United States Patent Application Publication US 2020/0157537 A1 - sequence listing, part 7

SEQ ID NO: 13347 - DNA, 1128 bp, Homo sapiens
cgattatttcagctttgtaggccccaaggagttgagacttcatcaggagggtactgggaagccactggaagcttggctccagctgcccagacacctccgcctgcaggctcccaggtacacactcaatgcatgcggaaggacagggcctttatcttcccccaacctgctttcctcctgttgttcttgcaggaaaggtaaagtggagcagacccctgccattctacatgcacatctgtggctgaagaggggctctcaccatcaactccaccgcagatgccatccaagaaggccaggaggtcacccccacccccaacctggaggaaggtagaatggaatcctgagggctgggctagtggctgacagcattcatctaggacagtcagaagaacccagaatgcagcgggagcaggactgggagggggagggtcaggctcccacgaaggctccctggaggaggcagtgcaagctgagcccttaaaggcattgggattctggtaagcagagagagggcaggagagcattccagtcgagaagaccggctgcagtaaaagcgtgagggtggaaacgctcgaggtgatgagtagactcgtacctgcggttgggaagtggggctgagggtgggctcccaggccaggacttggttgccggggcatgtcgtaccgggagggttggccccgagtcaggaaaggccttggcgggagcagagaaggcagtggaccattttaagtggccaagatctggcccggaagaaaccagcctttttatttttttaagggaaggttgaggtgggagtggggaagctagttctaagaacccctagtttggaacttctgcagggaagggtctcttggcccgtgggcaggaatgaagttcaggcccactgattacatccatccttcccgctccctgcctccccgctccccacacaccccagattcctctccagccacagtttacttttccggcggatctgggggtgggtggtaggttgggggcggaggggggaacttttagattggaataaaataaactccctctagaggggtgggggtggagagcgtacaggagacgtcggctctgccactgtctagcccgtggccttgcggagttacgaggtgctcccggcct

SEQ ID NO: 13348 - DNA, 1549 bp, Homo sapiens
ctatgattccagtgtgcagacaaggttgaaaatccctatttataatgctccctgttacaattgcttttcaactaagagatgtctgtacttttggtacctagatgatgtaagagccaggaaggtgcttgctgtttgggtttgaccaagtgtcactttttaataatctgccactcttggcagggagctcactcagtgggtttgatgtggtggatgctggctcgggaagttctgcgcatgcgtggcaccatttcccgtgaacacccatgggaggtcatgcctgatctgtacttctacagagatcctgaagaggtaagcttctccaaaggcttgtggttacataagcaaattggacgacttggactgtgcttctaggaagcaaaacttgtcagtccctgtaagtctttcctcttttttttttgtaacccagattgaaaaagaagagcaggctgctgctgagaaggcagtgaccaaggaggaatttcagggtgaatggactgctcccgctcctgagttcactgctactcagcctgaggttgcagactggtctgaaggtgtacaggtgccctctgtgcctattcagcaattccctactggtatgtatcaggatagaggtgaatcaagctgatattttgcaacttctcagttttattctaactttaatgatctctgtgacttttatactagctttaagaggttttcattccagtgtgctacagcatctgatagactgctgttgggagtggggtaaggaaaaatactacattgaggacagagctgatggctttttttggtattctcttaacagaagactggagcgctcagcctgccacggaagactggtctgcagctcccactgctcaggccactgaatgggtaggagcaaccactgactggtcttaagctgttcttgcataggctcttaagcagcatggaaaaatggttgatggaaaataaacatcagtttctaaaagttgtcttcatttagtttgctttttactccagatcagaatacctgggattgcatatcaaagcataataataaatacatgtctcgacatgagttgtacttctaaagcccactgtagatagtgtatattgcttttcacttcagaatttccctgagcttccttcctgtgtggagaacatgtgtgctgtgaaaatagatgtaagtggttacacatacttagttggtaacctcaggaatacttttccgaggccctgatgatcttgcttttattaccatttgcgtaggtaagttctatagagcttaggtttttatttttgagagtcttcctgtcacttaggttaactattcctggaagccctggagaggcgatggtccttccccacattgagagacattaattgcccctcttgtcagcttgcctacaggttctgggagaggagaggtatgtatgtatttaaaaatgtgatgttctccatatttgtctttgccggggagggggttggggagacagtctttccctgttgcccaggctggagtacagtggcgtgatctcagttcactgcaacctctgcctcctgggtt

SEQ ID NO: 13349 - DNA, 1227 bp, Homo sapiens
catttgttgaagaatcaatctatacaccattaagaaacagcctctgggccgggcatggtggctcacgcctgtaatcccagcactttgggaggccgaggtgggtggatcacgaggtcaggagttcaagaccagcttggccaagatggtgaaaccccatctctactaaaaatacgaaaattagccaggcgtggtggcagttgcctgtaatccccgctactcgggaggctgaggcagagaattgcttgaacccgggaggcagaggttgcagtgagccgagatcgtgccactgcactccagcctaggcaacagagtgagactctgtctcaaaaaaaagagaaacagcctctgcatcaatttgtagaaagactactcttcccactacctgcagccttttgtaacccagtgagatacatgtttattcaaacacaagatatctcaaatcctaacagtttaaagtttataccatgaaaaccagtttttgagacaaggcccatggattttcccaccccagctgcagcattttgctcccctttggctaggcagttatttaggattgaaggagtaaaaagtgttttctttgggccagatttcatcactgccacaaaggaaaatgaaaaattagactggaatttactgaaaccagatatttacgcaacaaccacggacttctttgcatctggtttacccctagttactgaggaaacatcttcaaggagaagcaggatgtgaagatgatgaagttgtggcattgattaaggaagtgttagatactagaatgtggccaactgtgcaagaagatggaggagacgtaatctacaaaggttttgaagatggtatcgtatgactgaaactccagggttcttgtaccagctgccctagttcaatcattactctgaaaaatggaattcagaacatgctgcagtttatattccagaggtagaaggtgtagaacagggtatggatgatgaatcagatgaaaaggaagcaaactcaccttaaaataatctggatattctttgggtacaatagtcggacttatcgataatatataccaagctgttattattaatatgctgaagaacttgaagattaataaaatatgccatttcttcagagtccaaaaaaaagatcgaatgaagaacttatggaaatgtctggcacactatagccaatcattttccactgactgattttatttgaccatctggtttttatatcattaattca

SEQ ID NO: 13350 - DNA, 1240 bp, Homo sapiens
ttgctgagcgggggccaatgagttgaaagccggagcaaggggacttgttttgttcctgcaccccgattttacttacattacccggggcctcgagggtgactcatagagattagccctgagcgtcgacccctcggcgccgccactgcacagcgagagaaggggagtcaagagagacgcttgagtcccttgactgtcctcccctacgagctctctgggaagagagccccagacctgcgaactctgggccgctctgcggccgcttgaacacttcgcgggtcttccgccccgcgctagaggacgcactccgtgacgggaattgcggtctcggccgcccccggcctcaggctttccgggctctgctgcctccagaaaactacaagtcccaggatgctcggcgcgggacggtcacgtgggaggggccgcgggcgcggctaaatagtctccatcggccattttgtgcgagaagccgcagcgccgcctcttctctcgcgccctcgcctcttcctccgcctcctccttcgcctcttcctgcctcctcccggcttccgccgccgccactccagcctaatcccaaccccagggcgaagcgttttcttatttatttccgttttctcgccactacagcctcctgacaaggtgatccgggcgggccccgcaggaattttatcccctcaccggcctcacactagtatcgcatgtccactatccagaacctccaatctttcggtaagatcccgtcgccgccgcctccctcccttgcccggcgcgcatctcggccttttgcccgcctggccaccgcccctaggggccccctttctgcccttcccgcacccctagtggggctttgtctcggcgcccagaaaatggcgacggggcccctggcgaccccttccccgaggacagcgccggactccgagccctcctctcggagccccggccgcgggccctgcgccaccccctgccccgtccttgacccggctctcgcctccgcttctgccccttgaaaccttggcgatcctatttcgtggactcctagatcggccctgctacttgcaaagggtatgccgggccagggaaaccagggatcggcgcccgttctctggcagctcctgggggcacttagggaaagatgcggatgcaagcctctgatctgtcactggccagtggttcagtcttctctgcttgcgtagcaatttgttaaattacgcctcttgatatatatgtaatctacttttttttt

SEQ ID NO: 13351 - DNA, 1199 bp, Homo sapiens
agaagtatgtccgacaagcctggcagaaggcagacatcaatacaaaatgggcagccacacgatgggccaagaagattgaagccagagaaagggtaataacttagggtcatttgaattctggtcctttctttttttggagggttcaagatagtgtgagagggataatttttatttgttgttttttttttaacagaaagccaagatgacagattttgatcgttttaaagttatgaaggcaaagaaaatggtaagatttaagatctgtatttttgtgtaacttagctttaaataataagggagcagtagccaaatcccatttcaggctgccagcttcttggaagctttctgtaaaaaaggagaatttatcttcatttgtatttcatgatgtccctatggaattgttacctttcttcagatgtagttgtagggaaacagactacttaatgccctttctaaaaccagcataaattggattttattgtatgtatacacaataagtgctttcttacattgataattttcagaggaacagaataatcaagaatgaagttaagaagcttcaaaaggcagctctcctgaaagcttctcccaaaaaagcacctggtactaagggtactgctgctgctgctgctgctgctgctgctgctaaagttccagcaaaaaagatcaccgccgcgagtaaaaaggctccagcccagaaggttcctgcccagaaagccacaggccagaaagcagcgcctgctccaaaagctcagaagggtcaaaaagctccagcccagaaagcacctgctccaaaggcatctggcaagaaagcataagtggcaatcataaaaagtaataaaggttctttttgacctgttgacaaatgtatttaagcctttggatttaaagcctgttgaggctggagttaggaggcagattgatagtaggattataataaacattaaataatcagttcctttttttttttttttttttttgagatggagtctcgttctgttgctcaggccggactgcagtggcgctatctcggctcactgtaagttccacctcccgggttcatgccattctcctgcctcagcctcctgagcagctgggactacaggtgcccgccaccgcgcctggctaattttttgtatttttagtagagacggggtttcaccgtgttagccaggatggtctcgctctcctgacctcgt

SEQ ID NO: 13352 - DNA, 1743 bp, Homo sapiens
taaatttaaatcctaatgacttttgattaactttttttagggtatttgaagtataccatacaactgttttgaaaatccagcgtggacaatggctactcaaggtttgtgtcattaaatctttagttactgaattggggctctgcttcgttgccattaagccagtctggctgagatccccctgctttcctctctccctgcttacttgtcaggctaccttttgctccattttctgctcactcctcctaatggcttggtgaaatagcaaacaagccaccagcaggaatctagtctggatgactgcttctggagcctggatgcagtaccattcttccactgattcagtgagtaactgttaggtggttccctaagggattaggtatttcatcactgagctaaccctggctatcattctgcttttcttggctgtctttcagatttgactttatttctaaaaatatttcaatgggtcatatcacagattctttttttttaaattaaagtaacatttccaatctactaatgctaatactgtttcgtatttatagctgatttgatggagttggacatggccatggaaccagacagaaaagcggctgttagtcactggcagcaacagtcttacctggactctggaatccattctggtgccactaccacagctccttctctgagtggtaaaggcaatcctgaggaagaggatgtggatacctcccaagtcctgtatgagtgggaacagggattttctcagtccttcactcaagaacaagtagctggtaagagtattatttttcattgccttactgaaagtcagaatgcagttttgagaactaaaaagttagtgtataatagtttaaataaaatgttgtggtgaagaaaagagagtaatagcaatgtcacttttaccatttaggatagcaaatacttaggtaaatgctgaactgtggatagtgagtgttgaattaaccttttccagatattgatggacagtatgcaatgactcgagctcagagggtacgagctgctatgttccctgagacattagatgagggcatgcagatcccatctacacagtttgatgctgctcatcccactaatgtccagcgtttggctgaaccatcacagatgctgaaacatgcagttgtaaacttgattaactatcaagatgatgcagaacttgccacacgtgcaatccctgaactgacaaaactgctaaatgacgaggaccaggtaagcaatgacatagctagctttttagtctgctttgaagtaaatgctcaaggggagtagtttcagaatgtctacccaataccagtacttgaaaactaacgatgtttctgaattcctgtattacaggtggtggttaataaggctgcagttatggtccatcagctttctaaaaaggaagcttccagacacgctatcatgcgttctcctcagatggtgtctgctattgtacgtaccatgcagaatacaaatgatgtagaaacagctcgttgtaccgctgggaccttgcataacctttcccatcatcgtgagggcttactggccatctttaagtctggaggcattcctgccctggtgaaaatgcttgggtaagaaaacatgtcagaatgcttgaagctaaaaagtagaagagtatactcacaatatttctgatgaggcttttttcttcttcccagttcaccagtggattctgtgttgttttatgccattacaactctccacaaccttttattacatcaa

SEQ ID NO: 13353 - DNA, 1155 bp, Homo sapiens
taacatgttccaacttgagcccttaactttctccacctacccccttccacaaacctgttttcactgtcttctctgtcttagttaatgtcagctttgtctgtccagctgctcaggctaaaacttttctttcatataacacatcctatcagcagctcctgtttgtgggtaggcattttgcctttttttttttttttttttttaaactgctatatctctagcatgtagaacagtgcctggcagcacataataggtgcttaatataatatttgttgaaagaacaagtcagtgagtatttttaatgtgaggtgcaaagagaaaaaaaaatgtatctttgaggtgtggagttttgaagaacttccattttctaagcatttgtgtaatgttggagttacttgttccttttgtaatctgaaagtatgctttaaaaaaaattagtgtacttttgagaattttcattttgctttctattcttccttgctttgtgcatgtttatctagactgctgatcttggacttgatattggtgcccagggagaaccccttggatatcgccaggatggtatgtgtctcatatttctcgattaactccagatcaagctaaagttctaaaacttttatcagaagagccggtttgctcatctgggaaaccagtgttggcagaaaagtagtggcttcaattaaaagcagttcttaaattccagtcagcaacagtatctttaatggagcacagggaattcagagccacacaatgagtagcagtaggattacaccaccaacaaatacatgctactgctaggcctctgcagtgcaggatgttacaatttacctggctttttattctctttttggccagaggactcataatacctttgtctacaagctacccaaggaagataggaaaactcctgtttctaggctcagatctcgggtgggtttttacatagttgcattatcatcagggttttcttgaaaagctaatttaaatctgggtaatgaacatggaggatggcatagaccactaacaattataactgtcttacatttataaccgcatctgcttctacctaattatgaaaccactaaagcgcagattcttactgtgagaaataacatgtcaaccctaagataaaatatgttgaggtttcatggaaatagt

SEQ ID NO: 13354 - DNA, 1659 bp, Homo sapiens
tgccttccttcttgcctattttgttgacaccctgactcttctagatcctagctatcgttcttttcactctggtggatatggccaggatgccttgggtatggaccccatgatggaacatgagatgggtggccaccaccctggtgctgactatccagttgatgggctgccagatctggggcatgcccaggacctcatggatgggctgcctccaggtgacagcaatcagctggcctggtttgatactgacctgtaaatcatcctttaggtaagaagttttaaaaagccagtttgggtaaaatacttttactctgcctacagaacttcagaaagacttggttggtagggtgggagtggtttaggctatttgtaaatctgccacaaaaacaggtatatactttgaaaggagatgtcttggaacattggaatgttctcagatttctggttgttatgtgatcatgtgtggaagttattaactttaatgttttttgccacagcttttgcaacttaatactcaaatgagtaacatttgctgttttaaacattaatagcagcctttctctctttatacagctgtattgtctgaacttgcattgtgattggcctgtagagttgctgagagggctcgaggggtgggctggtatctcagaaagtgcctgacacactaaccaagctgagtttcctatgggaacaattgaagtaaactttttgttctggtcctttttggtcgaggagtaacaatacaaatggattttgggagtgactcaagaagtgaagaatgcacaagaatggatcacaagatggaatttatcaaaccctagccttgcttgttaaatttttttttttttttttttaagaatatctgtaatggtactgactttgcttgctttgaagtagctctttttttttttttttttttttttttgcagtaactgttttttaagtctctcgtagtgttaagttatagtgaatactgctacagcaatttctaatttttaagaattgagtaatggtgtagaacactaattcataatcactctaattaattgtaatctgaataaagtgtaacaattgtgtagcctttttgtataaaatagacaaatagaaaatggtccaattagtttcctttttaatatgcttaaaataagcaggtggatctatttcatgtttttgatcaaaaactatttgggatatgtatgggtagggtaaatcagtaagaggtgttatttggaaccttgttttggacagtttaccagttgccttttatcccaaagttgttgtaacctgctgtgatacgatgcttcaagagaaaatgcggttataaaaaatggttcagaattaaacttttaattcattcgattgtgtcactctttctttttttcttgtcattaataaatggtttgtgagggtggtaagtaagtttatccaactcaactttatcctgaactttatcctgagatagatagatacatagtgaagtaatttgttgtagcgatagagagggccctacttctctagatgcaatttgccaagtttctttagcatttggccctggattacgctggacccctaaaaaagtgtttcagccttgcacattgtgattagttctgggctttggtgggagaaagccaagcagactatccatctatctatctctacccc

SEQ ID NO: 13355 - DNA, 1202 bp, Homo sapiens
tctgttatttttttttgagatggagtttcgctctcgttgcccaggttggagtgcagtggtgcgatcttggctcactgcaacctccgcctcctgagttcaagccattcttgtgccttagcctcctgagtagctgggattataggcgccagctatcatgcccagctgattttttgtatttttagtagagacggggtttcatcatgttggccaggctggtctcaaactcccgacctcaggtgatccacctgccttggcctcccaaagtgctgggattacaggcatgagccaccacccccggccacagcctctgttcttacaaactagtggatacaggtgccggaacaccaggccgtgggccacgtgtttacatgctgctccccagtagagttgctgagtggtttatgtttattccggaaatacatggttcactctgattttacaggtcttccgcaggtaagaatcacctttgattagagtcaggggattcctggcagaatggggagctggagacccacttagatcagtgattgctaagtgtgagctgtgtggcttccctgggccaggcactgagttatgacagtaaatgagacagtccaggtctgggggcagaccaaagagacccaatgtagtaatagatgtaggatatgataccaggtagtgactaggggagagaatgaggtggcagcagaggtgtctttagggaggttataggtgagcagagattgaatggggattgagccatgggaacatatggaggaaaagcttcccaggcagagcaaacagcaagtgcagaggccttggtgagaaggccagtgtggctgcagtgcaggggaccctggggatagtggacgtggatgaagccaggagatagtcaggggacggctgcatcccactggcctgctggctgttgtaaggagtgggtattttaatctgcatatgattgggaactactggaggattctgagtatggaggaagctgcaggggagtgacaagaattgattgatttttagatgatttatttatgagacggtatgttagtctattctcacatggctataaataaatacctaggattgggtaatttacaaagaaaaggtttgattggctcatggttctacagcctgcacaggaagcatggtgctggcatctacttggcttctagggaggcctcaggaaacttacaatcatggtggaaggcaaa

SEQ ID NO: 13356 - DNA, 1200 bp, Homo sapiens
aatgcattccagcctaatgtgtgctaaagaggctgcctccctgtgtcagctcttggcttcattgtcagagcattttagaatttctatatttattcattcattcacttaacaaatagctactgtttccctgtgccgggccctggcaatacaatagcccagccctcaggtggagagacaggttatcaagtgactgcacaaatatcaaaagcagttgcaaataattgtttttagaagcatttttttctttcctgtaggaacaaagatttgttttcattacattgtcaggcttccctttccttgtgtgatgtctgtgtagctctcacacactatgtgggcagaggttatgcctgttttaacaggcatcaaatgctaacacagatggtgaattattaattcctttgttatttctagatgcttatgttttcctcatttgacactgagcaccattgactccttcaggaaacacaggtcttttgaatctctgttctccctctttccttttgtagaaagagcgggatttagaattggccgctcgcatcggccagtcgttgttgaagaagaacaagaccctaaccgagaggaacgagctgctggaggagcaggtggaacacatcagggaggaggtaagacattggaggccgaggcttccagaggggcccgccacaggcctgggagctggaggcatggctgaaggagatgagagaatggagtcctagttggaaggacgctcccgagggcacgaccgcggcctgagcccagaactgtctcttctgaaacgttcacctggggactaaaagccaccttcctgcagctcctgctgctgcttgtgtctcttttctttcctcaggccatgtggatgggatggctaagggcgggcatggtcctcactcagtcgtacatctgtgtgccatgttgggccagccacagtccttgtcctcagagagtctagactctaacgatgcaggctgatcaagatgctccatgcttggcagaagggcacccaggctaacaccacaacgagcaggggttcctgagtcaggctgggcgtgggcagctggagaaggagccctgttaggaggccagctcgtgtacacagaggaaagtggtgactcacattcatcgttgtagtataattttgtgtgtgtaaaacaaaacaagacaaaaatagcctgttgttttcatgatagaaaccctcttatt

SEQ ID NO: 13357 - DNA, 1776 bp, Homo sapiens
tgtgtccacctgtagctagctgaaggatgtgtgcttgcatgtggtgtgttttaagaacaaaacatctgcacgacagctacgggcagttcatcaacacaggagatcttgaataataatcaaggattaattaagtttaaagcgtatcacattttgtaccagtgtcagaatctgggggaggaagaacaattaaaaaagaattaggggtttttattggtaaatccaaattcattcctaaatcaaatgatgaaaatatttgtcgttgttaatactctaacccatttaatatgtgcctgtctcttcaaaacactaggaagccctccactcaggttgagagaaagaataagaatttaaatagggaattaaagccttaaatccaagaaactctatcctttgagctcccaaatgagcagcatgggatgaacacataataccatcttctgcaaagaactttctgtttagataaagaagggggctttggtgcgtggcatgggcttggtgacttcacagtgagccctcacccaacccccctatttcctgccaagaaggatgttttatgtttctctctctctctcttttttttttttttttttttagaacttgctctcttcctgcacccagggctttaggaatcagcccgttgcttctctgtagcaagcatgaggagcctctgatgatcccagtcttgggtgactcactgtctctctgttgtgtctcaaggaagggaggtgcagcagcatcctggcagtcagtggtgacatgcggagagcccacgggtccaggcgtcctggtggtattttggaagggccaaatctctggctttagcactttggaaacttgttgatcttccttggtcttctacggctattcattgcttctggggaatggtgacttgtgaatttttagcagccttttcctatccccaaaacccatttgtataagatgggtttgcttctgctgatgcaactacgtctctaaaatgtccatcttacactccctattgcaattgaagatccaatatgtaagagggtggaggaggaagtgaacatttgtgaccttttgatttgatattctggccatatgtttaaatgggggtatgcttctgattttaaatccagccttcccttgtttgatttcttttaaatgttatctctctttcaactgtgttgtcttatttctatttactgctttccccctctcctccttcccaaataacccctcatgcctgttatttgggatgctcttcccaggctttttgttatttttgtttctagaccttattgcgggaagagaatcgtgattgtttggttgccttctcttcatagcttactccatttttgttttgcttgtggcagtttcttacttattggagttcctgagccattatgttcactgattgagaaagattcataaaggctatttttatgtgttttttttttccttccctcctgctttgcctggagctccccatggctgagagttttctcctgtggccgtggtgctggctgtcacgtcaggtgccatgggagcctgctttgacacacagacccgagtcagaccttaaaaatcagggcaaaccatcttgccttgttcctctagtcaccatcacttttgtactctggatttgtcctgcctacctttaatctgtgtctccagcatttatttttttgtttgtgtcatcgggttcctggttttcttttaagacatagtcaactgtgtggacctgtaggtttggggcagcaaccaattccattgttttcctttttgtcaaatccaaga

SEQ ID NO: 13358 - DNA, 1260 bp, Homo sapiens
gggttggaggtttatagcctcttgtgtgatccttgataccagcaaactggttccaaatcccaggagttatcctcactccaccatggactcactgttgttgtagcacttttgttttcccagtagttaaatgctacctgtgcagctgacatcactggactagatctgggaatagatgaaataatgttgaaaacaaaactttagaggtgccttctggtatcagatgctgcaaggccttgagcatcagagtgtgttaagtcccatctactgtatcaaggccagagtgtggctccatgctcttaggaagggtttcccaaccacggggccagagcccaaaaggtttccccttccctaatatgctaatgaacgaaacatgtaaatctgttttcccctgttaggctagtcttactgtgatgagaagtgtacctggctttccttttcctgggtggagacagctggggcatattcgggtggcattccctctcagtaccagaggccccactgcctgcagctggaggcatgtgaccataagctcctgcttttgctttttgggcttgcatccctcttttctgtgaactctggagaatgctggaattaaaacatttaagcattttgattaaatgagcttgagctcctctgttcttttctaggtgctcttgttctccaactctcctgcctctttctacctctgccctatacattccagctctggagacagagtctgaaactggagtctctggagggatgagaaaaccatctttaattgtaacaaatggggtgggtagacgagcttcagagtgggagcagattgcattgaggttcaactctcccacccatgcctgggagtcaagtcttggagaggagtaacacttggtggtcagcacagctcagagtcagagacaatagccagcaggccagcaaggctggctgtgtgaggcacaggaagcagggcataggtagggagcagagctgggggttctctctctgctggaagatagcagctgccccttggcatatgggggttgcacactgcaccttgtagccagggctgctatttgctgttctgtgaaggagttggccactcattgtgacatgcaggacagtggccttctgagaacctgctgcttgcttgcatagtgcagcacaagtgaggacaggcaggggtgggagcatttatggtgatcagatgtgcctggcaagcccctgttcagacattgctcacattccaaatgttttcgtgtagaatattgcacaggtctgggg

SEQ ID NO: 13359 - DNA, 1224 bp, Homo sapiens
atgtgactgaaggagtcaatctgtgctcatggatgggcttctcagcaatataattctttttattttttatttttctcttcagttttccaaaatgggtcggatagtaagcagtacaatatcatgtgtccctgtaaggaaggttcccaagtaccaagcgaaatctgaatgttaccagactctttaccctaaaatggttaagaaccattgttttaaaggcagaaaactgaggcccagtttgcataatcgtttccttttatgaagcagatttcaagttctcattccattctagttgcttcatacaacaaacagtttggttttattttcaggtctgtggacatgtcattgattacagttaattgtcttgattactgtttatagcttaattatcaaaccagttgtttcttgaatttgtattatgacagggtgcatgtagtctttggactggttatttctggttttgaagtaatcgaacaaattgaaaatctgaagaccgatgctgcaagcagaccatatgcagatgtgcgagttattgactgtggagtacttgccacaaaatcaataaaagatggtaagaacttttttgacagtagatgaagctaagatgcaggtaaagcattgctgaagactgtaactagatttgattagtggaactagtggtatagcaatagcccttggtgcccctgaatcataccctacatgtttaatcttttagcatatcttgtcagatcttactttttcttatttccttgccaccagccttatccacaccaccagtattttgtgtctggattattgccgtagcgtcgtaactgtttaccttgcctccgttctataatcttttgtcagcagcaatagcctcctaactggtctcattgcttatatcctaggcccgctgtggtctgtccttaacagcaaccagagtgatccctttgaaccatagtttgcattcatgtcacgcctgcacagaaccctccaaggactcccatcttcaatcatccaaagcagaagtctttatggtggtctctaaggccctggctggtctggctctctgctgtctctctaaactcttttcccttattcattgccttccaggcacattgaccttttttcagacatgccaaccactcagggattttgtgctgcctattctctttgtctggaacaccctttgttaagatatctgcatgacactgtcccttgctcttaagtctctgttcaaatgtt

SEQ ID NO: 13360 - DNA, 1186 bp, Homo sapiens
accctaccacaggccttgtctggtgtatttgggaagtggaaaagagccctcagttggagggagctgacaacccttggtggagggagggtgcccttgaatgtattaaaactatcacccaaagaaggtatgaaaacagggtaaggtggtcagttgtttgccaggtcaatagacagaaagtacattagaaaacaggacttaggccaaacaaacaatactggatactgaatacaaaacagtatgatttatattaaaggtttccaaaggttgcctgcaaaggagaatattactactagtcagcaggaaaaaaatgcattcagaacccaagcagaaactgccaaatgtaattaggttaagaaaagttacccttgggcagtgtattagttttctattgctgtgtgacaaattaccccaaatttagcagtttaaaaaacaatacccatagcagttctgtagctcatgagtctggcacagtgtggctggattctctgctcagggtcttaaaggctgaaataagggttggcaggacaacattccttcatggaggctctggggaagaatctgcttctaagttcattcaggttgttggcggaattcagttctttgctggctctcagctggaggcccctctctcacctcaaggctgcctgcattccttcttatgtggtcccctccagcttcaaaccagccttcctgctctttctcatgcttcatatctctctcccgtcctcctgttttaggggcatatgattagctcaagcccacagatatattttaaggttgattgtgcgatagaacataattgcaggagtactgtctcatctcatcatattcacgggttctggagattagctcattgaaagtgggaggggcattttcaaattctgcctaccacaggcaataactgcccatctcagctgtaggtggaatttttacccagaaaagataggccctagaagcctcatttcttttctccatggaaaaggacagccctctgctgcagcgttcaacttgtgtgtttactgacagagtgaactacagaaatagcttttcttcctaaaggggattgttctacattttgaagttattttttaataaaattgaattatgttgtgtattgtgcttcttaataggaaatgcattattggactgtttttgtaacatcctgtttattgcaaatagctagtat

SEQ ID NO: 13361 - DNA, 1195 bp, Homo sapiens
tttgcaaaaacttgatatggtatttaaattcagcctttgtaatataaagtctaaatgtaaaaataggttttattaatgaccctgactcattttttatctcaatttattttcttcaagtttctcttaaaatgaaaaaaacaaaaaatgaagtgattttaaagtttgtgaagaaaagtcgcagaaacttaattttgtttctcttcttattttgtagatatccatgacgacattgaaaatgaattttttgtattcaccagatattcttatatgagaagatctattttaaacagtctaaatattttttcttctgttggaccagcatggcaggatttaagcgagggtatgatggaaagattgctggattatatgatctggataaaaccttgggtcgaggccattttgccgtggttaaacttgccaggcatgtctttacgggtgaaaaggtggcagtaaaagttattgacaagacaaaactggacactctagctactggtcatcttttccaggaagtgagatgcatgaaactagtgcagcatcctaacatcgtccgcctttatgaagttattgacacccagaccaaactatatcttattctagaacttggggatggaggagatatgtttgattatataatgaaacatgaggagggtcttaatgaagacttggccaagaagtattttgctcagatagttcatgctatatcttattgccataaactccatgtggttcacagagacttaaaaccagagaatgtagtcttctttgaaaaacaaggtcttgtaaagttgacagactttgggttcagcaacaaatttcaaccagggaagaagctcactacaagctgtggatctcttgcatattccgctccagaaattctgcttggtgatgagtatgatgcacctgcagtaggtaggtaacctcggtccagtatttggccatttgaattctgccagctagagttggtcagatcggttgtttatctaaaaatgatttctagagaatttctgttaaattggccttaactagcaaattgggtttcataaatgccatatatgcctaaagctggcatttcgtttatttcaacctttagatggcaaatgtctaaagtatatttgtgagtacaaaggaaaatgagtaagttatcatttaaagtaatctcttttctgttcattgtcatttttttcttaaggtctga

SEQ ID NO: 13362 - DNA, 1199 bp, Homo sapiens
caaggctactcctaattgttgggagataattctgcatgggtcttttgtgtgtctgcccatcttctgagtaaaggcactgacatcctttgtttcaaattattaaatatcttttggaagatgtttgtgtagcagacggtcttgaagatagtggcagattttttttttttttttttttgctgtccatgataagaaagataatgtttccctcaggttgagcaggtttgctaacagtcccttgaaaagaccagggttaaaagtctgagtttttttttttttagctacgatgcaaatttattgattgtgtagaatccacccaggctcttccacatgttcccatgggacttgaggagtaaggagaactgacacaaatatgaagcccatgctgactgctacacaacgagtaataatgtcctttgtctctgacccaggagtcttgtgtcttctgtcaacaaccatgaaactgtgacaggctaacttattattagctcatacatgtggtaaaatttcaacccctttgtagttcttgacactcatgattcagaatctgatagttaaaatatctatattcatcaaaatctaaatttagaatgaacagttctcctcaggtgagtaatttcatagaggaattctattacttcaatggctttattctaggaatgtattacatacacagaagacacagaaaagacccattagccatttagcctcttccctgctaagacaaggaactgaaatggcactgtgagccaaatagtgtctttgattatttggcagatgtcaaatggtcattatgttgtaggtttccagtaaaaacacagtggaaataaaacaacattttccccaagatattcaaaatatgtatgtggtatttcatctactctaacttgtattcaacactacagggaggatggaaacagtttatatattatattgatgcaaaagttattgtggtttttaccattactctcaatggcaaaaaccgcaataacttttgcaccaacctaatatttctttccggggggacgagataggtcttttaatacgtgaaaataaatttacgttttttatttcaaaatagaaaacatcaaaaatgtcttcagcaaaaatgtaaagttctttttctcttcattttatttctacttgatatgttgaggcattttaaacgtgatgcgaaatacctgactataattgatttgatc

SEQ ID NO: 13363 - DNA, 1226 bp, Homo sapiens
tggctttcctttctcctacacaaaattgaaatatacaagtctctaaatataatacctttaaataaaaggttatttgtccctctgatgtactgaaaaactgtaatttttcagctgaaaattttttaatctaactttgctagttatttttatattgcaatctatattaccaatttaggaagtgatttctgagtctcttacactgtaaaggtgcactttattttctttgtcttccccatcatgtatttattgtgtcttgataactgatattaatctaaattcaatgtgtttttatgtaaaaatttgtcagttgtttagaatatttcactttgtttttgaaacggagtgacaaggcagatttttggttagaggacgggagttgatcactatcattactttttctagtttacctgttttttatatttaaggctgctaagccatgttcagcattttaaatgtggtctatcctgacatacagtgtataacaacataactccttggaacctcctatgtgtggtataattctactcttccaaggaacatgacttcaatactttcagtgattcaggtactgaaaagccttacctaaaaggctgttctttgtttccccctttcatactattcttttccatgacccaggatgcagcaaatgaaacagatttcttctcttaaggggatattaagactgttacttcctagtaagccaagtaataccatatttttattaacatctaacttttgtagatgggtgctaaaattgcatacattttaaccactaaaatagaaaaacaagtggtgctattatgtctcatggcaccagaaatgagctagcacttgggtttgttgttgctgttgtttattaagagtattgtgttaattaaatcattacatacttgaagttatattacaaaaattctagaaggttgattgaactatttttttaggaactaccatcaagtgtagcattttcttgcagttttaaaatgaggaaaacttctttgaaactgtgaaatgctccatgtggtaactggctgctgagaaaacccttcaccaaaaaaataaataaaaattgaataggattgtcatcaagaaggcatctttcgctaacgttgcttgtctaggagaaaggtagctatgtaaataaaaacagtgaactagagcaaatagtggtttaatggttttgttattgcatttttaaaatggttaattagggaatttgtagttgttag

SEQ ID NO: 13364 - DNA, 1171 bp, Homo sapiens
tgtcaagaatgtgggaaaacctttacacgtaaaagaacccttttagatcataagggaatacacagtggagagaagcgctataaatgtaatctatgtgggaaatcttatgatagaaactatcgccttgttaaccatcagaggatccactctacagagagacctttcaaatgtcagtggtgtgggaaagagttcattgggagacataccctttccagtcaccagaggaaacacaccagagcagcacaggctgaacgtagcccgcctgcacggtcttcctctcaggacacaaagttgagattacagaagctaaaaccaagtgaagagatgcccctcgaagactgcaaagaagcttgcagccagagctccaggctcactggactccaggacataagcattgggaaaaagtgccacaaatgcagcatatgtgggaaaacttttaacaagagttcacaactcattagccacaagagatttcatactcgagagaggcccttcaaatgcagcaagtgtggaaagaccttcaggtggtcttcgaacctggctcggcatatgaaaaaccatattagagattagcctgggacctgacagtgacagtgggggtgggttctcagtcccctgctagagaacccttaattataggcattgtggagtaactttgataaagggcccagccctttctgttttggaagctagtgacagaatcccaaggatttgaaagctcggggagtccccagcctgcctgctaggatgtgacgctggggaagtgcagcaccatgtcctttggagcccttctggagactccggcccctaggagtggcctctgcaccatagcctgcggctcccctattcaggtctccttccacaactctgaagagagagaccactgccctttgtggttggacagaatatctgtggcatcatgggctatggctgctggaaaggggccagtgggatcctagatttgtcttcaagtttggcctgtggccatgcctattctgttgactttaaaagcagcagcatcaagaactcctagccttcccaaatgccccctggggagttctggctggggcttcagccttcctggctggcttttggatatctgctagggggttagagtggtctcagcggcaggtggaggagagcaggatgctgggctcaagcgcttggcgtg

SEQ ID NO: 13365 - DNA, 1260 bp, Homo sapiens
aaaaaaggactcagggaccacagagttttcttgaagtagagtttaatttaaagcttattgatcatttgagcaaatctctggagggcagaacaagaaggagcaggcttcagttaacagaagcagccttgagttgccaggatagtggatggaataccaaagaaagagttcacaccagggaggaagcaatgccttctccctggagtctcccaaggggcagctttagaataagggaagaggatttgctggtcaccgtttgctgacatgggtctctatggtgagttcaggcctgaggacagggttgtctgcaaaaccacatggcccttgagaaatgtccttgcagattgggcttcaaactgcttggagcaccaggagagggacttcctggatttcagggatagagagaggagaatggaggcaataggaggagaatgcacttctatcaggcccatcccagtgctgagagagcactccagttgacaggtgccttcagggctggtgaacccatggcctgaagatatggcagcttctcaagggtcgtcagcaggtggcagcactgggctgcccatagtctgctgctccagggagagactctgtggcttcgaaatctatggatttgaattgagacaatggtggccctgatttttgaggccatgactcaggaaagggatgggattctgtggcctcggctggtgtttctaactgtaaaagaggtgaccctgtgatagcacaggacctggccttgtgggtctggctgcttatggttgtgttggcctttttgacctgctggctcttgaatctgccctcatataagtcatcaaatttaatcatccataatctgaaagctaagcacaaggtaggaaatgctgaaatctcaactaaggctccacagcatcagacaaggctacttggtgatgagaacaatcttctgagcattaatctctttcacttgtttggaacttaacttgacgataaatttcttgggtccagtttttattggggtgcattttatttgggattggatggtctcaccaggctgcaccgtcctggaaaattcaaagacatacggacatacaatcagccaaggatgttatgggaagagggagaagatgagttgggtgagaagccaggaaactgagccttagctcagcctctttgaaaagtcctggccattccagggcatggcacagtgtacctgcaccctgggtgctgctatcagttttctcagatgtaaagcaagacgggtgaaccagctggtttcca

SEQ ID NO: 13366 - DNA, 1049 bp, Homo sapiens
ttctgtcttctcttgggaaggctgggcccctggctcctggctttgagaagtaaggttgtgacagaaggaccgggcagggcttgccttggggacctgggttgggacactgacatcaggggagactagcctggaaagactgcagagctgccagctactccctggaaagggcttccccatgctgcctgccgaaattaggaggtagaggtggctgccacatctacctgcaagggccaggcatggttcaaagaggaccctgcattaagctctacacacacatgtgcaggacatgtccagcatggacagagccagagttaagacagtagcaccgaaaatgagcccccattccacagacactggagtcttcactgagcgagacagctgggagctgtcctgcctgtggctacatatctagccattcacagatgtggatatgggaaggacctctttggagctactggggactccctaaccactcgcatgagaacttaattgaatgttacctcttggagggagtctaataacacatgtaggtagaactgaccataaaccctgcctgtgtgtttgaaaaggccagttctcccaaattggtgcccatcttgtctctgaaaagatgggtgatggccagggtctgctgattgatgaatcagatgaatcaggaagatagacaaacacacacacacacacacacaccccaccaggatgagtctgccctctattcaccccatttgaagcctgtggtgtctgtgaccactgctgaaggtctgagcagcgttctggtgctcctaaaccccattccagtggttgctgaagcagcatcttctgcacaaagcccaacagaagggttcttatccccgtttggtataagaagtggattcaccacccactccctccacgtgcctttgttcctctctttggcccatttccccagcgtctactggcgtcaggattggcaggagcacaggcactcagcagagcatgcccctgcaagacctcagtgttagggccccccttccagctccaggcaaaagggcatgagtcctggccccaag

SEQ ID NO: 13367 - DNA, 1312 bp, Homo sapiens
gaagcagcccggaagggaaagagaaaagagtagaaccaagggacctccagatgggagcggcggccggtgagtagtctagagccaggggcattgtagcagcctggatacatgacctgaacacgtcttgacctttgctttctacgtgtgggtttcaacacccatgtggctttttcttgtattctttaaatatgtatctggcttaggatcacctcatagaagagaaagaattcacagtgaagcagaaacaagccactgaccagcgtactcccaacctgaaccttctttttctcaccctctccctcaagtaaacatcttgctgacttgagcagtgtgattgccgtagcaaagcagagtggcccccagggatcccgctctgttgggcccacaggaggagccgatgaagctgatccaaggagtgaggacaagcgctgcagagggacgttcgctaaaagccttctaggggccgcacatgctctaacacggacataaggatgccctgaatttctgcagctgaggccatatagtctggtgaccaagtatttgggtcctggcttcagtctttggttgaaatgtctgcttggctacttattaccgcacctactaccaaaatatgaccttgagcagtaacttctttaagcctcagttttttcatctgaaaacgggaatgataatctaaatcacaaagttaatggaaggattaaatgagggtgatgaataggaatgtatagcgtctggccctggtatggctttataaatgttagctgtgttggagctgtgcttttcaaaccattggtcacagccattcatggtttgcaaccagcatgtttttcaagaaaaatgtttaatgcattacatattgcaggataagtattgttttatgaagcttagggagttgtgtgtatatgtgttctggaatgcaacagaaaaatgtttcctcttgtgggttacaatatagaggtatgaaatctctgatgaggagagacagtgttatctggcccgctatgaagagacacatttgcataggctgctccctgaggctctggctttctacatctgatgatacagggagcagggaacagcctgttctcgttctgtggggctcagctgagtctgttctgcacagactcttccttcctcgggagccttagtcctaatacattcattttggagtgttggtgagtttgttcacagatcacagctcatgtgtcacccagactgacctgggccaaaaggcccatcacacaccctgcaagagcttctggtgtcgactatgacccccttaccaggcatcaaccatttttgttcgttctct

SEQ ID NO: 13368 - DNA, 2259 bp, Homo sapiens
actccattcacctgtcgctgcggacatccctccccagaaaccacagcaatgcagtgcttgactgaaagtatgattgttcttgttttcagggaatagaacaattgaaaaaggaagagagaagatgggctaaaaaaacaaaatggatgaacatgaaagccgtttttggccaccccttctctctaggctgggccagcccctttgccacgccagaccaagggaaggcagacccgtaccagtatgtggtctgaaggaccccgaccggcatggccactcagacacaagtccacaccacagcactaccgtcccatccgttctcatgaatgtttaaatcgaaaaagcaaaacaactactcttaaaactttttttatgtctcaagtaaaatggctgagcattgcagagaaaaaaaaaagtccccacattttattttttaaaaaccatcctttcgatttcttttggtgaccgaagctgctctcttttccttttaaaatcacttctctggcctctggtttctctctgctgtctgtctggcatgactaatgtagagggcgctgtctcgcgctgtgcccattctactaactgagtgagacatgacgctgtgcgtggatggaatagtctggacacctggtgggggatgcatgggaaagccaggagggccctgacctcccactgcccaggaggcagtggcgggctccccgatgggacataaaacctcaccgaagatggatgcttaccccttgaggcctgagaagggcaggatcagaagggaccttggcacagcgacctcatcccccaagtggacacggtttgcctgctaactcgcaaagcaattgcctgccttgtactttatgggcttggggtgtgtagaatgattttgcgggggagtggggagaaagatgaaagaggtcttatttgtattctgaatcagcaattatattccctgtgattatttggaagagtgtgtaggaaagacgtttttccagttcaaaatgccttatacaatcaagaggaaaaaaaattacacaatttcaggcaagctacgttttcctttgtttcatctgcttcctctctcaccaccccatctccctctcttccccagcaagatgtcaattaagcagtgtgaattctgactgcaataggcaccagtgcccaacacatacagccccaccatcatccccttctcattttataaacctcaaagtggattcactttctgatagttaacccccataaatgtgcacgtacctgtgtcttatctatattttaacctgggagactgttgtcctggcatggagatgaccatgatgctggggttacctcacagtccccaccctttcaaagttgacatatggccatcccattggccagaatccacagacacacctaagcctgtggcactgggacagaatagattttccatttgagaggcacttcctgtgtcagtcttgtttgaaggaggtggtgatggtggatagaggtgaaggaggtagggagtgccctccaagtgcaaaaataacaaatatgattattgaccatcggggaattctcacacattgatttgttttttaagcaattgccagaaacccccttttttagcttttgcttggggtgggggtaggagttaaggtttattcaatcctgtcctgggtagggcgaaagttaatctagccatgtgatttttcagaaaagtaagtggaacatgctgccacttttcaattctgtcagtgcttccacatggaaacaaaatgcaataaaatttttccaaaacctgttctgatttagctctctcttgaggtgttacccttagtgggaggccgactatccacaatctacttgagttttctctggttgggtgtttgtttcattgctctgtctcttgaatgaggatactttattttttttgttttaaaatgcatttatggtccctctcttgaaccagcttgccccaccaggcctctttcctttgctttctgcagcctgaatcaattcctttgtgctgatgggctctcctaagagctttcctgagtcagttaactttacctcgtgtctacggtgctattcatgcgatacgggcgaggctgagatgctaagattaaaaagaaaagaatgctgttttagatcaagttgatagcatttgttttccatatgcttttttaaaattttttcataacatacagctcagttaggtgtatgaaagaagtgttattgtattaaataactagagcagggctacagctctggccctcccctagggggaagaga

SEQ ID NO: 13369 - DNA, 1108 bp, Homo sapiens
ttggccataactattcatattggcatcatcttcaattgaagtatgtgcatggttggttctacagctatggagcttaattaccatttaaagtatcatcagcttttttcttccctggctgtctgagattagaccgccatcatgaacgacacggtagctatctgcactagaaagttcatgaccaaccgactacttagaggaaacaaatggtcattgatgtcattcaccccgggaaggcaacagtgcctaaggcagaaatttgggaaaaactagccaaaatgtacaataccacactggatgtcatctttgtatttggattcagaactcattttggtggtggcaagacaactggctttggcatgatttatgattccctggattatgcaaagaaaaatgaacccaaacatagacttgcaagacttggcctgtatgagaagaaaaatacctcaagaaagcaatgaaaggaacgcaagaacagaatgaagaaagtcagggggactgcaaaggccaatgttggtgccggcaaaaaagccaaaggagtaaaggtgctgcaatgatgttctctgtggctgttgtggatttttcacaagaagattaataaaccataaattttcatgtgaaaaaaaatcattgaacaattgctattattaaaaagtcaaaaataatagatgctggtgagattgcagagaaaagggaacacttatacactgctggtgggaatgtaaattagttcagccacagtgaaaagtactgatgttttctcagagaatttaaaatagaaccaccatttgacccagcaatcccactattgggtatatacccagaggaatataaatcattctactgtaaagacacatgcacacgtatgttcactgcagcactcttaacaatagcaaagccatagaatcaacctagatgtccatcaatggtgaactaaataaagaaaatatggtacatatacaccacagaatactatgcagccataataaagaatgaaatcatgtcctttgcagcaacatggatggaactggaggccattaccctaagtgaattaacacaggaacagaaaaccaaatccacgtgttctcacttataagtgggagctaagcat

SEQ ID NO: 13370 - DNA, 1183 bp, Homo sapiens
ttgcatttgcaggccctctcccatgtaagaaacctgaggatggtctcataaaatgagtactcacctaggtcaggcacagtggctcacgcctgtaatcccagcactttgggaggccaaaacgggtggatcacgaggtcaggcatttgagaccagcctggccaacatagtgaaaccccatctcaactaaaaatacaaaattagtcaggtgtggtggtgggcacctgtaatcccagctacttgggctgaggcaggagaatcacaggaacctaggaggtggaggttgcagtgagtcgagatcacgccactgcactctagcccgggcgacagtgcgacactccctgtcaaaaaaaaaaaagagtactcaccagattgtgccattttgtttcatgaattatacaggccctggttaactgggacccagtggatcaaacagtgcttgccaatgagcaggtggatgaacatggctgttcatggcgttctggagcaaaggtggaacagaagtacctcagacaatggtttattaagacaaccgcttatgcaaaggtgagtgtcagcctggaggctccccactaatgccttacatgctggcaggcaacaccaaaggcttctgggtatgagagagcctcactgttggggttgagctctaggaagggctgggagccatggatgtacagacaggaagcagctgagcctcatcactcacttagctggtgatgggctggtatcttcaactgtaagtcaagtatagcacctagaggtcattgtaggccattgtttgctgacgtttcaacttactgccacagaggtcaaaaatcatccataattatatcagtgataaagctttaaaaaagagagaggggggcctttaaaaaaagagagagaaaagtgtcttcaactgtgtagttctgatgagacctccagaaagatagaatgaaatctcagataagtaaatggacttttggtttattaactttggtgcatgtctttcccacccaactctagacttcacatgcttaaatttttcaatggaggtccagaagagattatctaaaagaattgaagagatggccggcctccatgagagaaggccaagtgaaaatgaactaagccaggcgctaaagcttgataaactggttcttgggccttagttttctcatcaatacaatgagcaggttggaccaag

SEQ ID NO: 13371 - DNA, 1149 bp, Homo sapiens
tatttttaatgcaaaatattcaatccttgcctcagagattctgattcagttgatctcaaggccaggaatcttttttcacaagcaacccagaggattctaaagatagtatatgaatcataaagccctgacatctagggatatagttggaataattatgttagaggaaaccctcatctggctttgggaaacatgattgatttgcacagcaacctttttaatactcttaactttactttttcacatctttggggtgagatgatctctaatcttcagccattttttggatggagggctgtcttgcctcagccatttagacttctttttggtctaggataatcacatatgcctgaccacacattcctgtctgaccttttaatttacagtttttaataatgtcactgaaatgagacccatgttataagagttaagtccttagtaaatctgacctactttggtatgagagtgtttatacaaatatgttttagttattttctagtggactctgctggccaggtggtggcaaaccaggaaggcgtgttccgaagcaattgcatggattgtctagatagaaccaatgtgatccagagtttgttagctcgtcgttcacttcaggcccaacttcaggtgcgaatgctttttttttttttaattgaaaaacaacacagcaaaaaattaaacatctttaaaacccagtaacaaaaaatattcacattgcccacaccctaacccagctctttttatttttgtgtcttgcccatggatgtcacattttccataactagggtcagtctgtgtatgcacagttttcacttttgccattttcccttagcatttatgtaatcacagtttctggtggttgtattgttgtgccgtaatttactaagccattcagattgctacatttttggtttataaataacaccgtagagaatatatctgtatatgttattattaacttgaattatttccttcatgttaattcctagaagtggaattactgggttaaagagaataaatatattattttccaagagcgtcataccagtttacactgacaccaataatgaatcagtaaatccatttcattgaactcttcccagcatttgatattttaattttttttttgtttttccttgagaaagtgtctgg

SEQ ID NO: 13372 - DNA, 2602 bp, Homo sapiens
gattcctggggcccaacagttgatgctttatcaagccctgcagaagattctggtactagccagggtttgagaaccactggtttaaaccttaattaagaggttcttatatttttcctgtgaatgtgctagtaaactttaatgttgccaaaatgtgctaaacagctgaaaactgggtctgatatcaacaaacgacttatttagctttttgtttcttaatatcaacaggtgacacttggacagaaacactggcctatgtgctcttctggggagttgcaagcattggaacattttttatcattctttacaatggcaaagattttgtcgatgctcccagactggtccagaaagaaaagatagactgaatttgtatttgtggaaagcggcttggcttggaagattccattgtgcagaactggagtctttactgacccgctttccacatcagcccaaggtctttttaatgcctttatccaaaagcacatcttgtgctccatgcaggatgatgacagaattgatctgatgttactgccttgatggtctctttactattgggacagttagatttataatttgaagctattctgtaattaaaatataacctgaattcagcttgcagaatggaagctgaatctgttcattgtattctattgattgtcaatttaattagctgttgcagaataagtaatatattttaaaaacctagctcctttcattatttaaaacagcaaaattatttttgtagctcagtttcattattgtcattgtagaagcggtcactattagcaggcatacttttccacacatctttggacttttcttaaaagttcagtaataagctaactgtgtttataaaatgtaagtctcttacagacatcaagtagtttgatgagacagtctgtgacttcatgataggaaagaggaggatgaggtctggggttctttaaagtctctggtgggctgcctcatgactttaatcagcttgaactgccagtgcaccagcagtttaggtgtgatgagagaattcagatatactttatctttttaaaaaagtgtaaataaaatcaaagaatgtaaagtctatctcttacgctagaggtccaaagctgcctctgttttaaagattatcccaatgtggaagatgcccatgactggtcagctacttcctcctatacattttggtttctttgagggtcactcattgagacacgcaggcctctgagagggtcttgttctagatttcatattgcacttggagggtaacagctgctttttcacgcatggtactcttgatgtttttcactctgtcaaggattttgttggctatcaatgaatgtgtctaaaacttagtgcttccaggtagttatagtactccaaatcaaggaccaacttaaacgttaatttttgtgcaaaaacaaacctgaaaaatatgcttcggaaactgtgcatagttctaattgtaagtcagattgtatattcaaattgtaattaagagatttaaatattagaacggtatgtaaggtagtataattaccactattttaaataattcagttaaacactgctgcaatatttcagtgttgtgcttgaaaatatgtacagtttttttccaatattaataccttatgttgtccttaaatatttctaaaagcgcctttatttcagcattacctttttttcatcactatcttttataaaacattaatataagtcgttacttttagaaactaaaggaaataatagctggaaaaccctctgtagtttaaaatcagtcattaaactcacaatagggtaagtaaatatagccacctgttaacatgtaaataagcataatttgttccaaagatggaatattgaaacttagttcatgtctgctgtaaaatattatttaaatgctgctgggcatttcacttaaagaacttaatgtcaacagctacaacaaagaccaaatctgaactgctaatgtggctgctttgtagggaatggactaatatcagtgtgttagatcttaaggtatcagtatttcagaatcctgcgacgattttatttctaaattcatgtactgtatgtccataagtgaaaataaaatgtcatattcttttctattattggtatcattcatgtactttgaaagtgatgtttttctttttgatcttagaatgctaaaaatcatgcaaaatgatagacggtttggctctgtgtccccacccacccaaatctcatctcaaattgtaatccctacgtgttgagggaggtacctggtgggaggtggttggatcatgggggatggtttcccccatgctgttttcatgagtttgcacgaggtctgatggtttaaaagtgtttggcatttacccccttgctcgctcactttcctgccaccgtgttaagatgtgctttgctttcccttcaccttctgccatgatgaagttttgtgaggcctccccagccatgcggaactgtgagtcaaacctcttttctttatatgttacccagtctcaggtagttctttacagcagtgtgaagacaaattaatacacaaagcaatgcatgatcatcatagaaaaattagagtaagcaagaaaatcagtagcttctgcaattt

SEQ ID NO: 13373 - DNA, 1254 bp, Homo sapiens
atacaagccaagaagtcttccaagcacaaagccctaaaagtgaccatcactgtcctgaccgtctttgtcttgtctcagtttccctacaactgcattttgttggtgcagaccattgacgcctatgccatgttcatctccaactgtgccgtttccaccaacattgacatctgcttccaggtcacccagaccatcgccttcttccacagttgcctgaaccctgttctctatgtttttgtgggtgagagattccgccgggatctcgtgaaaaccctgaagaacttgggttgcatcagccaggcccagtgggtttcatttacaaggagagagggaagcttgaagctgtcgtctatgttgctggagacaacctcaggagcactctccctctgaggggtcttctctgaggtgcatggttcttttggaagaaatgagaaatacagaaacagtttccccactgatgggaccagagagagtgaaagagaaaagaaaactcagaaagggatgaatctgaactatatgattacttgtagtcagaatttgccaaagcaaatatttcaaaatcaactgactagtgcaggaggctgttgattggctcttgactgtgatgcccgcaattctcaaaggaggactaaggaccggcactgtggagcaccctggctttgccactcgccggagcatcaatgccgctgcctctggaggagcccttggattttctccatgcactgtgaacttctgtggcttcagttctcatgctgcctcttccaaaaggggacacagaagcactggctgctgctacagaccgcaaaagcagaaagtttcgtgaaaatgtccatctttgggaaattttctaccctgctcttgagcctgataacccatgccaggtcttatagattcctgatctagaacctttccaggcaatctcagacctaatttccttctgttctccttgttctgttctgggccagtgaaggtccttgttctgattttgaaacgatctgcaggtcttgccagtgaacccctggacaactgaccacacccacaaggcatccaaagtctgttggcttccaatccatttctgtgtcctgctggaggttttaacctagacaaggattccgcttattccttggtatggtgacagtgtctctccatggcctgagcagggagattataacagctgggttcgcaggagccagccttggccctgttgtaggcttgttctgttgagtggcacttgctttgggtccaccgtctgtctgc

SEQ ID NO: 13374 - DNA, 2404 bp, Homo sapiens
gctgggcctcttgcattcggcttccttggagcagcctcttctggcagaaagccatcaggtgctcaatcatcttctcctggccaaggctctgaccatgcttagtactggaatagaggtggccaggcccccagcgactcttcttggcctgatgtttgtcctcacaggcatgccacgtggcctgagatgattcagaacaaatcatgctaactttgaatccatccagccacttgcaaatgataatcagaagtcagcttgttcactgttagaaagaaactaacaaaagagaacccagagcaatctagaatctttgagtgcttggctttccaaggatactgcggagactctggccaagctgatgaccttctgaagtgtcactggcaccatatgcaacaagaaccaccattcactgagtagctaatgggtttggggcctgggacattccatctgaggtccttcctgaacatgtcactccacagcagaggaccggttgcagcttacccagaaccactcctccaggagagctggatgttttgcgtgcaacaccttgagcactgactgctattgttcaaaaaaagcctttgctgcattcggaggactgccccgtgccctgaggtgacttcctaactatgtggtttcattagcgaatttattttttgtgctgggtggacatttgtattttgttaggttgctgtttaagctcaagtttgctgtgctctctgcagctacaaaacatcttggcatatttaagagtggcttttataaatagctttattctgatattaatcagattcccaactttactgagaattaaggactggggtactttaaagaaatgcaaatagcaattgaagaaccactgctgcaggtggtagccctggctagactgaattacactagaaatcagccagaaggaagcgtccttgggatcccagatcactctttttttttttttttaaaaggggcagccccttgatggctcatctctctgaataacagttacgtcttcatatcgataccagatgccttcttcatcatgccactgaagccactcaccaccttcaagaacatgccaacctctgtcagattcacttacccacaaacaaggaggcacgtttggcacaaagtgttgtcctccaggtccaagtggactctacagagtgcttgacctcaacacactggattccaggtggactggaccaagagcaggcaaagacacgggaactgaaaaactccacagggtttggagaatagaaatgaaaagccacgtcatataactcaagaataaatggtgttttggaaattttaaaattatcatcgaaggtggtgaaactatttcaggcccaaatgaaaggaaatcgccagttggggatgaaatcacagagcctgtgttttatgatatggttggatgtccactgatgaaattttaaaggagtttcagttttaaaagtgcgcatgattctacatatgagaattctttaggccaagaaactgtccttggctcagaggtgttgggaattaaagcagagagaagccattcgtgatgcttagaaccaaggatggtcatgtacacaaagaccatcgagacggccattcttgtttacaaaacacttaccaagaaagcactttgtaggggaactttagtaagttcttctcatttcattatgtttcttccaaggaaacaggagagactgaattaataattctctctttcctcttaagcacttttaaaataataaagtacatcttgaaatttggggaggcatctctgatttaaaaaaagaaaaaggctgcttgatgtatgttatgcagagacactctgcctctggtggctgcagagcaatacccaagcctcatttggaaggctcaacatttggaattgcactttaattgattaatcctcaattcatgtggccttacgggatggtgggtctgggaccccaattcattcttatctgccaaagaattatctagaagcacatcaaataccagcaccccacctgctcaatgggggtggaaaacttttgtatccctaagcatattattttatagtgtctgccatgccatgtggaaatactttatttttaacctcaggatttaaataaagtaaacactatgacatttagacatttgtctctcatttttttgggacataaagtgcaccacgaagttatacagagctgagttggggttgagctgtgctgctgggaaatagagcatcttttatggtggcttttcaggaggacttgagccagcagatgttctgggaagtttccaggtggcctggcacctggctgcttcctggcctgctgtgagggtggtgtttagacctgcctgagacagcctgtctttcaatccatgctgttgtgccctatgggcttctagcctcagctcaaatgtccagatc

SEQ ID NO: 13375 - DNA, 1223 bp, Homo sapiens
gagagaaggtttactttcaaagatggtgtatggtttaggaacagcccaaacttctcttataaacggtaccctctgccacctactagccacagtcccaagtccgtgaccatctatttctattttgtcaactattaatactgtagggtcatatagcttccaagatcttgatgtagctgtgagttggctggaaagatggcaaaagaatgaaagttaacgattcttagatctaaacatttctaaagtttgactgcacatttgtgatgacttacttaatggtgacaaatgcattatttatcacctatacagtatctctatacttaaaacatgaagtgacaataatgggtgtattgacatacattcattatgtatgtcatagcacgtagctagatttcataataaaatggtgaatgattgagcatacttttttctttctgttacagaatctgttcccagctataccaccaaagtgtcttttagccttcaactttgatatccatcagaagactgcaaatctcactattctctggagctatatataaatctttgttatgatcatgtcatataggaagaatggcttgtgcttaaggacaaagtctagaaaccactatcatagttgctaaaaaaaatggttttcaaatgtcaaatacatgagtatctccctccatggactggagaattgaaaaattggtttgtatattgatatttccaggttcatttgcatatacttttttccaaataatgcacatttaatatgttttaaaatgtcttatttttaagaattataactaaaagaccaaatactgaagttaagtgcattgttttcaggaatcaaaagataaaggggccgggtgtggtggctcacacctgtaatcccagcactttgggaggccgaagtgggtggatcacctgaggtccggagttcgaggctggtttggccagcatggcgaaaccccatctctactaaaaatacaaaaaattagctgggcatggtggcagttgcctgtaatcctagctactcaggaggctgaggcaggagaatcgcttgaacctgggaggtggagttgcagtgagccgagatcatgcgactgcactccagcctgggtgacagagccagactctgtctcaaaaaaaaaaaaaaagaaaagaaaaagataaagggattgtgaaaagagcatttatattggactaatcagatgagagtgttttgttattttgaaagagtt

SEQ ID NO: 13376 - DNA, 1149 bp, Homo sapiens
cctgacctcaggtgatccacccgcctcagcctcccaaagtgctgggattacaggagtgagccactgtgcccagccatgtcctatcttttaaatacacattttgtggggattttccttgagtcctttgtaatttggacacgtcattttaaagttggatgtcccttactgggagtaacatcaaacattgcatgacgacatgcagctgtgaggatctgcctgagaggaggtgttagtgtccactccatggcctcctgtactctctgcctatgactagggagctctcatttccccatcaggcctctgaaaagtctatactttaaaactggctctatattactgttggattattccacactggaattccactggtgatgctgatatcatgtggtcaaatgtgacttttaaaggtaagccagaacttgggataacagaggttattttatgtgaggaattttgcagtttaaaacgcacaggtgataatgtgatacttcccatgctttctcgaatagatttgtaagccttatggacaatcctattgataatgcccaatgtgaagatggcaatgaaataatggaaagtgaacgggatcgccaacattttgataaagaagttatgaaagcctatattgaagaccttaaagaaagaggtgggttactcatatttaaaattatttaaaattagtgtacagacgtccacttatgtaatacatttgttaatagaagtcaaattgacaaaaagtttattggttgaggggcacgttacttcgtaaattatttttccatttaccctccaacacactccaaatgatacatttccttaaaatatcaaattgtgctagtccatttgaatgcttgatgaatcatccactgtttgacagagaggctgggaaacgtgcacttaaaatgttagggttgcgttactaaccatacgtgagtttttaactaaacgatattgacaaaatagtatcctaagttactagaaaaataagatgtcgtttcaaaatccgtttacattcaacttttgaaaaagttatctcacataaatcaagaacacatataaaaatcacaaaagggaaagcacaggatggccaatttgcgcatagatgcatttagttttggttcccatagggtggtgagaatacagaggggc

SEQ ID NO: 13377 - DNA, 1120 bp, Homo sapiens
cctggcaggtgagcgtgaggaccaaaggcaggcacatctgcggcggcaccctggtcaccgccacgtgggtgctgacggcaggccactgcatttccaggtgaggagcggcacgcggggctgggggccggccccctcaagcacacacagttccattgccccggcaatttggcgacaaagaaacaaaactcacagtgaagccggagtgcatcggtcgtcttgctgtaggcatgtctaagtcgggcagacaaaccaagtttgagagtgatcaaggaagggtttttggtgatggcgatggggtggtagggacagtggcccgggaggttgaggccagtttcagaaacattggaaatgtatggaaaaggcacaaaggatgtttcccaggccttctcttagaggcatctcttccacagccgtttccattacagtgtcaagatgggagatcggagtgtctataatgaaaacacaagtgtggtggtctcagtccaaagagcttttgtccaccctaagttctcaacagttacaaccattcgaaatgaccttgcccttctccagctccaacatcctgtgaattttacctcaaacatccagcctatctgcatccctcaggagaatttccaggtggaaggtaggaccaggtgctgggtgaccggatggggcaaaacaccagaacgtggtgagacttcaaggcaggaagcaaacttggggcagagaggaggcacccttactcctggagtagacatgaaggccacagaaaggggcagggaggcaaactgcctggtgagtggcaggtggtgaggggcacgcagtttagcagcagtcagggtcatggttcctggttggcttgggtgacatcagaaactgggttgagttcttttgttgcaacacaaatatttgatggcagccatttaggaagacttctgtcctggaactggagttgctcagccaggagaagaagaaacacatgggcaacatctccttctgtggattcgtgggggcactgtgcttgactggtttgggggatttttaggttccctggacagagcaagatgctataaagttctccccaggaacagctcagagggtgatgagctgtctgccagtcagagctgctcctcattcg

SEQ ID NO: 13378 - DNA, 1240 bp, Homo sapiens
tcaatttaaccatccttaaaatgaggacagagagggtatatgggataagggatatctgctggtcgcaaagcccccttgcagtcgcaagttggtgtatatcccctctcccttccagactgctcccggccgcgcctcccttgcccatgaaggtggccatccgcagcgtggccgtgaccaaggagcgcagccacgtgctggtgggcctggaggatggcaagctcatcgtggtggtcgcggggcagccctctgaggtgaggatggggcgggggtggggaggcccctcgaacggggcggggcgtggcgcggcgatcccagctgatcctactcaacccttacgcccaccaggtgcgcagcagccagttcgcgcggaagctgtggcggtcctcgcggcgcatctcccaggtgtcctcgggagagacggaatacaaccctactgaggcgcgctgaacctggccagtccggctgctcgggccccgcccccggcaggcctggcccgggaggccccgcccagaagtcggcgggaacaccccggggtgggcagcccaggggggtgagcggggcccaccctgcccagctcagggattggcgggcgatgttaccccctcagggattggcgggcggaagtcccgcccctcgccggctgaggggccgccctgagggccagcactggcgtctgcggccgcagcagcactttttgcacagtctggggcggggttccccggcttccaagtcgctgtttcgtcaaagcacgagggccgcctgtggccttaattcctaacggcggccccggttctcccttctcggcaataaaccaggcctagttttgtagctgctccgtctccgagtgtgcgttcgcgcgcagcgtctcggcctgccatggccaccgtcccagggtcgccgtctgagtctggcctggctcgcgttcccctggcccgtgaccccctctgggcccactcgccccccctccgcgtggccgtcgctgaactggggcctcagtttacccggcagtgtagcccctgccccacatctcgccccggcttgtggtttccccacgatctcttcatggggtcgccttcgcacgccattcgtccacaaccgcaacccggccaggcgccccgcaggcgcgtttgcattccttcgccgggcaggggcgacaacacccgaggccgcgcccctccagctcggccctgccacctcattgtcttgcctacttcttgggccgccctgtggcgccgctgtg

SEQ ID NO: 13379 - DNA, 1210 bp, Homo sapiens
cagtccagacttggtggcggagacaggacacaagtgccatggtagacagtgccatggtctttcttcctgtgccctggataattggataaaaaaaattggatttagtgccgtggtagacaggaggtgcaaatggaccccaaaaaggaagagatcaagaagtcttcccagagtagaagattcttgccaatatgtcagatggagaagggagattggcaagagcagaagtctggaaggttatgagaacagggtgcatctaggaaggacaaggtgtccagagtggtaagcaaaggggaagaagtagatgaaaatggaaaaataggccagacagctcctgatgctgtggtataagcttttgactctaatagtagggactactggcttcaaatctttttggcaacaaagtttaggtgaggctacccagggaccctagcctttgttccttgctcctgacctgatctgtcttttcttccacaggtaagatcctgaggaggcaggagagggacagggaaggagtatgggtaggggcaggaggagccctggcccccaatacctcctcccctttcctcctggagtctccaagaggtctcaggcagcatcatcccagtctactgtacccttctggccactgtggtcctcggtctgcttgcctacatggccttcaagtggtaggtggtctgggcactgccctgtggcacccccttccctgtctggactcccaaccaattccctgtcttgaaggtgggggcaggttggtaggtctccctttctccccacagctggcgctcacataaacaaagacagcagctggccaaagctcgaactgcagagctgggaggtctcaacaaggaccagatgcatggggatagcagtgtcttcctggactctcctagcagtctggagccctgtgcccccagccagggtgagcccctttcccagaactgcctcaccacccagcccttgtgtgatcctcatgtctcctgccccaggaccacatcctgagcttgggtgccgacttcaccttgatctccctcggcagcaccaggagaaagtggagcggctgttagaggtgtcacgtgaacctgacaagggctggcggggactggcagaccatctgggctaccaagctgaggctgtagaaatcatggcccaaggccaggtgtgagcctacacactgctgagggactgggctatccaagaagacagtggtgcc

SEQ ID NO: 13380 - DNA, 1724 bp, Homo sapiens
tgaacccttaccggaaacctgactgcaaagtgggaagaattaccacaactgaagactttaaacatctggctcgcaaggtactccccttgcttttggtagcccaccaggcaatgttctgggcaaactgtgtaccttctaagaagcccttttcatcatagaaagtatttttttttttcttgtcagatgtcagagctggggacccaggaacggggagggaaggtttggggagggatgcgtaccttacatgacagcagtagttctctaagaaattttcagagctcagcttgtcctttctggtgatcatagcaccagcctgccccaacatctacccccttattaacttcctgtcttggtgagaagggccctgaagcagcaggctggattaccacccctgtcctccccctcatataatttctgctctgattggtggctgtggtctctcttcctgtgccctggacagctgactcacggtgttatgaataaggagctgaagtactgtaagaatcctgaggacctggagtgcaatgagaatgtgaaacacaaaaccaaggagtacattaagaagtacatgcagaagtttggggctgtttacaaacccaaagaggacactgaattagagtgactgttgggccagggtgggaggatgggtggtcaggtaagacagactctagggagaggaaatcctgtgggcctttctgtcccacccctgtcagcactgtgctactgatgatacatcaccctggggaattcaaccctgcagatgtcaactgaaggccacaaaaatgaactccatctacaagtgattacctagttgtgagctgttggcatgtggttagaagccatcagaggtgcaagggcttagaaaagaccctggccagacctgactccactcttaaacctgggtcttctccttggcggtgctgtcagcgcacagacccatgcgcatccccacccacaaccctttaccctgatgatctgtattatattttaatgtatatgtgaatatattgaaaataatttgttttttcctggtttttgtttggttttcgttttgcttttagcctctacatgctaggatcacaggaagactttgtaaggacagtttaagttctcctgcaaggtttaatttgttatcatgtaaatattctaaagcaggctgccttgtggttttggccagccttgtgctatgttgataagattgatttactgcttaaaatcactttactttatccaatttttactgaactttttatgtaaaaaaataaaatcaattaaagaacttggcatgtgtgttccctaaaagttaatcaagcatatttgtgtgtaatgatgtcactggaagaaggagagatagtgagtggccttaggtgtgtgaagtccaaggttaatccctgtgattggattttattacaggacttgttcattctccacaggtcctactatgactggggcagacatttgcacatttgccaggtgactgacacttgtaggcttgggatcttttggctgtgctcaggcattgggtcaatttgcacatgcattccagagcaaaagaagcagcatctagggcctctttggcactaggcttctttattttggttaattatcagtcaagagaaaggcaaatttatcttctcccttgatactttctcctggctggagagaagcattgaatcttttctcccccatggacttgatttttctgagcccactggaatgctttt

SEQ ID NO: 13381 - DNA, 1109 bp, Homo sapiens
tggtgaaaccctgtctctactaaaaatacaaaagattagccaggcgtggcagctagcgcctgtactcccagctacttgggaggctgagacaggagaattgcttgaacccaggaggcagaggttgcagtgagccaagatcatgccattgcattccagcctgggtgacagagtgagactctgtctcaaaaaaaaaaaaaaaagtcaactgtacaaagtgatgtaatttttttttatgtttaatcagattataaagactttggaacacttgcccattcctactaaaaatatgttggaggaaagcaaagtacttccaattattcaacgctggtctcagactaagactgctgtccctccgttgagtgaaggagatgggtattctagtgagaatacatcgcgtgctcatacaccactcaacacacctgatccttccaccaagctgagcacagaagctgacacagacactcccaagaaactaatgtttcgcagactgaaaattataagtgaaaatagcatggacagtgcaatctctgatgcaaccagtgagctagaaggcaaggatggcaaagaggatcttgatcaattagaaaatgtccctgtagaggaagaggaagaattgcagtcacaacagctactcccacaacagctgcctgaatgcaaagttgatagtgaaaccaacatagaagctagtaagctacctacatctgaaccagaagctgacgctgaaatagagcccaaagagagcaacggcacaaaactagaagaacctattaatgaagaaacaccatcccaagatgaagaggagggtgtgtctgatgtggagagtgaaaggagccaagaacagccagataaaacagtggatataagtgatttggccaccaaactcctggacagttggaaagacctaaaggtaaggaagcatcttttgttcatttcaacttgaattactcaggtttagagttctacaaacctaagcaaaattaactactttttttagccatgcatatttctgaaaaatggaatactgtctctcttactgttttatttataagtgtctcaaacatcctctaaaccgtggcaagagtcatattagccaaactaatatacaaatg

SEQ ID NO: 13382 - DNA, 1161 bp, Homo sapiens
tggggtttcaccatgttggccaggctggtctcaaactcctggcctcccaaagtgctgacattacagtcgtgagccactgtgcccagccagtcttttaataatcaaatgtttccttttaagtatcctgtattaatcattttatgtctgcttatactaatgcatgtttgtttgttctatgtgccaattaaacatttacatataagtaatagttctctgaactatttaagcaattttattcttaatccaaacatgtatatgatctcttattttcatattactaggtattctcataaaatggaagaattgtttatttcttggctagttttgtctcccaaagaaagatgattggaaaaataatgaatatttttaaagagcagttttcagacatttctattagtaatagcagacttgttggaatctcttcaagttatggtttttgtttgtttgattttgtttagactggtatgacttttgtgtgtattgccaacagttttgtatggtttacttccacatagctgacttctttcctatgctctttgaacagaaaagaagcccagaaatgtttctgcggatcagccaattgccggggttacctgggaggagaaaacagagtcagcatcagagcagcaggagggaaaatgaagaaggaacgatctcgtaagaaggattcagtaagtttgcatttttctttcaactttcacaataaaaaatttaaaaagcgaggtggcttttctgattgaaggttataaagtcatactactgccaccagagaaatccaagatcagatgagttgttaccagaaaagagatgcaattgctatttttatttcagattcatagagattggaattgggtactgagaactattaaagtattattgaaaacacctggactaatagtttttcagattctttaaaactcctaagtacaagtaaaacatatcttttctccctgatagctcactatgtctgctgtacgtttctaatctcttgttattggtttgtctttgtttggtactctaaactttgagtgttcttcaaatctctgaaaatcctcttttgagtgtgagaaaagttttgagaggaagtaggtaacctaagaccaacaggagtagtcacagatgctctttttatttaatgaaacagcagttgatagcctcatt

SEQ ID NO: 13383 - DNA, 1116 bp, Homo sapiens
gcttctgttaatcattttgatgatttatatcaacctattgggagttcaggtattgcttcatctcttcagagtcttccaccaggaataaaggtggacagtctaactctcttgaaatgcggagagaacacatctccagttctggatgcagtgctaaagagtaaaaaaagttcagagtttttaaagcatgcagggaaagaaacaatagtagaagtaggtagtgaccttcctgattcaggaaagggatttgcttccagggagaacaggcgtaataatgggttatctgggaaatgtttgcaagaggctcaagaagaagggaattccatattgcctgaaagaagaggaagaccagaaatctctttagatgaaagaggagaaggaggacatgtgcatacttctgatgactcagaagttgtattttcttcttgtgatttgaatttaaccatggaagacagtgatggtgtaacttatgcattaaagtgtgacagtagtggtcatgccccagaaattgtgtctacagttcatgaagattattctggctcttctgaaagttcaaatgatgaaagtgattcagaagatacagattcggatgatagcagtattccaagaaaccgtctccagtctgttgtggttgtgccaaagaattctactttgcccatggaagaaacaagtccttgttcttctcggagcagtcaaagttatagacactattctgaccattgggaagatgagagattggagtcaaggagacatttgtatgaggaaaaatttgaaagtatagcaagtaaagcctgtcctcaaactgataagtttttccttcataaaggaacagagaagaatccggaaatttcttttacacagtccagtagaaaacaaatagataatcgcctgcctgaactttctcatcctcagagtgatggggttgatagtacaagtcatacagatgtgaaatctgaccctctgggtcacccaaattcagaggaaaccgtgaaagccaaaataccttctaggcagcaagaagagctgccaatttattcttctgattttgaagatgtcccaaataagtcttggcaacagaccactttccaaaacaggccagatagtagactgggaaaaaca

SEQ ID NO: 13384 - DNA, 1537 bp, Homo sapiens
gcatgatcttggctcagtgcaatttctgtctcccaggctcaagcaatcctcccaacttagccttccttttaaaaattatttttcattttttgagatggagttttgctcttgttgcccaggctggagtgcaatggcacgactttggctcactgcaacctccacctcccgggttcaagtgattctcagcctcccgagtagctgggattacaggcacgcaccaccatgctcggctaattttgtatttttagtagagatggggtttcaccatgttggccaggctggtctcgagctcctgacctcaggtggtctgcccacctcggcctcccaaagtgctgggattacaggcgtgagccaccgcacctggcctaaaaattatttttaagagagatgaggttttgctatgttacccagggtggtctcgaactcctgaactcaagtgatcctcccaatttagcctcttaaagtgttgggattacaagtgtgggccactacacccagccttattttatgtgttaatctctgactctgcctgggatcttctcacaaatgtattcttcaaaaacgaatcgtctcttcaggattttttttttttttttaaagacagccatcaccacagctggagtgcagtggtgtgatcatggctacctgcagcctcgacctcctgggctcaggtgatcctcccacctcagcctcccaggtagctgggactataagtgcacgccaccatgtctggctatttttttgtattttttatagagacagggtttcaccatgttgcccagtgtagtctcaatcccctgggctcaagccatcagccggcctcagcctcccaaagtgctgggattacaggtgtgaaccaccacacctaggcaggaaaaattctttgcattcctattttcccactaaactgagttgcttatcgtcctctttgctgccttactatatatatttctattcttatatttactccattatgttggtattacttttgttacaaatttcttttttgtgacttacaggaagctgagctttttgagggcagggatgctgctttattcaaatttggtctccagcccttagcacagtatgtgacactatcttgagtaaatatttgttaaactaaatgtaactgagtgtgaaggaatggacaatccatatagaatatacctgtaggtagtaagtatcccaagttttaatacaaataactattatttcaatcgtttttaagtatttatgatttctttttattcttttgcatgttttcttggctgaatggaaatagagaagaagaaaatgaggtaagtataatttaactagtcattcaatgattatgagatggaccactaaacacattttagaaattgggtaaaagctgaaaacactcaaaatgtagctatcattttgaatgtgaaatgaagtaatagtttttaattttgtttttagagccatggtaacttatcccagtgagggatgttgtgtatctcagaaaaatggtttttaaactttagagcttcaagagatttaggaaaggtagaga

SEQ ID NO: 13385 - DNA, 1141 bp, Homo sapiens
ccatccactcgccaatcccaagagtctggcctccctccagccctgggcagactgaccagcaaggtggacctttacattcaagcacagctggcttttatgacataaagaactaaaggccgaaagaatctcttgctgctgcaaagaacagattttatatttcttcctctaatcttggcaaatgacctttaccttttggaaagatttcatattgcttcctcctccctggataggacctaatgtagcacagcgggactcaaagaggaggacattttctcttgccagtgcactgggcagtggggctgtccttcaactgctgctgccaaaattggttttctaaaattcttccagtagagactaaaagaagattcaattcctgtaacccaagactgagtcttagggctccagtctccacctgcttggtttcctatcctttgctgcctgcctggggtggcctggaagcctgttcagaaaggcacaatgtggagcctggggtgtctcccccaccccaggaccgtcaggtttaccagtgtgtgcaatcgccatgtattcagagggaagtacctttgttacctacaacttaggagctaggcctctgctacaagcacttgaaaatgatatttttatttttaacgtctcaacaatctgatatcggatgtcgtttaacctgggctcgtggtagggctccagcatttctccctccttcctggtttgcctgtaggggtagactcggaaggtgggtggggtgtgcatttcctgttaggagtgtatcagtgcttgtcttattataagcccctttcttttgtgaatttgaagtagcaccaacaagcctggattgtgaaggtattaagaatcggtctgtgggctactgagtgggtccttaggatactggcccagattttgccactgggtatggcagatcattttctaccatggcctgctgctcttgtagtggacttcctgagtccaatcccacctcctggtgtagaatttacactgctgcacctgaggtcgatgtttcaaagtaagatcaagccagtgttttgatctgggctctgagcacaagtcaggaaacaccaacatattcacactctcccagtaggttcctcagtccgatggtgaatggctattcgtaaatggctgg

SEQ ID NO: 13386 - DNA, 1148 bp, Homo sapiens
tctgaatcagcatacctcttgcaccctgctcagtgtgcgctgggcctcacttaagccctgacctgagggggcggttctgtctcttgggggaggggcccatgggtgcccggtcagcctgcctcaggggctgcctgtacaatccacaaccccagtgctgtcaggtgtgttcacggatgtggaggcttccctgaaggacatcagagatctgttggaggaggatgagctgctagagcagaagtttcaggaggcggtgggccaggcaggggccatctccatcacctccaaggctgagctggcagaggtgaggcgagaatgggccaagtacatggaagtccatgagaaggcctccttcaccaacagtgagctgcaccgtgccatgaacctgcacgtcggcaacctgcgcctgctcagcgggccgcttgaccaggtccgggctgccctgcccacaccggccctctccccaggtgagccccaccagaccccattgggagactcgagctgggggtttctctggcctcactgaccactgctgcccacagaggacaaggccgtgctgcaaaacctaaagcgcatcctggctaaggtgcaggagatgcgggaccagcgcgtgtccctggagcagcagctgcgtgagcttatccagaaagatgacatcactgcctcgctggtcaccacagaccactcagagatgaaggtgggctgggtgagcagggtagaggggctctggctccgggccccacccttaggagtcgaggccctgagtgtccgtccctggcccccaccccttcctcagaagttgttcgaggagcagctgaaaaagtatgaccagctgaaggtgtacctggagcagaacctggccgcccaggaccgtgtcctctgtgcactgacagaggccaacgtgcagtacgcagccgtgcggcgggtactcagcgacttggaccaaaagtcagtgcccagtcctctgctctttcccggagccacctggagcccagccccatggttcacctggagctggcccttctgcccaccaggtggaactccacgctgcagaccctggtggcctcgtatgaagcctatgaggacctgatgaagaagtcgcaggagggcagggacttctacgcagatctggagagcaaggtggctgctct

SEQ ID NO: 13387 - DNA, 1141 bp, Homo sapiens
ctctagagggaccggaagattcagggaaggtacttccccttccctttcagccctttctgaagaaagtgtgagggtttcttctgccccctggtggagacggggtgagctgctgctggtatgtgagctgaggaccaaccagcatctctcatctctgctgtgccctgcctgctgctgccctgccggttatgaggtggctgcagtccgggtactgctcctcttgggctgggacagtgaggtcacggcacccccccatccccatgtgctctgattccaggagttctgtctctttgctgtcgtggggctggtgtctgacttcttccttcagatgctgtttttcaccactgtcctgtccattgacattcgccggatggaggtaggagtgggctgagccctgccctgcccgcctcctcagccctggctgtactgagggagtcctgggtgagaagggtgtagacctcgggcaggacagcggtcctgtgcgagcagcctctggatggtggactcaggccctgaccactgtgcccccaacagctagcagacctgaacaagcgactgccccctgaggcctgcctgccctcagccaagccagtgggacagccaacgcgctacgagcggcagctggctgtgaggccgtccacaccccacaccatcacgttgcagccgtcttccttccgaaacctgcggctccccaagaggctgcgtgttgtctacttcctggcccgcacccgcctggcacagcgcctcatcatggtacctgccacccctgccctgccctgccctcttctggagggccggtgctccaggccccttgtggtgctgcacttggccttagagtggcaaagggtattcctcaggccctggtggcccctggaagcctggctctggggagttgcccgttgtgtcctccctgcccagaccctagtggcttctgaggagataagcctgtgggagaagcagctccagggttctcaggtacaggagccatcctctccccagagtggcccaggacaggagcctgttagttgagtgctctgggatggacccacttgtggccaccacattgccctgggtcgggttcatcggccgctgcatggtgtgcagacactggaaagtgctgggcaaaatcattcaccagccgggc

SEQ ID NO: 13388 - DNA, 1110 bp, Homo sapiens
aagcctttaaaaaccgataaccagcaccaggtacaattctgtacttatcaataaaatttaaaataatttttttaataaagaaagaaatacagtatttgttttttgtagggattttttgtaatttttttttttttgagatggagtctcgctctgtcagccaggctggagtgcagtggcacgatcttggctccctgcaacctccgcctcctgggttcaaacaattctcctgcctcagcctcccaggtagctgggattacaggcgcctgccaccacgcccagctaatttttgtatttttagtagagacggggtttcaccatgttggccaagctaatctgaaactcctgacctcgagtgatctgcccaccatagcctcccaaagtgctaggattacaggcgcgagccaccacgcccagccgaaatacagtatttgatccagaagctgagacattgtcatgttttgccgtgattatttcacttacatgtttccttcactcttctctcctaaccagcaaattccggaccccatctgagctccacaatgataacttctccctctccaccattgccgagggctctcacccaaatgtaaggaaactttgcaacactccccgtacctcctccccccatgcccgtgccttggctcactatgataacgttatctgtcaggtaacttgttttcttcacatctctcctcttatgcatgctttggcccctggcccatgtctgatgtctatttcagaatatgaaatccccagagagctctggaggtcagcctagggcaactgagttgggcagcaaaggtgggaataagcacttgatggtgtatcacttatttgacaagcagaattttcgatacaaaaggtctttttctttttaaaatttttgtagagatgaggtcttcctgtgttgcccaggctggtctcgaactcctggcctcaagtggtcttcctgcctcaggctcctaaagtgctaggattataggtgtgagccacctgcctggctgagaagatctttttctagggttactcatgatttttagcttcatctaagctttagaagtctgattattgtcttattttccatatcaaggagaaaggctctgctttcac

SEQ ID NO: 13389 - DNA, 2899 bp, Homo sapiens
ggaaaggacttctgtgtctttttttcactgaataggctctttcctgagtctcttgtatttccagcaataacgagttactcttggatatgtttgcagatccccctccaccacagcagcagccaccgccaccaccacctgcagatggggtccctccgcctcctgctcctggcccgccagcctcagctgctccttagcctggaagatgcagggaacctccacgcccaccaccatgagctggagtggggatgacaagacttgtgttcctcaactttcttgggtttctttcaggatttttcttctcacagctccaagcacgtgtcccgtgcctccccactcctcttaccacccctctctctgacactttttgtgttgggtcctcagccaacactcaaggggaaacctgtagtgacagtgtgccctggtcatccttaaaataacctgcatctcccctgtcctggtgtgggagtaagctgacagtttctctgcaggtcctgtcaactttagcatgctatgtctttaccatttttgctctcttgcagttttttgctttgtcttatgcttctatggataatgctatataatcattatctttttatctttctgttattattgttttaaaggagagcatcctaagttaataggaaccaaaaaataatgatgggcagaagggggggaatagccacaggggacaaaccttaaggcattataagtgaccttatttctgcttttctgagctaagaatggtgctgatggtaaagtttgagacttttgccacacacaaatttgtgaaaattaaacgagatgtggaaggagaacctcagtgattttattccctagtgaggcctctgagggcctccacactgcctggcagaacataccactgaactagtatgtgctagaggagggcacaaacatccgctccttccctaggcctgctggctctggttttctatgcagatgattcattggattgggggtgagtgttttgtttttctgggggcagtgtgagctttgagggttggaatattgggaggcattccttagtttcctcaactagcctggaaagttaggagtctagggtaattacccccaatgagtctagcctactattcactgctttgtgtgcatttttttctccctctttaaaaaaccctttaaaagaaaaaaaaaagtagatagtgctaaatattttagctcatgaaacttggttaggatggctgggggtacaagtccccaaactacctcttgttacagtagccagggagtggaatttcgtcaaccggtacttttaaggttaggatgggacgggaaaagtgaagcaggatattagctccttataccttctcccttccatttctgagatctcacattccatctatcacagggttttcaaagagatgctgagggtaacaaggaactcacttggcagtcagagcatcatgctttgaggtttggggtgctcaggctgggagggtagaatgccattccagaggacaagccacaaaaatgccttaatttgagctcgtatttacccctgctgataagtgacttgagagttcccggttttttcctcttgtccttccctcccttctgtccttccatgtgtggggaaagggtgtttttggtagagcttggtttccaaagcgcctggctttctcacttcacattctcaagtggcagtttcattatttagaatgcaaggtggacatcttttggatatctttttctatatattttctaaagctttacatatgagagggtatagggaggtgtttataaaacacttgagaacttttttccttaatatcagaaagcaaaaaaataaaaccacaattgagatttgcctttcaaaccctcaggtttgcctctaaccaggtgtccctggtcaccatcagagtactggaatacgggaaccgaggagaccttggtccttttgtttttgttctggactcttgggagtggaaatgagaatgagtttattcctactggagcttagttccaatgcatttggctccagaaagaccccagtgccttttgacaatggccagggttttacctacttcctgccagtctttcccaaaggaaactcattccaaatacttcttttttcccctggagtccgagaaggaaaatggaattctggttcatactgtggtcccttgtaacctcaggtctttaatgtgatcactttcaaatttaaaagatccaggtggaaatatttttactatagtaataattctacaaaatacctgaattcttaacactgttatatttcagtataagtggtggctttttcttttcatgtctttgatctggttttattcctgtaattcagccacctgattttgtgaggggggggaataatatgtggtttttgtacaaacatgtttctcagtgtgttgttattttggaaaaaatgaggggagggagtttggcaagaatggagaaaatgaatgaagaaggcctaatctctctctttttcagtgaataaatggaacaccatttctggattctagtcccattctctgcattcatacaccagtttcttcatatatcctatgaagaacctaaacatttggccccacctggtcttggtttgatcagcagttaaaattctgtgactcgggcttccttcccgactgcccaccttcatgatgtgtaaggaacatacattttgagggtacctcacccactgttcatttgcatggtcaaagtgaaaatgagtggaagttctccaaaaatgatggccaacatcctggcacctccaggtgtgagaaatagctttgcttggtgaatgggataatgtttgtcaggatgcagtttagacagtcccaagttggaggcaggccttgagggcagaagattctgtgaaccttgggggacagcttttgggtactca

SEQ ID NO: 13390 - DNA, 1107 bp, Homo sapiens
gggtttcaccatgttattggccaggctgctctcgaactcctgacctcaggtgatctgcccacctctgcctcccaaagtgctgagattatacgcgtgagccaccgtgcctggactactttctttacagtatgcatgtcttttatttattttacttgcctgattgaaaataatctaaggaaaccatcaaatctttctatttatgcataaatatttgcattaattttttttaaaaaagctatctaaagaacttctaatattacacattactttcttgttacctgacatgaaagcatctgttttttctgtcttaggccctggagatgtacaaggatgattggaacaaagtgtcggaacatgttggaagtcgtactcaggatgaatgcatcctccactttttgagacttcccattgaggacccataccttgagaattcagatgcttcccttgggcctttggcctaccagcctgtccccttcagtcagtcaggaaatccagttatgagtactgttgcttttttggcatctgtggtggaccctcgcgtggcatctgctgcagcaaaagcggctttgggtatggacttccctaaaccatctcctcaacagaaaaactcagtttatcccaatttaaatattaccagccgttacattcatttcttttaatgtaaataacaaaaatcagatattacctgtgaaagataccatattctttataaaagtattacaatatttggctggacaccaaattagctgggtgtggtggcacatgcctatagtcccagctacttgggaggctgaggcaggagaatcgcttgaacccaggaggcagaggttgcagtgagccgagatcgtgccactgcactccatcccctgggcaatagagcaagactccgtctcaaaaaaaaaaaaaaagtattacaaaatttttaagtaatgcaccttaaaattaagagctttaggaattggagggacagaggttttttattgtgtattttgtgattaatttagaatttggtgtaactagcaaaggaagtcatttaatattcatgggttacacattaattgtaactagaactttgtcacatcatagaactctttcttggttttatgg

SEQ ID NO: 13391 - DNA, 1196 bp, Homo sapiens
aatgtatcttcttgggcttggtgcggtggctcatgtctgtaatcctagcactttgggaggccaaggcgggcggatctgttgggtccaggagttcaagaccatcctgggcaacatggtgaagccctgttgctacaaaaattcgctgggcgttgtggtgcatgcctttagtcccagttactttggaagttgaggtgggagggtcacctgagcccaggaggcagaggttgtagtgagccgtgattgtgccactgcactccagtctgggtgacagagcgagaccctgtgtcaaaaaaacaaaaaacaaacagtatcttctgctcacccattgccatgtggggttatttgtttgcatcaaagctaggcatctttgagagttccatgcccagttctggactaggggctgaagtgggtaaacagatgaaaaaccacggctgcacaacacaacttaacggtgtagctggacacggaccaggccgactgaggtgtaaagatggtatcaatccttaaaacgtcccttttcccctccagggttggggtctgctaggtccccggaatgagttgtttgacgcagccaaataccgagtgctagctgatcgctttggctcccctgccgacagctggtggcgtccggaacccaccatgccccctacttcctggcggcagctgaatccagagagtattcgaccagggggacctgggggcctatcccgctctttaggccgggaagaagaggaggacgaggaggaagagctagaagaagggaccatagatgttaccgacttcttgtccatgacccagcaggattcccacgctccactcagggactcaaggtacagatggaggatggggatgcagcagaggctggctgtgccttgacacggggatgggcgaatgttctctgctagctttctctgagatgggagcgcccctgcctcacatttcagcctgtgtgccccatcactcagtgtgtgtctgcccattcttgggggacagccagctgtggtcttctatgtggctgggcttttgcagaacagcagcatggagcccctgctctctgctatcttatctgtgtgagggaatggagggagcagtccccatgcagtgtggctgtgggaggagcagagacgcccggtttcccatccatttcatgccttctgcccttctggctccctgctgcagcgcagcgtcctcacccc

SEQ ID NO: 13392 - DNA, 1113 bp, Homo sapiens
gactttctgctgatcctgctcaagggcctgcagcggctcaacccggccctgcggctggtgctcatgagtgccacaggggacaatgagcgcttctcccgatactttggtggctgccccgtcatcaaggtgcctggcttcatgtacccagtcaaggagcactacctagaggacatcctggccaagttgggcaagcaccagtacctgcaccggcaccggcaccatgaggtgagggacacccccatcccacccaaggctcctggcctttcctccgtggatgcccctcctccctggccctggggcttggtgcctggggcaagttaccctccccagtcctcggtttccttgatagaaactggggactaaccctgcctgcgtggcacacgtgaggattggagttgatgtcaagcggctccgtctcactgagtcaggtggctgtgtccttggcatgaccccttaccccggggctgtgactgtggcctctcttcccccaccccagtctgaggatgaatgcgcactcgatttggaccttgtgactgatctggttctgcacatcgatgctcgcggggaaccaggtgggtgcctccccatctgtcccatgctagccctggccacgtttgcagcaacagctggctcatgccccagggctcctttacaggtgggatcctgtgcttcctgcctgggtggcaggagatcaaaggagtgcagcagcgcctccaggaggccctgggcatgcacgagagcaagtacctcatcctgccaggtgagagccccggcggagggaccagggacctttggaaaccagcctgacctctgtcctagggactgacccaactgggactccaggggccccggtttctgaccaagctgtggcacttttcactgggcatagtgtttatctgcgcctgtttcatcaaaatggggtcaaaatccttgccctgcccacattccaggggggaattctggtggaagcagtgcccataactggtgtgtgtcttgcccaccagtgcactccaacatccccatgatggatcagaaggccatattccagcagcctccagttggggtgcgcaagattgtcttggccaccaacattgctgagacttccatcacaat

SEQ ID NO: 13393 - DNA, 1626 bp, Homo sapiens
aggctggttttggcatctctgtcccattccctgggatctggtggtcagccctaggataaaaagccagggctggagaacaagaaagggccaggagatggaattccttcaggccggcacccacaccctaggacatgtaagccctcatgtccaagggagcctcatgcagatagtaggaaatcaggtctggaaatttaaaaataaaaggcatgagactaaggctatctgcttcccttatgccctgactggagaggggagggaggagaggcaaggcccacagagggcatcccagctaggccttgggatggctgcagtgaggagaaatcccgggaactgtattgacacaaagattcttattgcacttgtattttttgtattaaagtttgcatggtttctaataaaggattcaaacataagtttgtagtgaaatggcctgggagattccaagggcttctctggagggggattggctgcagtgtagatttgcctctgaggaggctgccccagacttggcctcctcatgccccctcctgacctctgcccttctctggtcctggcatccctggagaaggtaggggtcttgacctaagtttagatttgatctccatgtgcagggaggctgtcctgggcctgacaggtcctccccctttctgaggtagcagtgccttgtggaggtttgacaccatgtccctagctccccaagcacacaccaggaaactgcaggggctcacggaggaagtgctgcctgggccagggggaccagctttcctccgtagagaccatgtgcagaacacttctgctgtgccaagaacatgagggagccagtgttttgtcagcaggaagaaagggcctgctgggatgaaagtgggaaggaaacagggttgcgtagtcaggagacacctcaggggcaacagcacaggcccagagtacctgctgcctccactgcgtctgtcctggggtcatgaggatgctgaggttgacgacaggttccaggtcctttcactcctttggccaaaggttgggggtaggtggcccaagtggcgtgctctctaggtagacaacaggagtggtcagagttccctcaaaggatcctccactccagagcacctgagaaggccgggaccagaggccctgtgtgatgtgtactccgcagctgtttggggtgggacatttctgtacttctcgatttgcttatggctcagccattacctgtgtcagtccatgattctgttgtaacagttttaagagtaaataaataaagctgcctgatgtcccatcacgcaggcttcgtgcttctgtctcgttttgcatctaccacctccctggatcttcctgccctcagctcagcccctcagctgtgaacttgtggatgtggacacgggaaggaccactgtgccacatagccctgcgccttggctacctgtggaactctcccctagtctgcctgataaagggctacttgacacttacttgcttacttactgtccaaaactacaaggacagtgacagttctgacaggcttcctgtggtgggtaccgagagcagcagctgtgccaggggactggggtggttaacagcaccgctgcttcatgctctttcttggtgaagggaggaggttccaaccccctt

SEQ ID NO: 13394 - DNA, 1123 bp, Homo sapiens
ttcagtaattgttaaataatgaggaatctcactattggatgaactatccaacaggtcagtttgttaaatgttatattaataagtatattttgtacagccattaagactgagggaaaacctgcagaagtcaagaagatgactgcaaagtctgtaccaggtaatagcccatccgccattttgtagagccctaacttgaacccccacctcctctgtggcttaagtctccctttttctctctctccctgaacccgtgttatctctcactcccttctttgcagctgacttgagtcgcccaaagagcacctccaccagttccatgaagaaaaccaccactctcagtgggacagcccccgctgcaggggtggttcccagccgagtcaaggccacacccatgccctcccggccctccacaactcctttcatagacaagaagcccacctcggccaaacccagctccaccaccccccggctcagccgcctggccaccaatacttctgctcctgatctgaagaatgtccgctccaaggttggctccacggaaaacatcaagcatcagcctggaggaggccgggtgggtccagggagcttggggtcctggcatgctggcccctgcatcttcccctccatttccacccactgttcccaggcccaccaaagaagcaggcagtcaggacactggactcagcatcagggtatttcagccggggctctgtagtgggttttgtgccccagcagcagggaggcggggtaggctgagctctgggctttctcttcctgtctcagtaagaaaggctcctgttctagatgttggggtctgagtttacatttttgcttggatgtaaaaggattcttttgtagaagaaacagaggaggcctcagagactctgcaagtgagagagacacttgacatgagcctagtttttcatggttcttagcctgcacagagaatgtcaggataggcagaaggtagaacacctcttacttccacaacccatgacttgagtggaatatatctgaaagaggactagggtgtcctcttatggccaggatgagtcgtgctgtgagcctctggccttcctaaacagcaggactgcactgcatatagtgatggagaaagatcaca

SEQ ID NO: 13395 - DNA, 1100 bp, Homo sapiens
gtcccagccaaggatttggtattactctcagaaatagaggtggcacaggctaatgacattatatcatccacagaaatatcctctgctgagaaggtggctttgtcctcagaaacagaggtagccctggccagggacatgacactgcccccggaaaccaacgtgatcttgaccaaggataaagcactacctttagaagcagaggtggccccagtcaaggacatggctcaactcccagaaacagaaatagccccggccaaggatgtggctccgtccacagtaaaagaagtgggcttgttgaaggacatgtctccactatcagaaacagaaatggctctgggcaaggatgtgactccacctccagaaacagaagtagttctcatcaagaacgtatgtctgcctccagaaatggaggtggccctgactgaggatcaggtcccagccctcaaaacagaagcacccctggctaaggatggggttctgaccctggccaacaatgtgactccagccaaagatgttccaccactctcagaaacagaggcaacaccagttccaattaaagacatggaaattgcacaaacacaaaaaggaataagtgaggattcccatttagaatctctgcaggatgtggggcagtcagctgcacctactttcatgatttcaccaggtacgtgcttgtgcttattctcagtatttctctctaccaggttgtagtctcgagaagactaaggacaaacatcatgccaggtaaagtacagacagtcacactgtactttgcaagtttattcatactcctgctctcctagacaactctttcccgcctttaccctcctcccacctccaacaccttttctatgttcattctctgctgattgtcctgtttttcttgcagataagtcaagcaataaaatagaacatcgacaaacttctattccattatctacccaactacttgtatctgtatccatggtctctgcttatgaaagttcccgtttttataagtaaactgttcctgctcctaattaagaccaacctctcctcattttgccctagattccatctcctctttcctactcgatatattgccccatgtattcttccct

SEQ ID NO: 13396 - DNA, 1138 bp, Homo sapiens
gaccacccaagggtgaggagaggggctggaagccctgggcattaggagaagggagtgggtgctggcatggacatgactggatagaattttctcaggagggagcttggtggattttgaaggtaaaactttctgggtttatcatgttttaattttagagacagggagtgatgaatcatcaccggttgtccccttatctaactccataaaagtgggaatttcaaaagaacacctcatccaaggagctggggcagacttcattgattctagagagacctgtttcagtgcctactcatccctgccctctggtgccagcctccttaccatcacggcttcactgaggtgtaggtgggtttttcttaaacaggagacagtctctcccctcttacctcaacttcttggggtgggaatcagtgatactggagatggctagttgctgtgttacgggtttgagttacatttggctataaaacaatcttgttgggaaaaatgtgggggagaggacttcttcctacacgcgcattgagacagattccaactggttaatgatattgtttgtaagaaagagattctgttggttgactgcctaaagagaaaggtgggatggccttcagattataccagcttagctagcattactaaccaactgttggaagctctgaaaataaaagatcttgaacccatgctctctgcctagttcttgatggatttaaggagaattacatttccctttaaggtcctgggaccacattaactaaaattagtgtttgggatggccacatttcctcaagaagctctgactccaaaaacttgtggttcagattgatttgcaagatgaaatgggtgcataaaaagtgtgcctgaggccagccgcagtggctcatgcttgtaatccccgcattttgggaggccgaggcaggcagatcacttgaggccaggaggtcaaggctgcagtgcccacacataatgtgatgctgggggctactggggacaaaatatattgggctgaagcacagagggacgcccagaatagaaaacacatggtcctttaggtatgggttggaaaaccaggggttcaggcatatttgattatattatatatacatatatttttctgagacagtctcactgttgcccaggc

SEQ ID NO: 13397 - DNA, 1179 bp, Homo sapiens
gcattctctaggccattttatggtctttatagagatttgcatctgcttgccctaactcatttcagcagattctcatactgtcacagtcctcaatgctgatcggtgttcactgatgcaaccttctaataaaagaaaccttgttcttcacaagaggctatctctagtacccattataaggtgaattgcttctggcaagagttctctgtaaaggctactgactactcagggctgtgtgtggtcatcaaatcatttataatcttgggatacattttcatataatcagtaatggctaaaattttgctttgtataacaagtataacatagtatgttttcatcataaaaactagtgacccattcaaggaaatgaaagtggatcagagctctcattattaatccatgaattttgtcttacagctttcctcaaatgaaagagatagcagtgaaccagggaatttcattcctctttttacaccccagtcacctgtgacagccactttgtctgatgaggatgatggcttcgtggaccttctcgatggagagaatctgaaggtaccgtgtgtgtgtgtgtgtgttcctatttgttctactaattaattacctctggagaaggcatgtgatgtgaaaaagaacagcaacagcagttccccggggcttgcttagctgatatttttgttcatttggtgataattcatttaataatagggctaccagccttattaaatcctttggattgggggatgggggcatcaaaagaagacacatgatccttcttaccctgaaggagctaactaacaatctatatgcaagaaacatgaaatcagaacggtataggatggtacattaaggatacttcctatccaggcctatctggtattgttcagggagaaacacacctaaagcacttaaacaaatgttagtctctacaggctctttttaaaatcagtttttctgtttctttagaatgaggaggagaccccctcgtgcatggcaagcctctggacagctcctctcgtcatgagaactacaaaccttgtgagttgttctagtgtgtctggaggaagccctgcgtgattggggcactggacagagtagtccttagttgagtatagccaaagattgaaatgcatgataggatttggggatctgggttttaggcctcactttggctacctacaaatt

SEQ ID NO: 13398 - DNA, 1124 bp, Homo sapiens
tcacctctatctgaataaccaaacaatcatgatatgaatcagttttattcaccctcttctcaaatcctatttcccttgatgttatttgcaaataggagaaaaaacagtaaatacgctatgaaaatattaagacttgtacaaacatgacatttttgacaatctaatagacgtaacatcaattctggcaaaagtacaagccatgaatatttgttgcctgacttaaataaagacccaggtactttgtttagtgttttaattttaatgacaaaatggtgttttttgtattatttcttgagaggttttttttttccccataggtttctgtctagattctcctgggccattggacagtaaagaaaagtatgtattcactgctttcaaatgtttatatgtagaaaaaacgtgtctaaacttaaataccttatttaaatgaagttcttcatacactggactggagccctggatttacctgtgcctagaaacactctggaatctcaagaatgaatagtttgtgtcagcaattttcagaactttttctcctttattttagctataattttggtgttctgtttgggtcttacccaaacccttactctgtgctctgacatcatagccttacaagaacatgtggggtttttttgtttgtttgtttgtttgtttctgaggcagagtctcactctgccgcccaggctagagtgcagtggctcactgcaacctccacctcccaggttcaactgattctcctgcctcagcctcccgagtagctgggactacaggagtgcaccaccacacccggttaatttttgtatttttagtagacacgaggtttcatcgtgttggccaggccaggagttcgagactcctgacctcgtgatataccctcctcggcctcccatagtgcccatagtgctgggattacatgtgtgagccaccgcgcccagccgaatgtgtgtattttaagaaaagacatgggtttgttttttttcacctagaagtctagtgttgggggtgctcctgagaacaggacagcttcagaaatttattctcccatctcttgcctaaaatgggagtctgtgactgtacccccaagctacaggctaaacactatctctctgctaatatga

SEQ ID NO: 13399 - DNA, 1160 bp, Homo sapiens
tttttttggccctaaataaagccatccactgtagggttgcccctacaatccacaaagtccttgtccctaaggagccatgttggtcttgtctgtgccgggggtagtcatagctgctattcttcgctgtggctccattgtcccttctttcccatttctgccggatgtggggaccacagtcaggtcagcagccaggtgccatcatttgggagcatgtgagcttggatgctctggccaggttttcatagccacccagaatggtcctgacttttcccgttggagaccatggaatgggtctccatcttgaccatctctgggagcagggtggatgggaaatccacttgagggtggacttcaagcagacacagagggaagcagccttggtcagcaccacagacctcgacagagccatgcctctgttccagaggcctctctgttccaggttcaggcccctgcaggttttaggggtaggtgaaggctcccgggagaggggggccatgtgcctgcaagcctgggcacgtgcccgcgggaggggtgagtactgaacgtgctttgagtcactcactgagtcatggctcggccgccacagaacattgttataataacagacatagagaagaaaaacctggcacaagaagataggaaattctgtcttcactccaaaccatgaccaagaatggagattccaacaccagcaagaatttgtgatcgcttaacttgggtcatgaccacaatttcagcatagaacatttgtaattcagtttgatcaatcttttcctaatttttattaagactgcaacgaaagtgtgccctcattattacatttttcacaaacctgttagcatacaaagggcctttgtttctcattaccacccggggctccttaaggcgttttatggagtgatgtgctttattaaaaagcgttttcaccaacttaaaagttggaataattgtccaaatggttacatgacccaggagttctatatttttattaattttctgatactgaaataatcgtgctaattaagataacagctgaatttatgctgatgaatgttggaattcttagaagccacctgaaaccttccaaatggtcaggacctggatcccactggccagtgccaacaggtgactctgggtggtgctgggggatacagggaacc

SEQ ID NO: 13400 - DNA, 1154 bp, Homo sapiens
aggcacaagccagggcatgactgctgggaggggcctctgggtggggccagggacccacttgtgggtgagccactggtgtttggattgctggcctcaggtcctctttgctgtcacagcttctgaaggttcctgtggcttcctgtgctcagcacctggactgtgcatcttgccttgctcacagggacccatactgtgggtggtgcgtgctccttggcaggtcagatttctgaccccatcccagccccagcctcaagcccacaatgctcctgcataattgtcctgtccagaattcctgacccttagaccatgactctcaacccctgatccccagacaccccaattcctcacccccatcctctgcactgggcatcagtgccctgccagggcagacacaggagcctctatcatgcccactctagggccctgcccaggtcctccagattgtaggagtccctaccctatgaactcccagtggcccatgagggtcacagatagacactggtcatctcgcccaggtgcagtcgccgttctgagtgctcgaggggccagggcccagagcagtggctatggagcttccagcctgagctgggctgtctgcaagtggcagccatgagtcctgccaacatcagccgagaggagacgagggaggtgaatgatcagataggcagggccctggtggggagggctctgggcatcaaggtctgggtagagatcttggatcctgatgtcggacatgccagataccacatggcctcacacaagtcacttcttttaggagctcagtttccccatctatttctaactcaggccagagggtgtttggggaggcctgagggctgttgattgctggtgcctgcccacattgggtgtcccataaatgtgagccctggtctgctgcccactagccccaacagtgtgtccctggctctcttggcaggttttcctatcagtgccagacctgccacccctgtggccaggggagtcatattcctgccactttggggaacatcagagtcctgccctgctgactggttctggtgtgatgtgcccctccccagaccctagtgaggccccagtgctgccgagaggagccggtgggtgagagaatgggccagcctggtgggggccagcccctgcttcaggggatgcggtgg

SEQ ID NO: 13401 - DNA, 1916 bp, Homo sapiens
atgggtggcaagcctggctctcaagacctggggagatggaggagggtcctgactggaattctctttgcagcggttgtcaccaccaccacatccaccactgtggtgcatgccccttatcctcagcctccaagtgtgccgcccagctaccctggaccaagctaccagggctaccacaccatgccgcctcagccagggatgccagcagcaccctacccaatgcagtacccaccaccttacccagcccagcccatgggcccaccggcctaccacgagaccctggctggtgagtgcccctgccaactctagccctgcccgacttcccgagtctctgccagcatccctcgggcacccatcccaaactacatcactcaacaggcctctgcccctttctgcttgcctgccactcacacggcagcccaccatgctcacagccaaccagggtcctctctgctttcaggaggagcagccgcgccctaccccgccagccagcctccttacaacccggcctacatggatgccccgaaggcggccctctgagcattccctggcctctctggctgccacttggttatgttgtgtgtgtgcgtgagtggtgtgcaggcgcggttccttacgccccatgtgtgctgtgtgtgtccaggcacggttccttacgccccatgtgtgctgtgtgtgtcctgcctgtatatgtggcttcctctgatgctgacaaggtggggaacaatccttgccagagtgggctgggaccagactttgttctcttcctcacctgaaattatgcttcctaaaatctcaagccaaactcaaagaatggggtggtggggggcaccctgtgaggtggcccctgagaggtgggggcctctccagggcacatctggagttcttctccagcttaccctagggtgaccaagtagggcctgtcacaccagggtggcgcagctttctgtgtgatgcagatgtgtcctggtttcggcagcgtagccagctgctgcttgaggccatggctcgtccccggagttgggggtacccgttgcagagccagggacatgatgcaggcgaagcttgggatctggccaagttggactttgatcctttgggcagatgtcccattgctccctggagcctgtcatgcctgttggggatcaggcagcctcctgatgccagaacacctcaggcagagccctactcagctgtacctgtctgcctggactgtcccctgtccccgcatctcccctgggaccagctggagggccacatgcacacacagcctagctgcccccagggagctctgctgcccttgctggccctgcccttcccacaggtgagcagggctcctgtccaccagcacactcagttctcttccctgcagtgttttcattttattttagccaaacattttgcctgttttctgtttcaaacatgatagttgatatgagactgaaacccctgggttgtggagggaaattggctcagagatggacaacctggcaactgtgagtccctgcttcccgacaccagcctcatggaatatgcaacaactcctgtaccccagtccacggtgttctggcagcagggacacctgggccaatgggccatctggaccaaaggtggggtgtggggccctggatggcagctctggcccagacatgaatacctcgtgttcctcctccctctattactgtttcaccagagctgtcttagctcaaatctgttgtgtttctgagtctagggtctgtacacttgtttataataaatgcaatcgtttggagctgctgccccctttcttcctggcctcggctgctggaattggaatcaggctgtactctttccatccatttgggcttctctgtgttttccctacttttactgggctcagatagttgaccatcctgctagggaaagtgagggacaaacac

SEQ ID NO: 13402 - DNA, 1282 bp, Homo sapiens
ggaggacccccatgtgcatggttatcctggtgactccagagatacctcagcagttgggaaggggttctgtggctgctgcatcacaggcacacatgttcacacacatacaccctctacccacacctgccaccttttctgttcccctggcagtctggctgttcctcagccttgtcatgtactgtttcagatccgccaccgtgatgatgctctaccttttgcccacgtggccattgcagtagagggtcctggctgggccagcccggacaatgtggccttgcaagtggccaatgccatcatcggccactatgactgcacttatggtggtggcgtggtgagtgccagcgcgagcatgggacctcgccttcagggaagagagggtgctggggctgtgtgctcctgtgcgtgggggtcacagtgtgcgttgaagacaagagggtgggtgctgaccacctatccccctggcagcacctgtccagcccactggcttcaggtgctgtggccaacaagctatgccagagtttccagaccttcagcatctgctatgcagagacgggcttgctgggtgcacactttgtctgtgaccgaatgaaaatcgatgacatgatgttcgtcctgcaagggcagtggtaagtggcagcctggtattcctaggtgggatggcggctttaaccagcacagtgggaggctgagagatgacacactggctcagaatgaataccacccacccccccactttaggatgcgcctgtgtaccagtgccacggagagtgaggtggcccggggcaaaaacatcctcagaaatgccctggtatctcatctagatggtgagtcctacagctcagcggggaggggtagagtacatcttgccagcgacagcaccaaggtggccactgctcctaactaaccaaggttagaaaggaaaactttgaagaccacgccatgccccatcaccccacccttggagatgcaggcaggtgtgagacaggtccacagcccatcactgccataataggtgaccatagaagagagggctgtgatctgagtcagcatgaggtcagggaggtccttgtcaacctgaggctggagattgtttgtgtacctgtgggtccaggattgggctgggtggacctctgagccttctctcacccttaaaggcactactcctgtgtgtgaggacatcggacgcagcctcctgacctatggccgccgcatccccctggctgaatgggaaagccggattgcggtaacatggacccctgggagaggttctggagtcttggcc

SEQ ID NO: 13403 - DNA, 1098 bp, Homo sapiens
aatatttagtgtgataaaatatacagtctaaaccaatagtcccttccttaatgatgaaaggataaaatcattgccagaacaaaggcagcgtgtaatttttagaaaggaaaaaataagttgttatttgcaaatgatatgttgtatgcttagacaaaaacaaataattaactgaaaattgagagtgaatttaaggatttgtatgctggtgagaccaggtaaatgtgcacagttagaagtgtccctgtgggtccttgatagccaatcaggagagcaatgatgtggtgtgacgagtcattcggctgcccctgttttccaagcatgactgtgtccccaagcacaggggtcctgctggggcagctctccctgactccaggattcataagtccctgcctggggcttgtactgagtcactcaggtggggtgtgagtagggggctggggagtggtttgtttgtaaccttttctggtggcttcttgaccaggtgggagtgtggattgatgttggcagccgttttgagactgagaagaataatggggcaggctactttttggagcatctggctttcaaggtgaggctcttaaagtctgtctcctctgggcttagggctgcctgttgtccctcctgaggatgaaggtcagaaaaattagcctgattatgggcctcagttgcggggctgatgtctggctggctttcctaaaaggagccacatgagcttaacctctcctgagtgggcacgtatctgatgagcccctgcctgaggccctcagagccaagaggacccaaggaaccataggagccccacttttcaccagagaagccaggcctgtggaacacacgtagatatgcacatgcattttaacaaacccacagacatgggcatgcatgcttgcttatgaaatgttcttctctggtggaatatctaggcatcccttggttgtaaagacccatgttttttaaaggaatgaaaaacatggagaaggattatggggtgggcagggccatggagccatagtaggcaacctagccagctgcaatgtcacaggtatgtgtgcagaattaacgtgtgtgtgcacaccaagagatagcaccactgttctc

SEQ ID NO: 13404 - DNA, 1183 bp, Homo sapiens
acccaccactggggagcaggaggctgccttgggatctgcccccactcctggagtctctcctgttagcctagatcctctgtcgccctcagctgttcctcgtccacgccgtcatcccctcaggagtgaccctcacttctgggaactctggaggcacatgaggaaatcagaggttgatgcccagaggactccgagtcaggcggctctggactcccccaccacatttggcctggctgcttcccttgcctccaccactgctctcgcctcttagcccccagccccttcatgcccactccagggttctcagagtcctccattccgcgcccctagactcagccaggctccttggctgcccaggtgttttctctaagtgcttcaagagcacctactgtttacagatgctatattgagcacttgacagatattatctcatagatttccacatctcaaagagtttgttactacagacttctttacagatgaggaaactgaggcccagaaaagcttgcctctgcctaaggtcacgcagctagtaaggtaagacacagagctcaaactcaaacctgtgcgactccagagcctggacccctgctcagtccctagtctacctcccaaacagccagaccccaaagctagactgcagggggacccaggccgtgggttagctccctctggtccccacccccagcagccctcagtgcccaagccccaggatccccaaacccctgctctttcctccttcctttgtcctctctctgccctgggtcctgctcagttctgtcgatcccctgccccacccctagggcccccttcctccccaagccatctcttaccccacaaacccccagagcctgacccagctgtttctcctccttgaaactcaactctcctcttggcttacaagagacctggaagctcctggttcctccccactcccaccagtccctctcggactcctgtgtatccagctatttcctgggtctgtccgccatccccttccccacagatgcttcacacatacccgagatgaaccaggttccaactcagttcctgtgagccccaccccaaagtgtccacagacaggaggaactcaatgttgactgaatacatcgatgaatgaatgatttatcctcaacaaagcaagcccttcagcctggtatatcctggcaccacttccagcctctcc

SEQ ID NO: 13405 - DNA, 1198 bp, Homo sapiens
tggccggcggggccaccatgtccttatggtctcactggactttagcctcttccaggtctggcctctgaccccggggtagtctgttctcagccttccaaccagatccgccttatttgaccccacctctagtccagctcctctcagttccctccactgcactgagtctgatgttctacccctagttccccaccatatatccttgcactgagcccacccaccagccaagttggtccactctcaagccctctttgtgccagatttggggcctggtcttggggaacctctgtagccagcactttgcctgattcctagaagccccttctagtctctgccccagtctctacccacccccggtcaaaatcaagcaatattaaggtctactgtgggtccaggagggagggggcagcctagaagggctagaagaaggccaagactgactctgggctatgacaggggttcatcaggcccctctccctcagtgctgactgccccacttcctccaggacaccatggcggtggggagtgagctgcagggcctgaaggtaaagcagctccacgtgggaggcctgccccccggcagtgcagaggaggctcctcagggtctggttggctgcatccaggtgggggtcagcatgggaatgtgatatggggcattagggtcaggggtcagaagtcaggggctccttgggacctgaaaggcagtattcaagtgggggttggtgcgagggggtgaatgacccagagttgagagctaggtcaagcctttctgtggcattggaggtgggagtctagcttggattatcaagggcctttaggaatctgtgtcagaaacagcacaattagggtcccacaggggtaccaaattggggatatttttgaggcctgggttttttgagggtatcagaagactgcatgtcaaggatcatcagaccgggtggctggctctgcagtacttgaggctgaggtgccttaacatggtctcaccccttgctggctgtgtgtccacagggggtgtggctcggctccacaccctctggctccccggccctgctaccccccagccaccgagtgaatgcggagcctggctgtgttgtgaccaacgcctgtgcctctgggccctgcccacctcacgcagactgccgggacctctggcagaccttttcttgcacctgccagccaggtgagccttgagagggtt

SEQ ID NO: 13406 - DNA, 1173 bp, Homo sapiens
ggatgattcgtttattcgcttactcaaaaactattgaagaccaattctgtgccaggtatattgtgggtgctggggatgcagccctgatgttcaggtccacagccctggggtctgtgggacagtggggtcctgtccctgtccagtggtggttgcagtacctccctggggtccctgagctggcctgctcttcccacagctgcgcatggagtacctctccctgatgcatgctatagtccgcaccacaccctacctgcagcaccgccaccggctacccgacctgcaggccatactgcgacgcatcctgaatgaggaggagacctcaccccagtgccagatggaccgcatgattgtccgagagatgtgcaaggaattcctggtgctgggggaggctcccagctagcaccttgctgtcctcccttccctgcagctccagtcagtgtgcaggggactcaggggcttggccctaagaatgttttgcactgacagtgggaggggataaggtggcagaaggaacctgagcaggacccccacctgaagtagaacttaagagaggggccaagtgtaggattggggaccatggtctgggagctgttctggggcagggggaatatgcaagctaaagcccctctataccctggtaggcttcctcttcagcatgcccccctcttcaccccacacccatgtgtacactcagagtcctgctgccgctccaggctggaccagacccccatccccacccctcctggtctgtatcctgggcctcagcaagccatgcccctggggtgaggggaggcatctcccaccagctctattctttgccttagctttgcagtgagtgctgctcatgtcctcccctccacccgcacatgggggtcgctgcccttcactcctacccccagaggccttggccaagctgctgctttgaaagcgggatcttggagacaggccatccatcctggagcctcatggaacaggatgatggcactgagaaagccaatgaccgaatctcttttctctgtaaaaatgtagactgaaaagccatgtgtattttcctatgtgctgtagctctcctttggaaataaatcacaggcatctggaaacaggcttccctgtatgatcttgggagacagtgggagaggatgggcagaagtactggggcctcaggaccccatc

SEQ ID NO: 13407 - DNA, 3140 bp, Homo sapiens
gctataagggctcctaggagcagtgtgaaatttccgtaaagataaatttgaatgttgtaaccaagtttatattaaaccaagaggccatttccaatatgattttttgtttctttttaacttgttaagtccctaagagattacatgctagggcttgagtcatttctattgtagataatgatggcccacacagtcaccttcaactatccacataagctaggctttccgcttttgccacggacagtgtgaccaagatatttccagagtaaataacccaccacaaccttggtaattcctcttttcttcttaagctccaggaagcgaaagcagaaggactcttttcagactgccctctgtagcctacattgcagctttccaaaacaggcagctagcactgggaaagcccatgtggtgaccccatatttttctgaggttcttcttttccatggtgttactttattatcagaaagtaaattcagaaaacaggtcttgcccttagcagacaagaaccacaccagtttcttgtaaaggtaacggatacattgggattcaggagtgacacagaggtccagccccagaacttgtaaggattttgtttgaacactgagcagatgcctcctccctgccacccatcacactagttagggctggccatgaattctatgccagagtcactcctgcagtctgctagggatgggccttcttatcccactctcgcacacatcccagtctagtctttgccttcacagagtcctccttgacacccctgacttaatgatagttgctgttttggagtagaattgatcaggtttaagtcatcctgctcaggttgggcatagtggctcatgcctgtaatctcagcactttgggaagccaaagtgggaggattgcttgagcccaggagttccaaaccatcctgggcaacagagggagaccctgtctctaccaagaaaaaaaaaaaaaaaaaaagttaaaaaaacaattagctggacctggtggtgcacactcagtaggctgaggtgaaaggattcctttaacctgggagactgaagctgcagtgagccatgatcgtgccactgcactccagtctgggggacaaagtgggaccctatctcaaaaaaaaaaaaaaaaagtcatcctcctccaactactgattgacatatggatcatcagttcagaccctcactgcatacaggatccctagagggttctatttaatagcttgaggaagggagactttaaaaggacgtgtgtgagtgaaataggatatagccattaccacggtgccaggacctgacagcgttccaattctttttgcagcatggggaatcaaaggtggcatgccaagttcaactcagggctgaggtatccacattgtccacatcaggcaagccctgcactgacggttgagcctcatggagaggagcatgtgttggaaagagatccctttgttaactgttttgtggtgttctcttcaatgaattagagctcatgccccttttctggctttgctgttgattttggatggtagagaatattcctgagagccttccttttggcccccagcttatgccacccactctcttctcttggttgaattctctgaaggaaaggttcatgtgctattgtcctgttagtcaatagtcttcatatataattgtgttacatatattgctgtagactctcagaaatcagggtagagcttttcctttgagcagtttaatgagtgaattcagcagcaaagtcgcaagaaatggttctccagccaggagaggttatgtttatcctctgattgcccgttttctctgcacacagtgatatcgtattcagtgagaggtgctgttggcacccagcagcaccctgggcacacagcatttcatgtcatgtcacagtgtacaagctaccctctaattcagaaagaagagcattttgcacagagaaaaataaaaagatccatgaatgtcatcttttatcttttattttcagttggctgatgttggaatttttgttcttgtcatgaacttgtaaaccaatcttgccaagatacaagttgttttggtttttcactacaatgacctcttgttcctcctgtcttgactgctgacgttcctcaatgattctattgtctattttatgggaagcagccttcccataggtttccttttacacactgcagggctatctttatactttaaaaaaaaaaaaaaaaaaaaaaaaaaggacaagaactgtcactaacctcatggaggggtttgcgtaaaaccatttagcccaccttgagcaaagggtagattccgtgttgtttttttaagctcactgtaataaaataaatctaattcagcattattgtgctacctcaaaggtaaaaaatgttttaaggtcttcttttggtcctgagttctatatacagtgtttgaaatgtccttcatttggaattattttttaaattcttggagtgaattttattttaatctgttttaatcttgtattttaatctcagaagaataagtgattgaaacgtgatcaattcttgctctgtggtgttaaacatataatgaacagtcattaagaattaagtcactgtttgccataaacaaggttgatgttctttttgttgttgttaaggaaaccctagggctcggctttactcttgattaataaaggctgacaaatcatgtctgactttctggtgcagtcttatgttacgtgtttgccattttgcttcagggctccaggccgtcatagcactcctttggcagattcattcttctggtagatctgggattagggtatgagcccttgaaaattagggaccccttgtactagtcagggttctccagagaagcagtcagtagggtgtgtgtgtatgtgtataaagattctttttttttttttttttttttttttagtgacaggatctcactatgttgtccaggctggtttcaaactcctaggctcaagcagtcttcctgcctcagcttccagcttcccaaagtgctggaattataggtgtgagccactgcacccagcctaaagatttattataaggaattggctcacacagttatggaggtgggcaagtcccaagatctgcagggtgaattggctagctgtagacccaggagagccaatggtttagttcc

SEQ ID NO: 13408 - DNA, 1339 bp, Homo sapiens
tgcatgagggaaatggcttgaattcattctctccctcacctctttttaacaatgcagttatggatgtacaagcattcgagaggcttctggggccctgcatggacatcatgaagaggaacatctcacactatgaggaacagctggtgaagatgtttggctccagcgtggatctgggcaacctcgggcagtaggtgtgccacaccccagagccttcttagtgtgacaccaaaaccttctggtcagccacagaacacatacagaaaacagacatgacagaactgttcctgccgttgccgccactgctgccattgctgtggttatgggcatttagaaaacttgaaagtcagcactaaaggatgggcagaggttcaacccacacctccactttgcttctgaaggcccattcattagaccacttgtaaagattactccaacccagtttttatatctttggttcaaaacggcatgtctctccaacaatttaagtgcctgatacaaagtccaaagtataaacatgctcctttcctctcttgctgctactcttgcttttggaagttaccacagggtctgcagaaacctgttgtataactgtagacactctctaatggttctcaaaggaggaaatgtagccttcagtctcctcatttgtcctttgaggaagtccacatttgttcacagttgcagcctttggttttacagtgggaaatggtggtggatgatatggacatatgtagcccagtggcattgtactttctgctgacagctgcacacattacagctgtctccaaacccacagtgatgcttagggaaagaccctgctcaggacccagcaggtcagcaccccagagcagactgataggtccgtgggacccatgttagagcagaaaatttgggctcagcacattttactgttagtagagagccaggaaacgttttctgggttggggattttgtgggattttttaatttttttagtaggttttgtttaacctctgtgcagtttgtatgaatgaattgctatacatttataaggagccagggtctggagggttgctatcactttgtccagcccaaataccttcctgggcaactcctaccatttgtttgcagttgcctctactagctgatggcagtatgctggaaagaggttgtactataaagagagttctttccttctactccagagttgttgtgtagctttgccattgaaccgatcaatttttaaactctttaaagaagcagcagctatttttttgaaattaaagaaaattctcaggccaggctcaatggctcatgcctataattgtagtgctttgggaggctgagctgggaggatcgc

SEQ ID NO: 13409 - DNA, 1231 bp, Homo sapiens
cctatttttcagacacctaaaagtaatgtctgtgaaacagtggttttctttttctacatattacagcaggaagtgttcctatttatgtactgtctgtatcaatactaacggggcatgataagcaaaattttaaactttggtagttaaacctttatgttgcctcccctctgggctgccagctgtggggatgtgcttctcccttaaggactttggcaagaataacaagttcattggaatttgactttctgacatagagcagacagccttgccctgtcatgccaggcctttcatgtgaagttaccatttattagctgcttctgtctctccagggaaggatttcccttttataagcctgggccagggggatgatagtaagattccccatgtgataccagagttggaataggctgtagtgagattagggccaggactgtcccattttgattcttgaatggtttctgttacaacttgtcatggggaaaaagtaacacttattttttttttcctcccttagaagacaaaaatactaatgcatttgagaaagcggtagttttggggggagggggaaaaagcaactgctttcctgatctgcaacttggctggatgctaagatgtcagtggacatgaatagccaggggtctgacagcaatgaagaggactatgacccaaattgtgaggaagaggaagaagaagaagaagacgaccctggggacatagaggactattacgtgggagtagccagcgatgtggagcagcagggggctgatgcctttgatcccgaggagtaccagttcacttgcttgacctacaaggaatctgagggtgccctcaatgagcacatgaccagcttagcttctgtcctaaaggtgagcagtgttgtaaactccagtgtaatcccccccagttaaatctaaggatgagctgttgttaattaatgtctcctccagactaattgaatggccttgtagcttgaaaccaaatttaagtgtatgtcaacatcatttggacattttgttacatttactttgttttctaatatatgcatgtctaaggtcctcagattcccaaattagtaagaattagaaagtaggggtgggacagattcaagaaagatgtaccataccagaaatgtgtagtagcagaattgcacaactttgcacgtttcaggaagtgagttttcagaattttatgaggttgatacaataagcatcagaatcaccatcttctgtac

SEQ ID NO: 13410 - DNA, 1149 bp, Homo sapiens
aaatgtgttttttaaaatagaagaaaaagggggaaagcctttattcttagtttcatatacaaaaatctttctaggacaagtgtgagggtaggaagcagtagggaggtcagtttgtactgatgatgtgcgtttaagacagtcaggtcggcctcagttggactagttcctccttcttatagtggcattgacatagcagaccagtagtctgtatggtcagcatctgcctgtgttagattaataaggcgcatggcacatgtgctcatggaatagaaattatccataggcttttgttcctatcagcaagtacaggctacaaggacagtaggatgtgacagggatgagaggtgcacattccttcgggaaagaggcacccttgggaagttgtgttcaggtgacccctttgggagcagggtctgtctgtctcactcctctgcctatggaggaaagtggagttgtcttgtagatgtaaatgactcttcctctgttctgcacagacttctgctggatgtgtctaggagattggaagactcatggcagtgaatactatgagtgcagtcgttacaaggagaatcctgacatcgtgaaccagagccaacaagcccaggcgagggaagccctcaagaagtacttattctactttgagagggtaggtgtcctctcctgtaccttcccctacagggtaggcttcttccacttggcctgctggtgggattcccagggactggtagacagagctagcctgtgcacatagaagtcagtgaatggagctcctgcagtatccctggtgctgcctctatagatgtgcctttcaagctctatagggtatatccccagccaacagggaaggacctggtactgaccttggttgaatgatggattgaaggacaatgaagggccatcagacagtcttttccatctagtaccatctttttttttttttcttttttctacgtttttaatttttatttatttttttctttctgtcctcacaatctgttcccatagtatcatcttagtagtcagatttggaaggcagtttctcccagggagccctttagaagcccaaagagccccatgcataatggtctctaagcatagtagaccatcaggggcctagctttgcagagtcctcagggctcgagtcctgtt

SEQ ID NO: 13411 - DNA, 1808 bp, Homo sapiens
gggtgttgttgtctctggtggtgctgcatgtctgtggctcacctttattcttgaaactgaggtttacctggatctggctactgaggctagagcccacagcagaatggggttgggcctgtggccccccaaactagggggtgtgggttcatcacagtgttgccttttgtctcctaaagatagggatctacttttgaagggaattgttcctcccaaataaatttgctttaccttggtcctttcttttgtgccagtattcaagtggtatagctctgagcagggtcacatttggccaaacctgacactgtcttgctgcattctcctttggcaaacatcagggtcagaattcaggatagcccttcctagggcactggactttctggcatgggggctgtgtttgcacaagttattttcatgttacctggagagtgtccagaggctgctctgaggctgaggtgtgttcccccttgcctggttccagctgtcagagggataccatcctagggtctgggaatccaaggccacgagactccttggtttgtggtccgagatcctgtactaaggagggtctggccagaggaacagaccagcttttgcacaatgaagcgcaagggaacaagtggtttgcctggtgtcctacctgtcctgaacctggtcctgtgggccattgaaaagttagatctgtgatctctggggtttttgtggctttgttcaatgcttccactctagggcaggcagagcagtctatactctcccaagcctgcttgacctccaagtagagctgatacagagatctgtgaatattgtgatagaaattctttggtattcatacatttcagctgcaagtcagcaatttcccaggtaccatgtaagctataaaacagtcattcttaaagacagaggatagctgtgactcatgggatcatgaggtccatggctggttgcaggttccctttttccttcctcaggttttgtctcttcctgtgttgtccccagcaagggagagactgtggggtggattgggagaacagattaggagtatagcaaatgaacccagaatggaacagtggggagctaactgtgaatgaggagagtacctgctgcaggacctggaggtcaggtgtgaatgctgtattggcacagggaataaatatcctggcgtctggagccttcacctctccgtcaagtccttcctgtgatactgccatggcacaggatctgagttgcagctctgcaccctaaatcacaccctgggcattgtctgggctgcagggctgccaggttctgtacttgtgtccagctgtggccctggatgctggagctggagggttttctgtgctcagactgtagcctgtagctcttggcctgtgtagagccccctcctgtgccctcagtggctgtcgtttgttaacatcatcaggaagatgggaaaggtcaggcagaatttttctgccctacaaagggtggaagagaaaggacacagtattttcatgaatttaccatatatctttgtttttcttcaacgaaaaagttaattgaggcaatgtcatctgctcaaagttgagtggtttattcacaataaactgtaagtttctgattataaaaatgtgtctagagtctttcttcatggggtctaggtagtcttctgagcccacaggggtctggccagtgaacaccagaggagtgccttcctatcagtcagccccttcttccagagggctgtggaggccccagtggccaaactcggctctgttttccctttctggctgttgggggagagggcacctgtaagtgatccctgtggaatgaag

SEQ ID NO: 13412 - DNA, 1236 bp, Homo sapiens
tggccaccgttgtgcccttgggggtcaggggcttgaggtttacaactggtatgactgaggtatcctgcggtggctggcgtgctgggcatggggcctgctcacagacagcatggagcagggatgggctgtctgtgcccatgctcagcatgccttgaggggaggaggtggtggccgtgggttcctgatgtcggtgcaggagctgaaggtgagtggagtgctgccaagaatatgcccgactccccatgacaagacagaactttgtaacaaacagtaccaatttattttggccgtgggtttttgctttttttccagttgatgactttgtgaacattcccaggtattggagcctctgtggccttaaatgtggctcagtggagggagacccagcatagccaggccagtatggagcacctcacgcacagctctcagaagctgcaggcggacgaacatctgaccaaagaggtgtggtcgaggctcctgaaagagaaagggcctgctggtctcatcctctgcttcctttgcctttaccctatacctctctgcacgtcccaccccattttgctgtgtgctcacccccaggatgtgtacccggttgtagtaggagctgaaatccatgctgagctgtaccaggaacttgcatatctagagacagagactgagtcactggcccatctctttgctcttgtgccccaggccagaataaagaatagagtgtagagtgtcctggttgtctatgcctcaccatctctgtgcgtacagcaatgtggagccccggggctgtgcagtccagcactgctgtccggctcagcagatccggaaaggggaggatactgttgaagagcaacaaccactcaccctgttggggagaaaggtgctgggaggggaagtccaggcctccttgtgccagctaccaggagggacactcacctcatcatgtagcagtgagaagtccagactgctcacaggaggaaaagtggggtacagaccttgttccatactacacttgtaactctcaaagagtgtggcaagacgggcacaattatacatgacaaaggtgccactctttgtgcccttcgtggagatactgctgtcagccagagccaggaagagctggggaatagaagcacagctgcagagagagaaggcagccaccacaccctgtgccccaacactggccctgtcaggctcccaggctcacctgactctgtggggctgtgctcagcatctcaaacttga

SEQ ID NO: 13413 - DNA, 1180 bp, Homo sapiens
atcatgaggttaggagtttgagaccagcctggccaacatggtgaaaccccgtctctactaaaaatacaaaaaattagttgggtgtggtggcgcgtgcctctgagctcagctacttgggaaggaaagaaaagagttaactggtcatagtcgatgactggcccttcttcacatctcacctcccacgtagataatgacaaagagggaagacttggtggtagcccctgcaggcatcacactgaaggaggcaaatgaaattctgcagcgcagcaagaagggtaagtcctagagctgggaaagggcctggaactaatgcctagggtcctgattcatgtcctgccctgaccacaggaaagttgcccattgtaaatgaagatgatgagcttgtggccatcattgcccggacagacctgaagaagaatcgggactacccactagcctccaaagatgccaagaaacagctgctgtgtggggcagccattggcactcatgaggatgacaagtataggctggacttgctcgcccaggctggtgtggatgtagtggttttggtgagctgctacacaggtgggttggggcaataggggcagctgccacatcacagtctgagacttacttcttgtcctaggactcttcccagggaaattccatcttccagatcaatatgatcaagtacatcaaagacaaataccctaatctccaagtcattggaggcaatggtaaggcaagattgtgccctgaaggatgtgtggtgggagtgggtaagctgggctcccaccttaaccttcacatgagcattttcctttccttcaccatagtggtcactgctgcccaggccaagaacctcattgatgcaggtgtggatgccctgcgggtgggcatgggaagtggctccatctgcattacgcaggaaggtaagaatatactttgatagggcccacagagaccccagtttcaggccccacataccttggaaccaagcactcttatggggacaatagagccctccaataggggcaaccctggggccaaattggcctcttggatgggtgacatggctggaagcaagacaaggtcttgtcatccatcacctgccactcccttgcctagcctggccttcttgctcctgctctgcaccttctctaaactctggtctgtttgttttatttagtggctcccaaga

SEQ ID NO: 13414 - DNA, 2722 bp, Homo sapiens
tattggtggtacccaacttttatccgcatattcttcagcccccagagtgtgaaaggccggaatgacaccttttacctgacacctgagccagtggtggcccccaacagcccaatctggtactcagtccagcctatcagcagagagcagatgggacaaatgctgacgcggatcctggtgataagagaaattcaggaggccatcgcagtggccaatgcaagcactatgcactgagatgccttggccatggcacaagagaaaccagccaggaaaaaccagacagactttcacactaaagaagaggcctccatttttttttttcttttttttattggtgtagttacgaagcctttcaggctgcttctgtttaaaatataaaagaaaactttgccccctttgcatcttcataaacctgctgcggcagactcctcagccgatggtggctctgggtttccttgagtgtcatatgtcctagaaagttgctggctgactcttttttgtctggggcctggggaaagggcttggactgtgaaaagaaatgtggcccctttccatcttcaagagagatggaattaatgatggatggaccctggagggaatctccccagccgacttccactgggctgacagactttgctgaccacaggggaacgatgttcttttctttcttcatgatcagacataaacttagcatcttaatggaagaaaaatgaggggaacttcaattatgatttattaaagacaatttctattacaccctcctttatgacaagtgacattttagatgtaaaagtaaaaactttaccatgccttttttttttttgttggcctaacattgaggccttaaaacctgaggctcctgtgcctgatggaattcttgtaacatacacttgtgtatcatataaagataccactctgtttctcttatgtattcttactctagttgtttattaagaatgacaagcacgtcttttcaacatgttagtgaacaacgtctctttattttggggaggagcccggcgggacagtagaagtaaacccttgcctgttaattgaactggccgaggtcctgcggggagtgtggggtgggacgtgaagtggcagctcctcagtgacaaggccactatgtgctatacgcatgcgctgtttcttcagcgccagctccgcccccgccgcagcgaggcgggtaggttccgcccgcgcgcactacgccctgacgtcagcgtcgcgcgcagcgcagtgacgaaatcggctggtttatattggcgcggcccagacggcagaggtctctgcggcgcggtcctcggagacacgcggcggtgtcctgtgttggccatggccgactacctgattagtgggggcacgtcctacgtgccagacgacggactcacagcacagcagctcttcaactgcggagacggcctcacctacaagtgcgggcctatggggctcacctgggcgaagagaggggcggcaccctggggaaaaggccagatgggggcttccgagagccgccttgggcgtgggcgtgggggacaggtttcgggaattggccacccacctccggggctcactttgagacatctggagcggtgcttggggtacggagaagcatctcagtagtgcttggaatctcaggccggagattccatgctccagacacatggaattgtcagggtgccaggagcactgatgacagctcggtggcagaaaaggtcccctgtacccatttccaccttgtgctgtgcctgtgacacacagactctgtcagtgccactctctgctcacatgcgttacgggttgattggtacatggggatggagtctcatgctgccctaagctgagagctttactcccaattcactcccttccctcgcagtgactttctcattctccctgggtacatcgacttcactgcagaccaggtggtgagtatgatcaggaattgggtcctgaacatcaaggtgagctaaggtgctactatcacctggtctctgggctaactcaccagattgggcttgggggtggattttataggatcatgttgcttgttagcatgcaggtcatacaaaagtgcctttttgtgggggactcagtaacaccttgaggtgtaagggatgctttcccacactggttgacgtttgtctcctcaggacctgacttctgctctgaccaagaaaatcactcttaagaccccactggtttcctctcccatggacacagtcacagaggctgggatggccatagcaatggcggtgagccccatggggtgtgggggaaggagcaaggactccatcgcctttccccaaaggcattcagtcctgcttcttgtcacttagtagtagtctctttttatcctgtagcttacaggcggtattggcttcatccaccacaactgtacacctgaattccaggccaatgaagttcggaaagtgaaggtcagaagggcaacgatcattagcaagcgctcctgggaattgcactgaggtggggtggggtgggagtaggggtttattctaatttagtattctttcttcccaccatggggttcagttactgagaagaccctgagattctgtttcttaaagcagcagcaatagaccaggtgtacagtgcctccagcctacccatgtctctaagatgtgttggtgtgatttggtcttgtggcactgccaaagggatcgataagcagagaccccatgcttcagatcaagagcctgatgaa

SEQ ID NO: 13415 - DNA, 2722 bp, Homo sapiens; identical to SEQ ID NO: 13414

SEQ ID NO: 13416 - DNA, 1175 bp, Homo sapiens
cattgggagtgagtgtcttggaagaagagtgggctgtgtctaaaatgcaatggtactaaagtaacaggaggacaaaatgccagaaaagtggtgtctcctgtcttggggacaagagagcaacatctgtaatagtatgttgaattcaagcctagtaacaagcagtactgaccttgtgtacataataagcaggatatgtggggtttgcccaaaaccaggcatttttagacatacgggtttcaggagttgaccctaccagacctaagcagagtggcttctgggaggaaatgggaaccagggataggcactcaagcccttctttcttggcattaggctcatatactcatgttataggccagttctgacattacaggcatgaaacattctagtagatacaagtgagcatttctatcccagcaccctgatgggcagtatctgttctgagccttccagatatggacccccaggaccttcattcatttttgaggcttccgttgcagggcgccaactgctgcgattccaggaagatctcatctcctctgctgtggcagagttgaattatgggctctgtctaatgacacgggaagctcgaaatggagaaggtgaaccctatgacccagatgtgctctactatattttcctgtgtattcaaaaggtaggaaacagatcttcacaagaacatgtttgagctgtgttcctattggatgtttgctagtttagttaataaattgataagcaagaagttaaaataaggaagttctctttcaggtatacagtgagttttaaaatacacatttgttgttttttttttttttttaagttttaaaaacctacacgttcactttagaaaataacagccggggccgggcgctggtggctcacgcctgtaatcccagcgctttgggaggccgaggcaggtggatcacttgaggtcaggagttgaagacgaccagcccagccaacatggtgaaaccccatccactaaaaatagaaaaatttgccaggtgtggtggtgcactgcctataatccctgctatttgggaggctgaggcatgagaatcgcttgaacccgggaggtagaggttgcaatgagctgagatcacagcattttactccagtctgggtgacagagcgagactctgtctcaaaaattaaaaaaaaaagaaaagaaaagaaaa

SEQ ID NO: 13417 - DNA, 1173 bp, Homo sapiens
caaatccagaccgtgggtgccctttccccaccaccatcccagcagggctcaccccgggaaggggagcggcgggttggcacggccagtgtcctccaaccagtgaagaagcgcaaagtggacatgcccatcactgtgtcctacgccatctcagggcagccggtggccaccgtgctggccattccacagggccagcagcagagttatgtgtctttgaggccagacttactgacagtagacagtgcccacctgtacagtgccactgggaccattactagccctacaggagaaacctggaccatccctgtttattctgcccagccccggggggaccctcagcagcagagcattacccacattgccattccccaggaagcctacaacgcagttcacgtcagtggctcacccacagccctggcagctgttaagctggaggatgacaaggagaagatggtgggcaccacatctgtagtgaaaaactcccatgaagaggtagtgcagacccttgcaaactctctctttccagcacagttcatgaatggcaacatccacattccagtggctgtgcaggctgtggcaggcacgtaccagaatacggctcaaactgtccatatatgggacccccaacagcagccgcagcagcaaactccccaggaacagacaccaccaccacagcagcagcagcagcaactccaagttacttgttcagtaagtgaagacttatcagtagggcaggcagcctggtccctcagggcccagtgcagcacagagcttgcctcgcaacctctggcttatttactgctgttactcttacagtgatgcagtatttagtatttgggagaagagggggagaaacatcacgtgaggctatgcaacagaaaaaagagtttatcctggtacctggaggtaaatgagatggccaggaattgctttggagttttggagacattttgggtttaagtaccatggacacttctttgtaatctcttctcaggaagagtaaagttacaggtgtagatgaatgggacacctcaagtgtgtcccagtgctgtttccttgtatcataagtaaatggttttagcaaaacacttgtagtttatcacatagattacaaactcatcactggagaggctgtgagattgttcattctgtttttcatctttgggcacacagtgt

SEQ ID NO: 13418 - DNA, 1092 bp, Homo sapiens
tggaaataaaacatatccataggaatccctgcccctagcttcctccttgcttggtgtcctctctgtgatggtcacagagcagttttgcatgtgacatttactgtccagtgcttggctctgcagagaagatgggattgacctagtgctgggtaggaagtgtgttttcagcctgtttcatccagtattgtgaagcatgtgtttgtttttttgttttcagtgtgatagttttatttaagaaatgttaatagaaataattttcaaacatccattaattgaaaaaataaggtggtataataaaactttattttttgattctatatgtatacagctgccctgaatatattccactcttgtgcaagggtaattgcttctgggcatttcctgctaaaaacagtaacataattttgacttctgtttatttctaggaaccctaaggactctgcaatatgaataattccctagagaacaccatctcctttgaagagtacatccgagtaaaggcacggtctgtcccgcaacacaggatgaaggaatttctggactcactggcctctaaggggccagaagcccttcaggagttccagcagacagccaccactaccatggtgtaccaacagggtgggaactgcatatacacagacagcactgaagtggctgggtctttgcttgaacttgcctgtccagtcaccaccagtgttcagccacaaacccagcaagaacagcagatccaggttcagcagccgcagcaggttcaggtatatgggaaatgctgaggtgcagcctgtttaatgtactttatttgttgtcagtgttttagttagtgggctcatcacatctatgtggatgttataggttatttaacactaagattttcaaagttaatgtggactaaaagttttttctttcttctcctttttctttaagcttttttttttttttaaacaaaccccagtgtcaaggactgactttgaatagattgcagccagggatctgcttagctacctaggaaaccccaacccagaagcgggtcatctatgattggtttagcatcaggttcaacgtgacttgcgtgatgagtgagggggcgccacc

SEQ ID NO: 13419 - DNA, 1096 bp, Homo sapiens
agtgggaggggcttactttattatattaaaggcccacctttgcctcagccaaaaagttggccttaaacaaaatggaacaacctgagaatcagtgctttaccttttttgaaattgcagaaatcccagcagaaattactaaaatctgatagtgtatcactgtaaaagtcacttttggtgtaggatttcagtccttttcagctctttttttgaccctgccgctgtgttttggtgtcaaggaagttctaggtttgttctagagaaataggcacctcttttttctaatacaaaacatctgctagtttgatttacagtcttgctcaattaagcttaaggaataggaagctaagaggaagtaaaattagccatcaaatttgataatggtggggtagttctttctaatgtactgtattgtttttaagaacaaagttaaaattattaataaaaagaggctgaggatggaaggaacttttttgttctatcttcttcagaatattagaagtcttaagaactcaggacaagcagcagaaatacatgcaacatggtgactggtgagttaaaattgttcatatcctggaagtatctgtgcacagttttttttctggtaatactgaagcattacaaatcctgtcaattctgggtgctgtcttccagaaactattaggtgctgtaaaatgaagatgtgggagaacggcatctttgaattcagccacagttcgctacttgctcagttttctcctcttaggatataagtcagtggaacccgcagatttaagcgtttgcaggctcagcttttaaacggacctaaatggttcaaagaaaagctgtaaagtttttctaggatacacttaaaattttgactttttttttttttttgagacggagtctcactctgtcacccaggctggagtgcaggggtgtgatctcggctcactgcaacctccgcctccctggttgaagcgattctcctgcctcagtttcccaagtaactgggattacaggcatgcagcaccacacctggctaattttttgtatttgtagtatagacggggtttcaccatgttgatcagactggtctcgaactcctgacctcgtgatc

SEQ ID NO: 13420 - DNA, 1102 bp, Homo sapiens
ggtctcgatctcctgatctcatgatccgcctgcctcggcctcccagagtgctgggattacaggcgtgagccactgcgcctggcctaatttttgtatttttagtagagacggggttttgccatgttggccaggctggtcttgaactcctgacctcagattatctgcctgtctcagcctcccaaagtgctgagattacaggcgtgagccactgcaccagcccaccctgtctttcttactccttaaagtagggggcaaacatggtggttgttataatccatataaaactataccctggacccccacggtggttgttatggtccatataatactatagcctagagccccattcagtcccttacccaaagtcacaaagttattgaggacccgggcctcctgacccttagtccctcggcttctttggcttaagaaggatgttagggggaggtgtctgtggtgaaacctgcccaggcctccctggccttgttctgggttggtggtcatccttttccctctgccctccagcttgtctttaaccgaactgtcacactgaaggaagacccaggaaaggtgtgagctggaagcactgaacctacctcatcctcctggagggtgtggctaccctcgccaccccaaattccatgtcaataaagaacagctaaattctcctagagtctgtgtgttatctctgcacttctagcatctgaaggccctgaagacatgctggtggtggtggtatgattgggggatggagatgtgccttttgcacattttgtctgtgagaatggactttcccagaacagagtggtactgacagctttgaaagcaccggtgcactttttggtgcttaaaggcaggggcctgggtaggattcataccctccgcacctggtctgagagaatggagggccctggggtgtttgtccatggttaggacccctgtgccagagggatctaaaaggtttgtttctgctggtgtggagaggcctagctcccagtctgatcattcagcatataattttttttttttttttttgatacggagttccactctagcccaggctggagtgcagtggctcaatcttggctcactgcaacctctgcct

SEQ ID NO: 13421 - DNA, 2278 bp, Homo sapiens
atgagatgctcctgtgcttagagacagcctgagtccttgttcccctcaggcaatgcgcaagggcaagttttcagagggcgaggccacactacggatgaagctggtgatggaggatggcaagatggaccctgtagcctatcgagtcaagtatacaccacaccaccgcacaggggacaaatggtgggtgtagaatggggtggggtggtggggctgccgagcagggcgatgggccatggggtagggcagagtagggctggatggtagggcccactgcctatgccccacaggtgcatctatcccacctacgactacacacactgcctctgtgactccatcgagcacatcactcactcactctgcaccaaggaattccaggcccggtgagggagctgggtccatggggtggtagggccagtggaattccagcagcccttcctgtggtctctgcctggttccagagctggccagtgctaaccctactctcccaccccagacgctcttcctacttctggctttgcaatgcactggacgtctattgccctgtgcagtgggagtatggccgcctcaacctgcactatgctgttgtctctaagaggaagatcctccagcttgtagcaactggtgctgtgcggtaggtgcggctgtttggcttatgaaaggttaatggcatatgctcccaaaggccttctcaccaccttcttatccacagggactgggatgacccacggctctttacactcacggccctgcgacggcggggcttcccacctgaggccatcaacaacttctgtgcccgggtatagcccagcaggttgggtagatacattgggggttgagtgtggcagtttgtgattgtagctgtgactgatgctgaactttcctgccaggtgggagtgactgtggcacaaaccacaatggagccacatcttctagaagcctgtgtgcgtgatgtgctgaatgacacagccccacgagccatggctgtgctggagtcactacgggtcatcatcaccaactttcctgctgccaaggtgggcctgcctcaacatgtgtgtcacatgtgtgtgtgtagctgggggtacacttggctctgggcatgggggtcctaatgctgagtatgactcatacctgtctcctgtctcctgctatagtccttggacatccaggtgcccaacttcccagctgatgagaccaaaggcttccatcaggttccctttgcacccattgtcttcattgagaggactgacttcaaggaggtaaattgtgggggtggagggtcccgtttgctgctgagtctggtactgggaacctttcatctcctcatctctgtcagtccatctacttcctgcttcagatgaaccaatctttgccagacacgggggtagggaagcttccccacttgtttgacccttgcagcctcatgtgtctaccccacttcctatctctaggagccagagccaggatttaagcgcctggcttggggccagcctgtgggcctgaggcatacaggctacgtcattgagctgcagcatgttgtcaaggtgagagccagctgcagccttcctactgcagtgcctgctggggccaagatgtgagtatagcctgcagtcctggttgtggttcccgggtctaattgctgctcccctccccccacttccagggccccagtggttgtgtagagagtctggaggtgacctgcagacgggcagatgctggagagaagccaaaggcctttattcactgggtgtcacagcctttgatgtgtgaggttcgcctctatgagcgactgtgagtgaacagagctggggtgggggcaggtacaagatgcacattgcctgctatggctgcccagctgggggtatgaccttcactttggctgcagattccagcacaagaaccctgaagatcctactgaggtgcctggtggatttttaagtgacctgaacctggtaggttcatgaggtttggggtgagggaggtaggcctccctggttggatggttgcctgagttccctgcctgcaggcatcactacacgtggtggatgcagcattagtggactgctctgtggccctggcaaaacccttcgacaagttccagtttgagcgtcttggatatttctccgtggatccagacagccatcagggaaaggtgcttgactttactcacctgccctcatctgcagcagtgacagtggctgccgttcattgtgccaagtgctctgcatacattcccttagttaatcctcaccacctgagggagttggtattcatattctac

SEQ ID NO: 13422 - DNA, 1272 bp, Homo sapiens
agaccggaggacggcaaaggatgtggtggagaatggtgagaagcttgagactcctgtcacagcattcagctccctgacttctgaacctcctcagaagagtccttacaggctcctcaggcccttggcttactcagtaccctgacttctgtctcaagactgggattcctggtgtttcttttgttccctttgcccagagactggcatgagaggcctcagatgtctggctctagatatcttgtctctggaattgagggaataggggtctactcagttctgttctggctgtaggatatggtaaatgtatctagaggacaagttttccttgttttgttccccacaggcgagactgctgaccagaccctgtctctgatggagcagctccggggggaggcccttaagttccacaagcctggttagtgggcatgtcaaaaccctggggagggctggatcttggcagcagctcctatagtcaggcccctggggtcagaggctttggctgcagcctggtccttaggcttattctggtcctggcaggtgagaactacaagaccccaggctatgtggtcactccacacaccatgaatctactaaagcagcacctggagattactggtgggcaggtgtgtggggatgtggccatgtgagcttgtgccatcaaacacctgcctgagtgcctgggctgcgtccatactgccccatctcacccatcaccatggccttcctgggagggaacatctgtttctttaaggtcatctgagctcagactttatttctcttttcccatcccccttattttaggtacgtacccggttcccgccagaacccaatggaatcctgcatattggacatgccaaagccatcaatttcaactttggctatgccaaggtaagcatgtgtctagggacctggcaagcaagatgaccacttgctgttcccatgagtggataccatatccctgccttgctgtctgctcccaataatgtacccaggtgggcagaggccatggaaaggaaccacatgtgtgacagatacctaggaatctattgagcttattggaataaatagctccctccctctgaggagtcagtgagttcaaatttgggggagttgccagtgcagtccctaggcttagaaagatgctaggttagatacaggaaggtgagagaagctcttgaagacatttttaattctgacatgagtccgggttgggtggctcacgcctgtaatctcaacacttcgggaggctaaagtgggtggatcacttgaggtcag

SEQ ID NO: 13423 - DNA, 1102 bp, Homo sapiens
cacctagactcccactactcacactcccctgagaccctcccccacccacactcccctcagaccccctcccctggctctggctcagctctgccttgctcctagcctgccagtgcagccacgagggggcactcagcagtctctgtgaaaagaccagtgggcaatgtctctgtcgaactggtgcctttgggcttcgctgtgaccgctgccagcgtggccagtggggattccctagctgccggccatgtgtctgcaatgggcatgcagatgagtgcaacacccacacaggcgcttgcctgggctgccgtgatcacacagggggtgagcactgtgaaaggtgagactggagcagctatgagtgggttggttggtgggcaggcttcccagggatgacacatttcttcttcctcctccctgcaggtgcattgctggtttccacggggacccacggctgccatatgggggccagtgccggccctgtccctgtcctgaaggccctgggagccaacggcactttgctacttcttgccaccaggatgaatattcccagcagattgtgtgccactgccgggcaggctatacgggtgagtggatgggggcaggcgtgggatcagggtgagttggctgggctgagcactcacagcttcctcttaaccgtgggcagggctgcgatgtgaagcttgtgcccctgggcactttggggacccatcaaggccaggtggccggtgccaactgtgtgagtgcagtgggaacattgacccaatggatcctgatgcctgtgacccccacacggggcaatgcctgcgctgtttacaccacacagagggtccacactgtgcccactgcaagcctggcttccatgggcaggctgcccgacagagctgtcaccgtgagtatgagtgtgggagggcatggctgaattggggttctgcttcttggcctcctcttgactactgtgctcatcttggttggcacaggctgcacatgcaacctgctgggcacaaatccgcagcagtgcccatctcctgaccagtgccactgtgatccaagcagtgggcagtgcccatgcctccccaatgtccagggccctagctgtgaccgctgt

SEQ ID NO: 13424 - DNA, 1118 bp, Homo sapiens
aatcgcttgaacccgggaggtggaggttgcagtgagccaagatcgcgtcactgcgctccagcttgtgtgacagagcaagactgtgtctcagaaaaaaaagaaaaaagaaaaaaaagaaagttgaggccgggcttggtggccaacacctgtaatcccagcactttgggatgctgaggcgggaggattgctcgaggccaggagtttgagaccctgtctctacaaaaaataaaaataaaataaaaaggtaggaccagatggcaatttgaatttgtataatttcagcagttcttcagaaagtactctaaagaattaagaataaaatgaagcaatgtttggaagagaaagagatggcctagcccccatgctgctgcctgtgtattgaggaggatgctgacatagaggtcctgcttatttgctctgcttctgactcatctgtaccctgacctcaccatacattgtttctagaagggctcctctgcccctagtgatgcctgcttctcctaatgcatttcgcaccctttgtggggcacccctgtgaccttgaccatctctgtcttgcagtaccgtgtgactgtgccgctgatgggggctgtgtccgacctgtgcgaggctctctccaggctgtctggcattgctgcagaaaatgtaaggcggggtgatcagtggcactcggtctatttgggatacttcatagcatttggagtttactttcaaccttgaagccactttttggggttgttgttattgccagcacaaatgtgattatttgtgtgtgtctggatgcctcactcactatgcacattgtgactgagactgtcccttccagctccaggaaacactatctttccttcattgggttcacactagccgtggtcaaaggaccaggagtagggctctgctgtcagatctgtgcactgagggtggcatagagactgcagactatggaatactccagaggctctggacaactgctggtttctggttagcaccacactcctcgcccttcctgccagtcgagggcagatgctaccagcatgttcaattctgatggcagccatgctgctcccccttgggccttggccctcagctctctggggctgtttgtgtggtggtttctc

SEQ ID NO: 13425 - DNA, 1821 bp, Homo sapiens
acctctgagaaaaaacggagccctcgagggccccagcccttggaagggtaacctggaccgctgccgcctggttgcctgggccagaccagacatgcctgctgctccttccggcttaggaggagcacgcgtcccgctcgggcgcactctccagccttttcctggctgaggaggggccgagccctccgggtagggcgggggccggatgaggcgggaccctcaggcccggaaaactgcctgtgccacgtgacccgccgccggccagttaaaaggaggcgcctgctggcctccccttacagtgcttgttcggggcgctccgctggcttcttggacaattgcgccatgtgtgctgctcggctagcggcggcggcggcggcggcccagtcggtgtatgccttctcggcgcgcccgctggccggcggggagcctgtgagcctgggctccctgcggggcaaggtactacttatcgagaatgtggcgtccctctgaggcaccacggtccgggactacacccagatgaacgagctgcagcggcgcctcggaccccggggcctggtggtgctcggcttcccgtgcaaccagtttgggcatcaggtgcgccgggcggagcggggcggggcgggggcggacgtgcagtagtggctgggggcgccggcggtgtgctggtgggtgccgtcggctccatgcgcggagagtctggctactctctcgtttcctttctgttgctcgtagctgctgaaattcctctccgcccttgggattgcgcatggagggcaaaatcccggtgactcatagaaaatctcccttgtttgtggttagaacgtttctctcctcctcttgaccccgggttctagctgcccttctctcctgtaggagaacgccaagaacgaagagattctgaattccctcaagtacgtccggcctggtggtgggttcgagcccaacttcatgctcttcgagaagtgcgaggtgaacggtgcgggggcgcaccctctcttcgccttcctgcgggaggccctgccagctcccagcgacgacgccaccgcgcttatgaccgaccccaagctcatcacctggtctccggtgtgtcgcaacgatgttgcctggaactttgagaagttcctggtgggccctgacggtgtgcccctacgcaggtacagccgccgcttccagaccattgacatcgagcctgacatcgaagccctgctgtctcaagggcccagctgtgcctagggcgcccctcctaccccggctgcttggcagttgcagtgctgctgtctcgggggggttttcatctatgagggtgtttcctctaaacctacgagggaggaacacctgatcttacagaaaataccacctcgagatgggtgctggtcctgttgatcccagtctctgccagaccaaggcgagtttccccactaataaagtgccgggtgtcagcagaactgtgtgtatgtcctgtgtcattgtcatttgggaattctttttcttttctttttttttttttttttttgagacggagttttttgctctattgcccaggctggagtgcagtggcgcaatctaggctcactgcaagctccgcctcccgggttcacgccattctcctgcctcaacctcctgagtagctgggactacaggtgcctgccaccacgcccggctaattttttgtatttttagtagagacagggtttcaccgtgttagccaggatggtatcgatctcctgacctcgtgatccacccgcctcggcctcccaaagtgctgggattacaggtatgagccaccgcacccggcctggcgatactttttctaacctcattgtc

SEQ ID NO: 13426 - DNA, 1947 bp, Homo sapiens
cagcctggccaaaatggtgaaaccccatctctactaaaaaattacttgggcgtggtggtgggcacctgtagtcccagctactcgggaggctgaggcgggagaatcccttgaacccaggaggtggaggttgcagtcagctgagatcatgccattgccctccagcctgggcgaccgacgagcaaaactgtctcaaaaaaagaaaaaaaaatcttttagatgaatttgaatactttttacttactatatgtatgccacactattagctaaaaggactatttttttttctttgctaggagccggtgaaacctgaagaaggcagagatatggcaaacaggattggcgcttttgggtacatggagtgttcagcaaagaccaaagatggagtgagagaggtttttgaaatggctacgagagctgctctgcaagctagacgtgggaagaaaaaatctgggtgccttgtcttgtgaaaccttgctgcaagcacagcccttatgcggttaattttgaagtgctgtttattaatcttagtgtatgattactggcctttttcatttatctataatttacctaagattacaaatcagaagtcatcttgctaccagtatttagaagccaactatgattattaacgatgtccaacccgtctggcccaccagggtccttttgacactgctctaacagccctcctctgcactcccacctgacacaccaggcgctaattcaaggaatttcttaacttcttgcttctttctagaaagagaaacagttggtaacttttgtgaattaggctgtaactactttataactaacatgtcctgcctattatctgtcagctgcaaggtactctggtgagtcaccacttcagggctttactccgtaacagattttgttggcatagctctggggtgggcagttttttgaaaatgggctcaaccagaaaagcccaagttcatgcagctgtggcagagttacagttctgtggtttcatgttagttaccttatagttactgtgtaattagtgccacttaatgtatgttaccaaaaataaatatatctaccccagactagatgtagtattttttgtataattggatttcctaatactgtcatcctcaaagaaagtgtattggttttttaaaaaagaaagtgtatttggaaataaagtcagatggaaaattcattttttaaattcccgttttgtcactttttctgataaaagatggccatattaccccttttcggccccatgtatctcagtaccccatggagctgggctaagtaaataggaattggtttcacgcctgaggcaattagacactttggaagatggcataacctgtctcacctggacttaagcatctggctctaattcacagtgctcttttctcctcactgtatccaggttccctcccagaggagccaccagttctcatgggtggcactcagtctctcttctctccagctgactaaactttttttctgtaccagttaatttttccaactactaatagaataaaggcagttttctaaacttcctgtatcctgttgtttgtgttgctctctccagggctgggggtaggaggatgcaaggacttcctggcctagctcaccctggagaggtttgttgagtgcaaaggactagcttgtgccccacctcccacccacccagcagctaatctggtccctcccaacaacatggaaatgattaccctgtaccgcattctggttcagatttgggggtagggtgaatgcagcctgaggaggccagggagggaggactccggcagcgtttccttggcctcggcgagctactgggctccacttaaggaggctggggcagagcttccaggactctgcccggttagaaaacccgcacgagggcggtgccgctttggagacagggaggagggagaccggaagcctagatccctctggctgtcccctgca

SEQ ID NO: 13427 - DNA, 1106 bp, Homo sapiens
ccgccatgactggccctcgccccacccggggtactgtcaccgtagtccccaccacgcacgcgtgtggtcttccgggaccaggcccgttagtgcgcacgcgtaaacccagccagggtggggcctacttcgcgtgcgtgaagagttggcagttcggggaggagtattaaaaccgcgcacgcgcacctaaccccaccctgcttgcttaagggatgagtgactccgggagtacaaaatagcaaccaggtcttttatagccccggagttcccgtgatgccccacgcggctgcaatgattggttaagggttttgcttttagggcgtggacgggctcctgagcaatagtggatgagctgtgagtgcgcgcgcgtgcgcggggccgcgacctgtgccggctcgagcccgctgggcactcggaggcgcgcacgtcgttccccgccctcccgccgccgcccgccctcgctctctcgcgctaccctcccgccgcccgcggtcctccgtcggttctctcgttagtccacggtctggtcttcagctacccgccttcgtctccgagtttgcgactcgcggaccggcgtccccggcgcgaagaggctggactcggattcgttgcctgaggtgagcggaagggttccctccaggcgccgcggggccccaggcccgccagcccggtactcttccggccggcaggccgccgcaccgccgcggccgcgccccaccggctgctcgtggccgagccgcccctggcccctgacccttgacctgactcccagcccgggccccgcgccccaagcggcgaccccgcccgcgcagtccccggaagcgcgcccggtagtctcctgtgccccttcccccgcccggccgggcctggtggagcccaggctgcccgcctgcccgccctcggtccccggagcttcctctcccagcggcgccgggcagggcgggggctttgggccgggccccgcgaccgcgcagtgtagccggccgctgaaagcgcgcgtggctgtcggagttgaaatgggaaagaaactctttacaactccattttgctttttacgtttaacgagaaacgacaatcactgtttcatattgattaaagtccagttacac

SEQ ID NO: 13428 - DNA, 1113 bp, Homo sapiens
cttgccctcctcctacctaccacaaggctccatgggctagggacaagggcatcttctcccacttgcagagtaagacatgctcagggcttgttctggtccctgaataaggctttagtccagctttgagggatgctgggacctggatacttggtcactggctccctgggcccaggccccactgcagcccaggtactacaggccggcgtggcagatgacctgaggaaactgcccttcatgaccagtgctgtgatggaggtgtttggcgtgtctggctgccgcgtgacccgctgtggctacacaggagaggatggtgtggaggtgtgtcaagaagtggtgtgggggcagtacagggcacaggatgcatgtgaggggttgggggtatgtggtacagggagcttcccatctgccctctggtgtttcatacagatctcggtgccggtagcgggggcagttcacctggcaacagctattctgaaaaacccagaggtgaagctggcagggctggcagccagggacagcctgcgcctggaggcaggcctctgcctgtatgggaatgacattgatgaacacactacacctgtggagggcagcctcagttggacactgggtgagctgggccagcactaaaggatagggtcctggaggtcagggtgacccttgataagactagccagcccatgactcatccaaaggttatgtagcctgaagccttcctgagcctcccttccctgaaggtgccactgtgcctttgcccattagaaactgcagatgttggccggatgcggtggctcacatctgtaatcccagcactttgggaggccgaggcgggtggatcacgaggtcaggagatcaagaccatcctggctaacatggtgaaaccccgtctctactaaaaatacaaaaaaaaaattagctgggcattgtggcgggcgcctgtagtcccagctactcgggaggctgaggcaggagaatggcatgaacctgggcggcggagtttgcagtgagccgagattgcgccactgcacctccagccagggcgatagagcgagaccccgtctcaaaaaaaaaaaaaaaaaaaaaaaagaaactgaagatgctgccgggcatggtggc

SEQ ID NO: 13429 - DNA, 1128 bp, Homo sapiens
ggggagcacactggccatctgatcaggccttcctccctgtttacagtggtccactccttggctttgtttgctgtgaactggattccaaggacagccttctcagaagagctagaggtcatgggggtgtcatggataggtcaatggccccaaggaaatgagctcagagggtctcatcatctcatccttctagcttgcccccattaaatggtgtgccttaatgtcccgggttttccagggctgacacccactctcatgtattgggctggatgttggtttgaaaaggggttatttcaggaaggtgctaggtcctgtccagttccctggcagtccccccacacagagtgactgggggaggtcaggaaatcagaaggtggtcctttgccacgtgtagaaccaaaagactggttagtcactttgggtgggctggactgcactgtggatggcagggaggatgcatccttgcttagtagccttttggattgtagctgttgcaatggcctgaggctttcaatctcttccccagaccaagatacttggtagtgaccgggtgaagctgatggagagtctagtggttggagacattgcagagctaagaccaaaccaggtgggcccttttatttctgctctatgagttttcttagtcatgagccagcaaatgggctgagtccctacctcaggcttaggggcacagagatgagtcaaacacagcttctcagggcttgcagtcttggacagaatccctgagtcatttccagagacacagacatttgtagggaggggaatatcccagtcttactacatcaggctaggaggccagaaaccaaggttaatatgctgctctctggccatcccttctgcttaacccctctctattcaacatgtggtccctggccaggcgacgtgactcaaacacctgtaatcctggcacttggggaggccaaggcgggtggatcacctgaggtcaggagttcgagaccagcctggccaacatggcaaaacctcgtttctactaaaaacacaaaaattagccgggcgtggtggcgcgtgcttgtagtcccagctactcgggaggctgaggttgcagcaagctgaggttgcaccactgcactctggcctgggcaacagagt

SEQ ID NO: 13430 - DNA, 1221 bp, Homo sapiens
ctgtgggctccctaaacagggttttcccagtgtctgaggcccagcggcccttctctctgctcctaggaccttggaatctggtcccagagctgtccactttgtctcactcagggcagtacatctttgctttgcagagcccctccgtgacctttcccaagtggctctcccacccagtgccctgtgagcaacctgcactcctccgtgaggtaagccctcaccctaggtaagaaccatgtgtgaatggctctagtgtccaacacaggccaggtagaccccttcctgtaaaattctggggctgggcccagggcccttgggtgttatcttcctcctgggtattctgtgggatttgaggcatctctgttgtggggctacatcaggccctaacctcatgtttcataagccatctgagaatgttgttggtctcagctggagggcccctagcccaggttggcctctctggagcctgaagggcactgctggggagagacccatggccactgacccctccttctggagcagggtctcccagaccccagcagggtatcctccgaggtgcagcagatgtgggcactgacagagatgatccgggccagtcacacctccgcaaggatcggccgctttgatgtaagtaatcgcttccttctgcttggcttgctttgccctgagcagatcagacctgatggtcttttgtatttcaggtggatggctgttatgacctgaacttgctctcctacacttgaatggttgctcctagccaagatgttggcctttctgtgcccacccagacttggtttgggccaccagaggctgaagtgtatttcctgtgcattccaagtgttgcctgcatgcctgttctgtctgggccacattcacagattcaggattctcaggggcttaccgtgttacttcagcatgagctcctggcatgggggtgctctgtcttcgcctggctgcaactcaattcttccttctacccaaaaacactccagtcagttgtacttactgagaatccctgagtgccctctgccccttctggcaacatgcacattcctgtcttctgcctgctccctcatgtcagtgcagttgggctgggctgacctactaaaacctgctccatgtatggacctggaaggccattgctgccatggcacttgggacacttgaggaagaaacagaaaccttatttcttcctgtgtgtcccctagtggttttctttccatt

SEQ ID NO: 13431 - DNA, 1170 bp, Homo sapiens
gcagggcgtgtcactgttataaaatccacaacagtcgtgagctccatggcatcagttcttgggaatgagacatgtgcttgagtgccagcactgctgtctccccactgtgtggccttgggtgagatatttgcctcccaagttagcccatctcatagccctagtcttgtgacaggtaaataaactcagttgtgtctctctaggggggaggaatcagcttccccagcaggcattctgaattataccttaaacctgtcacacaattcaggttaactgttgtgatcatattcaggttatgcagtgacaatagtatttttaatttatgcttgtgtctcttctaggtatcagcggcagggaaggaggctttgccatcttggctgcactgggactcacagagccacaccctggagggcctcccccttgacactgataagggtgtgcattacatttcagtgagcgctacacggctgggggccaacgggagccacatcccccagacctccagtgtgttctccatcgaggtctaccctgaagaccacagtgagctgcagtcggtgaggacagcctccccagaccctggtgaggtggtatcatctgcctgtgctgcggatgaacctgtgactgttttgacggtgattttggatgccgacctcaccaagatgaccccaaagcaaaggattgacctcctgcacaggatgcggagcttctcagaagtagagcttcacaacatgaaattagtgccggtggtgaataacagactatttgacatgtcggccttcatggctggcccgggaaatgcaaaaaaggtggtggagaatggggcccttctctcctggaagctgggctgctccctgaaccagaacagtgtgcctgacattcatggtgtagaggcccctgccagggagggcgcaatgtctgctcagcttggctaccctgtggtgggttggcacatcgccaataagaagccccctcttcccaaacgcgtccggaggcagatccatgctacacccacacctgtcactgccattgggcccccaaccacggctatccaggagcccccatccaggatcgtgccaacccccacatctccagccattgctcctccaacagagaccatggctcctccagtcagggatcctgttcctgggaaacccacggtcaccatccggactc

SEQ ID NO: 13432 - DNA, 2308 bp, Homo sapiens
agttaaggttaagtttttacgtttaatctgctgtttacctaaacttgtatgtataatttttgggtgggtatggggaattgctttgctaaaaataagctcccagggtgtttcaaacttagagaagaccaagggacagtattttttatcaaaggaatactattttttcacactacgtcaacttggttgctctgataccccagagcctgattgggggcctcccggccctggctcacgccaagtccctggtgctgggtttgctctcccgctgttgccaggggctggaagctggaggggtctcttgggccatggacatccccacttccagcccatgtacactagtggcccacgaccaaggggtcttcatttccatgaaaaagggactccaagaggcagtggtggctgtggcccccaactttggtgctccagggtgggccagctgcttgtgggggcacctgggaggtcaaaggtctccaccacatcaacctattttgttttaccctttttctgtgcattgtttttttttttcctcctaaaaggaatatcacggttttttgaaacactcagtgggggacattttggtgaagatgcaatatttttatgtcatgtgatgctctttcctcacttgaccttggccgctttgtcctaacagtccacagtcctgccccgacccaccccatcccttttctctggcactccagtcccaggccttgggcctgaactactggaaaaggtctggcggctggggaggagtgccagcaatagttcataataaaaatctgttagctctcaaagctaattttttactaaagtttttatacagcctcaaattgttttattaaaaaaaagatttaaaatggtgatgcttacagcagtttgtacgagctcttaagtgttgattccatggaactgacggctttgcttgttttgattcttttccccctacttttcctaatggtttaaattctggaattacactggggttcttttgccttttttagcagaacatccgtccgtccatctgcatctctgtcccatgactcaggggcgcccactctgcttcgattctcctcctgtggaagaaaccattttgagcatgacttttcttgatgtctgaagcgttattttgggtactttttagggaggaatgcctttcgcaataatgtatccattccctgattgagggtgggtgggtggacccaggctccctttgcacacagagcagctacttctaagccatatcgactgttttgcagaggatttgtgtgtgctgcctcaggaggggagggctggtaggagggggggagaggtctctgtcctactgctctccagagggcatttccccttgcgccttctcccacagggcccagcccctctcccctgccccagtccccagggggtactctggagtgagcagtgcccctgtgggggagcctgtaaatgcgggctcagtggaccactggtgactgggctcatgcctccaagtcagagtttccctggtgccccagagacaggagcacaagtgggatctgacctggtgagattatttctgatgacctcatcaaaaaataaacaattcccaatgttccaggtgagggctttgaaaggccttccaaacagctccgtcgcccctagcaactccaccattgggcactgccatgcagagacgtggctggcccagaatggcctgttgccatagcaactggaggcgatggggcagtgaacagaataacaacagcaacaatgcctttgcaggcagcctgctcccctgagcgctgggctggtgatggtcgttggactctgtgagatggagagccaatctcacattcaagtgttcaccaaccactgatgtgtttttatttccttctatatgattttaagatgtgttttctgcattctgtaaagaaacatatcaaactaaataaaagcagtgtctttattacaacgccgttgcatctgggcatctgtttccctggcatctggagaggttcctggacatgaggggttgggggctcatgtgacggggaagaggagactcagccaggtccacttggggttggcccagtggcctccatgtaagccttaccatttctgtgctgggagggctgggtgtgcactccagaaactctgccaacatgtaatgcccccttcacccctcttctgcctgtgaatcagctaagacaagtctcctacatcctcagttcctcctctgtaaggggtgggggatagcagagaaaccagtgagactggctgggaaggaggatggtgggaaagtgtcacgggttttctgccccagagtgtgtcagcccct

SEQ ID NO: 13433 - DNA, 1196 bp, Homo sapiens
gccatcaaggtgctcgtggtcaatccacgaaggcccggcagggcagccctggggctcagtgtgctcccttcccatactgtgcctgtcagacctggggaggcactagcttttaggaagcagagcaggtcctatagacaggctgggcattgagtatcttgtgttctcagggggatcagtttgtgttttatgaagactggggagaaaacatggtttccaaaagcatccctgtgctctgcgtgctggatgtcgagagtggcaacatctctgtgcttgagggggtccctgagaatgtgtcccctggacaggtcagcagcaacagcctgtgtcccccctggagtctgggacccttcttgagctaccaccccttgctcactcctgccctttgatcctgtttacaggcattttgggcccctggagatgctggtgtggtgtttgtgggctggtggcatgagcccttccggttgggcatccgcttttgcaccaatcgcaggtgagggagtggggcaaggcaaggggccttgcagcccagctggccttgagactgagtgtctgtctcgtggttccaggtcagccctgtattatgtggacctcatcggggggaagtgtggtaagtggctgatgcccacctgtgctttgctgacacatgttggccctgccagcctgcgtgatgctcatgtttccatctggcccagagctcctctcggatgactccctggctgtctcttctccccggctgagcccagaccaatgtcgcattgtctacctgcagtacccatctctgatcccccatcaccaatgcagccagctgtgcctggtgagctggaggtggcagggatgggagggtggtcagcaagaagatgggatggtggatgagagctgaagggccagtatcatctccccataggccctcagtaggtgcccttctgtcctcaatgcagcagcggtgtgagttctgcctgtcctctcaaggagggcctagaggttgagagtgctgccatggagagctttgcactgttggggcattccaccttgagagaatgctcgtctgcaagaatgctcctccccttggctctcaactgcatgtagccaggctctgcaaggggctgggatatagtggggagttacacaatcccagaccctccccaggaagagctctgggcccctggtaaaagtcagagggacatgcctatctgagg

SEQ ID NO: 13434 - DNA, 1232 bp, Homo sapiens
ggcatacaccacaggtccctgcccttccctcctctacctcaaattctcatggagccccgtagccccagaattcctggggctgcaacagctcggtgtcttgcaggtgcgtggtggaggctggctttcctttcagcagtgactgcctgccagacctcagcgtgtgggctgagatgctggacaaatcgcccatcagatacatccctcaggtatgcagccccctccttgccctgtgtgctgcccatccatccagaatccagggcccagctcaacacagctccccactcttccccaaacacccaggtgaagacaccactgttactgatgttgggccaggaggaccggcgtgtgcccttcaagcagggcatggagtattaccgtgccctcaagacccggaatgtgcctgttcggtgagtgcagcatgaaggccctggcagctggtgggcaggtgagcacaggaggaccctccaaccttaaatgttgctgactaatccctacaggctcctgctctatcccaaaagcacccacgcattatcagaggtggaggtggagtcagacagcttcatgaatgctgtgctctggctacgcacacacttgggcagctgaagccctgccattctgcatgagctgatcagcctgtgccacacttcgctcttgaggagctcaacggtctggcagggcagcaggaggctttctgggctctggactccacggatgcgtgggcagaggaatgtgggctatgtagtcataataaattaggacacagagcctggttcctgctggtactttgtaccaaaccatccccaaccccacctcccactctggggtgcagagaccctaggttctgggtgtggcagccacaagggcttcatctgcctccagtgtgagaagggagggaacagtgagaggcttagcctctgcctgtcctggcaaccaggactctgtaccagcctagcttccctgctgcagccccttccattagcaactactctgtaccacccttcccaagagtatgtctggaggactagtgtgaggccctgtctttccacggcacccatgggcaaaagtagtcccagggacattgccttggttggggaagcccctaggctggacagatcacctagcccagggtgtgctgggctcaagccacccgagccctagcaaggagtcactgacacatttcctggaagcaaaggctaagaagcatctgtacaggcataaagaggaaacatggc

SEQ ID NO: 13435 - DNA, 1153 bp, Homo sapiens
gaacttgctgagggtcaggctgtggctgtgtggctgctctggacctggagtggatggtgtggtgtcagggctggacacagctgcagcctggggcttgcctagtagaaggaggggacagattctgtcccaactaactccaaggcagctgtcctctgtcccctgctttcatgacctgagcattcctagggagccatctttctgtccttataccaaagcctcaatgggcgaggacagaggcaaacaggcagaggccactgcagtggagtccctgatgatgccgcctcctgtccccctgcagagccctgcccttccaccctgctgcagcagcacatggcggacctcctacagcagggtcctgatgtggcacccagcttcctcaacagcgtcctcaatcagctcaactgggccttctctgaattcattggcatgatccaagaggtgggctgtggtggggcctcgtgggttagggtggtgcaagggatgaggcctggtcctgggctagagccaggtgctgaccactgcatgcccacgtgttggtggctcagatccagcaggctgctgagcgcctggagcggaactttgtggacagccggcagctcaaggtatgtgccacctgctttgacctctcggtcagcctgctgcgtgtcttggagatgactatcacactggtgcctgagatattccttgactggacccggcctacctctgagatgctgctgcggcgtcttgcacaggtgtggccatctgggcaacaagggtgggaccctggggatgccccattgatgacgctccccatccaccaatggactcctgctcccctcacagctgctaaaccaggtgctgaaccgggtgacagctgagaggaacctgtttgatcgtgtggtcaccctacggctgcctggtgaggacctagatgccctgcaccccaacacactacaggcctcggttcctctgctaggaacagtgaggcctgattccacattctgcccccggacagccagacttggtgctctgcagtctcggctcacccttctgtagagagggcagtgggcaggcctggagcccttgaagcaggagcatgtgggtggctcatctctttcctccccttcccctcaggcctagagagcgtggaccactatcccattctggtggc

SEQ ID NO: 13436 - DNA, 3649 bp, Homo sapiens
accagctggacacagggcattacctctgcaggaacaagtactatggccgtgggctctccattgaaggcttccgcaatgccctctatcaatatctgcacaatggcctggacctgcgacgtgacctgtttgagcctatcctgagcaaactgcggggcctgaaagctgtgctggagcggcaggcctcttaccgcttctactccagttccctgcttgtcatctatgatggcaaggagtgccgggctgagtcctgcctggaccgccggtctgagatgcgtctcaagcacctggacatggtgctccctgaggtggcgtcatcctgtggccccagcaccagccccagcaacaccagccccgaggcgggtccctcctctcagcccaaggtggatgtccgcatgattgactttgcacacagcacattcaagggcttccgggatgaccccaccgtgcatgatgggccagacagaggctacgtgtttggcctggagaacctcatcagcatcatggaacagatgcgggacgagaaccagtaggccctgttctgggcccccagaaccccttcctctccactgcaggcagggaccattgttctgaacttgccgtgaggacacacagacttgcttttaaagggttatatttctctttggtgtaaactaaaagaaatgtttttagctgtagcctggaatccatatatataaagtgaaggagggcagaccacacgccctctcagccaggctcctcagctttgtggctctgactggtgtgtccaggctgccttaggaaggaagaggtgcccctggtgggcttggcagcagggacagggtgcccttggacattggtttctcttgtctagatctttgagatctgtggctgcagggccctgctgattgtaaggtaaagccctgggctggtgcagggcccctccacgcccactcttcccttgttccccagaagtagagggctctgggtgcccatttcttgggggctttccagtcttatgctgtgggtgtcagctagctctttaataggtgccctcagggcaccacagggctgactgcacaaagctggacccatccttcggtctgaccttagcatggggctagattaatgaagctgggctgaggccaacttatggcagagggcggcgcctgggttccccaggcacctgttggcacgtgacaggttggcacctgtcctattcctgaaacagcctctctcaccaagttcccttgcctaagaaggccactccctcccaccccactgaagtgggggatagtcggtgtcctagcaggcctcagggcctctggtggctctggcccagacagtatttgcagttcttgtgctatgggtgggagtcttcttcctcaagtttcggcagctgtgctgctgctggatgggctgctcctcccagggctcaagggctgtggtccgctcagggtctcatttccccaggccaagttcaaggcagcagccctttgtgaggcgctcttggccctgggcctggagggagaactttaagcttttttgctcacagggacgtggtatgggccctgggtgcaggtgcccacattctgctaatgagagctttgtctgatcagtcctgggtccatcagtttgtccatgtgtccggctgccagcccgtcccttgggatccttcccctggggtgtagccttgttcattagtatatactcattccttcatgctttcctcagcagaacacttccacttctgaggtgagcttttgccccatgcccttcctccacaggtgttgcctttttataaagacctgatagcagaataaattggtgtttccctgttgacccagcaccatttctgtgggcctagaatatggccctcaacccttagagtggggcagtgagggcttgaggagtgacccttcctttctcatggttttagtcattttggctgccagcccttaatggcacagatctgctgcttctaacagatggccaggaggtgacaccgatttcagccattgccaaggttagcaccctctcctttgagcctagggccacactgttcattgtcactttaggcaagtgcctgtttggctttaaaggtaagcctgccagctgtgagaagccttggtaactgatggactcatttcctggtccttaaagatgcagcctcttaagggctccttgatggatgccatctctcctagcccccagccctggtgccactggtgggcaggttcccattctttggggctgggagggacagcttgcctgtttctggtcacaaattacagtcttctctcctgtaccattctgtggcttcagccatgggggcagtagcccttcattagtgtagatagtcattccctggtagggtggagggtaagacatagggtctggaactgtttgggaccttttggggatgtcctgtgcctcccagattcctcgattctgggaggagaggctgccgcattctgctgctcctcacagcgagcaaagctgcacccacttacattcagtattttcctggcactacaaagagtgggaaggcctgggatttgctgctgctcccttagagcagggcccctcttttcagcactttggacacctggagacccagccctgttatttaatggtagtgggcaagtgtgtgtgcatactgtctgccactgctttctccctgccccatgccagagagccctgtccctgccaggcccagccttcttagccccaacttgggaacaaagtgcaacatgggatcatgggttggggtgctcaggtgagccctctctatagtgcttccctgggccaagctgacaccagcccctgagggtggggtgggacgggtggtgcttaaaagaggaaggggaccagtgtagcaacttgccagggaccccacccctccctctctgggcctgtgcagtgagcatggggattcccatcaaggggcctggcacctgtgctagttacgtagccgctgctcacgcgctcactcctgaccacatgcacgttccctagatgcagactgctttgaactttaaagctgtacaatttggttatgtttgtgctgacttaaaatatattttaatgaggaaaaaataatggagaaccctgggaaggacctggttcttttgcttctcggggaactgtaagccctcgcgttctgggaatcgctctctgctgctctttcctggaagctaagcctgtctccaccgcccgaggcctgcgccggtggctcccgccgcagttgcgtttgctttggaccttgcgtgcgggggagggggtgctcggtccgagcccgctcctttctgtacacctagcgctgcccgccccgcttgtgtctgaggtcgtgtatgtcaaaaataaagccgctagaaacggaggcgagtctgtctttgtgaaaatcccgtggcccgggagccttccctggtcaccctcggggcgaggccggggccgtggggcggggccggcggctgctggaccgcggcgaagcagggaacaaggcctcgcccttggcgccagttccgcctttggatccgccaatggccagctgacccgcgggtcccggcccgggtctccatggcagcccggcgtactcgggcgctcattggctacgtctgtcgcagcgctgcgctccaacgttccgacgccggcggccgtgccacgtacgcgg

SEQ ID NO: 13437 - DNA, 1193 bp, Homo sapiens
ctgctccagacaaggagaaacgagacagccaggtcatcatcgacactctgcgggatacgctggaagaacgcaatgctactgtggtatctctgcagcaggccttgggcaaggccgagatgctgtgctccacactgaaagtaggtcctcaggttttatgggtacagaattcatagggaggtattgccccagaactggactccccattctgggcttatcttctggttctgctccagtcatcaccttggtttggggagttgtaaaatagaggcaaatcacttcttccccttgcccttccatactgtacccatccatcccataagaaaagggccatattggctatacttgtgggttttgtactaggtagtttgaagagtcaaggccttcccagtacctcacagaggggatgctcaactaagacctcagtgaggctgggccatatttccgaaagtggttcatactctactgatgaggccagcctgaagaaccttccattagcactctagtccttggctgggctgctctcctgagccagatcaaacagcatcctagggaggagcaagggcctttgaagtcagctgtgctgagctgaccaaccagatcaaagtctgcagagtgaacagccttagacccagatgaattttgcatcagcctgggttggtgagcctcttgctctccaaggggcatgagaggcgattgatctgaacccacgattgatattctggccttgtaggcaggagcagtccttgctggatgccatttgaaagggaaagggagccatccttgtgaacagacaaggccccaggatattcattgtctctgttcctgcttgggggctgggctggatcacatggtctggctggtgggagggagcaaactggcacctggctgcagagcaggagtctctcatggtattctcaggtcagagacaagtggtcttaggctgaaggcagcctggccagcttcccctggctcaattattcattcttggcaactgtccatgggtctgggtgttggatggtgaggcctgggtttgtgctctggacttcttcagccacctgcacaacatgtaccatgaggcccagaccactggaccttggcagcccacagtgggcctgtaaatgctggcagtgggctgtgtctactgtaagatacctttcaggaggaagcaggcagggaggtgaagaagcagctgg

SEQ ID NO: 13438 - DNA, 1202 bp, Homo sapiens
agggaaaggaggaacaattaggacgtggcaatgagacctggcagggcagagtacaagcccagcacccagtgtcccagccttactgggtccttaccctgggccaaacagggagggctgatacctccttgctcttcctagatgcccacctcctacaatctcagcccacaagtcctctccaccctagggggcttgctgcatggcaataactcataatctgatttggaggtttgccctttacaggggcagattttctgctcagttcaacaatgaaatgaagaggaactccctctttctacagctcacttctatcagaggcccaggtgcctcagagccacattgagttgctttttctgggatgaggaagtagggttaaactccccagtttcctgagggaggctcctgacaggtgccctttgtcagaccctaccacagcctggataggcagccacattggtcctcgcccttgctcggcactccgtggtggtcctgcccttctccctgcatgcctgtgggtctgctctggtgtgtgaaggtcggtgggttaactgtgtgcctactgaacctggcaaataaacatcaccctgcaaagcctctggccaccctctcgcctttgcttcctctgtcctactggggaggagcccctggaaggcagtggggaagggagaggctgggagcaggttcacaagtagtggctgggagtagtagtgaacagtgccctgtggatttcttgggctgagggtgaagatcatcctcaccacagtgtattcctcaatggtggtggtggtgggggtcctctgaactctagaaatccatgtgagtagtgggtcttgggctgcatttggaccaaggaatactccctgggctgagagctcaagtaagggctgctgtttttgactcctgttgaccgaggagccttactcttgatttaggcatagagctggaatctacctgggccagccaccgcaaggacagaccctgctcatagccaaagatagcttccctgagctagggagagggtgtagggtgagcaatgcacaaagattctatgctgctctgtgttgattccttctttctgtgaacacctgtgctttccacctatgccccaaatgaaatctcactctgggtctatttcagctggagcagatcagctttatattatgggactatgcacagggtttcttctgggtagagggagtaacact

SEQ ID NO: 13439 - DNA, 1197 bp, Homo sapiens
gatcctttcttctcttccttttctcttcttttttttttgagacggagtctcgctctgttgcccaggctggagtgcggtggcgttatctcggttcactgtgagctctgcctcccaggttcacgccattctcctgccttagcctcacaagtagctggaactacaggtgcctgccaccactcccggctaattttttgtatttttagtagagacggggtttcaccgtgttagccaggatggtctcaatctcctgacctcgtgatcggctcgccttttccttccaaagtgctgggattacaggcctgagccactgcacccggcctcttctctttttcttagccatgatacagaatccttaactttgtatatcacatctagtagaattataagaaaatgaaaatgtcacagattccagggtacttagtggaagttagcttatgaagaactgacatatacaatgacagaagaaggctagattgggcattacaaataaagatgtttgggttggcgttcagtgccttggctttccctaacacttgtgtttatcatcaggcacagcagtgaccaccacctcagcggctgtagtgtcccagagtcctcagctgtataatcaaacctccaatccacctggctctccggtaatcctgttgtcctatatacaaaactcgtggctgatggggaaattttgttttgctatacaagtattaccctttcctgttgtatgagccaggattgagtaatacacacttcaaccttatttctttctgttgttttaaaatattaattttatgatatatatgtgcatgtatattttaaatataaaatttcaactgtgtatttacactttatgcatgcttgacctttagaaagttgtcgccggggccgggtgtggtggctcgcgcctgtaatcccagcactttgggaggccgaggcgggtggatcacgaggttaggagatcaagaccatcctggctaacacggtgaaaccccgtctctactaaaaatacaaaaattagccgggcgtggtggcacatgcctgtaatcccagctactcgggaggctgaggcaggagaattgcttgaaccccggagacggaggttgcagtgagccaagattgcgccactgcagtccagtttgggcaacagagcaagactcctcttgaaaaagaaagcaaaaaagttgtcaacatgtgttttgctga

SEQ ID NO: 13440 - DNA, 1102 bp, Homo sapiens
cctccagagggttgcttcttgtcccaagtagcctatggtgaccaggtggccctcaggcgccccccactggacagaagtgtaaccttggaacactggcaggggctggtgcctcacttaggcttgtatagttgtgtgtgcacacatgaagcccttaacacactcaagcatgtacccctgaacatgtgtacatgggcatcctccttcacacagtggggtacccctttgcacatctggcatgtatgggcagccacaaacattgtcatattatgcacatgcatgcacaggttgtatgcctggccgtccacacgcacagacccttgctgcacacgtaggatgcggcctgcctgccacacatgcagcacaagtcttcattttctctcccccaggggccaacaaatatgatgaggcagccagctacatccagagtaagtttgaggacctgaataagcgcaaagacaccaaggagatctacacgcacttcacgtgcgccaccgacaccaagaacgtgcagttcgtgtttgacgccgtcaccgatgtcatcatcaagaacaacctgaaggactgcggcctcttctgaggggcagcggggcctggcgggatggtgagccagaggggctgtggcagggtgctggggaagaactaagcgggcctggagccccagcagggggttctgggggtgggtaggggggtgaacctggagggggaggggcaataggtgaccaggggacaagggaggagaaggcccagggtgtgaatcaggaggtcaagtgagtgaggtgcagggcatggaggaggtcatacaagcaggcctggcccagtggtccagacagaagggcctggccttgccctgggacagaaccagaggccatcctgatgttccctggagaaatctcacctcctcacccaccaggccattggcccagcctgccggaagctgcatgccagcggagcccagccctgctgcccactaccaccagctccatgtgcacctccagctcttgccctctgacttgtctgagcgtcccgggcttaggctggccccactggccctggtggaggtggggatgactctcccagtgccacagactcccctcccccacgt

SEQ ID NO: 13441 - DNA, 1359 bp, Homo sapiens
tgtcccctcagctccagacgtaggggaggggttgccacaggcctccctgtttgaagcctgcccttgtctgagatgctggtaatggccatggtacccccttctgggcatctgttctggtttttaaccattgtcttgttctgtgatgaggggaggggggcacatgctgagtctcccaaggctgcgtctggaggggcccctgcttctccagcctggacccccagctttgcccaacaccagcccctgccccagcccaagtccaaatgtttacagggagcctcctgcccagtcccccaaccccagccgctcggaggccccaaaggaaaaagcacaagaagcgtgagacgccaccattcctggaaaccacagtccacctgctcattctcgtagctttttaaaaaaatgaaagtaaaggaaaaaaaaaaaactgcaaatctagaaaactttttagagaaaaactatttaaaactgtcagatcctgaccagcaagcccccccccagccccccttccaagtgactccgtgccttgagtgtgtctgcgtgtttacacccgtccctctgctggccgcccccgtgcgagcggcacccctgccctgccctccacagaattgggttccaagggctgttccagacaactgccaacgtcactgagggccctgccccagcggccctggccccaggctctattaacctaaaatgtagctccctagcgctaacctaggaaccgccgctgcctgctggggggccacgcccctcatgcccttgtcccaggcccggggccttcagcgttgaacacttccttgcttttttcacatgttttatggaattgttcacctggtttgaaataataaaatgtagaaagaaaaaaaataccgagaactgatgggtattctctcccaggggcagaggcctgggctaaggtgtgccaaggtgatggtggtcctaacctcagtcctcaacctgagtcagggccctgactcagctttccgggccgtcctggagccccacgctctgagcttcatttctcccacctggactaggcagcatacatgtggggcccgtgtgtccccgcccttccagtactctgcagccttgggtctcgggcagctgggcaggcttctaagggagctgttgtaaggtgctcttccacacctggagcaggaggggtggccggcctctctagcgcggaaggagaaagtgacttccgacttaggtaccaaggcctgagagtgtccgttgccaaggccacacagccaggtgggccgcatgcagtcctggcttgactaaaaaggccagtaggggccttaagacatattcagaaagttccctgccccagagggccgccgccaaacctgaagggta

SEQ ID NO: 13442 - DNA, 1313 bp, Homo sapiens
catcccagaggccagcatcaacatgtcagtaccgcacccttcccatttgctgcctgtaggtccaccccgcgcgtgcggtccccaagtggccatgccaccctgcacgccctccccgcgtcagtcgttcgtttccagaccatgccgagccacacctgcccacagagtcgagctctcgaagtcctcattcccaaaagctccacagcctgtgacccactaggagggagggggaaaccgaggcccgggagagacggagaagccactctctgaggaccccggagccccgcccacagtgggtggggtcggcactgaaggggttaaggccgcggggaagccccgggctcagccctaggggcggatcctggggcttcctccctctagaccaaagggtgcggctgctgcagaggtggctgatgcaggtgaggggcttacagccctgtgaatggtgtgggaggtgaggggaggggggtgcctgttactgaccagtgtttaattggcctcaagctcaggagaggtaaggggagccaggaggccccctctggagcaggtgagtagaaggagggggctcagctgcccgcccacgactagaaaacccccagcatagacctgccggacggcaggaccttggttaagatgggaaaacagtagggtttgggcacaggaggtctgggcccccaacctggtgaccgttggacaccctgtggatataggaaggaagctgtggtccttatctagggtgcctgcgaaactcaagccagtggggaaccaagcctgcagaggcaatactgctgtgtgactgtgggccaggcccagtgctggtgctgctggggccccatctgaggagacagttgggtctatatccaaagtgtcctgagatgggcagagttgggaagggggccatgggctccaggtggggaaggcagtcaagacaggccaaagctcagcctgatgggtgcatgagtggggccccaggatccactaaggcagtgggcatagcccaggtagttgaaaaggctgggagctggaggagactcggaacatagggagaagaaagggacaggaagactcccgggcagtttttcctatggagggaaccttgggtaggtttgagcagggggtatagtgtctgctttgcatcttctatcccatgccctagtggtggactaggaggactactggaagacagaaggccagcaagtagattgggtcggctgttttatagacctggtggttacagaccccctgtgaggggaggtcctgaggaggacaaatttgtagccagagcaggctggggccaggactcctaggttctgccc

SEQ ID NO: 13443 - DNA, 1313 bp, Homo sapiens; identical to SEQ ID NO: 13442

SEQ ID NO: 13444 - DNA, 1147 bp, Homo sapiens
tacattggccctggtgctggcggtgtcatgggccatggagctcaagcccacagcaccacccatcttcactggccggccctttgtggtagcgtgggacgtgcccacacaggactgtggcccacgcctcaaggtgccactggacctgaatgcctttgatgtgcaggcctcacctaatgagggttttgtgaaccagaatattaccatcttctaccgcgaccgtctaggcctgtatccacgcttcgattctgccggaaggtctgtgcatggtggtgtgccacagaatgtcagcctttgggcacaccggaagatgctgcagaaacgtgtggagcactacattcggacacaggagtctgcggggctggcggtcatcgactgggaggactggcgacctgtgtgggtgcgcaactggcaggacaaagatgtgtatcgccggttatcacgccagctagtggccagtcgtcaccctgactggcctccagaccgcatagtcaaacaggcacaatatgagtttgagttcgcagcacagcagttcatgctggagacactgcgttatgtcaaggcagtgcggccccggcacctctggggcttctacctctttcctgactgctacaatcatgattatgtgcagaactgggagagctacacaggccgctgccctgatgttgaggtggcccgcaatgaccagctggcctggctgtgggctgagagcacggccctcttcccgtctgtctacctggacgagacacttgcttcctcccgccatggccgcaactttgtgagcttccgtgttcaggaggcccttcgtgtggctcgcacccaccatgccaaccatgcactcccagtctacgtcttcacacgacccacctacagccgcaggctcacggggcttagtgaggtatgtgtctccagggccctgccttttttctccttccttgaggatccactgcacatttgggttatcaggggccactataggactatacctgtagtttattggctgctccacatcccctcaaatcattctgtctataacctgaaagggtgacatcattatccccatttttcagatgagaacaattgaggcacagcgatgctgagaagtttgcccaaagcttcccagcaaatccagagcagagctgggactggg

SEQ ID NO: 13445 - DNA, 1171 bp, Homo sapiens
cactcccacctcacccggcctcttcgcctttcccaccctcctgccccacactccccgccttagagcctcgtccctccctcactgaaggacctgagctggccaggccctgagagtctggtctgcgccttgggatggggagtcccaaagcgggacgccgcaggtgtttggcacccaaatcacatctcacctccgaactgttcaagtgtccccagacccttcttgcctgctgggctccccccagtgggatgggacagggaggccacacgcactggtgccaaaaccaggcctctgctgccgcccttcctggaggctgcctatgttgggggggaccctgcctcagctgacccggcctctctgccccacccaagcccaaacttggtttctgtgagaatagtggaggaaggtgagatggccagtttgaagcctgtgcctcccagcttaaatcctagcaggagagaggctctggggcagcccccatgggctcctgcccctttcaggcctacagccacatccccaagcccaccaggtgtcaggatagtcacagtgataccagttcagacactaccccatatacacctggaacattgaggatggaaactggactcacattcgacataccccactgggcacacgcacaaacacacacactatggggtggggtgggtgtaggggcttacaaagccttacacagggcgaggggttggtgggagggttggcacctgcacactccatctcctgctcaccacctgcctctaatctgagctgcagcctggctggtcctcccatttctaaagctgaatgtcaaacagtgccaaatgctggggcagggggtgaagaaccctctgtcccacccctagccaccagtgtcctccaagtgccccctcacctctccaggtgctcattgtaaccatttctcactagtgtcaggcccccagtgggaccacatgccactgcctgcacctttcggcagaggaacccccaccagacatcaccctttgccttagcaggggtgactttgtctctcctggctgggccatccttccgccaatctggcccttacacactcaggcctgtgcccactccctatctccttcccacccctacacacacactccctgcttgcaggaggccaaactgtccctcccttgctgaacacacacacacacacaca

SEQ ID NO: 13446 - DNA, 1099 bp, Homo sapiens
ctcctggggtctggggtctgagcaaccagggccttctcccctgagcaacctcagatggggctgtccttctagccctgtaggattcactctgggctgggtatgggacatgtgcttggcaatactgacttatgagcagcctgccttcccccagcacccttgctctagcatttcatggcaatgtcaccaactcaggatcagaagttcctgctccgaggctttctatggcacttggtcattcacagccttggctgagcacctgccttgcttccccttttgtgaatgaaggtagcaccttgggtttctctatatttggcccatgttagtgggcaaggcccgggtctttttataaatggacctggctccttctgcactgggatggagtcggggagtctggctgaagatcaccttggggctctgctcctgcctggttcctaactccaaaccaatgttttctctttctggcccagcctgaaaacctactctacacatctaaggagaaagacgcagtgcttaagctcaccgattttggctttgctaaggagaccacccaaaatgccctgcagacaccctgctatactccctattatgtgggtgagtccttcggacatgagttgtaactcctcaccccaacttatacagctgtattatggggtagccagtgggttgcagaaaccaaagggttaaagcccagcaaggagggagggggagaattctgtctgcatggaggcgggtgacgtggggggccggaggctgcaaaaatattctcccaaacttcagcttctgcttttgaaaatagatccaggaaaattctggctgtggcctgtgagctgaatgacatcacagcagctctaaatatatatgtgataaaaggctgccatcagcttgggacggagcccaaccgcggttgtttttctctagtttttgtcttcctgggattcatattcagaaagtgggcatgcatttcctcctaacttggagggacaaagggtaccagtcacctgccttgtgggagacggtcactaaagccagggcttggaggtgtgcacatactcatgcttcctggaaaagttcactgcccttctgcaagtgggcaaccccc

SEQ ID NO: 13447 - DNA, 1349 bp, Homo sapiens
cttagtgcccaccatcctgtctgtccccaggaggagatgaccagtgccttggccactatgcgggtagactacgaccaggtgaagatcaaggacctgaagacctctaacaaccggctcctcaacaagaggagaaaaaagcaggcaggcagctcctctgcctcacagggctgcaacaaccagtagctcatggggccttggaggagcctggcctctcagcctgcataacagactgaaatgtgctcaggccctggccaggagggcccagggtcattcttttaacaaaaggattattttgttgtgttttaatttgtcactcggaacttcaggatggaggaccctgaccctaaacctccttcagatctctggcccaggctcaagccctagagatgggcagggcctaggggctgggagctgcctgctgccatagcagcacctttagctaggttggcccgagtgaggcctctgtgctgtcctgccctggtgcatggccttagctttctaggccactgggagttgtggctgggcttcccatcttccacagagacatctccctgtgggatgggcagatgggcctggccttgagaaaggcattggccattggttgccatggtgaccagggaccacgttgctgcctgtgaatgctgagtgagcgagtaagggaggaggggcgattgagggttcacctctgccttggggaggctgatttctcacacactggctggccctctcattctcactcctccttgggccctgaggctgctggatccggtctgcctgcctccctgtgcagtccagccctgccttgctgcagccccagcccagatggcactcagcgctctcccctgagggagtccctgggcctagccatcccctcactattcccgacccaaagggtgacttttcatctgaacttaaggtgggagatatttttaacttttttccactttggaaaatgtcactgtgacaaaagccagcatactttccctgcacccatctgctcaccagatctcaggcaggaaagcccctctctgttgaagtcaggggctatcttttggtatacttgtgtgaaagtggctggttgggagcagagctaagtggcttcccattaacctgaggtctctttctttactctgggtcagacctgaggttggggaaggcgactgagccatgctcagaatgtctggtcctggcttgggcctgagtagggcagagagggcctttcctggctgatcagagcttaccagccccaccccaccatggtagccttagggtgctgagtgcctgatactgcctgacaagtgcctgacacgcagcctagttccttcctggcccctctctcactggctggg

SEQ ID NO: 13448 - DNA, 1135 bp, Homo sapiens
gtgtctttagaggaaactcattcaagtcagggcactgattttcctctcagtttattatttggggggatagggtcaggtgggtatagtagtactttaccagggtgcttttaagttactttaaaaaaagcctacaaaatattttttttcttttatttgctcgagttcacattaatgatggtcacaaggctgccttgttgggcaggcgtattgcccccagttcctcttctgctggcctgtatgacctccacagccaggccctgggcccaagccccttgtcccttctccactgcccctctttccagacagtaaaggccatggtcagtgtgtttttctcttgtaaacaaaccccagcttgtttaacagaaatgctaataacctactgggaaagatggaggtctaaattacctccagggtttttctgggggtttatcaccagtgtgggtcccttctgataccaccaggttcactccaggcagagtggggcggaaggctgctgaggatatgggtcagttacagcagccctcacctcaaagggctggcctgcttctcagcctacattcatttgcaagcttcaatctctggaccatctggtgttcacaggtgttagagggttaggggttaggggctagttttggatttgattcataggtaggagggcttagattttaaggcacttctgaaagtcaatccctggacaaggcagtcatcacataagaacagctaccttctccacttggtggcacaagaggtagggaggggagtatgggttcatttggcttcgcattatgcaaggtgaaaccgtttgttttccctctccattttccctaactaaatgaaaaggacacattctgaaatcccttttgttggagaataagtcagtctgaggggaaatgggaggccagagatgagaaccctttgaaaagattgtaaaatactgattttcattctttcaagcttatttgtaaatacctatttgaatgctgtgtatttgtacaggaatttgagcaaaaaatgtatagagtgtgatgtccaattggtattcagcactataaatgtgtttttaacctcccgcattctgtgcttatttaaaacaaggaaacttctaaccatttcttttgtgtattcatgtttaaag

SEQ ID NO: 13449 - DNA, 1740 bp, Homo sapiens
gcccgccgacccgctcggctacctcccgctacacggaggctaccagtacaagcagcgctcgctgtcccccgtcgctgccccgcccctgcgggagccccgtgcccgtcacgccgccgcagccttcgccctggatgccgctgctgccgccgccgtgggactgtcccgggagcgggccctggactactacgggctgtacgacgaccgtgggcgcccctatggctacccagctgtgtgtgaggaggacctgatgcccgaggatgaccagcgggccacgcgcaacctcttcattggtaacctggaccacagcgtatctgaggtggagctgcgaagggccttcgagaaatatggcatcatcgaggaggtggtcatcaagaggcctgcccgtggccagggcggtgcctatgccttcctcaagttccagaacctggacatggcccatagggctaaggtggccatgtcgggccgagtgattggtcgcaaccccattaagataggctatggcaaggccaaccccaccactcgtctctgggtgggtggcctgggacctaacacgtcactggcggctctggcccgagagtttgaccgctttgggagcattcggaccattgatcacgtcaaaggagatagctttgcctatattcagtacgagagcttggacgcagcccaggccgcctgtgctaaaatgaggggttttcccttgggtggaccagaccgcaggctccgcgtggattttgccaaagcagaggagactcggtacccccagcagtaccagccctcgccactccctgtgcattatgagctgctcacagatggatacacccggcaccgcaacctggacgccgacctggtgcgggacaggacgcccccacaccttctgtactcagaccgagaccggacttttttggaaggggactggaccagccccagtaaaagctctgaccgccgaaacagccttgagggctacagtcgctcagtgcgcagccggagtggtgagcgttggggggcagatggagaccgtggtttgcccaagccctgggaagagaggcggaaacggagaagcctttccagtgaccgtgggaggacaacccattcaccatatgaggaacggagtaggaccaagggcagtgggcagcagtcagagcggggctccgaccgcacccctgagcgcagccgcaaggagaaccactccagtgaagggaccaaggagtccagcagcaactccctcagcaacagcagacatggggctgaggaacggggccaccaccaccaccaccacgaggctgcagactcttcccacgggaagaaggcaagagacagcgagcgcaatcaccggaccacagaggccgagcccaagcctctggaagagccaaaacacgagaccaaaaagctgaagaatctttcagagtacgctcagacactacagctgggttggaatgggcttctggtgttgaaaaacagctgcttccccacgtctatgcatatcctagagggggaccagggggtgatcagcagtctcctcaaagaccacacttctgggagcaagctgacccagctgaagatcgcccagcgccttcgactggaccagcccaagcttgacgaggtcacacgacgcatcaagcaggggagccccaacggctatgcggtcctcttagccacccaggcaacccccagtgggcttggcactgaggggatgcccacagtagagcccggtctgcagaggcggcttctcaggaacctggt

SEQ ID NO: 13450 - DNA, 1226 bp, Homo sapiens
tccggttatgttgatttctagtgtacaagatactgtctgctgtggttctgtatttttttattttttgaccaactgtatggaaagttgtcagtaaaacctttgacagaggatggatttttaaacctgttcagagtcctggtttaatcaatcaagctaaaagaatcgaagacatccctagtgcatgtacacgaatgccctacgtcatccttccagcaccactgctgcatgggtcactctcggcctctcaattcttcaggctcagtctggactctacttacactcatttttatcttggctgacagcaggcaagcttcagtttgggctgtggacgctgccacacaagcctgagtagagcccatgcaaaggaagggatggggtgagcgcaaggcctgtggtcagcagctactgatggttttttctgccttaaaccgtgtgtgtgtccatcatcatcagtttgagctgtggctgtttgtttgggacagagtgcccactcagcatgtttggcagcaggtagccttcagcagctgtgtagtcttgtacaaggagaagctgtgcactgttgatgccagggggtctcggggcccctgatctgtccaggctcctggttcggcctactttctagcctcactcagcccagggatagccagtgttgggagacagagttgcctcaggttcccaggggcccgggagtccaaatactggaatggagggttggaggcagccttccttggatttactcatgaactttgcctagttgtttgtgatttttggctttctctggtcgttcaggggtgatgggtaatagagcaggcccgtgtccagtcatacctagagatttgtggggggatactgaacctctagactgaagtacttaccggggagcacagtggactaggggatgcccttgataatgacggtttcctaggtgcaagatcagagcatgtgcctacaccttgtgccctgatgccgaggtggagaccattgggaaataattaatagatatttttctggggggaaatcacaagtcactgaggtgtttgtttgtttgttaggcagtgctagagcttgaagccactcaagccagttggggaggaaagggatgcggaggtaccctctagctgggaagaagggtgagattccgtcttcttccctgtctcaagtaagtaaggaaggtactgcggacagtgtgggccagggaggaaaaccagagcacacagttttgtcac

SEQ ID NO: 13451 - DNA, 1816 bp, Homo sapiens
tcgtagacccctcggtgatgtggaatggacaggtgcctcgcaagagagcaagcacgttcataacaaaacagcaacacaaagacatgttaagcatgtttatttatttgcctgtttttgtttttttacttgagctgtggtcacagctgccaggtacctaagcaagtcagttgggtacagcaggacacgccaccattccagggtagctggtaccgccagaaacaggagtgggtcttgtcctgttgcaggcacactgcagtggttttcctgcagctctccaacaaacgcctgagtcacaggccagagctgccttggtatgttgttaagtccaaaacttcttctctgggctacctatcttccttcatgaagcaggtgctcaggacccggaagaatcatctacctcccagctttgtgagacagaaccaagtaaaaggaaacatgctagaaaacgtgcctagagaagacacttcaacctttgccttatccaacccctcttcagagaaaggtgtcccatggccccaaaaagaactgccaagttttggtgaggagtaacaccctggcatgacattccttctctttcctggccctcaaccacttccttcctttggctcttaagacctagcaggttctgtgaactctcaggccttggccagcactagttaggggaggtcaggtggtcaatgtcctggtgattttatgagactgccccactgagaaaacttacttacttcaggcatccagtgcccccacccagggttcaggccctgtctaaggtgttgcttaaagacaaaaaggcaacatgtgcctcactggtggtgtgccactgttctcatgctgcctcctaagtgactccgattttcagccctggtagaataaggaagacagctgatgcctccttagccccttagcacatgttcctaaggtgtgttgtcaagccaacctgaattctgcctccctgttatagtccctgtctcccccacagagacctgtgggtgctcccagcagagttgagactggctccgttgagttaatgactagaatatagtgctttcactacttgattgttaacctgttttcttctgatgccatcagtaccagcagtcagactattccactggttaagtgtttactaccattaaagcgaggcatgaagcaaagagctgagtgagtcctctgctctccagaggaccaagaaatacctgtgtgacacagacccacttcagtgtgtacagcaaattctatagtgcttctgagcccagcagggctttacctgcccctggagagttttagccgtcttgtgtttcttgtttacttcacaaccaaatttgtcccctcttctctctgttaagggagagaagtcactttagctggataatacctatgtaacaaactgagcagctgttatttgggcaaaatcaaaggaagaaagagactatggtcttctatttattgtgggaaggaaaacagggtggggcgggtgagtgaaaaggtggaaatccctggtaccttgcctggtggttacacagtttaaccataggccaattttaggggcctctgaagtatctttctacaaacgcagacaagctccactacccctaacctgccaggatgctcaagtccactgtcacaatccctttcagaaaacattagtggccgctgccccagctacagagacggccgaaatgctttcactccttagctttgccaactccatcctccaaaacttcccagaatacctccctttccagttctaccaaatctgtacttgggagcagcctgctggatccagaacatgacaacagagagctgcgtccacagg

SEQ ID NO: 13452 - DNA, 1368 bp, Homo sapiens
tcttatctctgaatgagtgaggagccatcactgcttggaagagattcttggcaggcgagaaactgagtcaaatgaattcagaacatattcccttctctttctcccagggctgtctgtcttttaaggagctgcatgccctgcattcagaagattatggcttagagagcctcattggcacccgagggtccttccagaatcaataaccaccacaaaaatgacaacagggactaggccctactctgcaccccccacatccaccccccaccatttcctaggatggacatatctttcaaggggaaaaaaaaaccatgtctctggggtatttcacaatatattttctttgtatagtgttctttacttaaagaacaagaaatagttttttataaaactttaaaaaggaaaaaaaaacaggcatttataactgagggtatgaacttatatccaccaggtctcttgtccctgcacttcattttctttggaagaaaatgatgtctaaagaacaatatagaggcatttttacatacgtatttaaatgaaaaggaaaatcgtggtttcttaaattgataaggattaagaatattttattataaatataatatatgattttttaacctgttttgttgcctcatatgctgtcaggttaatttgttttccttcgtgccagaggtggggaggaaggcactctgtctgctgggtaaatgcctaaattcactcaccttcatggtttgggggcagcatggtcattgtggatattggttttgtggagttgagggaacttaggatataagttcactccctctatttttctttgtgattcagtttttcaaaaatctttttttcttccctttctccccattgtggaaattacaaatcaaaggcctttttctttaatgtaaagtgtatttatttaaaaaaaatacaaaataaactacaagtctgtctttgtttatggcctttccctattttcttttaccgaagtggggtgtgtcccttttttgcagctctagccaggccatagagaagacaccttccaggagaggcaaggagagcatgttctgcccacatagagcactccagggaggaaagtagcttatactcacagtgtctgcccctgccgtgtagctctctcatggggagggcctgtttttgtaagggtaatgtggagagagaggtcagggctttgttccctgtggacgcagctctctgttgtcatgttctggatccagcaggctgctcccaagtacagatttggtagaactggaaagggaggtattctgggaagttttggaggatggagttggcaaagctaaggagtgaaagcatttcggccgtctctgtagctggggcagcggccactaatgttttctg

SEQ ID NO: 13453 - DNA, 1121 bp, Homo sapiens
cattacttcacatatgggcttttgactcaagaattgtggaatttgaaaggtattattatttaatttataattaaaaccttggccaagcatggtggctcatgcctgtaattccagcacttgaggaggctgaggtgggaggatcgcttgagtctaggagttcagggctgcagtgagctatgatcatgccactgcactccagcatgggcaacaaaatgagaccctgtctctacaaaaaataaaataattagctgggtgtggtggcatgtgcctgtggttctagctacttgggatgctgagacaggagggcagcttgagcctgggagattgaggctacagtgagccgtgatcaagccactgccctccagcctgggcagcaaagtgagaccctgtcttgaaataagtaaataaaataaaatctcttggccagtgagctgtgctcaaggaggtagtaggcagatgtagagttatatataataataatactatatatctctccttataggcatgctcatatactcatgaacagattgtggaaatgatggaatttttgatagaatatggcccagcgcagctatattgggaaccagctgaagttttcctcaaactttcttgtgtgcaactcttgttgcagcttatttctattgcctgcaattggaagacctattatgcaaggtgggaccagagagagatttcaaatgaagtttgatgcatctttttgttaaagttgatgttggtttgcacattgtatatgcttaacaaacatttgttgaattgaattgaaattttggacttgaatctgagaaattagattaggcatgaaaatatgatttttaatttacagcacacttgttcatatatatggtcttggtgattgtaaaatttgcataataggcaaggattagcctctgtactgtcggagaaggtacatgatttacacggccacagctgcagagctggggttaaagtcttgtcttgagcctggagtccaggattctttagtacttaaagtgtcttgctactacttgacaaccatatataatgtttatattacgttcatataaaattgtccttttactcttggaattcgacatactgttaggattttcacaaattagtttaag

SEQ ID NO: 13454 - DNA, 1205 bp, Homo sapiens
agagatgtttgagctatgcagagtcactaaaacatgtctcagagccagaacactcatagggaaggtggtgatttggatacggttagcttgccttgcttagagaagttccggggaattcatgttcagcatttttttctttgtttttcttttggagagagtctcacctcgtcgctcaggctggaatgcagtggcgccatcttggctcactgcaacctctgcctccccggttcaagcaattctcatgcctcagccacctgagtagctgggattacaggtgtgtgccaccatgcctgactaacttttgtatttttagtagagatgggttttcaccatgttggccaggctggtctcgaactcctgacctcaagtgatccacccaccttgacctcccaaagtgctgggattacaggcatgagccactgtgcccagctagcatttttttctttgaaagacttgtgttcctaagcaaaacccttggtgattctgatgcctttcatcctctcctagcacccctgcagtggaccatgagtcggtaatgcccactgaggacctctgggagccatgtcagacgaatctgcctcagggagcgatccagacctggacccggacgtggagctggaggatgcggaagaggaggaggaggaggaggaggtggcagtggaggagtgtgacagggatgatgaagaagacctgctggatggtaagtgggctctattgagtgacagaagttgccttatattttcctccagtggaatttttgctgggagaccttggcgtttccagttagatttcttaggccatccatagtgggaagatacagactaggaactgagatgcaatgaattcagatgctcattcctaggaaatagattattgttcctccacataagctttgttttactgctggaagaacctttagcctttagcttgtctctgacagatgtttggactcaggtccagagattcgagtgttgcatacttgcccaggtcatggaggagtcaatggcagagttcctatggtaagactttgcagtctggaggccatgggctcttcaggtagatgtgagggtaactgtgagtggtctgtaagttttctgaaattatacatacaattgtgcttgtgtgtacatgagggaattgtccaggcagagattcttagacagattcacaacttcagaaagctcactgcatctcctgcagtgctg

SEQ ID NO: 13455 - DNA, 1099 bp, Homo sapiens
tgtactcttgacagaaagacagtaaacctgcctgtgtatctctgagcagtctcttcgctagtgctggagacagccagctcttttcttggtcctaaagtaaggctcattatctatcagccatgttggtaactaaatcaacatcctcctgtgtccccaggagcctttcgagcatgagtcattgctcttgaaccgaaaggatcacaagctaaccaaggctgagaaaaaagcagcaaagaaaagctatgaggaagacaaacgcacatcagtcccctatacccgcccatcgtatgcgcagtattaccctgccagcgatcagagcctgaccagcatccccgccttcagccagagaaactggtgagttgctgaaaggggagggtctgctgctgggccaggcacaaacacctttcaacttgttcatattttaaataaaggcagagcctacaacttgttccttgactgctgtgaattgacaggctctgctctagggtaggtgtgaaagcagttcagtagccctggtgttttaaatggttctggttttgactgccctagctggaaaagtgagctgctggcccgtgacccaggagagtctttctggacacctgggtaggagacggggataaagcttcccagaaagaggcccagccattccacacaggtgcatctgacccctagcaccttagtcctaggcctcacttagaagtggtgttcaaggatgaaggctctgttcccttggattacagtcagggaatcctgctgctcctaaggggattccattctgtgtctgtgccatgatctggaaccaaaaaatctcttttttgagtataacatctagacttgttcagaatattaacagaatagaagccaagtgctaagcagtgagagaggctccttgtaagatattatagaacagttatctaggtttaattttttttttttaatttcaagacagtgcctcacagctctcaccctccacttactgatcagatctgctacctgattcagtagtttgcatttttaattatttgattatcttgaattaaaaataattattttatttgatgggaacagatttaaattttctctttctttttttgtgaca

SEQ ID NO: 13456 - DNA, 3216 bp, Homo sapiens
aatttggggaaattcatgagagaaaatgggcattaccaatctatgtctcttaaccccggtggctatctctgagcagctctccctttccagcttggaaggttgtctgtgtgcagaggctgggagggagaagcactgcagtacgtgaatgaaaggtcgcagagttgtggctggaaaatacatttttcaccagggtagaactgagcccccagctgcctatcctggtagtcttttctgttcctttccttcccctttagagagctccatgttaatttatttcttatgggcaattatttattacttggacttttcatgtgtcttgtttatttgggggtggggggaggttaggggtaaggagggtaggtgatagaaagggaagttttaagatatcccagaccctatagccactggtgaaaaacaatcctggatggatggtaaattgaccaggggaagagttaggtttgaccaaggtttggattaaacaactatatttttgagagatggcttttcaggaagatcagggaatcctgagactggatagttagtggagggtgggactcattccacagaaatcgaaagttgtgatcatggagtttgcaattgggaagtaagagaccccagatttggagctgtgtcctcctgggatgatgttagatgttggctctctatgctgaatagtgaagctgtggataggcggttgctgggttgagggactgttgatttcatgttcgaaaatatcttcaggtggtccatgtaggcctggtgtctgctgcctccatctttgaaggaacatggaggagccctttctctgtaggagccctaagtctgggttttatcttaaaagaacacaccagtcattctgggtctccccttattgccattgccaggggagggtcgtctagtccttaagcataaacactggctgtcttcctactggtgtccccgccccctctgtatcccccaccccaacactttgccagacagttctttatgatgaacaaactttggctttagagctttaccacttacccatggctccctccttactgggcaggtggtgtacctgcctcttcccagcccagaaggcagcttagtcaggtcatcccagtagtagctcctacagctcttctgaccagcccatttccatctttggagggccttagcagactctggggtattgtcctcagagaagagacaaggagatgatggatggggtgcatgtgtatatgtgtgtttgtctgctgtccaataacaccaaaagtggaacttaagaagctttgtgttttcataagcaccctgccagacacttaactcttctactcatggaagccttagatctacaatttagctatgcaaattattttaataatttaaaaatagcagttccaaccagtgctttctctttcagatgcatcccaagaatggatggtgaagggactcagttggagtgagctctcaggttgaggctggtgcagtaggagtgagctagactgaatctccaatttatgggacacactcagaacctgggttacactgatgcctctcaggccctggagcactgggatcccagagatgcatgtgtgcatgtgtatgtctgtgtgtgtgtgttgtcgggagaagggggtagtatttctgtgttcacttctaggaaatcactgtactagcctccaagaatccggaaaccttcccagccgggaactgaaaccattccctggagggatgggcttggcttttgaagttgacagaaagtaaatgggtattctgagaggcagcacatgcctactgtctatccagtgttccagggactgggtcttgcttctactcagcagaggccatcattctgggaggctgacctgactagagaaggctttcttttatatgtgcagtttctattgtgtagaggggttgggggtgggatcatgggaaattggagtgctaccaggtccatggtttttgctttttttttttttttttttttttttttttttttttaaagaaaataacctgaaaacacttctgacttttccactgtctctttatatgtgctgataggcaaatgtgcatgcacaccaaacataagcatgtttgtgagggaagcaggaagtatctcagagcctaagaaccatgttttatagtttctttgatcataaacacttggtggtgtcttccacccattatccaggcctgaggggggcagggtggctggtgataagagggagggcagaaaatcaggcctaggcgttttcccttaccattgtcttccatggaatgttttcaagggcctctcaagccccattcatctggtttagccaagttctcagcctggggaacacagtactacttaatgattgaggtttaccatttatagtgatgcttgatttccttttcttaatatatttgtagataaaaattgaacagggacaaagtagctatttaagaaaggaagtgaaccatgttgggtcatatcattttctttagattggatatctatgaagtccacacccctttgagttatgctttttaggcatctatctcatcatctcctgatttaaggataattctgtctggtccttggagctctcttccctaggaattagtgtgtggagtctctatatgcttgtgatccttggagctctcttccctaggaattagtgtgtggagtctctatatgcttgtgattcacaactaaatatgaaatttctcaattcaggagcaggaagcaaagtgctggggtacagttttgcagattggttgaaacacttagccaaacttaagtggcctgggtaggaccatcactcccaaagttgtcagcagagaagggccctctgtgtgagtctattcaaacctggcattgctctgaaattgagtcctcatcccatggggaaggtcttctgggggctttacattccttgttactagtgttctggatattaccttctgcttcccacttccttttttttttttttgagacagagtcttgctctgtcacccaggcttgagtgcaatggtgtgatcttggctccgtgcaacctccactcccggtttcaagcgatcctcctgcctcagcctcccaagtagctgggattacaggtgcacaccaccatgcccagctaatttgtatattttttagtagagacggggtttcaccacgttggccaggctggccttgaactcctgacctcaagtgatccaccctcctcggcctcccagtgatgggat

SEQ ID NO: 13457 - DNA, 1232 bp, Homo sapiens
gccccctgagcccgggaggctgcattattcatgagtgcactgcgtgctgagttgcctctccctggaggagggggtggggtggtcctagctaacctgtgctcccttttcctggtcataggagctgacacaatgagtgacacgagttctgtaagcttggaagtgagccctggcagccgggagacttcagctgccacactgtcacctggggcgagcagccgtggctgggatgacggtgacacccgcagcgagcacagctacagcgagtcaggtgccagcggctcctcttttgaggagctggacttggagggcgaggggcccttaggggagtcacggctggaccctgggactgagcccctggggactaccaagtggctctgggagcccactgcccctgagaagggcaaggagtaacccatggcctgcaccctcctgcagtgcagttgctgaggaactgagcagactctccagcagactctccagccctcttcctccttcctctgggggaggaggggttcctgagggacctgacttcccctgctccaggcctcttgctaagccttctcctcactgccctttaggctcccagggccagaggagccagggactattttctgcaccagcccccagggctgccacccctgttgtgtctttttttcagactcacagtggagcttccaggacccagaataaagccaatgatttacttgtttcacctggatttgggttgtgtatttgtttgttctgccttggttgggggcggtggggggatggctgtacagataggctgggagtgggaaggagcctcccctccccaggacaaagaatggaaggaacatggcaggtaccctggggttgggggaggaggggagttagagatcctccacgtcctgctctgtgaccccagtggccagctgcccctccattgcagctgccagagagcaagcagagcctggcttgggtgagagctgagtatggggtgcccttcagggctcaggaatggggagctcacagcctgtcttcatctgcctccaagggatgcctttgtgtctgtgactagtgtgcctgcacgctggtacttccccagtaggcgaggctcccccactgtgcctgccagtggctgtgtacctgtgtgtgtgcatgtgcacccacgctcatgcatttggctctgtgtaaccacggatggatggggctgcttgggtaaagctgtgcccaggtgagcatcagggtatgat

SEQ ID NO: 13458 - DNA, 2150 bp, Homo sapiens
cttttcatggatgaggatgatgaggcagagagctcagatggccttgtccgggctgtgtgcccttgatcccttcctgtcatgtggccttttttctttttttttagaattaaaaaaaatttgttgtgggtgcttagtaggtgtacgtatttgtggggtacttgagatgttttgatacaggcatgcaatatgtaataatcacatcatgggaaatggggtatccatcccctcaagcattaatcctttgtgttacacagggggccttttctgcctctggccccctcactgctgtattccctccctgtttatagctctgtggccttgtggggtctctccaagaagcgaccacttgccctgcagcgtgaagctcacgggctgcggggagagccaggcctggagcagcccttctggatatcgtcggtggcagccctcctcaacacagaccttgtggccacaggtgggtgccctgagaggcagggaggaggggtcgccgggtgggccggtgcaggggttgctcactgttccagtctccccaggctcccacagctcctgtgtgcggctttggcagtgtggggaaggcttccggcagcttgaccttctctgtgacatccccctggtgagtgagtgtgcttgaatgctcagcctgtctctgccacactgcctaggcccctggagttagctctttaaggtctttcttcctgccagaagggaaccttctcagggcagggccagctcctagcacagggcctggcaggaaccctccccactttccctcctctgctccccttcctatcctaggccctgtccagggtgctggggtacaagtcagggagcagcatggggagaggcatggaggcctggccctgtgatgaattctgtactgctggtgccagattgggtgccaggctagagggtgtggacctcactgtccacactagggtgacctgggggagggtggcaggatctgtcagtgatgtgtgctgagaatgcagggtctaggtcagtggggacagtcatggggtctccagggccccaccaccaggagccagcctcaggccatactgggtgtacactgcctccttcatcctcacaaactcactgctagccccgtgctctgcttacccccatctcgcagatgtggaggctgaggccctgacaagtgaagggctggcctgtgtcaccaggtggcaggaggcagagcagggatttaacccaggcctgataaggcccagcccttgactgtgatgctgaggacggtggtggcggggggcgttctaatgtctttccgtgttgtctttctgctcaggtgggttttatcaacagcctcaagttctccagctctggggacttcctggtggctggggtagggcaggagcacaggtatgtgtggccctcgagggttcaggtaaggtggtgcaggctggacagctcggtggaaatggggtggagactgggccgagtctcagctgcgtcttgcactccctgcaggcttggccgatggtggagaatcaaagaggctcggaattctgtctgcatcatcccactccgcagggtccctgtacccccagctgctggttcctgacactcttatcctccttatttaagtccttcccaggctatgccccaccctctttgtattaaaagcctcctcttttgggccttgtttcttgtagcttcttggtgggggtgggggtgcatgagggactgggtgggaggcggcctggggagggacaggactccagcagtctcctagctctgcccctctgctagcctgagggctgttatccttttccaaagaacttgggatggagacctcaactggctcctggctcctgtccctgcgtgtcctgcacgacctcctcaggctagctgcctgccactgctctgggtggtcggggtcagaagctactcacccctcagctcagaagccagggcttgtaagggctggtgctggggtcaggactggactgtagacagcggacctgcacatcaaactggcttcgcttcctctcccaggtcaggtcaggaagctggaggggacagactgccgtgaggtgtgggggtcaggagtgggagtgggaccctgcactggtgggcttactgtttggagacaggggtccaagttgggaagagctctgtctttggtctgaatg

SEQ ID NO: 13459 - DNA, 1111 bp, Homo sapiens
gtggggaagtctctggaggcaggtttgctgccctaggagtgctctctgggtgacagtgaaagctgctgcccggcagtggggcttatgagctccctgtccctagagacctttgggcaaagtcaggatgatgatttaatgggaattaatgctgcaggtaggtggttggactagaagacatttgaggctgtgcagtcctgggattgagtgcccggtcctcctgggttcccatccgttgctggctgaccagcggttccttctacacccgctgtagtaacagaagaactcacaccatcaatcccaaagcccttttacatcccttctcttttttgggctttgtggctgctgtttggcactaatgtccctcttcatagatgaggaaactgaggcagcttgtccggaggctcacggtggctgagccaggtcttctggccgagtccgggacatttgccatggctcttttttccatgctgccccttgaggggggttgccagccagccctatccccccatcccagtagcttctcccccacccccaactgcagggagcgtggagagtggacggaagctgcatgtgattcctcgagccaagaagggtgccgagggaaagccccctggccacagcagccacgtcctctgcatggccatctcctccgacggcaagtaccttgtaaggccaggttggccctgggggcaggcgggaggtctggtgcatggtgggtgcctgtgatcattgtcttcatccctgcaggcctctggtgaccgcagcaagctcattctcatttgggaggcccagagctgccagcacttgtacaccttcacaggacaccgggatgcagtgtcggtgaggagctgggtctatgtcagtggatctttagtgggcacatgctagtgttctaggctcagtgctggcctctggagtctctgtcctcagggaacctgcatcctggggtagcgagtgggtagcgagtggtgctgtaaaatacataaatgggctaaagggatggggaggagctgggggagaccgggccgagcttgctcaggaatcaacgagggccttgagaagccgcctctgggcgggatgtagcggctcttgcctataatcctagcacttt

SEQ ID NO: 13460 - DNA, 1521 bp, Homo sapiens
ccctgggtctctggccaccccatttctccctgcacctcgtgctatatctgcttgtcctttcttcccttcctcttccacctttcccatcttccccttattgttctctgttcactacctctctcttgcctttcatctaatctcatgcccatctctgccctcattgcccctctctcactcccactttcccctttgtctcccctctatatccctctctccagtctagagacggccaagtctacctctggggggacgcccagctcggcccccgcagacctgcctgcccccttctcgccacccctgacggccctgcccacagctccccctggcctgctgggcacaccctatgccatctccctctccaacttcatcggcctcaagcccatgcccttcttggctttaccacctgcttccccagggccgccgccgggcttggcggcctacactgccaagatggcagcagctaatgggagcaagaaggctgagcggcagaaattctccccctactgaggccagctgaggtacaggcaggggcaggcaggaccaccagcagggggctgcctctgcaccctacccgcccaaggagactccaccctggggtcccaaacgccgctaacgcccagacgcatggatgcaccccctaccctgcctccatctatgggagttctttctctcagagtgggggcagtttctggcccaggggtctgagctgcggcagccccagggcagggggccctacctcctcagctctgtgcttggatacagggagcagccaggagactccctagtgcccccaccatggcgggtgtcactcacgcactccccatcccttagggcttcctggcctactgcatccttgtgggagtcagggaggagggcccgttgggtagctggggccaggcttctctccccaccacctgcagatttcttgctgcttccactgatacccttttgactggaatgaactggctgggcttgtcagggggcaccccaaagagggggcactgccaggtagctgggggagtggcatggggcaggggcccagttctcagcagcagacactctgtacagttttttcaatccctgtttttgaataaatattctcagcgaccaggaagttgtgaaatactggtgttgtgggcagcaaaacctccagaaaatgggtgcagctgaggtcctggaggacccccatgtgtgaatccaccaacctcaattaggcctcagccccttccacatgccagttctggggcttcaggaccctttgggggtgaagtcgtccagcctcctacttctaataccaaactggtccagttgtcttctgggcattttagaagcaggtggaggagtttcagtagctttgtccagactctccttggtgcagatgtcagggaagtccttctgagtgtctctccagtggttcttcctgctgtggctgtaacccagatactgccctgcttggcggatcactttggttgtgagcccttagggccctcttctttgtgacacctgcccatcttggcctgg

SEQ ID NO: 13461 - DNA, 1355 bp, Homo sapiens
tgatttttcttttttttttttttttttaacaaaaagtgttattttcaggctacatgcaacagtggattgtataacccagtatttcatccctttcctgatcctgcaagagagagaaatgttcagttttgtttttcgttcaatttcaaaaagcaagtatcgtgtttgtttttgtttttgttttttaatggaaaagacagacgccatgttgaccttgaccaaatgcgttttgcacatgtgtgaagcctctgtttcctcagcgggcccttcttgaaggggtggcttactgctcttcaggtattgggacccccagtcgtgccgcctcccacccttggcccagtctgacttagctctgcattcgcctgtgatgactgctgcaagttgtgattggtgggctggatggtggtctttgcattttctgccgtctcatccatccctctggtggtccctgcagacctccctgaggcagaaggtggggaccctggggccctgccgctgtcccccaggaggtgggccgcagggggctgccaggcagtagcattagccctctggggtcagcccctaagaaggcctgggctctgagcccttttatatacttagccactacttctgtctgtctgtctgtctctctctcttcctctccctctctctctttctctctctccctctctctctctttctttctctctccccccctccctctctcttcctttcctctctcttgttgtaactgggagtggaggcccagtggctggggagacattaggtggtggggcccagcccgacctccaggttcttccttctccctagctgttgctttggtctggccactcccagcccccttgtccccttggaagcttgccctgccctcatcttgcccatgccttctactgccaggagacttgcacccatttcaaccctagggcgggggcaagtggggcaaggatggaccagcagaaggggggtaaggctctgttcacttccccctgcctccacagaacgaagccacggattccgttatcttcctccagttttgttccttctccagcctcagttccaccaggtgtcaggactgcatgggggcctggggcaggcagaggagtcaggccagggtccctgacggagcagcactcagcatgtgagtgaggccacagaaaaactctgccccactgcttcttacctcacgggggtggctttcagggattctttagcgcagcagattaaaatcttgccacagtcgagaaattgacaacaagcttccatgctgtacatggttctctttttctctcttttatttttaaaaagaaaacccagaaagatgtaccagatttgtgtaaatgagggtatgccagaaggtg

SEQ ID NO: 13462 - DNA, 1135 bp, Homo sapiens
ctggctaccatgtcatgtcctttccctgggcctggagacagggaggaggtgaccccagcgagcagagtccaaggcatgcagggcagcaggccctaagctcttgctttcctgggagtggcattccaggtggggaatcaaggggagacctcaggagaccccagggctaggatgtgagagtaaggggtgccccaggagtgggggctaccaggggtggtgtgtgtcagagcccctcccattggggtgaccactgccttgccccatgcagattgagattggcgatggggcagagctgacggcagagttcctctacgacgaggtgcaccccaagcaacacgccttcaagcaggccttcgccaagcccaagggcccagggggcaagcggggccataagcgcctcatccgcggcccgggtgaaaatggggatgacagctaggaggctggagcagggccggccacgtgtggactgtggggctgcccaccttccgctccctgccaccatcctccttcctgggctccaggaaagtgtttctgggaggtcaggagggctggcagctgaacgcacttgcagcgtccgagggccaccgggctggcattttgtgacccttccctgttgctgtccctgcatctcgtctgtgtgcccagggtgtccggggaccctgcctggctggcttaagggggctgggtcaggggcctggcatgaacctggcctcccggggagctgagactagggtcccagcacagcccagaaacctttggccacaagaagtggggtcagtcagggctggggcaggggtcactgcagtttgggatggttgaatgctgtattttctaaagaataaaatatttttaaatcaagacttgtgcttggccctgagagaccgcctctggccctgggaattgggcagtcttgtgcatataactgtcctttcccaacaggggagaggggagtgccggcctgcgaggtggagccccagcactccacctccaggtgtgtgggagaggctgtgcctgtgagtgggcgtgcagcctcacgcgggtctcccagtcaacaggagccctgctggagaggcaggcgcgcctccactgtgacatgagggatctgcatatggtcatttgctgaggctgccgtaacaaa

SEQ ID NO: 13463 - DNA, 1141 bp, Homo sapiens
atcaccggaggtcgggagtttgagaccagcctgaccaacatggagaaaccccatctctactaaaaatacaaaattagccgggcgtggtggcatgcgcctataatctcagctacttgggaggctgaggcaggagaattgcttgaacccaggaggcggaggttgcggtgagttgagatcgtgccattgcactccggcctgggcaacaacagcaaaactccgtctcaaaaaaaaaaaaaaaaaaatgccacctcacagtctctatcgttgggccctgtggttgcaaagctgcctcctgaattaagaaggaaagggaaaagatatagctggaagcgagtggaagagatgctgagggctggggctgcacagacgtgctcagcagggctacaggtgctcaagccctattggggatgggtggggagtggggcagcggcgtttgccaccttaagaattggggccaaagccactgatgtttatttgacagtgacactgcactgggtacttaaagaaattatttcccgttgtaattataattactgcttattaaggaaaatatgggaattttagaaagaatcaagtttgccacccaaatgctaccactgttaatcttttggtgttaaatgttccccctagacatttctgtgcatagatttttggtgtgtttacatagtcgttattctgtatatacaattttatgtcccttttgtacttaacgtataaacattttttccatgttacagtcttaaacagaattttatggctgcagcctcttcgatttgagtttctgtagcatggtttgcctggttcccagagctggagggaggcttgggttgtctcctgttagttctggctcacactgcagcttgctgtaatgctgtgtagacggattgctgggctccctgggactgcctctgactgccccttggtaactaagatttatgggctggtgggaggaacccctagaaccagccttcaaccccaggctgtaatagccatagagccagcaatgactgacggggcaaggcaagcctgagccagcctgaatcttcggagactgtctggcacttacctcaggctgccttgcatcctctactgtttactcaacccttcaccagattgacaacctctagttggaatatgtttt

SEQ ID NO: 13464 - DNA, 1975 bp, Homo sapiens
aagcatcttcaatttgaatgtacatgctgctgaggagccggtgaagtcatcagttccgcacatcccttctaccctccaactgcatgggaagccaaagtcctggttttgaaatgcttgggcagctcagccgcttgccctcaccctgcatgtcttgttactgggtctccctgtgtacttgtggcattatccacaaccatcatgtttcttaggtgccaaacatttacagaaacattttcatatatcttggggtcagagaaagggacagatacagaaggaccttgcttgcaggaagccatgcagttagtttctgcagttagtcgtgtgaggctaggtggttgggcaggcctcgggctgtaggtgttgggtgggaaaaagacccaagggcctgaaagggagggaaaggggagggtagcgggagggtagcaggtgagttcctagggctggaaggtttagcagcagcctggtgcagtgccctgtcatcaagacaaacccacggtcctcctgggtgcctaccaagcttggtttgtacaaaagcaaggtgggagtctatttttgtacatgagatacatcacacttacctgtgggccagtattgtgaagtgagtctgagttgtttacactgatgccttccctgcccaccacaaattgtgtacatagtcttcagatgataccacccctttccccagctcccaaccaagagctggttctaggcctgtgttatatgtcatatttagcgtttttatatatgacctttgatttctgttgtttgtattttagcacagtgtatgcaccttcatttaaatacatctgtgtgcatacagatacgcatatatgtgtgtgcgtatgcatatatctctcatctgtagtttccaagagttcagctgaagcagatggagtcctgcagcccaggagacaccctgcatccctgctaatagtgtttgccacaagtattagtgagtcttccttattaatattttcatttcagaagactgaagcaaagctgatagtgtttgctgtttctttggcagctaagtgagggtcttgggatgacttgctgtgttcctcaagctgcactttggggccatctctgcagtattagccccctttttgcttggtggtactctgtctgtgcctgtgtgtgtgtgtgatagtcactcttgcatggcttccatgtctggtttgtggcatttggggataaggtgctgaagccagagcatttgcagtttgtttgaggcctcgttgccaatgatagatcactcctgttgacctggtatgtctgcttgcttgctgcttttccttgctttctcttggaagaggaaaggactctggtcaggcccaggctgagtgagatgagctgcagctggctcatggccttcttagagcagagagaggagtatgtcattttactaagttcctaaacaaacatttatgcaggcaacactccttgcagatccagaaactgaggcacaatagggttatgacttgctcaagaatatgtagctgctagggggtaaatcaaggcatcacaatttctgttcagcgggcaggaataggctgtgaattgctagcactttttttttttaagcaattactttttgacttgttcctctgaaagtgcaagaggcgtacacctttcccaaatgtagactagaatctgcaggatgccacccactgtatagttctgctttcccagagaggaagaacttttagaaaccaaatgatcttaattgttattgcccacccctggcttttccgggtagaaaattcacagtaggaatgattgttaagagagagtgcttggaaccatgggttaacaggaaaggctacctaacttcacatatctgcaaccagagcagccaccaagcattacttagcagcaggaaaatgattgtatttgagttcctgtgtgtccaaaactgagcaccatgttctttgaaaacatgccacctcaaggctgggcgcggtggctcacacct

SEQ ID NO: 13465 - DNA, 1194 bp, Homo sapiens
ctgggactataggcgcacaccacctaattagcgcgcccagctaatttttgtatttttaatagagacggggtttcaccatgttggccaggatggtctcgatctcctgacctcatgatccgcctgcctcggcctcccaaagtgctgggattacaggcatgagccaccgcacctggccaactcagccatatttttattattcacattttgtagacgagtaaactgtgaccccaaaatgttccgtaagctatccaagtccaacttcacacatgtgctaagggccagagctgggatttgtacccaggccacctgacccagctctctgctcttagcctctatgttttgccattgtttttcactctgtggccttgagctgcggagcatagctactgccacgtgaccccagcccactacctattctcttgccactggcctcacaggtacaatcggctgctgcaggtgatcacacagacactgcaagacctactcaaggcactcaaggggctggtagtgatgtcctctcagctggagctgatggctgccagcctgtacaacaatactgtgcctgagctctggagtgccaaggcctacccatcgctcaagcctctgtcatcatgggtcatggacctgctgcaacgcctggactttctgcaggcctggatccaagatggcatcccagctgtcttctggatcagtggattcttcttcccccaggctttcttaacaggcactctgcagaattttgcccgcaaatttgtcatctccattgacaccatctcctttgatttcaaggtctgggcacagccagggccaggtcaggtgacaggctagggtacagcccagggaggagaggctctgaggccacggttggttggcagttgggggacccctaagccagggcatggaaagacccaagccagaagaggccatgagtcccaggaacgggtctgggctgggtccatcagaaatccacaggggcagggcacagaccacaggccatgggctaaagtggtaggtacgtgatgatgggcaggcaggcagcattaggcagctctctcagaagggagttttgtgcctcctaacccagattctgggtattgttatgtgtgtggggtgtgtctgtgtctacccacaggtgatgtttgaggcaccatcagagttaacacaaagaccccaagtagggtgctatatccatgg

SEQ ID NO: 13466 - DNA, 1989 bp, Homo sapiens
ggacccacaactacgatgagttcatctgcacctttatctccatgctggctcaggaaggtgaggggatgcgctgctgtcttaactggaatgccctgctgagggccgtgtccttcagctcccctcccctggcctctcctgaggcttgagcagaccttggggcacagggagggccatgagagcctcagctcctggcctgaggcagccagcacctgctcaagggtctctacctcttcgcaggcatgctggccaacctagtggagcagaacatctccgtgcggcggcgccaaggggtcagcatcggccggctccacaagcagcggaagcctgaccggcggaaacgctctcgcccctacaaggccaagcgccagtgaggactgctggccctgactctgcagcccactcttgccgtgtggccctcaccagggtccttccctgccccacttccccttttcccagtattactgaatagtcccagctggagagtccaggccctgggaatgggaggaaccaggccacattccttccatcgtgccctgaggcctgacacggcagatcagccccatagtgctcaggaggcagcatctggagttggggcacagcgaggtactgcagcttcctccacagccggctgtggagcagcaggacctggcccttctgcctgggcagcagaatatatattttacctatcagagacatctatttttctgggctccaacccaacatgccaccatgttgacataagttcctacctgactatgctttctctcctaggagctgtcctggtgggcccaggtccttgtatcatgccacggtcccaactacagggtcctagctgggggcctgggtgggccctgggctctgggccctgctgctctagccccagccaccagcctgtccctgttgtaaggaagccaggtcttctctcttcattcctcttaggagagtgccaaactcagggacccagcactgggctgggttgggagtagggtgtcccagtggggttggggtgagcaggctgctgggatcccatggcctgagcagagcatgtgggaactgttcagtggcctgtgaactgtcttccttgttctagccaggctgttcaagactgctctccatagcaaggttctagggctcttcgccttcagtgttgtggccctagctatgggcctaaattgggctctaggtctctgtccctggcgcttgaggctcagaagagcctctgtccagcccctcagtattaccatgtctccctctcaggggtagcagagacagggttgcttataggaagctggcaccactcagctcttcctgctactccagtttcctcagcctctgcaaggcactcagggtgggggacagcaggatcaagacaacccgttggagcccctgtgttccagaggacctgatgccaaggggtaatgggcccagcagtgcctctggagcccaggccccaacacagccccatggcctctgccagatggctttgaaaaaggtgatccaagcaggcccctttatctgtacatagtgactgagtggggggtgctggcaagtgtggcagctgcctctgggctgagcacagcttgacccctctagcccctgtaaatactggatcaatgaatgaataaaactctcctaagaatctcctgagaaatgaaccctcctgtggttgctggcctgagatatggaggctgggccttactagacctcatgggcctagggccctgggaccagaaaggtaagaagtatatgatccttgagtgtccagctgtcttgggccagagatccttggaatcctaggcctgggatttaggacctgagctgaggagggacttcaggtggactgtagacagggtgcactttctggggagagggccatggctttcaccaaatctgtggctttgcagcctggagaggtgctgggactgtgggtcaaagaggcggggctgcctctaatctaatctcgcctggtgtgttctccctgggagggcg

SEQ ID NO: 13467 - DNA, 1132 bp, Homo sapiens
tgcaggaggcgggtgaggtctctaagctgatggctgactggccatcagctatgggcacattcagccagagggccatcttcaaaaagctcaccctattctggactgcgcccctcctctgcatgtatgtcgggggaggtggtgatctagtttggaccctaccatcctctgtctccgggtgtgccgagttggacattattaacacacctaccttttgaacacttgccatgggtcaggcccatgtacaaagcattttacatgcattgccttacttggtccttgattctaagatggaggaactaaggctcagagagaacttaggctccaagttacttatataagtgacacataagctgcagccaggaaatggcagaaccaggtttttaacccaggccttccttaacctctaggccatattgcctcctgatagagcttagttgctaccactccctccccacatcagctgcttgtgccttgattcctggctcagcagcagaaatcacagccatgaaccagttgaaagggttggaaaatgacttgcttccaggaggtagtcagggcacctggaaagaagtacaacagagaagatgctcaggctagaactggccctgctctgcctcccttggaagaaatggccttgcctgcagctccggttgggttttgagttacctagaggcaggaggtaaaaaactaaagaggtgacttgtggtaatcacctttttcattccttactgatggatggagccacatgcttgtctcatgtgcctcccagccctagtgcttgggccatggaggaagctgagaggggccctgctggtcagcaagggtcaggtgcagaggctggtgggcaagggcagcctgactttggccttggggtgggtctgagttgcagagagaaagactgataaaagataattgggaaagataattgcagcttttgctgctgggggaggagactccttgttgctgggctcccttgccacaagggctgttggtttccccttttaggtttacatcatccaggtcactgatggcagccatgagtggacagtaaagcaccgctacagcgacttccatgacctgcatgaaaaggtaactgttaagagctgggagcacgtatctcagggctggggga

SEQ ID NO: 13468 - DNA, 1096 bp, Homo sapiens
gctttgtcctatttcgggtgaaggccagcatcaccagtgggcttccaccttccgtacgtgggtgggttatcatagacagttatctctgtgctcaagagccacttcttaaccggggtgggaggaagcagcttcaggaactgctgagagagcagaactcacgctccagggctcagagcaggaggtagggtgtgcggcaagcgctggcccggacagaagcagagtgggccctggtctcgggcaggatgtttctgactcacatttcctgaggagagaaagctaagctctttgcctaatgtctctgtctccccttccagaaaaatgcctcagctcttccggcctgaaggaatggcctcctcccgggccccatgattctttcctgtgtgggccctcctggccctggcctctgggctgaggcttgctagggactcggggtggctctaaggggcagggatagggctggggagcgccggcctgtggccctgaccagccccttctcgtgcaggttccaccccgatgcaggtggtcacgtgcttgacgcgggacagctacctgacgcactgcttcctccagcacctcatggtcgtgctgtcctctctggaacgcacgccctcgccggagcctgttgacaaggacttctactccgagtttgggaacaagaccacaggtacccctgtctagctcaggctgcagacaggctgcctggacagacgtcatgggccccagggtggctctctgtgccccagaaccctctctgcctctatgtctctcttttctcacttagctggccagggttttatgtggggcttttcgatggcagagtctccactccagcagtccctcaaccatctggcagacacatctccagtgcctgctttgggctcctggcctgtgggccccacacttggagcatcctctcctgcctgtctcatgccggggtctctcggttggcttggggcccttggtgctcccagccccaccaggggccggttccaggctatagcccaggtggcatctctctgcagggaagatggagaactacgagctgatccactctagtcgcgtcaagtttacctaccccagtgaggaggagattggg

SEQ ID NO: 13469 - DNA, 1217 bp, Homo sapiens
cccgcaggccctcaccctcgtcttcgatgacgtgcaaggtcatgacctcatgggcagtgtcaccctggaccactttggggaggtgccaggtggcccggctagagccagccagggccgtgaagtccagtggcaggtgtttgtccccagtgctgagagcagagagaagctcatctcgctgttggctcgccagtgggaggccctgtgtggccgtgagctgcctgtcgagctcaccggctagcccaggccacagccagcctgtcgtgtccagcctgacgcctactggggcagggcagcaggcttttgtgttctctaaaaatgttttatcctccctttggtaccttaatttgactgtcctcgcagagaatgtgaacatgtgtgtgtgttgtgttaattctttctcatgttgggagtgagaatgccgggcccctcagggctgtcggtgtgctgtcagcctcccacaggtggtacagccgtgcacaccagtgtcgtgtctgctgttgtgggaccgttgttaacacgtgacactgtgggtctgactttctcttctacacgtcctttcctgaagtgtcgagtccagtcctttgttgctgttgctgttgctgttgctgttgctgttgctgttggcatcttgctgctaatcctgaggctggtagcagaatgcacattggaagctcccaccccatattgttcttcaaagtggaggtctcccctgatccagacaagtgggagagcccgtgggggcaggggacctggagctgccagcaccaagcgtgattcctgctgcctgtattctctattccaataaagcagagtttgacaccgtctgcatcttctaaaccaagggtcactgggatcccagcagggcttccgtccagggcgtggtcacatgggggagggagggtgccctggagacaggagggtgaggggttgggggaaaggaaggagcagccctccaggagccagatgcttcttggaacatgggaggcatgacagggccatggcctctctggacagtgccatgctgggctgtggctaaaccatgagcgcagggcaaacaagaaactcctcagggcacccctgacacaccagccgctgcccctctgcctgggtgcggggcatgccaccctcttcaggctgtcctgcaggtcttatgtgtcagtcacccctgggcccaaccccacctgtttcacaacccctgttgagagtgggggaggggc

SEQ ID NO: 13470 - DNA, 1115 bp, Homo sapiens
aaacccccccccccccgcccccagcaactggcgctgagcccagttctgccgccccacccaccaggatctcatgctgcggcacggctggcgcacaggcgccatcatccccgagctggagcgtgagatccgcatcatcaacacggagcagtacatgcactcgctgacgtggcagcaggcgctcacggggctgctggagcgcatgcaggtgtgggccggggtggctgtgggagggccagggcggtagcctcctgggtgcacacacccaatgcacactttgtgtccccagacctatcaggacgcggagtcgaggcaggtgctggctgcctggatgaaagagcggcaggagctgaggtgagcaggtggggccagggcaggagtcccagccaagccaccaccccaggcccaccccttgagcgcatcgtgtctccctcgccaggtgcatcaccaaggccctgttcaatgcgcagttcggcagcatcttccgcaccttccacaaccccacctacttctcaaggcgcctcgtgcgcttctctgacctctacatggcctccctcagctgcctgctcaactaccgcgtggacttcaccttctacccacgccgtacgccgctgcagcacgaggcacccctctggatggaccagctctgcaccggctgcatgaagacccccttccttggtgacatggcccacatccgctgagggcacctttattgtctgggacaggccctcagcccctcctgccccatccacccagacaagcaataaaagtggtctcctccctgtgcatgcttctgctttcagccccagcctcgtcacttgactgtgaggatcctctgggtgtcagggaagtcctcctccagcagtgagtcctagaagagcagggttggtggtggagggtgtgaccagggcctgggcccatcccacatctgccacacttcttcacttccatgcttacatcgaagggttcacaaaaggtgtcgctgccaaagacagggttggggacagagaccagggtggggttggtcccttcttgccacggtgagaagtcgtcatcagcatcatcttccgcctgggagcagcagaggggtgagtggcgaggcgcctcaagcgagatcc

SEQ ID NO: 13471 - DNA, 2912 bp, Homo sapiens
ttgttatattaagttgactttatcaaatacacaaagatttttttgcatatgtttccttcgtttaaaaccagtttcataattggttgtatatgtagacttggagttttatctttttacttgttgccatggaactgaaaccattagaggtttttgtcttggcttggggtttttgttttcttggttttgggtttttttatatatatatataaaagaacaaaatgaaaaaaaacacacacacacaagagtttacagattagtttaaattgataatgaaatgtgaagtttgtcctagtttacatcttagagaggggagtatacttgtgtttgtttcatgtgcctgaatatcttaagccactttctgcaaaagctgtttcttacagatgaagtgctttctttgaaaggtggttatttaggttttagatgtttaatagacacagcacatttgctctattaactcagaggctcactacagaaatatgtaatcagtgctgtgcatctgtctgcagctaatgtacctcctggacaccaggaggggaaaaagcactttttcaattgtgctgagttagacatctgtgagttagactatggtgtcagtgatttttgcagaacacgtgcacaaccctgaggtatgtttaatctaggcaggtacgtttaaggatattttgatctatttataatgaattcacaatttatgcctataaatttcagatgatttaaaattttaaacctgttacattgaaaaacattgaagttcgtcttgaagaaagcattaaggtatgcatggaggtgatttatttttaaacataacacctaacctaacatgggtaagagagtatggaactagatatgagctgtataagaagcataattgtgaacaagtagattgattgccttcatatacaagtatgttttagtattccttatttccttattatcagatgtattttttcttttaagtttcaatgttgttataattctcaaccagaaatttaatactttctaaaatattttttaaatttagcttgtgcttttgaattacaggagaagggaatcataatttaataaaacgcttactagaaagaccattacagatcccaaacacttgggtttggtgaccctgtctttcttatatgaccctacaataaacatttgaaggcagcataggatggcagacagtaggaacattgtttcacttggcggcatgtttttgaaacctgctttatagtaactgggtgattgccattgtggtagagcttccactgctgtttataatctgagagagttaatctcagaggatgcttttttccttttaatctgctatgaatcagtacccagatgtttaattactgtacttattaaatcatgagggcaaaagagtgtagaatggaaaaaagtctcttgtatctagatactttaaatatgggaggccctttaacttaattgcctttagtcaaccactggatttgaatttgcatcaagtattttaaataatattgaatttaaaaaaatgtattgcagtagtgtgtcagtaccttattgttaaagtgagtcagataaatcttcaattcctggctatttgggcaattgaatcatcatggactgtataatgcaatcagattattttgtttctagacatccttgaattacaccaaagaacatgaaatttagttgtggttaaattatttatttatttcatgcattcattttatttcccttaaggtctggatgagacttctttggggagcctctaaaaaaatttttcactgggggccacgtgggtcattagaagccagagctctcctccaggctccttcccagtgcctagaggtgctataggaaacatagatccagccaggggcttccctaaagcagtgcagcaccggcccagggcatcactagacaggccctaattaagttttttttaaaaagcctgtgtatttattttagaatcatgtttttctgtatattaacttgggggatatcgttaatatttaggatataagatttgaggtcagccatcttcaaaaaagaaaaaaaaattgactcaagaaagtacaagtaaactatacacctttttttcataagttttaggaactgtagtaatgtggcttagaaagtataatggcctaaatgttttcaaaatgtaagttcctgtggagaagaattgtttatattgcaaacggggggactgaggggaacctgtaggtttaaaacagtatgtttgtcagccaactgatttaaaaggcctttaactgttttggttgttgttttttttttaagccactctccccttcctatgaggaagaattgagaggggcacctatttctgtaaaatccccaaattggtgttgatgattttgagcttgaatgttttcatacctgattaaaacttggtttattctaatttctgtatcatatcatctgaggtttacgtggtaactagtcttataacatgtatgtatcttttttttgttgttcatctaaagctttttaatccaaataaatacagagtttgcaaagtgatttggattaaccaggtttggttgttctgttaaagtggtgtcagatgtttcaagcagatttaactcctgcaagccctgatttcatgctgacaaggttgtatgtgactgccaatttaagagaacaaagctccacagatggagatgaaagtcagtgtccagacctctggttcagggctcgggctgcattaacacagagccaaatgtagtcagactgcagactgaagtgccccacgccacgcctcaggctggcagtcaaggaattcctacatgtcctcagcatgggcagaaatgcaggttgaaattaaaattggagaattactgagggcggaaagtgaggaaagcatgtaagcagtatagcccacttcaaatagcttgtctgtggccagaaga

SEQ ID NO: 13472 - DNA, 1202 bp, Homo sapiens
agtatattgtagaatatatgtattctatatttcttcaattctaagactccattaaatgtgtcatattcgtgtaataacttagtgaaatgaaacacattaagaagcattaaggtggggatgaagtatatcagagattatctctagaattacttgattcgaaacgacatacgtacttctttgtgcctttcgatattatccaaaatgtccatatgatcatatattagtaaggtgatgtttttattctctacatcctttgtgtagttatatattcatttaaattaatgatggttgtaattcaaagatagttttgagtagaggctattaggaatgtgaagatcatactattgctgattcctgccttcgcatgttgcaaatggaattaaatgtattaaatgtattattagtatgtgttgtttgaaccctacatctgacttcagcatccctttggtgagtacctttttcctttatttatttatttttttacctaagaagctgaaaagagtgaagattcctctggtgctgcaggcctctcaggcttacatcgcacatacagccaggactgtagctttaaaaacagcatgtaccatgttggagattacgtctatgtggaacctgcagaggccaacctacaaccacatatcgtctgtattgaaagactgtgggaggattcagctggtaagtttgttttaaatcaaaggacagtttagtgagatatgactgtttgacttctccttgctcctcagggaagaaaattttaactcagacatcttaagcctttccataataattgttcaatatgtcaataaatgtaagtaagcacccatcatatgaaaaacataggacctattgggcaagtgtcacagttgagtcaaaagaaatacagcttctaggtcgggcgcggtggctcacgcctgtaatcccagcactttgggaggctgaggcgggcagatcacaaggtcaggaaatcgagaccatcctggctaacacagtgaaaccctgtctctactaaaaagatacaaaaaatgagctgggcctggtggcgggcgcctgtagtcccagctactcgggaggctgaggcaggagaatggcgtgaacccaggaggcggagcttgcaagggagccgagatcacgccactgcactccagcctgggtgacagagtgagactgtctcaaaaaaaaaaaaaaaaaaaaagaaagaaata

SEQ ID NO: 13473 - DNA, 1414 bp, Homo sapiens
agtggacagagctaggaaatttgtgtgtttgtttgtatgtttatatttaaagataaattacatcataagttcatagtgatactttcaattgagattaaaggcctcaaggtaattattaatgtcctacgttttaacatccgttatctctttttatcccatgatgaaaatctcagttctccaggataccagaggtgatagaatgtcacatagctactcatttgctttattccttcttattcacagctttctcaaccttacagtagtctcccatcaaaaatataattactgaaaacagttaaaaaaaatttttagtacttttttgtctgcaggttatatttcactatagacatgctaattgctagattttacaaattacttggaatcgtcccttgtggttatgctaccatctgtatacaaatttaggttcatttattttattcatttaacattaaatatctctctttaggtaggaagagtggcatttctcctaaaaaatcaaaatacatgactccaatgcagcagaaactaaatgaggtctatgaagctgtaaagaactatactgataagaggggtcgccgcctcagtgccatatttctgaggcttccctctagatctgagttgcctgactactatctgactattaaaaagcccatggacatggaaaaaattcgaagtcacatgatggccaacaagtaccaagatattgactctatggttgaggactttgtcatgatgtttaataatgcctgtacatacaatgagccggagtctttgatctacaaagatgctcttgttctacacaaagtcctgcttgaaacacgcagagacctggagggagatgaggactctcatgtcccaaatgtgactttgctgattcaagagcttatccacaatctttttgtgtcagtcatgagtcatcaggatgatgagggaagatgctacagcgattctttagcagaaattcctgctgtggatcccaactttcctaacaaaccaccccttacatttgacataattaggaagaatgttgaaaataatcgctaccgtcggcttgatttatttcaagagcatatgtttgaagtattggaacgagcaagaaggatgaatcggtatgttttcaaagccatttttattttgaggatatgtgctatttaatacaaaacagatgaaagaatattgctttgatgtactatttccacttacatacatgatttgtagttggtagcatgctattctgaattctaatcagccagaacttcttaagagtgagtatattctgtgggggagagaaggcacaccactaagtcatctagtttaaggccagtgaggaggaagacaaaattgaaaatctcttgaaaagcataaacttaaaatacagcctttcatagaatgtgttttttaaaaagataaatgt

SEQ ID NO: 13474 - DNA, 1275 bp, Homo sapiens
ggccacccacgcccccagccagcaactcggcgcggacggccccgaggccgtggcgcaggacacgcggcggcgcctcgggcccccgacggcgctgtggccccgagcggaacggcccggaagaggagacgcgtccccgggaacccagtgcccgccctggcccagccccgatccagcctgcgcctcacctcgggttgtagacagagcggcggggatcccagaggggttcgcgggtcggacctggagtaccggcccggcgaagcgcgccgctgtcgcccgcacgtgactggctcggacaagatggcatgagcggagaagcggccggatcccagatgcgcgcgtgccgccgccgcgggcactgcgcccgtttgcctgcccctcgtcggggatcgggcgctccctctgagacctgaaagggcacccaagtgccccctgtctgcgaagtccggcgcgggcccttcggcgcccccgatgtctctaggcttccgcaggaggcgccctgtaaatcttgagtcttcctgcagcgagggggcacaggacagctgcgaattgggacgaacgagcccagagccccgggaaggatcagaacctcgaaggcggcttcaagtcggccccgcagcccgaggtgaccgtgggcggttacgttgcccgagctcgccccctcctcctgagcgcaggtgcccgtgggacatacacccgcccacctgctccggaaagttccctccagaagggagttcccgcgccaccgagacccgggagctcccgatcagactcccaggccgtgaaaggcgttatcggacagggcccagaggcgcccccacagcaagaagaaagtctggggttctcaccgtgtgccaggtgcgagctcaagccacctccctcaaccgctctgagaaatatcccacttcacaaacttgctcaaagtcacgctgctggctggatttgaatccagattttttttagcaccactgaaaaaacaatatgacaaccggagaaagaaaaatctaaaaagaatacagtaatccatattgttacaaagaaatgcaacttttcacgacatgaaacatatatatactgtgtatagttgcaaccacactttttttgttactactttcactaccatttttatttgttcacgattcatttttaaggtgtgcaggtgtccttaactattcactcagccccctaatgtttttggttctttacggttgtttgctaacgtatccttgaattctgcacttgggacaaatacctgggagtggaaaggctcccaggtag

SEQ ID NO: 13475 - DNA, 1099 bp, Homo sapiens
cccagtgggagagatgggctttgactctggggtcaaatgtagataattggactatggacagtggctggctggtcaccaacaatggtgtttgaaacaaacatttagaggccatatttgggcttataaaaatagttctgggccgtgcatggtggctcacacctgcaatcccagcactttgggaggctgaggacagcggatttcttgagctcaggagttgggagaccagcctgggcaacatggtgatacctgtctgtctctttaaaataaaaaaaatcaatgagttatgtgatgggctcatggctacaggtggagaaaggcagtgcatatgcagcctcctccatccttgactaaggctgacagagggctgggcccaccactgctcaccctgaggcctcgtcttctgactcccctcctttcatttctaggtggcattggtgaggctgtgtccagtgcagtagtgggcgagcctggcatcactgtcacccacctggcagttaaccgggtaccaagaagtgggaagccggctgagctgctgaagatgtttggtatcgacagggatgccattgcacaagctgtgaggggcctcatcaccaaggcctagggcgggtatgaagtgtggggcgggggtctatacattcctgagattctgggaaaggtgctcaaagatgtactgagaggaggggtaaatatatgttttgagaaaaatgaattggccctgaaatgttttcttttttgatgtgtttgcagccagtgcaggttctggggaagaagcgtggagggtgcgctagggaggctggtgtccttggtcctgggccaggacctgggtgtcccaagtccccttggaatcacctgcaactgccctcaacctccagaactatcgctgcctcccattcatcaccaggtgacatttgactgcaacctgccttctagctgagaggctgagacctacatccctcattgtgacctcagtccacctggccctgagcgggctggggaactgcctcagtctggaagctgaccaggcactctcagggccgccccacctcccccaagtccccacagccttgcagtcaggtctcctgggatagggaggttcact

SEQ ID NO: 13476 - DNA, 2520 bp, Homo sapiens
tccatgttttcaaaatatcccctcctggtggtccaggagcccagcctggcttgcaggcccctagggacagggagcttcctctctctggagggcactcagatctccagagttcttccaactggacctgaaattctctctgtggtttccagagactgctctgcagggcgtggggctggggaggtcccaggtactagggaaagaggccttgtgttggctggcagattttggagccttgaagggcagctggtttggaactgatgactgtactcagtgctgcttctggatgagtgatttggggcctggagcctcagcaggcatgaggctgctgccctcggaccccagggaggggttgggaggaccggtctctgcagaagaaggtggtgggggacatattcagaagcccagaaaggatggacaatctatatacaaattgtggctttctccacaaaaggggtcctaggctccccgaccaccctctgcctgcccctttgggctgaccctgtcccacctgcccccaggtgagcatcgcggtgggctgtgccacccgcaacaggacggtgcccttctgcagcacttttgcagccttcttcacgcgggcctttgaccagattcgcatggccgccatctccgagagcaacatcaacctctgcggctcccactgcggcgtttccatcggtgagtttagccagggtgtttacacctggagctcccttgacttttgcaccaggaggtatgggagggggatgggccaggattccagcccatggatgggggggtaggggtcttatttctgcatatcctttcccccacaccccaggggaagacgggccctcccagatggccctagaagatctggctatgtttcggtcagtccccacatcaactgtcttttacccaagtgatggcgttgctacagagaaggcagtggaactagccgccaatacaaaggtaggttgcatggctgttctttctcctgctggcagccatcacttcccaagggaaacagaagaggaggccagagctggtcacttgctgccccagggggtgtttcctgaccttgcccctggtgttcgtgtagcttgtggaagttagacaagaaaaaacgaaatacacaccccacttactgccacgtggcagacattgtcaactgattgccagtctgtctctgctgagaatcctggcagccctggccggtccagcggttgacacctctccaccctcctgagttgggttctccaagacaggcaaggatgagctgagccctgtggtccaggcccggagctgcatgccacagacccagtgcgcgtggttcctgcccctctgcctggtgcagtctgtgggagtagcccacctgcagccagtctacctggtggaaagttgccttcggtctgaggctgcaaggtggtgggcagttctcagagtgttcaagtggggtgcgggcggcagagggcaagcaaggcccttttccctgctggagtagccaggatgcagtaactaacgctcccatgggaagggatggcctctctagaaagacctcgtctctgaggttgggtgtgccacatcctgtatcctcagtttatctgtttcggtctcagggtatctgcttcatccggaccagccgcccagaaaatgccatcatctataacaacaatgaggacttccaggtcggacaagccaaggtcagtgcctcgcatgccccaggagcccacagagctgcctggaccctccctgctgtgactcccagcagtcagggcacaccctgccccagggccctgagccttactcaccctctgtgtcacccccaggtggtcctgaagagcaaggatgaccaggtgaccgttatcggggctggggtgaccctgcacgaggccttggccgctgccgaactgctgaagaaaggtgaggagaaggggcctccaaagtcatcaactgagcggccactgcatgctaggtcttggggttctttctttcgttctttctgttctttcttgaagagctcacagctagagagaaagcatttcatttcattaaataatgatagcaattatagccatcctttgagcacttgttctgtctggcatgttgctaagtcctggggctgcagtgcccacagtccctaccctatgactctaaagtcgagacccccccagcatggtggccagatcagtggcctggagcctgccagctgggctggaatcactcagccaggcactagttaaggaagtaagttattcactgtcaccatgcctgttttcctatctgtaaaatggagatactagccccttgccctcagagctctcctgagggttacatgcatgtgacttggtattctattattattactgcgagctcacagtgttggctagtggtttgtaggggagacaggcattggcctctcctgcaatagaatcacacagcagatgtcatgttttagcacgaaagagggggcaggtgtggcatcttccagaaagtggcttcagagtgggtaggaattgattagcagagaggagagtgaaggga

SEQ ID NO: 13477 - DNA, 1265 bp, Homo sapiens
gcttcatcatggaaacttctgagcagaacattgagtttgagaatcctgaaattgagcctatgagaaagagactcatttcttaagaatgttttccaagtgacattctcagtgataatggaggtttcactgtgaagcatcaccagcagatccttgttttgacaaaaaaaaaaaaaaaaaaaaaaaaaaagagagcgatcattgtgttaagttatgtgggtgttttcatcagctaggagcaaggctgtggaataaggagtcagattctcagcttgctttcactttcaaggacttacagaggagtagtcaccagcctcacagcagaagttcagcccggcccccaccgcttcccccagcctaccccatagaaacgggctttgggctgacaagtcaagttttgaacagagtagaaggcagctctgcaaagtagcttctagtttttaggaccagaatttaagccggcaaattaggaattatttcctcaagtgaagtatattttatatgaatgccccatttgggccttaaaagttgtgaaatttcttaatagcattttgtttttaagtgccccagtcctgccctgcagcaggcccccagtgcagcattaccatttgaatagggcactgtcaggctctggtggtgtggacacaggcatgtcatacctttgaaggaaaggctggggctgggaatgcccacatcctatcaaatcttcattttaggttaaactctccattggttctgaaaatgctaagtttgtgtgtgaagcacagccttattttccttttctgtcattgttgattgttttccttaacactttgacaaaaggaccagtggaccaatctgacaaagccattctggttcctttccttgagtgtactgagaatagttttaaagctatgcagaaaagggagctgttattcacactgcccttattttgttgtagaattatggagttaaaagaaaatgtgattccgaactctaccaatgtattcctaggctgtgagtactttcccggcccaaagtgtgaaaatatgtaaagaagctttgttatgctgctattgatctgccatgatttctatttattcttttatggcatgtaatggtgtttagtaatattttaatgtagattttgatttatttcagcaatagtaattttaagatattctttgaatgaaagtgtcttcgtttctatgatacaggtcattttgtagtatttaaccaattaagatgcactgcttacttttctgagcactatttaatgatggggtaaa

SEQ ID NO: 13478 - DNA, 1202 bp, Homo sapiens
taacactctgaaaatgattaagactattgaattattggtactgcctttttttttccccttggtgatggtggtagttatgttagagaaaagctgttgtatgtatctgttactcattagagatagatgggttttacaaatcagagatgcggagtaaatgtgggaatgacctcagttttgtcagaagaaatgcactaaaagaccctttgtgaagacatgatgtgaaggagtactaaccccactgggtgtgatgcagcggtgatcctgtgtgattgacactgagaccagagctcgtggacttttcttgactctccagctgactaaagcccagcttgtgaaaaatagcacatgagattcaaaatggaaacataggagtgaatgattcccctgttattgatgggagacaacctttgatttttttctcctacccactggatcctcatttaaaaaaaaaaatctttgtttttctccttctccccagaggcaaactatgcaagaggcaccagacttcctctttctggtgaaggaccaacttctcagccgaatagctccaagcaaactgtcctgtcttggcaagctgcaatcgatgctgctagacaggccaaggctgcccaaactatgagcacctctgcacccccacctgtaggatctctctcccaaagaaaacgtcagcaatacgccaagagcaaaaaacagggtaactcgtccaacagccgacctgcccgcgcccttttctgtttatcactcaataaccccatccgaagagcctgcattagtatagtggaatggaagtatcctttttttgggggaagtctttctcattttctcttttaccatctgttttttaaaaggatttgctttctgaagtgacacaaagctgtagcagtctggaatgcgagtaacagaagttgtatataaggggtttcattgtatataccttcctgtctcttcgggttgcagaggggtggctgtacgggtatatttagcccactgtctggatgtgtgtatagtagtagtagtagggggagggagtgacagcctgaaacttcacaggggcagataattaaaatgtgaaaccaacctttggttattggacattagatggttagttttaaattcagtgttgtctttgggcaatagcatgcattgaacctattgcaaacaaggtatacagattagaaaaaaagactgtataagactctgtt

SEQ ID NO: 13479 - DNA, 1201 bp, Homo sapiens
catggggcacatttacacgtccaaagtggtttaccatgagacagccagagcctctattctgcctcatgcatcacctttaaagtcatcagcagagttctgattccccaaccatacacgttggaggttgtttctgaacaaagcaaaaataagcccagctcaactatgaggttggttggagctgtcactacagtgcagaaaatgagctgttcagaattacaaaccaagaaatggtatatggagcttattggtggagaatagggggcggggagctcatgaaaatctgaatttgcagtcacttttctaaaccttcctctccttctgagcatgtatgtcacctttctaggtctctatcttgagacatcgggatttggacggttaattgcccttgataagtttatggtagttatacatgcaaatccctatgcacaggggtgaaatgtggcccgtgaagcctctttttgttttgtaatttttattttaagtaaataaccaagacagcatttcatagtgttactaatatgctgctctattaaactcataacaaatatattattttctgcaacctagagtatcagttcatttaactgacactaattttgagccttagttgctttgcaaaaccttgctttttgctggtttgagacccctgtgttatatgctgagacctcggtgccttctgcgccggaccgcccacccgccccactctgcccctgcccctgccccagccagaagcaagtgtttaggctcttggtctaatgtgctgattcgggagagctctgtctggtctctccgtttagatgatgaggtaaccgtggggaagttctatgccactttcctgatacaggactactttaggaaattcaagaaacggaaagaacaaggactggtgggaaagtaccctgcgaagaacaccacaattgccctacaggtgaattgttgtctcattttgttttctcttttgactaacgattttacaagcttatttgaaatactagagagctgcctattcatggttgagcagtaccacaaggattttgtttaaactgagatactacacactcccccaaatgtggactagccatttctgggccacaaggtaagtgcttccctccccgatgcctaccccatagagccctgcacctgccactacccacgcggcagggctgccaggacggagaggagcgagcgctaccctcgcacc

SEQ ID NO: 13480 - DNA, 1301 bp, Homo sapiens
aaaagttttcttggctattgaaacagaaagatgcctgtagttcataagtcctactgtctttttttgagacggagtctcactctgtcacccaggctggagtgcagtggcgcgatcttggctcactgcaacctctgcctcccgggttcacgccattctcctgcctcagcctcctgagtagctgggactacaggtgcctgccaccacgcctggctaattttttgtatttttagtagaggcggcattccaccgtgttagccaggatggtcttgatctcctgatctcgtgatctgcccgcctcggcctcccaaagtgctggggttacaggcgtgagcctgtatttaatcctgctgtctttaatacagggtgaaagcctggcttactaggtattgactcagcagggatttttctcggccccatattcaagtaaatgattgagtatatgtcttatgtgattaggctgaaatgccttcatcccttctgtaggacatggacccccggctgattgcatggaaaggaggggcagtgttggcttgtttggatacaacacaggaactgtggatttatcagcgagagtggcagcgctttggtgtccgcatgttacgagagcgggctgcgtttgtgtggtgaatggggaggaaatgtcactgccgaagaccaaaaacaagcttcttggtataaaagactcttacagaatatgtgtattgtaatttattgatctggatgcttaagtgtcatggacagtaaatgaatttgaactttatgttgaggacatgacattggtttgaaaatataaactgcttttgagcagtttagtcagggcatttgagaataaataggaactttctcttcagttgtaaactctcttgccctctctcagggtctcataaactccccagtgatgtaaacgttgctattgaaggttctcatgtggtgaagcccttcatttaagttggcttgaatctcatcagcaggcagcctcatgcaaccatgagggatagtatgtgacgagggagaactgtccactcatgccattttctctcttgtctagtatttcattaggatctaaagttgtctgagttaaatgcacttatgtgactcatgtgtcctcttagaatcccaaatagggggaaaaagttttggtggtttttgttttttttttcattttctgttggattacagaaaaagaatgggacccattcaggtctcgatttccaaaggtaaagatggaaggctgggcagactggcttttgttacctgacatgccgtagggtgagcttagaggaagaaagaaaacaattttt

SEQ ID NO: 13481 - DNA, 1166 bp, Homo sapiens
accaacccatgtatagctagctatttctatgtatgtgccaattttgtcacagctcttgtttggagggatcattttctgcccaactttcattggttaaaatattactgatcttacctttatgaggtcgtataatttagtcccttaaaaattaaattctctctaacataacaacctttcccatttcgtgtaatattctctgatgtttgggggttaccaaaaatatccctttttcacatattaagaatagtctctgggtttacaacaaacactgtgatgttgggaagctatttcctttgcgcaaactttaacaggttttcttctaatcataacatagttgaaaaaagaagtttgggctaacatttaggagaagttggtcttactttgtgcaaaagcaggcttgtgctttataccccatttgatttcgatgtacagtctcaattttgtatttaatgatttttgtgtatccagtatgcacgttaacagcgtgtcaactttcatttgaaagtgggtttcaatttactttttaaacagtgtttatgacgagacctcagatgtgttgacgtaagctctatctgcaatgtttttgtgtagagtggcgattgaatgctgcccagggtcagtgtatctaattccccgagaccctcgtttgatagtgcttcttgtaatatttcttcaagtgagtggcatgtgggttgtgatattgaccatgtgattatggacatcgatatgaaaaataaataaataaaactaaggaaccctggaaactaccagtgggcatgtattagccagtcattgtaacctcgtgtctagtagaacaatgtacaaggtatgtacagttcataaatttgttgtcatgtgtatgagaagtactttgtgctgatcgccttatttatattcatcaaataaaccttgtttctttctgaagtgagttcattctatctctaataaatgctccaattgtgcagtttctaacattttgagggtcatggatccccatttgaagaaccctatggacttaagtaaaaagggaagtcattggctcatttaactggaaaggcaaagacgtaagtcttcctttatgtacaactggatctagaggttcaaattagaaaatcagaagttcacattaggaaatttaagttactgtcattgtctcccttcttcct

SEQ ID NO: 13482 - DNA, 1123 bp, Homo sapiens
agagaatggtcgctggagtccaaaagacctggattcaaatgaggccccagggagctggggaattttaccaaaagcatccagttcttctaagctttcgtttcctcatctgcatgaggggctattaaccaactgcatcagtacctcagtgctatcgagctggtttcagataattaatgcaaaacacagagggtggtggcagatagcacgcaacaaatggtacctgttaataattctgaccacaataataatgacaaaaataaatcctacggagacatagcagtctgtgctgccattttgatgtacacagcctatattcatttgaatcccttcatttaaaacgttatggatgagttataccccgtgcacagaaaccaaagttgaaataccaagtccctccactgcctcctcccagcaaactccgtcatccctaacagcagtgtgcaattctgagcacagggctggccccgccccacccccatcccagcccccagccctttgggttctgaagtgttacattttattgccccgtggagctgtaggagtccactctcaaggtaaaatgttgctctccactcatattttttgaattatggtttcaaggtggttgcttctatcaagaaaattaaatgatttaacataatttgttgccactttgatcacaacaataataaataaatcttcatgaggaaaacgggaaacccattccaccccgtttttaaagatgttaagtaataacacagatgtagttatagttttggttttttgtttgtttttttttttttagcagaaacgactctattgggttttcctgtgagcagagtggcttcatggagctgttctgcaggatgcccgctgcccccagaaggagcagctcttctcctccaaccgttgttaattagtctatcaggggcttgccttttatgtgggcaccacgtgcagcgtgttaggggcatctgaagccgtcgtgaatgggtgtctgtttttgtacctgggggcacactgcacacatttggaaagcacatggaacataatggacattaacccagatgtcaaaaatagcctgcgttttactactgttattaaacagtttcccctttaacccctccgtgtttaccaaagaccc

SEQ ID NO: 13483 - DNA, 1107 bp, Homo sapiens
ttgtgttacataatttttatttcttcatttgttagggaaaaaatagccagtactgagaagaaggctagcatagaaagctggctacctggtcagacagttcccagtcaccttgtacctttccagctcagtgcagggcagattttcaaaggaccttcctgagcacagattctgtaaggactgtgaagatcactgagaagcagtgtggagtaagggaacgagcacagaaccaaggaatgagctgacctgagctatgttcttgattctgcaatcatgtaggccagggctgtccagtagaactttctgtggtgatgagttctccatctgcactcaccaggagggtaaccacttgctccacgtggcctctgagtgcttgcaatatggctggtgcaactgaattttaaattttattcaattttaattaattcaaatttaaatagcccagtgtggctaggaggaacctagctatactgtattggacgcataggtaaccgaactagtatagcctgagaaggtttgtatagcagtggtttagaagactgtggctctggagtcaagctgccttggtacaactcctaacatttgctttccataggacattagcaaggtacttggtttttctgtgcttcggtttcttaataggcaaaatagggataatgacagtattttctcattggacttttatgagaattgaaataagaaagtgtacagtgcttaacacagtgcctggcactcattcgtctttcaaatggaccttaggttatggagttaatttcaccatgatacttgattcatgccatactgtcatcattggtccaggcagcatgcaagacacgtgcacatgcacacacatgcatgcacacacgtacacacaaacacaaactgaccatcacaccaagagtcagcagattaattataacattatgtctgtgtggggtttccccctctcctattgtgtgccttgccctgagatacacccatgaccctgggttttgtgtttattattaccaagcttttaataaaatagtcaaactctctgtgcttggaatgctcccttcccccgcttttaagtagatcctccctcctgttctctttgattgccctctcaag

SEQ ID NO: 13484 - DNA, 1167 bp, Homo sapiens
aagttttagctccattataattttatgggaacaccattgtatatagtgtggtgttccttgttgaccaaaacatcattatgtggtgcatgactgtatctatatttaatatataatatgtaaaatattataagtatctttacagtagaatccaacctctttggcgaggcatcccaggcgtttcacagttggatccctgcctacctgttgagccttgtcttccaccatgttcctcacccacactgtgctttctttacatcagaaggatgacaatataaactcacctgggaagtagtttttttctgcctctaaagggaacttgcctcgctctcagatacatcacttagcacagaataggcactcaataaacatttggtgactgtatgacaatagctccccttatagagcatggacaatacagccaggcactgcacctgtctatctttgtgcctttattcttccctcatcccaaatgattttctgttgaaattcatcttcttgtttaaaatatatttaaaaacctccttcacaggtcttctcttacctcctcttcaactctgatcctgtcacaattaatctctttttcttcagggatccaaaggactgtgttcttcttccatttgctcttttttatgacacaacattgtccttgtccctgtcctgtatatggcttcaggtaaggagccgtgactgtacatccttctattgccccaggacctctgaacacaggaaacacccaagtcctgatggaataattcagcggatctttttcccttgtcagcagcttgaggtcctctttgctgtcatgcgatttactctgtgttcactttgaaatgagtctaaagagattaagtctaagaacactctcagctccttgaaggtggaggctgtgtctaattcttcttggtagccctttatctagagtagcccagagaacatgcccaacagatgtctgggaaatgactgatgccttgaaattactgctaggtggtaaaagcttctttgttatatattgttcttggtgtgaaaggcaactgatggccctcaaagcatctgtccagtgaacttaatcagggtatacatggagtactctctgtattagtcatacagctagtgtgggattaatttaggtactaaatattaacttacaaaaagaagggtaaaatggag

SEQ ID NO: 13485 - DNA, 1141 bp, Homo sapiens
cactttatttgggtgacgggattgcagcagcacataagccaccaaaaaaaaaaaatcagggtatttcaatgaatagattattttagtctcacttgcgccaagggtacttattgaaaccaagctccaagagggaaaggcaggaggagtggtcactcccaaaacattcacccccaaaatattcactgttgttcgctatcgacagcatcctcagagaattttaagagtcaagtctatgttgacagcagaaaagtaacagagtgattttacaggccaaagcagatggggtgggttctgaatgtggcctattctggccagaacacaatttcagtttctataattagttgcaggtggagctcttgtgttgttgtttcggagtccattgacatctgtgtgcaaattcccaccacccccagttggcatttggactcaataagtggtttggcctcgcaggaacatagaaaattgtaaatctatttcacagacacacagataaagctgttgtaaaggtcaggttctgaaagctgtggaaagcatttcaaaagtttgggaagtaggtttttaggtagagcgtgggagtgcagccaagagctggggcagtctaacaaccgaattctggcacgtgcaatttcttctgtttctctgtgaagccagtgcttgattgtgccttggaagcaacgtgtagccattttgtttttcagtaggaaagatctggtgagaagtaaagactgaggcagctacttttcatcttacaaacccatggctgggcgtgagctgtctcgtttgtctccatacgttgataaagttaacttggtagttctcaactgtgggcagttttttctccaggggacatttggcagtgtctgaagacatttttgactgttacaacttgggggatggtagctactggcatttagtgagtagagagcaggggtgctgctaaacatgctacagtgcacgggacagcccctgacgttgtctagctcagaatgccagtagatacaaggttgagaaactgagttaactagatgattactataacttcattttgcatatcatgctttgccttcactcagtgctttactttcactttgtgaactgatgatcaaaatgcatgtatttttgtaaaaatgatgatataaaa

SEQ ID NO: 13486 - DNA, 1527 bp, Homo sapiens
ctgttttatatgctgctattttcttttcttttcttttttaatgcctactttatttcctaaaatgctgctatttttataagcgctttggaatcagacatacctgggtttaaattccagcttcatctcttgctctctctctctctctctctctttttttttttttttaagagacagggtcttgctgttgctcaggctggagtgtagtgacgttgatcatagctcactgcagccttgacttcccggctcaaatgatcctccacacctcagctttctgagtagctgggactacgggcacatatcaccacagcctgccgattaaaattatttttttttgtagagacaaggtcttgctattttgccaaggccggtcttgaactcctggcttcaaggagtaattccaaagttctaggattgcacacctggccccagcttcatctctaattggtgcttatagaagtgctaagagctggggcatagggaatgtgataccacgtggctcaaaaattcccagatattatttaactttctgaaggaaattgagataactctaagttgactgaacaagtgattttccaataactggctttgatgttggtctaacgaagtgctctgcctttcttggagtcacctgctgaccctcctaactgtttccctggctaccactcctttggagtttaagcgcctgtagaagcatttgtgatctataggaaaatctgccttttgttttcattctatgtgtagaaaacaatcaccttatccttttgattatctaacagagccaaagctagttttcagacgtagaaatgtgattttgtagttggaaccgaaaggtttgttcttcactctaaaatgatgctcttcggtatcatttctgcttctttctgattttgctggttcatgaagtctttatgaacctgtttgtacaatgcacatttccccccagttttatactggttttctcttcattttaattttttggaaaatggttaaagcagtttaggaatggtgcaagcagggacaaaaagtttgaaagctcttctttaaactgttagctccaaagtgacttatctcatgcttctttcattaagtttatctttgagcacagaccccaattatacatgtatatttatttataaattacaggatgcattacactgccagtgtattatgtgtcttttatgacatccacgaagaattaaatgtggatgagatagagcaaaataatacattgagatacattttagtgacatataaaaccttttccacttttattaaaaacatttcgaaccatttgtccatttcatgagggttagttcagtttagaataggtgatatccataattccacttaaccgtctcaggttgccataagccaggagtgtgtgaatgcttgagggcacttccattatcccttccttgttctggtcttactgtgatcacaggataccttggtatcataggtgaaatgtgactgtgtgacatatgactcagtgaaagctctagtattaatctgtatatttaatacaag

SEQ ID NO: 13487 - DNA, 1149 bp, Homo sapiens
agacatttatcattctaatacttagcatgcacaagatctgctcatttattatactgtagccagtgtaagttgtaagttattatagattatgcatttctacctatattgtagacagtgcatactatggagtatgcattttgtctttgaggtttttgtaagcattattggttactattgtcagcaaaggggttatattaataaaaaggtaggaaaccagatatggcgatttagcattgagctactagatttccccacatgcataaagcaatttaattgcaagatagtagagctgtcatagctttaatcttttgtgagatggcctctgctttggttccaggttctgtgtaaaatgaaagatgtacttttgtttttgatgaaaaaaagcagaaatgatcattcatttagtgctaaccaactagtttagtaatccagtgaagctagatgtcaaaaaattttattttatatttgtcttgtcaaatactgaattaccgtataactttagatgctgttttgacattaacccctttggagctgggagttgggatttcccaacattaaacgtgaacacatttcgcagaagcttttagcatcggattatctggacattcacatctagtgtgagtgttgtgactaagtgaacttgtggcagaagaccaagctttaagggattgtggacttgcagaccctgacgcgttatattgtgtgagtagtgtataattttaaaacttaaacaaactgtgtatttcaatagaggaggactttttgttttttaaatgtagctcttttagaaaacgatgaaaaggatgaagaggatatgtctctggattcaggggatgaaatctcacatatagaagtatgcagcaattttcattcagaaatatgggagaaagagaccaaaggatcacgtggaacagatcaaaaaaagaatactcaaattgagttgcaatcgtctcctgatgtgcaaaacagtttattagaagataagacttaccttgattctgaagagagaacttctattgatatagtatgctctgaaggagagaacagcaattcaacagaacaagattcatatagtaactttcaggtttatcatagtcaattaaatatgtcccatcagtttagtcattttaatgttctcactcatcagac

SEQ ID NO: 13488 - DNA, 1149 bp, Homo sapiens
aacgtaaggagaccttgtctctacaaaaagacccaaaaaaaccaaaattaccctagcgtggtggcacatgcctgtagtcccagctgccctggaggttgaggtgggagaatcacttgatcctaggaggttgaagctgcagtgagctgtgatcgcaccactgcactctagcctaggtgacagagtgagactgtcacaaacgaaacaaaagatctttagaataaggtgagatattcgtagatatgctcttctattttccatcaagtgtacttttttgtgtatgtgttaagattgctagagttgaaaatacagataaggcaaacatgtttttaaaattttctttcagacctgagaaattagatgttgaaacagttatgagtattgatcatctgaaacagaaaatccctccagcactgttttataaggaaacatacttaggtccaaatgaaggtaaggtaatttaattttattgaaatgcattagaagcagacttgatttggatatttactatgtatttttcttatgtcagttttgaagaatggaatgtattgcagcctttatgaagttgtggaaaagacaagaattggaagtaacatggagagtttactgcaaaaactagacagagaaaaacttgtgagtgaaaagttttttaatgtttctcattctttgttacaaatatgcatattcatgtgtgatcatattagtgtttcagtttatttttgcctctgaaagtaccatgaggtgtctgtctgttgctgctgtttagttaacagtgttttactgtggttctggtattcttttatttgggccatggtattggagcttgtgcaaaccagtctttcccatggaatatcttttttttttttttttttttgagacggagtcttgctgtctcaccaggatggagtacagtggcgtgatcttggctcactgtaatctccgccttcctgggttcaagcaattctcctgcctcagcctcctgagtagctgggattacatgtgcacaccaccacagccagctgatttttgtatttttagtagagacggggtttcaccgtgttgtccaggatggtctcaatctcctgacctcgtgatctgcccgcctcagcctcccaaagtgctggaattagaggcgtgagccaccgtgcccag

SEQ ID NO: 13489 - DNA, 1209 bp, Homo sapiens
aggccggcgcgatggcgactgctgtggagacggaggcctgtcagccgacggatgcgagttgggaaagtggcggcggcggagacgacgagatgaagcaggcgcttccggagcttgagtcctcccaacaaaatggcggcggcggcggcctcaacatcgctgagcccagcggcggcgctgggcgtgaggagaacgcgggggccgaggccgcccagagcctcagccacgagcagcctcaggactcctctgaggcgggcgcggccgccctgcccagaggccccgaagagcccgaaaggcctgttaggaggagttttcagatccccaggaagagcagagaaaagaaaggtggtgcctccccttcttctcaaccccctctctctctcccctccatcttttcattagaatctttctatctcctcttcccacacccatccgagatacgtaaacacgcatgcagcgccggccgcctctcccctcaccgccacggccgcccagctgccgcgtttggtgcgagagaaagcggtggaaccacgctcccctgctgcccctccccgcggaagttggaagtagctcaggtttgaagcttgtccgtaaggctgcagctcccagagaggaaagatggtgctcggcgcccctccctcccagcccctgaaagcagagaagccgttgtgtcctcctaaggatgcttctgagaagtctcgctatggaaatagcccgtggccatggattctggggctttctccaaggccattgccaatgttctgaggaccatgagtgcttctccccgtggaaattcttcagttctgtgtgtctacttgaaatgtgcttgatgtcagcgtcctcccttatttagaaatctctattagtagatgtgatccatgcacactgctgttttccatcacacttcatttccatgtagatttttcccccttgtttttgaagcgttagattaaataggtttttctctctttaaattcgaacttagtattgtttttcttatatttgaaaagaatggaaaggtaggttcttggagcagtaatttcccaatggaaaaaaactaatgagaagttaccttattctcaagagtcaccaacttggtcttctagatggtagaacttcaggttaaaaaaaagtccagtcttagtttttggaacccatatggaaacagttacattaattacttgtacttttaaaaaatcttaatgccatatt

SEQ ID NO: 13490 - DNA, 3124 bp, Homo sapiens
gacgtgattctgaatgcactggacatgtcttgattgcgtctttacatttcacagtgtcttaaaagaaaggcaagccagttgttaatttcagaatcagatttatgctctctcaatttaaaaaatgctgggaacaatttcatttttttttttttgagatggagtcttgctctgttgcccaggctggagtgcagtggcgtgatctcggctcactgcaagctccacctcccgggttcacgccattctcctgcctcagcctcctgagtagctgggactacaggcgcccaccaccacgcctggctaatttttttgtatttttagtagagacggggtttcactgtgttagccaggatgatctcgatctcctgacctggtgatccgcttgcctcggcctcccaaagtgctgggattacaggcgtgagccactgcgcccggcctaacaatttcatttaaactccacaacctaaagggctttgtttatagttttagctcttggcataatttttttcaggtggtgtgcaattctgagcataggccaagacatgattaggaaagcaggcagttgtagagagtaaggcaaggaacctcctagcgtccattagagccaggtatttgcattatcttccgttttaagtggtctgtgaattgactgtgttttggaggtgtgaaacagtatacagagaaaagcttttcctgatactgagatatcagttaggagtccaaatggggtgttgggtcatccttgccatatcacctcctttccaggctcagagtgaaaatagacaaaaggaaatctgactgcaagccagtggctttgattccagtttcagagtttagggactaggagagagtttagattatctagcatattctccccctggtgtcagacagggctgtgcctgaattattccagacatatggctgtagatggtattctttattttataagaaggagattctgtaacctaccctgctgatcagatagttctttgtatgtcttagagaaattcaagccagcttccttttgttcggcttgtagtggagaaagaacagctggtcaccttccatgtattcaaaaaccacagtgaagtcatccccctggtgtttttatttcagtgataaataattccacccacttaaaccattcttcatggctcttgttttccaggggcctaataattttcactgctgtaatgtttctcagcttcacacttagtttagttgcccaaacaatgttggtgccttactcacattggtgccttgtgaagacgaggctcaggatggggattatggggaaattcttgcacacccagctcctcttaccacttaaaaatataatggcactttcacaaaatgatatgtcacctatattcattgagaattatttgactgccacatttttcccctgatgatagtcatctatcataacttgtgtttgttttcctcctgagatcaaacacttggtgcttattcctgatgtatactctgagaccagctcttaccttctgagtggcagctacccctccctcccaattttagatcctatttttacacatctctatagatatcacctttatttcatgactcacaatattaaatggtacagacttcagtttaaccactggtgtggtaacagcagtagttgctaagtaccaccttcccattgctgtttgagggctaatttgcaaagacatttgaatctcccagtgaagatgtctggggaattttggccagttgtcttccctcttgcccttttgttctttaaaattcagcttggaccatagacacctccaggatcttgtttatgttctgctctcaattgaccaagcactgcgttttgcacaatcagaagtctcacaaaagcaaacagttatgactgcatatctgatgtttatatcctataaaatttcaggaagattcagagtcaatcttctatttgtacatgatgtagacaaaattagctgctccaattgttagacaaaaaattgccattggattacactaatgtgctcatctgttgttttaaaagtttggtatcaggcggggcacggtggctcacgcctgtaatcccagcattttgggaggccaaggtgggcggatcacctgaggtccagagttcaagaccagcctgaccaacatggtgaaaccctgtctctactaaaaatacaaaattaatcaggcgtggttgtgtgtgcctgtaatcccagctactcgagaggctgaggcaggagaatcgcttgaatccgggaggcagaggttgcagtgagctgagatcacgccattgcactctagcctgggcaacaagagcgaaactccgtctcaacaacaacaacaaaaagtttggtatgtttctctcaagaaaaaagcatggtgagtccagacagcagcaaaagcttttgtgaaaaccaattgtgttcatctagatagtaagtaactcctatttttactgttaattttttaaaagagaatttttccctgtggaaactccctgttagtacgtcctaggggagaaagcctgtggaatatggtggttattgatggcgttgcctttgtttcatctttgagtttgccctttgtgggatctagtgggataatgagcactgacagaactcttaacagcgtgctgtatttttgacattgaaaatgttaatgacttgatttgtacataactctgtaactaggtgaaagtagatcacagctgacatttacaaaatgtttttgtaccttagaatttctgcattaaataaaatgttttgttttaaggttgtagtggctcatttttcagcacatctttcttgtttcctgactgtctggggttcccagcccagttttcagagggctctgcctcaggacgaggaggccaggggtggccagtcttccttgccctttagagaacaggaccctgctgccctagaccttcagctcggctccacaggcaatcagtcgcccattacccgtgtggcatcaggaggcttccctgttgcaacagggttacttatgtcagaaagaaatttgacttctcagaacaaatggactttctttttagaaatttgaaaaaagccactgagatttgggggctgcacgcaaattttttttgtcactcagaaaaagagatgcctgctcagtc

SEQ ID NO: 13491 - DNA, 1557 bp, Homo sapiens
gcttgtaaaccctgtaagtaatagtgttcttatctatcaagtctcaaagtatcgccactatgatggtgttagggtagcctctggttgctcactctgggtcctaccttcttccagtctggaagcctcggaacctgaacatcagccagcatggctcggacatgcaggtgtccttcgaccatgcaccgcacaacttcggcttccgtttcttctatcttcactacaagctcaagcacgaaggacctttcaagcgaaagacctgtaagcaggtgagctgctgggtgtatataaaggaacactgcgtgtttcaaagcgacccccaggccactggaatttgggttgctcaatgtgagcattaggctttgttggctctcagtggttggtagatacttgagaatgtaatcattgggcatgtctcagggccatcttgccactgtccttcattccctagttatctgtaacccagctgtcctggtggtgatatagcctggtaacagtattgccaaggaataaacaagaagtatttctcatttgttcatatatatgtatgaacaaatatatatatatatatatttttttttttttttttgagatggagtcttgctctgttgcccaggctggagtgcagtggtgtgatcttggctcgctgcagcctccgcctcctgggttcaaacgattctcctgcctcagcctctggagtagctaggattataggcgcatgccaccacacccaactaatttttgtatttttagtagagacggggttcaccatgttgcccaggctggtcttagactcctgacctcaagtgatctacccaccttggcctcccaaagtgctgggattacaggcctgagccaccacacctggcctgtccttttatattttcagcattcatcatgtgctctcttgtgtggcaggccctgagctttatgctccttgaatccataccactctatgaaacagaggctgctgtcatccccattttacagatgagaaagctgaggctcagggatgtcacctggcttgctcaaggccgcacagctagtaagtggaaaaatcagatctaggagccaagccactgataactcagtggctactgattttacaaataggccaaggttaaatagaaactaagtaacccagcctttaaactgggagtggtcagaagagtggaaaccgtttcatggatgttcacaggactgtctgattgcctctgtggataccaagaaagtttttggtcgtggtggcaaagcccagtacctccttagacatgctcctgtgtatgtcaggttctgtcatagtttgctctccttgctggctctcatctctatcaaggtctttgacctcctgctcatgttaaaattatggcaaataaaatatgtataaacacagactggtaatttctttcctcacccttttattaagtaaaggttgttcaaaccagtttctttgtcttcaaatcaaatattcctgctgagggtgccaccagctaagcatagactatggcaagggtcctgggctgtcctgggccttttatcaaagggaagttcagataacat

SEQ ID NO: 13492 - DNA, 1198 bp, Homo sapiens
cactaatcttctttctgtatggatttgcctacttttgatatttcatataaatggactcataattttagacttctttatgtctgttttcacttagcataatgtgttcaaggttcattcatgttgtaatatgcctcagtacttcattccttttttggctaaataaaatttcattgttatggatataccaagttttgtttatctggtcatctctttatatatctgtgtatctgtttatctagtcattgtttatttgtgttgtttctaccttttaactagttcaaataatgttattatgagcattcatatacaagattgttttttttgttttgaacaacagttttcagttctcttgagtaggtacccagaaatgggattgctggatcattgcatggtaattttatgtttatttaaaagttaaataattttagaaaaccaccaaactgttttctacagtgcctgcaccattttacattcctaccagcaatgtaggagggttccagtttttccacatcctcgccaacaattattttagtttgtgtgtatttaaaatttttttaaaaattatggccatctgagtgagtgtgaaatggtatctcattgtggttttgatttgcattttcttaatgtctaatgatattgagcaccttttcatgtgcttattggccatttgtttatctttgaagaaattatatagatcctttgcccgtttttaaattggttgtctttttattagttgtaaaagttctctttctagatacaagttacttatcagatacataattggcaaatattttctcccattctgagttgttttttttttttttcactttcttgatggtgcgctttcatgcatagaagttttaaattttgatgatgtccattatatattttctcttgttccttgtgcttttagtgtcatatgcaagaaagtgttaccaaatccaaggtcattctgtgttttctaagagtttagtaaatggaattttttgactatatagtattttgtactatatcacataatttttagtgttttcctatataaaatatatcagaaccatttttactagattatgtttaatttacataacactggttaaatgtctgtgtatagttatttggcctttttggtctttctttttctagcttagctcttgtcatgcagtgctttcaactcaacttgctgatgccatgatgttcc

SEQ ID NO: 13493 - DNA, 1271 bp, Homo sapiens
cttatacttttggtagatattcccccttggaatttgacagtttctatggtgaaatggcagaaggtaacaactatgttgaaatatcaaggaggagattaagctttatatttgcttatttgttgtagctacattttaaaaaaaagattgaacttgatgacttaggtttgcattgatcttttttcccccttaaacataatgtactatgtattaacatctaaaggaaacctgctcatctccctgaagcagactgctgaggaattacatttgctcaagaattttttccgtcaaattgtgaacttttaattcttgcattgtaattggctgtgtccataagaaatcatttattcttcaggcttagacattcatggatatgcttttctttcattaggaacattttgctggtgatgaggaagcatttagctgaataagtttaaagccctttatacagagaattctacaagtttgcaaatattttaacaatattaaatgtgcaatagaacttttataaaataattagaacagagattttacagttaaggtttcaaattgtggcaggtggtactgttgatctcagggtactttctgggattgctcacatttctctaatgtactgcacttgatgccagtaggaaagaagcttaagtgtcttcagttcaagattgatagagcccttggcattttattatcacattcttagttctcaggttgggacttcaattactgctgcagagcagtagtggttaaaaataagatattggaatttattaaaagatttttgttcaatacattttagattaggattgacaagtaaagatactgctatggaatgatacattgtattttctgcattgtgtgaaatagtttttattgaaagtcaagtgacatttcaaaagaagttctataacaattatgtttcatgcttaaagtaaaaattcccagagtttagtttagaaaatgtaatcttttaaatttcagactgatatattcccagtattttcataatgccatgttttgataaagtactgaatcaccactttatatccacaaaggcaaataactaatgtatgataatagaataatttgcactaattattgtaaatatgtctactcttcaaatgagtaaaaggtccaattttgtgaaagattgaaaatgaattgaatgcctagtagagtataggagaagttgaccaaggaaggatttaacctggtgccaaggttaaaataacatttctctactgcctattgtttatgttaaaccttaattttttttc

SEQ ID NO: 13494 - DNA, 1031 bp, Homo sapiens
ttgttaaagttggaatttattctgttgccagcatttaagtagtcatggcaagtcctgtttttaagaccttttggagactggagctttctgttccattaagtcttttgtttatactacaaattgtcacctcacttagttcagatgaaatctgttactctacaaggaaggtgttcatcattaggaggcagctttactaagctggtgctttgcatggtagcaagtgctgccctttatcagcaccctgggtcatagtgtaggctagagttaaggcactggcagacttagggatgctggacagacctgtagttcgttttaagtcatgttcacaggaatttctacaataataaacccatcatctccataggtcagatcgaagtgcattccaatgctaaatagaagttatgagtgggtttaacaattttagatgattcagcttttgttccattactgttgaactatatgaactattccattactgcagagatttaagtatctgttttaataagctctttttgttatttaaaggctgcccatgggtttctgcctagtggtaaagctgattgttaccctcctttgaaatcccttctagttctgagatgctttgagggtaactggattcgattttgggatatcttttctcacattcagacttacacttaatggtgttagaaatcaacaaaactcctttttaaaaagaaaagatattaagcctgcctacttctacaatgcattctgttacctatttgaacagtatgtttgtaactatggcaatgaagtcagtagataggaaaccagttattccttctacctttaaaaattttgagaacttgccaaccagggattaaagctattatcttgaacagagtccctaaagctagtctagtttttgccacatctgcaatgattattgtttaatttcaaaagaatcctcaggctctacaatctaggggtggtaaatgtgtttccactatacttgggaaaaggtcagtaggatgtgcatcctagggaagataaaatcgtatatggtaaag

SEQ ID NO: 13495 - DNA, 1593 bp, Homo sapiens
agtgatcctcccatctccgcctcccaaagtgctgggatttataggtgtgagccaccacgcccagccagaagtagctttaaatatgggagagttttgtgagatgcaagaggtgtgaaaagactcttaagtttgattaagaaagtttaaacactggtgttatatattaactttgttaatcaagtattttcttgtcttctctttacagtggtatgttcaagccacttgtgcaacacaaggaactggtctgtatgaaggacttgactggctgtcaaatgagctttcaaaacgttaaatgaaattggatatctaaccaaggacatgtttgataaaattggtctaggcttgttacaacaaaattagtttgtatcttggttattaaacagtatctgggactggtttgggcagaatattaaacttattttgttgccaattattgtttaccgagtataatgttgctatttagcaatgtgcttggttttaaagaaattctccttgggaaaaaagtatcctcttttaattttacttcccataagcgtaaatgcctggacatagctcttgtgcaacctttaaataaattgttttgagtgttttttgagccccagacaaataatgttttaaagttatccccttgctactttactgatacctttatcattcctgagacagtttgctaatttaaaaatgtagcattccatttgtatttatttctctcccttgccaaaaagattttctaatactgcttgtaccagccagagaaagatccaaaacactactcagctctcttgcactgaggaaatttttccccctacattgactcctggcctacatcagccaaacttaaccttggtggggtttggatttgatagccaattagttctgtgctggttgcaaagaattgatatttagatggtttttaatactcagcagattgtcttcctttatattgtgtcttttttatgttgcatgttgcttttgttatcagcctgattttttgctcagtatatgatagttctgctgatgttttgtttattgggcagacatatcttcattaagagtttttggaaaactcatcaaattcgatgaatacattttcttcataacccatttggaattattcctaataaaatgataaaatacgtaattgtgtgtgttctttttgagttttgaaggtatttgaaatgtattttcttatgtagccaactttgcttgcatattttatgtactgtgaacagtaacacagatcccactggtaggttactaattgtataaagtggagatctagattgttttcatgtgtataacagcatggggaacactattaaaaacatagttttctaaagtcagatcaagggtaaaaggagggcctggcatggtggctcacgcctgtaatcctagcactttaggaggttgaggcaggagggtcacttgagaataggagtttgagatcagctttggcaatgtagtaagaccctgtttcccctgtctctacttaaaaaactaaaaacaaaacaacaacaacaaaaaaatcaggtggggggtggggaggggcggcatgtggagtggggtagggagagtaaaaggctgtaataaaat

SEQ ID NO: 13496 - DNA, 1230 bp, Homo sapiens
agcttttgttgttgttgtttttgtttctgttttgtttaaacaatactaccttgccaaaaatagaagaatgtgatttggtagagtagggttgtttggtttgtgtttgaataagagtatcctacagaagccactttttttttttttgagatggagttttgctcttgttgcccaggctggagtgcaatggcgcaatctcggctgactgcaacctccacctcccgggtgcaagtgattgtcctgcctcagcctcctgagtagctgggattacaggtatgtgccaccacgcctggctaattttgtatttttagtagagatggggtttctccatgttggtcaggctggtctcaaactcccgacctcaggtgatccgcccgcctcggcctcccaaagtgctgggattacaggtgtgagccaccgcacctggccagaagccactaactaaaataggcacacatgacacagcatgtggttaatagctgtgtcttgaattatcctctaaataaccaaatttagttgtatgtatttgtaaaggatatggcttcagaagctatcttttgttctctgtcgatataactcttaagggcattcctgacccaagaaagactccttgcgtttgtaactgtggtctaatacccaaatgtgccctgttcttatggatacagtctcttgaagcatacctcaaagtcatagagagaatatggcatttgaaagaaatcgtttgccttggatcatatgagttattttgtgaaacaacagctgacttttcagaaaaggagcaactacttttatatgctaaaagtatttcataactttctgggaaaccttatttaggtataaatggtcatcttattatttttcaaaaaggtatattttaataattgtacaatttatatacagtttgtgaccagaatttgtaagttgttggtgtcatatcaaggatcttttaaattatgccactacaggatgtatcatttcaagtctattttgcacagctaaacagtagcaaaagatgccaattagcatgataatggtgtcttcatttttactgtatttaactgaaacctaacacatgttgaaaaccatatcatacctagtttatctcttaatttcaaactatgtacttgtaaaaatgatgtaaatttgcactgggaacctgggaaagagtgactgataatttttggtgcgtgatttttagatttgtctttttttttttaagaagaatttgttact

SEQ ID NO: 13497 - DNA, 2454 bp, Homo sapiens
aacaaagttgaaaacttcccaggactttcttgggacgtgttagacttccaaattggtgttcctgctattatgactcttcttatacctgcactccctcacttttttttttcttttcaaactttatatttatgatgcagaaataagatttttccaatattctgttaagtattcaggactctctggaaccaaggggttaataggtatgaaaagagaggggagaatgtgatattgactcttggtttctttccacacagaaaccctggccctggatgcccatgttggctgccctggttgcagtaacagccatcgtgctgtacgtgccaggtctggccagagcttctccatgagagcgttccttgagtccgtacaccgtcctccctctagaagctggcatcacactcatgctggggacaaacagaaccattttcttcctctttacctcttaaaacagcagaagtacaagaatacagctgtagggtcattgctttaaattatataaaatgtatctgtctataaagaagatataaaattgtgactttattctactgtaagcaataatttgcttgcaatttttcatgtaatttttaaattagtatgttaagattctgaatattatggtggcctaaagtaggcttcttggtacaccagattatttataacattaaatttatgagtattttactctgaattctgatcaccagataattcatttttctgatttgataactacccaaaccaaacaaccaatacatacatgggaagagaggccctgtgtgctcagtgcctatcagtttgaaatatatacacatatatatattttttacatatttacgccatttttacttgttatgaaaccactgagctattgggaacaagacttagagacaactatttgcgtggatttttttttttttaaggaaaaatacgtttggaaaataaactgttatggtgataatttggggaatatgtgcacgcttgttcagccttaatgtgacttgaagatgtggaggacatcaactttgaaaaactttccatgagagtgtattttcttgagcaaactgaagtatttctgggagcaaaaacatagtaattacacaatttcagtgcagtcaaccaaaatgttgagtcaattggaatgtaatttattaaaccatgtatttaaagagatatttttctttaaaagccaagttactttctcatatacagcattttaggaagcatgattttttttttctatcatctattcctccaagcatgtttaattgaagaaagtattaatatctctttagataagcttgtattgacctaatttggtttatgatgtgtcagagctaattcatgttcagggtgagcgttgtacctaccaacaaatttcctggttgggtatgcaaatggttattttctttttattgttgttaattgggactttctgttaatgaaaagcactattcccaagattaatagtgttctatgcacaatgaagcacctaaaaacactgcttgatattataaatttaaaacacaagtgaaagtttagccatggttttgtgcggcatcatagttatgtcaataaagtttatttaggtcatagaatatcctaaagtatcacatagttaaatttttcagtcagtgaagaccgggagggaatgtcagtgaattggcttgaatgttctgtggcaatccacaggtctagccaaatattgaaataggagtttagggtataatttgccttgtgatgtttggcagtcactgtttatactttaaaggttatattttaagctatttgagattgcttttgggaagatcactagatttatggaggaattagtcacaaatgacttgtagaaaatactgtcatatagttcatttcatcattttctgttgcaggaagccactccaccacagaatgctaatatgccagtggtacccagtacctcttgtatataggttattgcaaatattgttctgaaatgcttaacttcagaattacattttttaaagtaaataattgttttaaatctattttgtaaagatataaagtacaatagaatttctggagtacagattaaactatttgcactaacacacgtgacgtgcatgatttaataaaataactttactctccctacgcatgtttgagttgaatatcattgaagttcttaatgctgactctactattgggttgttaatagtcttctcttgacatgactctttatgcaacataacatacatttggtattcttcagggtttaaaagaaaacactgagctgtttcctccaagttttattaaccttttatttaacttactgctttatttttttctcttttaatatggttattgttaaaatgagagtcacttgctagactggtctctttaaatgtaaggtctagtatcaatatttacttcattcaagtggaataaatggctttttgtagttacttccagttttcctca

SEQ ID NO: 13498 - DNA, 1156 bp, Homo sapiens
gtgtggcggctcacacctgtaatctcagcacttcaggtggccgagacgggacaattgcttgaggccaggagtttgagaccagcctggccaacatggcaaaaccccatccctacaagaaatataaaaattagctgggcttggtagtacacgcctgtaatcccagctactacttgggaggctgaggcatgtgaattgcttgaacccaagagacataggttgcagtgagccgagaccgcgccactgcactccagcctgggcaatggagtgagactctgtctcaggaaaaagaaaaataaatgaagcataagcattgaaaatgaggggtcagagtgtctttacttacattatactaatgtgaaattccctatgtgagaggtgtagtaattgagttggggtggctacgtggaatagtttataaagggaatttgcatgaattttggcaataagcagaccagcataaataaatggtgcacatttcactttcttttccactctttccagaggcgcaggaattggtgggcttggcataactgttgagggaccatcagagtcgaagataaattgcagagacaacaaggatggcagctgcagtgctgagtacattcctttcgcaccgggggattacgatgttaatatcacatatggaggagcccacatccccggtgagctattcctcagagaggaccccagagaataattgattttgcaggaaaatgggtttgattttggttatctctctgagtggggaaaacaatctgatatttgtaatagctgcaaaaggagagtttttcttagggctacatctccaagattatctcaactcccagtagaaccggtaacatggcaaaaagcatcggcttagaattttgactggaaacagttgtgcgtgtgttggaggacctagttcttgattcaggggaaagctggttctttacaaagttgaaaatcacagtggctcacacctgtaatccccaaactttgggaggccaaggcatgcagattgcttcaggtcaggagtttgagaccagcccaggcaacatggggaatccccatctttacaagaaatacaaaacttagctgagtgtgatggtgcgtgcctgtaatcctagctatgtggggtgggggctgtgatgggacgatgtctgagatgggagcc

SEQ ID NO: 13499 - DNA, 1204 bp, Homo sapiens
gggatataaattcttagaacctttgcctagatatgctgccagacacttctctgaggaacagtttgttattttttctgtaacttagttcctcttcagcatttccactgcagttggaaatgtcgttcttggtgcctggccctgttaacatcttgagagcagggactgtgtcttgcccacctttatgtgtacctggcacttaagaaaatgcccaatatgtttgctattgaaagtcaaccttcattgccatacctttaaatgctggcaaacccaggctaacctttagtcaacactcagagcttacagatgctccttatttagtaagtaattgatgacgtaaccctttgagcaacacctgatcaggggatctttgggatatccctctgaatggcagcagttggaggcctaacatttacaggcacagacaacatggatgggtatgatttgttcttgggcctccaggatgtgtgtccatacttccattctcttcccctgaactcttctccaggtcctggaatcgcctccactgtgaaaactggcgaagaagtaggctttgtggttgatgccaagactgccgggaagggtaaagtgacctgcacggttctgaccccagatggcactgaggccgaggccgatgtcattgagaatgaagatggaacctatgacatcttctacacagctgccaagccgggcacatatgtgatctatgtgcgcttcggtggtgttgatattcctaacagccccttcactgtcatggtaaggaaaattccttctcccgagcatgctgttattggtggaaactgtaacagctgccgtttgttgaaccctgactaggatatcctcttcaccttttttttcctttggaaaaaaatttgttaagcagtcatgaccttgtagagtcccagagtaatctctagaaactcagagaccctttggctgtaagggtttttagggaatcttactggccaccaaggtgtctatcataataagggacttgggcaatatcctggcctaagcccaggcattttgaaagataactcctcagaaaaacacacctttatgaaaatgtttctacataaaacatgacaggtttttaaccggccagctcttccttcttccatcttcatggccattctccatggctggaggagagagcttcctgatgctgttttgtttggagacttgactctgaaatcccaggactcaa

SEQ ID NO: 13500 - DNA, 1132 bp, Homo sapiens
ctctgtgtttaaagagaaagacagacagctgtctgcagccctcctgctgcctctcaaagccgccacttgcacattcagtttctgttcagggggaaagccacccactgctactctctgccacttaaaatgcaccttcttttccaggccacaagcaactaaacctttccagatggagcctcttgggactcatagacattgctgtctctcacttttccactttcccgtgggtgctgctgggaattttacaaacagactcccgagtgattgctaacagttggtcagcatgacctctccagtccctcaggttctaccctgggtctggagccacttagacaaagcccataccacaatgggcagccgcattcccaaatcccggcctcactggcttgtagaattcccagcagctctaacccctgtagcttcaccagctcccgctgttgtctgctttacccagtgaccactgccttctgtttttaggtgaccgaagaggcctatgtcccagtgagtgacatgaacggcctgggatttaagccttttgacctggtcattccgtttgctgtcaggaaaggagaaatcactggtaagcacttgccataaaggccgtctcattctcacttgctctcacgagcttcccagaatggtgctggggaggtgtgtccactgtcccccagacccaggctccttaacccagggtcacgagttcttggtctccggtgttgggccgtgggctcctgaaactacagaatatgccacgtgtgtgtttctctgaagaagtggctcactgacaacttgcattactttcttgagcagtcccatgattctctctaggttaaaaactgctgtgtttagatacctcatgactgtcgggttcttgtttgcccctttttcctgccttctcttatttgacttttccagatgtgactttgacactgagtctgtcatacaggagttcctttctcccctcagcctcttttcaatggcccacttctctttggtttgatgctctatgtatccagctggtttcatggtgttctcaagtcctttctgagcttgattttgccagttgtagaaaactctttaagagttgtctgctatattttgtggaagccaaatggaactggaaaaaaaaaaa

SEQ ID NO: 13501 - DNA, 1150 bp, Homo sapiens
tttttgagacagagtctcactctatcacccaggctggagttttagtggcatgatctcggctcactgtgacctctacctcctgggttcaagcgattctcctgcctcagcctcctgaatagctgggattacagcacccaccaccacacccagcttatttttgtatttttaatagagatgaagtttcaccatgttggacaggctggtcttgaactcctgacctcaagtgattcgtctgcctcagcctctcaaagtgttgggattaggcacctggcccaaagattcctttaaaatgtggtccatgaggactcaagtctctaggtcctgccagcttcttgtctttgctgcaagcaggcatgaatcccatcattcttcattggttgggtctactcagtgttcaaggctcatttttttttcacttaactttgtgtaattagttcttgcgtgttcatccgtgaacagcatatggcatggcagctctgtgaagccagggtaaccacatgtaacgggagtcctttttgggggatgtttcccagatgacagcaggcggtgctcccaggtgaagttgggctcagccgctgacttcctgctcgacatcagtgagactgacctcagcagcctgacggccagcattaaggccccatctggccgagacgagccctgtctcctgaagaggctgcccaacaaccacattggtgagctaggctacccttcctggctggagccaggacatcttgggtgggagatggggactcttgcagtcctttcttgggaatgggtagcacaatggagtgtgatgtgataaacctgctgggtcacacgcacgataaatgcccaagcgtatttgtgcattgtgatatcgacactctggattgttgggtgtcaggaaagaggacatatttctatttctgagagtgtgtctctctcctgcttcctctccgccatccccttacaagccccaatctgtgttctggtccaggcatctccttcatcccccgggaagtgggcgaacatctggtcagcatcaagaaaaatggcaaccatgtggccaacagccccgtgtctatcatggtggtccagtcggagattggtgacgcccgccgagccaaagtctatggccgcggcctgtcagaaggccggactttcgagatgt

SEQ ID NO: 13502 - DNA, 1203 bp, Homo sapiens
ccaacactagcccttgtttttaacacacgctccagcccttcatcagcctgggcagtcttaccaaaatgtttaaagtgatctcagaggggcccatggattaacgccctcatcccaaggtccgtcccatgacataacactccacacccgccccagccaacttcatgggtcactttttctggaaaataatgatctgtacagacaggacagaatgaaactcctgcgggtctttggcctgaaagttgggaatggttgggggagagaagggcagcagcttattggtggtcttttcaccattggcagaaacagtgagagctgtgtggtgcagaaatccagaaatgaggtgtagggaattttgcctgccttcctgcagacctgagctggctttggaatgaggttaaagtgtcagggacgttgcctgagcccaaatgtgtagtgtggtctgggcaggcagacctttaggttttgctgcttagtcctgaggaagtggccactcttgtggcaggtgtagtatctggggcgagtgttgggggtaaaagcccaccctacagaaagtggaacagcccggagcctgatgtgaaaggaccacgggtgttgtaagctgggacacggaagccaaactggaatcaaacgccgactgtaaattgtatcttataacttattaaataaaacatttgctccgtaaagttgccttggtgttcttggatgatgtcgcttctgaataaattgtttaatcctaggagttcaacaccctcagcctgggtaacagcaagacccagcctctacaaaaaattaaaaaattagccagcatggtgatgcatgcctgcagtcccagctactcaggaggcggaggcaggaggattgcttgagcctgagaggccaaggttgcagtgagctgtgtttgcaaccctgcactctagcctgggcaacagagcaagacagtgtaacacacacacacacacacacacacacacacacacacacacaggcacatcgttggagccccagatcagctctcccaaccccttaagggacacaaaactagcaacttgttttgacaatgaacctgggctccttttgtgggggtggggtggggctggtaaacaagctgtcacctgtcaccctgctgtgcttattgttgctgctgcctctgtttctcttttttttttttttttaattttccttttttgagacagagtctcactc

SEQ ID NO: 13503 - DNA, 1226 bp, Homo sapiens
caagctatagtaaacatcatgtacctgaatacgtacaggataaagagattgaaagctaggagtggccaaacgacttcaactttaaacttgtaagtttggcatttctcttcaggcagatatttttaaaagcaaatccagaaagcggttccccataattagcattccttacattttctcttcctggtcagccacacctctgtgccaaggtggtagtgcccagctggcatttgcactctctcagttgagccttccttctcctaggtcctgcgttcaatttcctggatgctcctgctgttcgtgtcactggtgctgatgtccctatgccttatgcaaagattctagaggacaactctatacctcaggtcaaagacatcatatttgcaataaagaaaacattaaatatttagtttggacttgaatatcaagtcgttgaaatttatttgaaatacttgctggcactgcacctggatttgtactgcaagacctgactattcataacggaaaacgatttctaaagcaacagcaggtatttttgtacagggaagtttaaatgtgtttgtgtatggaaaactctccactctcctcccctagatgccatgcttccttttgtctgttacggttgccatgttctttgaataacaaattatataacattttatcctctctcaccacaaggacaaagtatggatgtggcagagtcctcatgaaagatgtatccaaacaagataacttatatgtataaaattaaagcatataatatacatttactgttagtttgttttgataaggaataaaggaatttctaacatgactaatttttttttttttgagacaatgtttggctctgttccccaagctggagtgtgatggcacaatcttggctcactgcagcctccacctcccaggttcaagtgattctcctgcctcagcctcagtaggaaattagccaccacatccggctaattttggtgtttttagtagaggtggggtttcaccatgttggccaggctggtcttgaacacctgacctcaggtgatccacctgccttggccctcccaaactgctgggattacaggcatgagccaccacacctggccatgactattgtatttttatattgaaagaattggctgggctgggcgtggtggctcatgcctgtaatcccagtactttgggaggccaaggcgggcagaacatgatgtcaggagatcaagaccatcctggct

SEQ ID NO: 13504 - DNA, 1194 bp, Homo sapiens
tgttttgcattttgtacagctctggcccatgaagaagtttagaactgtgacaattagttttggatcctggcaagtttcctaatcctaataagcataactcttaagtcttttggccctctccctttcttccttcccctcctgccagttctccacactcagtttttcttgtcctttgtcaagaagttggtccttctggtcactggtgtttcttctccacctggaaccacatgtttagagtctcaccacttccacagtgctcttccttcaggcctaaaccttctacctgcataaagaaaatcccccaggagagatggtgattcctgcttcgttgcccttgtttggggattccgggccaagccaacagctaatgtgtctgtggttccccttccccacaggtgaagaagacctcagtgtggaagaggacgaggaagtactgactttgttgtatgacccttgtctgaactgttactttgacccccaaacagggaaatactatgagttggtataatgcctccttccggggcagagagcaggcactcccagctggagcagaatagcagttcagggtcgcttaaggagtcaccacaacttatgtgttgggtgaccacaaaatcaacagtaactgagagaaacgaattcattttgtaaataatgttcaacgttaagaatacctatattccttttgtagatgagtatgattttgaaactgaagaaattaatacagaggcaagattttaggagtttgaattggttcttgtttgttctcattctacatataattttgtttatttcagataattttatgtaaacaaattaagagttattcattcaaattttttgcagtgttaatctgtaaatgatggcttgatgtacagaaaatgtatttttgcttaaaagatgcctgggtaccttttattttatggcatttgtattaaaaataaagtatgatggtaagaagaatagcttttaaactgcttcttttcattcaccccactttcttttccagaatattcctatatgatactttccttctcttcgactcttagaaaaagaaacattgtgaactggtcagactttatgatcacattttattggcactggacccactatttccatttcattattgttcatccagagtttgctggagatcacaacattgttcatcacttaagctgcttagcactgtatttttct

SEQ ID NO: 13505 - DNA, 1119 bp, Homo sapiens
ttttcctcttcctttttctttctccccttttctgccattttgtttcttctttctcttccttttctccctcatccttttccctctttctcttgtttttcttctttgtcctctcttcccttccatctatctttattcttgccctttgccttttacttcttttattcttcttcttcctaatttttcttttccttcttcctttccttctcatttcttatcactctccagctgcttctcttccttctctcacttctactcctgtgggagtaaacttactcaagaagagaaagtgggtgcctgagggccacaggaaatggtaaatgctagttctatcatcctggctgctaactacagacatctttagacacccaaggcacctgcaggattattcagggtccaagcctgcctcctcccgcacctgttcagcaagaactcaaccttaggctcttcagcccttagtcccttcattgtcactactccatccacatcctaacctcagaaatgagctcgcaaaatgttctgtactggtaaatgtttaacacttgtctctggggtggtaatggagtattgagggtcctgatgcttacttagtacttgctagtttctgtggtgtaaatattcccaccatggctgctttcaagctaccaatctgacatcactgaatgtggagctgggaggagatgctcaccacggagcctcacaaaccagtcaagcatactgctaaggagtagtactacatatagccatggtccatatgtagtactactgccttccaccattatgtagtactaccaccatatgtagtactactgacttccacaattaatgcagataattgagggttagccgttagtaaataaattactctcacttcaaacatcagatgtctgttaactccttaacagactcattttttgacagccattgagataattaaaggcagcagcatattataattaccacaacactaccttttagtttgcttaaataaaatttaactgcaagtactgtcagaaaaattcaggcttttcaactgttaccctctttttacttgtgagtctgagcttgatatccctatgaattgacaacactatttggattatagatatcataaagtttcag

SEQ ID NO: 13506 - DNA, 1214 bp, Homo sapiens
tcttttaaacaaggtggttgtaccagataggccaactagaatggtccttttacagaacgaacaggctgttgttttgccttttctcagcctgtgagagatctgatttatgtttgattctttaacttacaatgaggccgattatctagaaaaacatctgtattgaaatagctgagaaccggattcagtcccttcaccctcagctttccctctacatgcttggtcgtcttgtgaacaaatagcctttctcctgagcaagactcacatgtgatattgcagtttttaaatcaaatcagaaagaatatgcttcaaaaataatttcttaaggatttattcactgtttgcttagtgcaggggttatatttagtcgcattttaagctctccaattttctctgaaatgtacacgggagggaaatgagagaagcaattgaaaaacaatagaaaaagcacttagaataaatagagaaggtttggtaaaaccttccaatgtgtgggaacgatttcaagactttctacagatctttaaacattccacctgtttcatttgggtgttaaatggaatgtatgcactgctttcaaagctatctagaatcctagaagttttgcctccgaggtaataaatgtacaaaatgcatcgttgtgcctcttggctatcaacacgccctgcttcagacctttttgagataagtctttatctcagctttttacttcctgcttcataattgcccagctaagctaatgaagcccatttggtgttgtgagcattcaaagcgttcatttgcatgaaagctaccaccccttaattatgtaaaacagatattaaaaaataattccctgcttctgatcatgatcaagactctagggatgaatcctaaaattcaagtccgttcagagttgtccttttatgctcataatcatttgctaaacttaaaacgcttgggtgcttccttttgcagtgttgtctttttttttctctccctctctccttctctctctctcttcttctctctctctctctcccccaccccttgtgttcccttcccttccctccctcacctgcaaatggtggcacagtgccagcagcacccagctaccactctgtttgctgggtgacatgaatcctgcaagttaggaatcaaggtgtaggggaaaatgatgtggctttggcatcacttccctttcacaggtgtcttattacattttgacaggtgtctga

SEQ ID NO: 13507 - DNA, 1103 bp, Homo sapiens
tcttcgacattgctgtcaatagcgagcccttgggctgcgtctccttcgagctgtttgcagacaagcttccaaagacagcagaaaattttcatgctctgagcactggagaaaaaggatttgattatgagggttactgctttcacagaattattccagggtttgtatgtcagggtggtgacttcacatgccataatggcactggtagcaagtccatctacagggagaaatttgatgacgagaacttcatcctgaagcatacaggtcctggcatcctgtccatggcaaatgctggacccaacgcaaatggttcccagtttttcatgtgccctgccaagaccaagtggttggatggcaagcaagtggtctttggcagggtgaaagaaggcatggatattgtggaggccatggagcgctttgtgttcaggaatggcaagactagcaagaaggtcactattgctgactgtggacagctctaataagtttgacttgtgttttatcttaaccaccagaccatttcttctgttgctcaggggagcacccctccaccccatttgctcgcagtatcctagaatctttgtgctttcactgcagttccctttgggttccatgttttccttgttcccttccatgcctagctggattgcagagttaagtttatgattatgaaataaaaactaaataacaaccacaacaacaacaaaagaattcagtaacagagaagtggctggttgttaataattaaaccaagttaacaaaaagtgagatttaagtgattgtaactttaattataatactgaatgcaaatgtaaaactatgcttttgaaagagaaaatatgtcacacaaaataatgctttaataagcattaaatatttaataccttaatatttaacactaagcaataagaaacccaggatcatatttacaaggtccagaaataaatttgtgacaaattctcatttttctaggggtagactcaaatattctaaatatttgaaagttttaaaatgtattcgttcaacaaatattaatattctttttgatataccaggtgccactattagaaacaaaagtaggatgcatgacttccaaaccaatggagaga

SEQ ID NO: 13508 - DNA, 1139 bp, Homo sapiens
tcagtcactttggatgataatttttttttttgctattatttttaagtgacagattgcagtacgtattttaggacctgccacccattttgatttgaaagattatgttgtcggaatttcagacactgcaggtaaagatctaattttactaattaacaaggatttacaaatcttgtaaattactttcctcttgcaatggaaagtgcttttctctgatttattatacaaataattgcaaatccttataactgaacaaggtaaaacttttcgtgtcttttggaatctgttttctggttttgtgccttcagtaatagtcttaccttagtagacaagatgtataaattgtgtaaattactaagcaaaggtgaagggaaatatattttggttatttccagttagtaactgcctcttaatgaatcacattaagtgccatagtcacttctttttttcccaaattgtctttaagaaggtacatttgcaccctaagtacaaaaaagggacagtattatttttctgcttttaataaaagtaataatgtcatatttttcctgttctagaatttcaggcatcaccccctggagctgatggagagactggtattccactgtgtatcttaatatcagggaaatatctcacaggcacatcaagctgatatcacagggtttccttgattgtaaacaatagaatggattatgactgacatgagccaacacttggatttggaagggtatgatagatttttttgctcagggtctaagaatcgtaagataccaaaccttggaaggggcaggaatcaggacagtgggagctaatggcaagttggtggtggaatacattggccctaccatgttttgtttttagacatggcattcccaagactcagatccctccttgggcgaggttctgatctgcatgactagggaggacagaacaactgcatggttaaggcagaggaaagttgggggactagaacacagagaaatcggggggaaggaccttgaggttaattacaactaggccttgctttctttaaggttatccagtgcagggctttgatcatagagtggattttcaaacattggagcaggaagaggctcccgactctcaccaaagccctggggaatgaatgacttgttcaggag

SEQ ID NO: 13509 - DNA, 1227 bp, Homo sapiens
ctaatttcccctgcgtttattcccattagaccatattcttttatcctgtaattgtatttctccgtgactcttcattcttcatcaaacataggcataaaaatacataaggttacctatttcttagagtcttcatttccaaatgaagcttcccgtgtcacataaaacttacattaaataaatatctatgcttttctcttgttaatctgccttttgttataggggcctcaaccatgaacttaggttgggaaggaaagagatttctttttccctacaatttgatataaagtctccatggcacataagagatagtcagttaatgttgcttatcatcatcatcatttttttctggaaagggccacatagaacatgttttaggctttgcaggtcataccttgtctgtcaaaactattcaacactgcccttgtagcaggcaagcagacatagataatgcataagtgaatgggtgtggctttgttccaataaaactttatttacataaacaggcaggctggatttggcctgaagatagtatgtgaaccactgtagctgtgtgtgtcaatacagccttacttacaaaaccaggcaggatagatttggcccatgggacatagttggctaatccttacgtagcagtggttctgaaaccttttaatttcagatctcctttatactcttaagaattattgaataggacctgaaagaggttttgtttatgtggatcatatctgtggatatttactgttctaaaaattttaactgacaaattaaaaaaacttaattcattttaaataactaatacaaccatagcatgttaacataaataacacatttttataaaagaatatatgtggcacatatacaccatggaatactatgcagccataaaaaatgatgagttcatgtcctttgtagggacatggatgaaactggaaaccatcattctcagcaaactatcgcaaggacaaaaaaccaaacactgcatgctctcactcataggtgggaaattgaacaatgagaacacatggacacaggaaggggaacatcacacaccagggactgctgtggggtggggggagcggggagggatagcattaggagatacacctaatgttaaatcacgagttaatgggtgcagcacagcaacatggcacatgtatacatatgtaacaaacctgcatgttgtgcacatgtaccctaaaacttaaagtgtaataataacaaaattaa

SEQ ID NO: 13510 - DNA, 1655 bp, Homo sapiens
aatatcagttatgtaagacacagagaagcccagcagtatatgctgtacattgctgcattctcctcctcaaagaggtcatctctaatgacattttaaccaacacacacacacacacagacacccatggcctgacaaacctgagcatcaggaatatcacatttaagtagtctgaatagtgtaataatgaaatgggtttagaaaggaagaatacagtgactcccatcatacaggaaaatctgagtctctcgattttgacaaggtaagagtggagatttcaaaaccaatagtattaactagccaatgatgcttacgtctcactcagcaggaggaatcttaagtcaagttggttgctaggcagagagctgaatgagtgacaggtattttcatcagggagtttccataaactctgtctcttctcagaacttctactgagcctacctcatttccagcccgaagcaaaaaaagataaaaatattaccagacccgctcttttccggttagcgcggcgtgagaagccatgagcagcagtctctcgcaacaccctgtacgaggcggtgcgggaagtcctgcaccggaaccagcgcaagcgccgcaagttcctggagacggtggagttgcagatcagcttgaagaactatgacccccagaaggacaagtgcttctcgggcaccgtcagacttaagtccactccccgccctaagttgtgtgtgtgtgtcctgggggaccagcagcactgtgacgaggctaaggccgtggatatcccccacatggacatcgaggcgctgaaaaaactcaaaaagaataaaaaactggtcaagaagctggccaagaagtatgatgcgtttttggcctcagagtctctgatcaagcagattccacgaatcctcggcccaggtctaaataaggcaggaaagttcccttccctgctcacacacaacgaaaacatggtggccaaagtgggtgaggtgaagtccacaatcaagttccaaatgaagaaggtgttatgtctggctgtagctgttggtcacgtgaagatgacagccgatgagcttgtgtataacattcacctggctgtcaacttcttggtgtcattgctcaagaaaaactggcagaatgtccgggccttatatatcgagagcaccatgggcaagccccagcgcctatattaaggcacatttgaataaattctattaccagttcaaaaaaaaaaaaaaaaaaaattccagacccaaaggcccaatttcttcctataaaaatgtcctaagagtcacctactactgaagatatcaacgcaactgtttcctacgtgcctcatttaatttcccagagccaccggacatagtttataagaataaatgtttttattccagaataaaaaagcagatgtgtatcccatctgccttaactgtgtcttcgggaggattctgtgtaatccttactctcagtgtttcacagaaatattgacttccggggaaaaaaagacttgcaagctgtgttaactcttctgtgttaatttgcagtctaaacatttttcatacaaagagcccggctcctctgaataccacatgaaacagcattcgtgacatagatgttttttcttaagttttactctcagagagatgaaagggtcactgagtctatattgaatatgaata

SEQ ID NO: 13511 - DNA, 1104 bp, Homo sapiens
tccttttcatttttatttttacttttacccttttgagctaatgaagggagagagcattgttctaactatgttgaatgttacattgcaaataattttcttacattttaaggggacaaaaatgaagaccgaaaactagggatagacttttctggattaggcttcccaaaactcccaaaatatgagaggtggattgttatttctagaagagatttttgatgctcaaaaatatatggaaaatgtattaaagctaattaaggaatgcttgagtaagatagaccactttggaaattactttggcactgaataattcaaactccttctatgaaagagcttggaggcatggagtattagtcttaataataaatctatgtattatgcaatgttgttgcatatagaactgaaagtattcttttcataatgatgctcgggtttaaatcctgaatttctcccagcaaatcctgttaaatttatgccagtgtaaaatttataggtctgatctttaattataccttatctattggctttttgcatccttttgtctattgataaatctgctgcccctgcagggagaatatcctatctgttttgttttgcagtgaacagatagtgattctgaagttttccatcacacccagtaccttgtgattagaattatctaattagaggctttttgtcaccatttctgataaatgaaggaaattggcagatgaaagccaaaattacatatatatagcatcttgccaagaaacccaaagaaaatttatcattttgtactctgtggctctgacatcagtcaggaggaggcacaaagtggcttgctatttacagttcatcagtttagaataataatgctgttagtcaggaaattggaagttatatcccattagcatgtccaattgcaaatggcagtgaagagatgaaagcccttaaacttttcccattatgtagttaagaatgaccataagtggtgccatctttgtgatggagtgattgttgatgtctttaactttggtagagttcagaagtctccattttgtatttctggaatgcattgtgtctgaatttgggtattgcctccagtagtagaaggactaatggttcaaa

SEQ ID NO: 13512 - DNA, 1172 bp, Homo sapiens
atgttgtccatgttgtccaacatggacaacatgtaatgcctcaaacattctgctaagcacactgcaacccacagtactatttcaacttatgttcacgttttactgcatacttgatgagttattttttcccccaaaggatttttgttgttgttgttgcttcctgaatgttgcacttttacaataaaacaatgttgaaatgtgaatgtctggtggttggctgggctctctcactgggtgacacaccaccatatactagctttcaggtgctcaaaagtaatttcttcctcaagagattgaaaaatacctatttgtcatgggtcttctgggtctgttagaataattaccaagtatttggatagttaaaagttgcaacgctagggtcttttatacttgctctaggacatagttgtcaggtatgaaaaatttaccatggcaagatccatttgttgtattaatcactacctttcccttagagttgatttatggttcagagggatattctggaaaatgcttagatcaaacaagaccacattcattcatggagaaagagtggaatgcaggttcgtagtaaagaaaaataatttccagggctcctgggaaaaagctttggtcacttaaatgcccttgggctttctgtaagtaaacatctgcagtcctctctattggttttctagcatatttcacacaaaagcaggggagcagagtagtgttaattaccctgagccaagtcagtattaatctcaggtctccattgttgtttaagattgatggataaagatgtgactgcccagaactacctttgttctcttactggaaagatgtggacttggaggggcaatctggagttaatagtcagaactagattgtatcctccttactgggatgtgagctctgtcacctgagtaaccaatttctttgtaaagggatgtaatctcaaatcttagctttcaagctgccaggcttggtttgcttttatatccccaaatggaaccggaaccttctttattccaatggtacattgtggtagactgtattcggcaaccttttgtatgaaagggttaacatagatctgtctcatcagtgtctttctgtttaaggatagcataaaagtgctgattgttaacttcacttggtcctatgcttattctttatttttactgtaggatttactt

SEQ ID NO: 13513 - DNA, 1376 bp, Homo sapiens
taaagagattagatattatattttcttattatatagtaccttaaatatgtctataacagataataaaatagtgcattagctcatatatactacctaaagagagacacttaatcttactgtatttatttggaaagtttaggtaatttcttacattaaaatatttttccttaaattaactgctgattcttagatcaagtcagttatgtattattgacctaaattccacgtacagtaattagtttttgttttgctggtcatactgagtcattgcgatatttctctggtatgtgattttagtcttctacatgccctttttttctcagtctatcaaggtacattacatagtttatttattctaagcgtttctacgaaatacaataattgtcactcactttttaaaggtttaaattcctaggctagcaaaggagtaagttattttcctatatgcagtcaaacctgggtgacacagtatggaagatgtttaatatctgtccatatgtctgtttattctttcatacagcgacacatgtgttgcacaactataacataccaggcatagtcagtagcgtctgggaatattcaagtgaagaaatctaagttctagctactccatggagaagatgcttttagactagaacaaggtagacaaggtgtgttttgcacgtagtctttcattttcatagtgcctggcccatgcttaacaccaaataggtagaaagtgaatgcatggacttgtaaccaacatgtgtctcatctggcctttcaaggaagtgctgtgtgaacccagaggaagtgctgtgtgaacccaggggaggagtgactacacatggttggcgtcggatgcattggaaaggcttcagataggatagtattggacttgagccaatgggaattggcttggtgaagacctccaggggacagggtgacaagccttgcctgcagtgacagcagcttgtgtgaaggcacagtgacagggattatgtgaaaagaggtgagctgtggttttcatgtccctgagggatctgtttatttgggccaataacctatatttcctttttttcccttggtcatgggtggaagatatttacctatatgactgattctgtacccagaagaggtgaaagcctagaacagatgatttctccaatatttaaagtgtaggttttgtcagcatctgcatgtgttatatagatatatatccttagcacgtggtgtgtatgtgtgtgcatgagcttgcctgtgtgtgcccgagtacgtgcctatgagtgagagagaaggaacttacttggcatgggatatgaaggaagatactcagtatttgttccgactcatgcatcccaacaaaggcgaagtaaatgtctctgtggtgtcccaca

SEQ ID NO: 13514 - DNA, 1216 bp, Homo sapiens
gttctttctaacgtgtcagccttttgaccttgagctgcattaaggctttcacatgtgcagttgattaagatttttattttcttcctttatttcatttgtaccatatgcacagagagtcgtggataacagtttagactaaataaaggacattgaattgtcagtaatgaaatatcttgttttaattaaaactattagtaatgctctttcttgccctggatactaggatattgacatacttaatggtagaataacagataatgcggtatttttttttttttttgctttttactcctacaaattgcttttaaattctctaagatctggttgacaattgccagtataagtatttatagagaaagataaagatggagctacctacactgtatctataaatacagctgtacatataaaatttgatggtgacagccatcttgcctgtttcagctgtgtgtgtttttaggaagatttgaatataaaagatttgtatttatataaattattttttgtattttgtgtggcttcataccctcaagggtgactttgaaaggtatcttgacccagggacaccaacgagtttattccaacaattccacgtggaagaatgtcagtgattccctggaggtcagagttccgtctccccctgtcttctcagcagtgtgatgaggggctcccagcacacagattatcacttccattccttttgggatgtagacctgcatcttatgtgttgcgtcttacttttgagttactgtgaacaactgttttcttcatctgccagttaaagacaaattacaaggaggaaaggatggaaaatacaggaaaagagtgtgaaagcccaagaacttaaagctctggatgtacagttgttcttttttgtggagtcaagcgtcattgtggcatcctctatgggtgttccaaaattacaattatagttagagaaataatataggtaattatgctgtcgaaccactgtaaaggagagcacgtaaaagaaggcagtgcggccaggcgcagtggctcatgcttgtaatcctagcactttgggaggccgaggccggtggatcatcacgaggtcaggagttcgagaccagcctggccaatatggtgaaaccccatctctactaaaaaatacaaaatacagaaattagccgggcatggtggcgcacctgtagtcccagctactcgggaagcagaagaatcacttgaacctgggagg

SEQ ID NO: 13515 - DNA, 1159 bp, Homo sapiens
caattactgatgcttctctgctttttcttcttctgcctcttttccacccttgccgggtgaccctttccagcccacagcgtctcctgcctcttcagccgacatggcccccatcagctcggggtcttctacctggacgtcctctggcatcccattctcatttgtttccatggcaactgggatgggcccctcctccagtggcagccaggccacagtggcctcggtggtcaccagcacgctgctcgccggcctggggttcggcggtggtggcatctcctctttccccagcactgtgtggcccacgcgcctcccgacggccgcctcagccagcaagcaggcggctaggccagtcctagccaccacagaggccttggcttctccagggcccgatggtgattcgtcaccaaccaaggacggcgagggcaccgaggaaggagagaaggatgagaaaagcgagagtgaggatggggagcgggagcacgaggaggatggagagaaggactccgaaaagaaggagaagagtggggtgacccacgctgccgaggagcggaatcagacggagcccagccccacaccctcgtctcctaacaggactgccgagggagggcatcagactatacctgggcatgagcaggatcacactgccgtccccacagaccagacgggcggaaggagggatgccggcccaggcctggaccccgacatggtcacctccacccaagtgccccccaccgccacagaggagcagtatgcagggagtgatcccaagaggcccgaaatgccatctaaaaagcctatgtcccgcggggaccgattttctgaagacagcagatttatcactgttaatccaggtaagtggtgcaggtcttcttcgagggttcctgctcctgtgaatagtcgtaccctttttcaaaaaattgggagcagaaggtgaagcttcagaaggtacttaatattcttagaatcatatatgtctgtcatagaaaaggtgcacacatgtgaaatgtgtatgtgtgtgtccctgttttactccaaaagcctactctcttacgctggagtaagtctttctttgatatttgttttcttgcctcggaataactccagggacttcaaccaggcaatgatatacatgaataaaaaaagccatcgatcttaagaagtt

SEQ ID NO: 13516 - DNA, 1141 bp, Homo sapiens
ccaaatgaattgtttcactagcatgacctacttggttgtttgttttgagacaaggtctcactcacagtggcatcatcaaagctcagtgtaaccccaaactcctgggctcaagcgatcctttcacatcagcctcccgaatagcaaagactataggcatgtaccatatgactagttaatttttttttttttttaatttttttagagacagatctccctgtgttgcccaggtgggtcttgaactcctggcctcaagcaatcctcccaccttggcctcccaaagtactgaattacaggcatgaaccactatgcctagccatgctttttttaaaaaacaaaaaaacaaaaaaaaaaaaccttcctggtatttttcttctttccagctgtggtttggttaacacaacattgttgagagttacctataacacatggctttctcaggagcaagttctagtcattagattgtagatatgtgaaataaaggaagggatttgacccatgttgtattggttacaggatgactatgtcttagaagttcggcactttcagtgtcccaaatggcctaacccagatgcccccataagtagtacctttgaacttatcaacgtcatcaaggaagaggccttaacaagggatggtcccaccattgttcatgatgagtatgtatctgtttcttaattttaaaatgtagaccgtttttttgtttaatttcttgttgaaagcagtagaaaaggaagccagaattttaaaacctatcaacaacctcagcttgtgacaactccatgttatttctactgtggacatgtacaaagtgttgttgctctgtttacattttaatatgtcaaactcttccaagactccaggttcttctagagtatatgttctagaaaggggaaagtattatatcttagcctacagaggtagatctgcatgcatttagaggtgttatgtgttagtaacaaatgagtaaattaataactgtttaccttaattaaatactttttaaaaatccttacactgaatttcaaacacttgttagggaaataacctttaaaaatatgacttagttgatgagtagagataaaactactagtattaatgataatatttaaagttcatgatgtgttttaaagtcttcagtact

SEQ ID NO: 13517 - DNA, 1171 bp, Homo sapiens
gacaaaaatggtgctgttcttattgcagatgaatcagaccctgctgagagcatggagtccctagtgtgactggaatcctgaaagggcacttaatttgtaaacttctgaagactgagaacttttttgaggccttttttgccagactctaggttatacaataacccagttacttttttacactgataaaagttttgatatttattttttgccattttatgtcttaatggtatcctactgagcatttgcacctctgttcatttcacacagtgaaacgcaattttacctagtttgcactatatgatcagtgttactgcctataatcttatacaacagcaaaccctgatgtgacattccatgacgacatacatgctacttttttttagttcaatacagtgaaggtctttgttatgacagtgaatattgcttttattattattattgctgaagtggttgcattctactagcaggcaatgctgtacttttcttcagtcctcctctcctttttattttaggcactgttcaatactgtatgccttctgtattttaatggagtggatagcattgttttcttttacagactagcaggctactgggacctaaaaaggtctgttaatgtcatggccttgaaacagttccatttatgctggttaagagatcccttaagaagttagaaggcttaagaactgcttcatgtgaacatcccttattagttacaaagttatattcacagttttttaaaaatgtgtcaaaataaaggataactctgtattacagctttcacagtagctatgtggacaatgtgttatttccattttgactctctaaaatagctacatcctaaaatcagggctatctttaacaatagcaagatagcaatattatatacaactcagttatgagaccctttagttattctccattaatgcttcttagtttgtaataccatacctcacagtaggtagaagaatgaaaacttctgcaggtgtgtaattttgaaactagtcctctaaaaattccctattactcctatagcaatctaataaaaactacctacatagttactgttttctttccttctttgccaaatgttttataataaatctcttaattacatacatttttctacttaagattaaattggaaatactgtcttagcaaaagtcttgggact

SEQ ID NO: 13518 - DNA, 1186 bp, Homo sapiens
accttgcaggctcaagtgattctcctgcctcagcctccctagtagctggaattacaggtgcatgccaccacacccagctaattttagtatttttagtagagacggggttttaccatgtaggccaggctggtcttgaattcctgacctcaggtgatccacctgccttggcctcccaaagtgctgggattataggcatgagccaccagaccctgcctggatttttttttttttaagtgaagtctatcacataaattttaaagtttgattcaactagtagccatcttagctttaattgtattggctaataaaggataaacatgttttcatgtgttcatcgaatataaaatataggcaaacttgactaaggttttatgtttccttctcaattacagatgatgaaaaactctcagaggtagaagaagctcaggaagcaagcatggaaacagatcctaagccatagacaggctaattgcccaccactcccaggaatattgaaatagctacatgaccataatgtgtttaaaatgtggtatgctcttgagatatttaaagttttggcagtaaaatactctgtttttaagtatgaatgtatttcattcatatttcctctcacaaaggaaaatgacttcagtatagatttgtttttattaaaatgcattttttattcttaagtggtaggaagcaacatccaaaaatgcttaataaaatgcttttaagctgcatatgtttgtgctcattaatattctaggtagtttttaactggtaacattgattggcttacaaaataagttgaaaattgttagaagttggcatttctaggatgtacatgggaaaatgagccaatttctggaaatggttacacttctgaaaacggagtctatgaagaggctttaggaggaccatgaacctgtgaaattacatgcaaaatgttagtggtgtatgcttattgtggagagaggttccaggctgttaaaattcgctggtatgggacgttaattataagatgcaaagtaaaatagtgcacattactttatatatctctccttaatatgagaggaatatggttctcaaatgttttgttgatctgttttctctactgttttgttctttaggaatcattttcaatagaaaaagatgtattgataaagtgaagagtgtttgaagtaaatagtttgttaagattgtt

SEQ ID NO: 13519 - DNA, 1618 bp, Homo sapiens
aagacagaagagcaaaaactgtatcatttcttaatatgattgggatcagggaatgggagaagatgggagctaagaatgtaaagtcagaaacttgcactgttttaaatgttaaagcgcttttgggggtggcttatgggggagaaaagggaaaatgctgtcagtagatggaggcaaggttacaggttgactcaataggtagtcacagttcttggcatgttgaatattatttgcacatttcactttggaaacacagtagactctatcgaggccaggcttggtcacttccttcccatcagttctgtgttgagttgccatctctcaagatggtaaattgtttcctgctcgcttttatcctctctggttctcttacttttaggacccttttttcagtaagtaatttgtttattagccaggacccaagactaagttatttacatgtccattgtaaatgcaatgtaaatgagagttctgataaaatatttttgtattttgtaatatcaaaggaatttctatatcgtaggactcagtggggacttgcatgcacatccaccattgtctctgagtagtattgaaatgtggcccggtaccaccttttttttttttttttttttttctatacaaatttgttacatgtcagtgagacctttttcaaaggaacatattcaatttggctttttgtggctgaaaaaacataactgttagacccaaagcattttatgctccgttccatcttaaggagccatccttaagtctgctcccaccctcagtagaatttattttctacaaagtggtagtaatttttttttaaattgcaaatgtaatttttgccaattagagaaaccaaccggtgtcagtaaaattctgtgagaaatgccatccctgctgggaatgttgaagttacttaatgttgatctatcccttggggaaagtaaaagtgactgtgagtggtgccattgtgtgatgtcagcatgacgttgttttgaatgtggcattatgttctggtgctcatgtttcctggattgtattatctgctttcctttaccaaggcagacagaactgctgccttagcctgacaaccggttgtcctcaaagcaaatgaacttaagcatttgggattgagggacagaaggattctgagggggctctgcgagggacggtgtgtgacatgtcatgcctggagaaggaacaaggctatttgaaaacagaaggcaggtcaagggtagaagttaaaggagaatctgaaggcaggtcagggaaaagaagaactggaaatgaaacagaggacaggtgacaaccacctcgaagagctcccagagattgtagaaagagtccagtgtaaccagcttagtaaccagagtatctggattacccaggaaggttgagctgctgagatttcagtggtgcaatgtctttaaaaaaacaggctttgttgggagggtatttccattttgaactttgaggactgttggtcagaaaatgggctcaaaagtgagtttgcttaatgaagacatttaacggttgtgctgtttatagtaaaataaaactccctaccttgcttcagttaaaaatgaagcacttggtttcttccatcctcctcctccccttaatggattgtggc

SEQ ID NO: 13520 - DNA, 1112 bp, Homo sapiens
atgtaatgtccaagaaggcactttggactttgtttaaacacattttgaaaacttactcatgttgccttctagcagtggttctcttactgtgatattgggaatacctgtttggtgaattgctcttctaaaaaagaaaacaaaaaaaggcgccatgtgtgcgtggaacatacgatgttttacatctccctcttgagccatcacaattcaaaggctatgagaaggcctggagtagagaaacccattgaggcttgatgttgcatgttctgtgctaatgtgaccctggaaccccctttcagcctcacctcttaatgtgccacagaacacacttgggggaagctgttaaacttcaaaacggtggctccaccacttattagcaatgggacaagtcatttacatctctgaacctcagtttccttgtctgcaaaatggaaataattgggacacctaccctatggagttttagggagggttaaatatgttaagagatgtcaaggtcaccctctgcctgtcagcagggtttgtcccagtggatcattccctcctcttgcttccttctataactttctgtctccctcttactttatcttcctcctacctcccaatttcctttgctgctcttttctcctcttctaatttttttttttaggtcagccgctcctgcctccttcctgcttgctcatgtctttttcatctttattgctcccttgttgacgccatccagcccatggcttcttgttacactggactcttgactagtggagtcacatctccagcctggacctctctcctgagctccagacttagatacacatctcttctcagcatcttcattagatgtccaatcggcttctcagacttgctgtgtcaaaacatagcgctaactttttcctttccttaagccttgactgtgtcaacaaatggcacctccagctacccagttgcttgagctaaaaacttttggcacctttgattgttctctttctcttaccctctccccatatcctatccaatgggaataagtcctttcagttctacttcaaaaaaatagcccaaattgtagcaggtgagggtgagagggagggaggactgactagaaaggagcttgaggtaac

SEQ ID NO: 13521 - DNA, 1365 bp, Homo sapiens
agccattatggatggatgaaggatagtaatgcaatacctccaccttaatttgggtgcatgtgtatgtgtgtgtgtgtttgtgtgtgacttgtatgcttgtgtgtgtaaatgtgtgtacatatacatatatacatatctacacatacatatatacacatatatgtgtgtatgtagatatgtagactatcctaatgatgtaaagtttaatatttatgtttgaaattatttattgtgatgtaatatttttgtacgtaaaatgattctattatgactgcctttgcatgtagtaatatgacaaagtgatccttcattatcacggtacactattgtttacttttcatctgtaaatgttttattgttacttttttaaaatgaatttttttaaaacaatctagccatcatcaaggtgctataagagttgtataaaagatatttttggcatttctaggcaagtatcagccaataagtatgttagtgatatcacagattgtaccaactattaactatgttaaataagtattcagtttcatgtgatctctgggaaaaaaatatgctgccttggtgctaatattgtatgtatttaaatgatcatccgactcagaaatataaacacttttaatgaaagggaggaacggaaggacaatttccagtgcacagaatcacttggatgaaataagaccagctctttacccttatttttggatatgccttttttggaagagacttagactttatccttattgttgttagtgttgttaatattcgttgcttcagcccacggtgccttggtctctccacaatcaaatggaggatcccccaagcagcttcattacagagtgatattgggaaagtgagatcctctcaccattttgccaagatactctaaaatgacatccaagtttaccagtagaaagacacaggatgcacagaatgggcatgaccttcagctcacgagcacacctggagaaattcagaaccaggttctgaatcatcacgattgccttttgcatgaaaacatcggctggtgatgtgacttctcttcaggccatgagcctaacaccctgccggttttcatgcccgctgcagtaatggacgtttgtgtgaagaaatgaactgtggagtacaaaatgctttgagtctttccgattgctcattaattcacttttttgttacttctttccaaaatggaagtgctgaagccatggtctttctgcccctccaagctgatgaagggaagcctttgccaatggcccatggaagacacttggtttgagaaaccctgcccacttccaaagaccaaagagattaggaaaagcctggcagtattctccaactccaaacaagctctagagtgctccaggaaaa

SEQ ID NO: 13522 - DNA, 1257 bp, Homo sapiens
ttacaaagtctgtgcccacaaaatagactaaaatcatttaaaaatgcaaaagaccaaaaatggaacaggtgacctggtgccttttagggtgtcggaaatgttctctctcttgcacagagataggaagcccgtttgggaccattttttgctttggtcctagtcttcctttgctatctgcttagccagcagctgacatggtgagacaggtttgccactgtaaatatgatgcaaacttctggggcagctcttggcaaacagaagcatcagctgtgtcaaaacaatactttggctgagttgtgcccataagctgtggagccgttagggctgtttcatgtaaatagaggaaaaatggtcctgtaaatacattaattgcactgaagctgaatttagtattgtattaagtcatatccagaatgtttttttacccagtatggttctcagaagtcttaaccatccctgaaaccagctaaagagcagattaagtgaagtgacatggttaatacctgttgacatttctaagagtcaagggtttcaatggctggggtcgtgtctgcaggtgtaacactaactatataatcactatactttgtattaggcagaaatctagaagaatttggagcattatctccactggtactatttagctggactgttaagtattttcttccagaacttaagaaacgccactctgggtcagagagctctggtctgttgtatctctagtcagttcagtaggagcattttccctacaataatggcaccttccccagatgaacatttttgaagatcagaaataaccttagaatctcaggaacatcttctgacattcccaacttccctcatctcctattatatattatttttcgtgaaattccctcttaagctcattgtgttttcacccagttcactagaccaacagcaataccagtaccagagttatgttttagaaagtctactagctgtccacaaagtcgtagttcattaactttgacccaaaaaaaaaaaaatctcttaacccttaggaagaaacacacaaggctatttattgcatattcttgtggtttggtgaaaaaaagaaacctgcatttcccttcccagactcaattccattgatcatctcagttccattgattattctatatttacctctccaggaagaattatttgggaaaacagggggaaaaacataagtcttagagaattataaattaatttccatggtattctcttccttaaacactttctaaatacgctaaa

SEQ ID NO: 13523 - DNA, 1170 bp, Homo sapiens
ggcaggcggatcacgaggtcaggagatcgagaccatcctgcctaacacagtgaaaccccgtctctactaaaaaaaatacaaaaaattagccgggcatggtggcgggcgcttgtagtctcggctactgatgaggctgaggcaggacaatggcgtgaacccgggaggcggagctcgcagtgagccgagatcgcgccactgcagtctagcctgcagagcaacactacgtctcaaaaaaaaaaaaaaaaaaaaagaaactgaaggtagaatattggagttgctccatttgactggagcagggaaacaggggagtaagaagggagagaaatggggcttgggaatttgacaggggcctcatcattaggagacttggacaatgtatgatactcttggggccttattttgagagctgcaggaagtcactgaagagtttaagccagggagtgatataattagatttttttccttcacaaaaagcaggaccagaagcagaaagcatcagttagatgaggtagaagctgggtcagttgtccaggtgagccatggtggtgactgcaagtgttgacagtcaggatggagagaagtacgcagattagggagttattgaggaggtggaattagtaagactcaaagatcgattggatatagggatcaaataagaggggaatactgagaataattttctatatgggcagctaaggagatagtagtgacagacactgagacttgggcacttgggagaaagaatatgcaaatcttcttaagtgactcattccatttggctagacattggttcacagtatctcaaagccttcacagataaacctgacatctctccagccaagtctaatttacacgctccagaaatggcagatatcctattcttgtttctaaacacttggactgaattattaaaagactccttacagctaccatgtgaggaacctttaaataaaggtttcccaaatccgtgagctaacattataaaagctgtttcacttgattttcaaagtagttcctagattcattacttccatagcaaaaagtttaggagtattgctaactattcgtgccattgacttccagaatataaaatgaggtcagagttcctctgaaattatttttcttctttttaaaggcaaaataatgatgtaagtatggctatattgcaca

SEQ ID NO: 13524 - DNA, 1232 bp, Homo sapiens
aggctctaaatctagaccaccaagcaatactaatcactgaagacatccccaaaacacttggtctaaaaagaaagatccagactactgctttttatgttaaatatcaaagttccaatgaccggtgggaactttttggtttataagaaaagatatacggaacttttgttagaggacaaacataggaatggtaaatgagacaaattgagaattttccacattagcatctgccttggtcattgaacattaaaatagaatagggagagtaacttaacagtcctcctgggaacaggagtgggttttgacattttgaaggtcacatctctgtccccaagggaagcacagaggaaaagggaatcaggttcattccctaagcccatctcttggcttgtatgggaaaggtaccaatggcattgatggagcctgtggagcaccatgctgattgagaaaaatattaaagcagcgaaactctcttttcaaagggaatcaaactgtaatcccaatttctaaaactgatcaaagaggagcagttctgtttgaaatagagtttgtagcctggaggccagctcagtccaggctgcgtcacacaatccctatccccaggtggccctgtaagactgaagcctaaggctctgccaaatgtaatttgaaaaacactgttccagaccatgctttcaagaggagcagttgtacatttctcctggttcggaaagcctcccatcagaaaagctaaactaatgactaatagataaggggtagtgtggtttctttggtatcagtgttgatcatggtattgagattaaccaggttggaccctttctaaggacatttcagtgtacataagcatcgttcccatagagtgtccccagcatccctgggcacatacattatcaacttagcatccatacagaaagaaagtaaaatgtagattctgattcagtggatctgggacagggccccagctctccatttctgataaggtcccttgtgctgccattgctttgaatactagggtttcaaaccagaattggtgcatcggaatctcttgcgagacttattaaaaatgcagatttttggccccatcccagagcttctggatccagctctctggttatgggtctggaggtttttgtttttaacaggctcccaggtttttctgatattcactatatttgacagctatactctagcatgtgtttacttacatagcttactcttgaagaacccaggaagag

SEQ ID NO: 13525 - DNA, 1214 bp, Homo sapiens
gggagatgtccaaccacagatctcaggcaatcatatttctctggtgatgtgtttatgcagcaggtgtcattttctttaaagggctttggaacttgccggttgtattgaggaatacgagaatctcaaggcctgtgataaaaacacaaaccccttaggctctgagcttaaggtggatacgtttttagtatttactggagtcgtaaaagctgctgactgtgaatgttgtctgtataaaatccagttcaccttttttattcagtgcattatcaaaaatggtataaaactctctctaggttacccagcggtgcttggttttctctctctcccatttggggtcccaggcactagagtgtggaaatgagaatgctgttgtgttgtattagaaagaagttgcctttactgtgtccctgtctggacagatgaggcagcagagtcttaggtacgccctcttactgaacaggttattttaattacacctggatgtggaacttcctgttttagttgattgatggtttgttgtgcctttgtattttctgctacaggcacaacccgatctcccagagaaggagaagtgcctggcgtggactataactttctgactgtgaaggagttcttggacctcgagcagagtgggactcttctggaagtcggcacctatgaaggtgagttacttgtacgacagcataaaaagcttctctcctgggtacttgagaggagccagagccatccaggcaaaaatgttttgtggaatctggaggtctaaacaaataacaggagatttcagttcaccttaatatgacgaataatagacaaagtctatggaataaggctttgtggagttctttaaaaatagttttagtttttctctaggagttttcttttttaatttacctattcaagtatgtgggtgtgttttgtttttaatacggacatgtgcggtattaggagagaaggaagaatcatggttaatcacaaaatgtgatcctataagtagtgttgttttaatcttgaagaaataaaatatcactttcctactgattggtttttaatgtatttttatgtgattcataaagcaaacttttttttttttttttttgagacggagtctcgctctgtcgcccaggctggagtgcagtggcgcgatcttggctcactgtaagctctgcctcctgggttcatgccattctcctgcgtcagcctcccgagtagctggg

SEQ ID NO: 13526 - DNA, 1346 bp, Homo sapiens
tatcacagaccaggtggcttgaacgatggactttgttttctctcagttctggaggctagaagtcccagatcaaggtgttagtaggtttggtttcttctgagaccttgctccttggctgccagactcctgctgttatccctctgtgtcctcacctggtctttctgctggatacatgctcattcttgtcctaacctcctctttttctcaggacaccaattgtattggattaggcgcacccatatgacctcattttgccttaataacctctttaaagggcctatgtaaatacattcacattctgaggtactgaggattaggattttagcagatgaattttggggggacaaaactaagctcatagcagggaattgcctaaagatttttttgtgttttttttgtctgtaggtatttcttgttatggatataaactcaaattttggagttttgaattatctgtttttagagattgtttatctaaaacctttttacatttgaataaaacgtttatgtggttccaaagtaaaatctgaagcctgttcaaagaaatctggcttccaaacttcaacctcatttcctctgaatgtccttctctatttgaccttggtataatacagttcatagtaattgtttcttactagtaattatttcaacccttctagactgcaagcttcatgaaggcagaaacttttattctcttgttcatagcatcatccacaaaaaatctaacactgtacctagaacacacttggtgtttggtgactagttgttgaatggacatgtggcattggagtttaaggtgtagactggaaccagtaggtttgggaattgtcttcattgtcttcatagaggctatgaaaatggatgagacccatctagtgggatgagttacaaaaagaaaaggcaaacagttgaaggtctatatttaggggacagaacaaggacggtaagcagagagaaaaaaggaacagttggagaaatggtaggaaagtgggagaaagtctgtatcaatgggcattgggaaagcatatatttaaaacggactccttagtcaagaagggcatggttgaaaagtgctgaactggacactggaagacattggttcaagttttgcttctaccttgatttgttgtgtgaccttgggcaaattagtctctgaaaatcagtttcttcacgtgtggaatgagaatcactgtatctatctgcattgtctacctcgtagggtatatgagcttcaagagataatagtgttaactcaaatctagaaacttcttagtgctttagaaatgtaaggttaaggctgggcacggtggctcacgcctgtaatcccagcactttgggaggccgag

SEQ ID NO: 13527 - DNA, 1226 bp, Homo sapiens
tcttttagactttttttttttttgagatggagtcttgctctgtcacccaggctggagtgcagtggcacaatctcagctcactgcagcctctgcctcccaggttcaagcaattctcctgcctcagcctcccgagtaagctgggattacaggcctatgccaccacgcccggctaattttttgtatttttattagagatgagatttcaccatgttggccaggctggtctcgaactactgacctcaggtgatctgcccaccttggcctcccagagttctgggattacagacatgagccaccacgcccggcctagatattttaaatactggcagagatgaggactgcttcagagatatttttcttgggtgatttagaaggaagatggtggaatataaagaacttggtggacaaacacttaggaatcttctagactatatcctgattttatagtatcaggcacatagtaaaagcttggtataaagttgagcaaatgaatggattttgaaaggactgaacttttaacattagaatatgaatattatcaccatgggaaaaaagatacattatttattttaacaagtgatctcaagagtgataatgagatgatgtggtatgaatcatctttgtatgcctagacgtatctagcatccaggaaaatatgcagatgtctttgtagagagaagtcatgtagggtctctttctttttttttaagcaattgatagaatgaagtttatttaaccctgtctcccatttactcctttcttcaaaagctaattttcatatctgttttcagacttttatgtggacagatgtttcagggtttgtttgcaaacatttcccagacatattgttgatcagcaggtttctgcaattaacagcatcttcttaagcctgtttcctacattctgattgactgtatgacaaatgctgtaggttttcacagatgcagggaaagagaaggttaccagctcagcagaatcctgtggaaatcagatatgagtcttaggacagttcattggaaatggaattcagtaaaaggttgagagcgcatgaagtagtgtggttgtaggtggcgtcttgaataaagtcagctgttgtgcatgcaccccagcagacactggggaatgcacagacacattcactcacacacaatatctcctttaatcgtctgaagaattctgggaaaagcgactggggtctttatttcagcgatgaggacagagaggct

SEQ ID NO: 13528 - DNA, 1097 bp, Homo sapiens
gtagctgggactacaggtgtgtgccaccatacccagctaatttttatatttttagtagagactgggtttcatcatgttgcccaggctggtcttgaactcctgcttcggcctcccaaagtgctgggattacaggcgtgagccactgagcccaactttttaatcacacagattctagtagctgatgccatgtgtctgttagggatgacaagggcaggaactacaaggggagaggagagactgtaataggtaattagagaatgggcttcagagttcatcagacagacccagttcagcccacttatcagctgtgtgacttgagacaaatttgtgattctttctaaggttggtttcctagtctgtaaagtgggaataataataataaccatcatgaaatgataatgctaccattttgctcctttctatgtaccaggtattgtacctagactatcaacttcaaaccttataactctaaattgagttgtagaactcatgattattcccagtttacagatgattctgagcacagagaggttaagaactttgcctgagaacacacagccagcacatagtagagctgggattatgtcacaggtggtcaggttgcccaaggttgttataatatgtgaagctttaagcatgatgtctcctaggtaacatttattccaagtgtaataacatgatcataaggtaggctttaattgttaaagagacctgtttcttcccttaatcgcctgacttctctctgcttggaacctttactcccatattcagattctgcctactgtggtggattggggccaggtcttccactgtccttagcaatgcaaaatgattgccgaaaacagggggcttaatggtggaccctgggactcccagcgaacttaaatgcttctctttgctctccgcttccaccttaatgtctagctttgtatcaacaagttgagaaattttcggccgagtctggtgcattgatgagctgagtcactcccaattaggctgtgggcctgcctggtggggatactcttgtttaccaatgagcacaagtctttttggtggttgtttttcaaacgtggattgatggtatggaagccattcta

SEQ ID NO: 13529 - DNA, 1160 bp, Homo sapiens
ctgatgtgggaggctcgcttgagcctaggagatccaagctgcagtgagctgtgattgcacttctgtactccagtctgggtaacagaccgagaccccgtctcagaaaaacaaaccaaaaaactgatattgctgattaaagctttcacttgaaagcctcaacagttaatcagaaacgtacaatttataattagtgtaaattgagcataataattttattatagcttatctcagtgtattcatttgatgatttaaaaatataaatataggagttttcatcccttaaatttatgtcagaatttagagacatgttgtattattctttgtgttcctccattttaggttgattgtataatttttccaggttttaaatatatttaggagatatttataccttacatatgctgtttggggtattacaaattctaatcccagaattactatagataaaaccataaatataaaatgataggggcctattatcttagcattttgttagtctgcttttaggaaccatttgctatggcttaccaatacaattttctttcaacattaggatcctctttccttgaagaactacaggaaacacaagctcgggagttattttacataacaatgaggatgagatgttatttgtttataagttattcagtgtctaaaagccttagggtaccaaacataacacaagatagaaaagaaacaaatttgccttgacatttagctgtaaattgaaattaattcatataaaatactgaggtgaaacacttcagttgtagagttttgcatactgcttagctttcatgattttgtcactttagattttagttcaaaagtgtgcttttaaactgtataaactcattagctgcataaaattctccagctatccactttttcctatattttcttactctgcaggtgaaaacagcatttttaatatttaacattcttaagtgatctgtttcatgtggattgtttttcgttttcttgtccctggccctacctcttctggagtcagcgcaggctggtgggtgcgctgccagatctgggtgtgcgtgtgtggtgtcaggataccattattgggaaatggatgactgcaaaacagtgaggcctacttgtaggcagatgacataaccagcagctcactgaatgccattgccaagaca

SEQ ID NO: 13530 - DNA, 1221 bp, Homo sapiens
atgagactgtctaatttttgtatttttggtagagaggggattttgccatgttgcccaggctggtcttgaactcctaggctcgaacgatccgcccacctccaccttccaaagtgctgggattacaggcttgagccactgtgcccggcctaaaaaccatctttcaattcagacttgggtaataaggcattctagaaagtattttcttaaattttatgccttatataaaatgtcgaagaccccagcatttcaatatgctggtatgaagactagaaatgacagattattttgtggtctaaattctttttcctttaagtttggcctgtgctccataaagagacagacataattttggaaattcgctttcttggcactgatgtgtttgctgagtcaagtcttgaatttttagaatgaaaacgaactattgccatgagttgaaagttgggcaggaagaacatttcaatcatttttgggttaggaagaaaatccaagttgacatttctcatggatatttactgtttttttttttttaaatagctatttcccttttaatctttgcaacataatatgaatgatttgaataagtttttgcagctgtacaaaaataaccctgcctatggtactatgttaatttgttactggctttgcaatttagaagatttgattatttcaaactccacagcctctatgatgtcctccaatgatccctgccttcttgtatttacaccttcgtgcagtctgttcccaggtctgtgagaccaatagcctaatgatggcgtttcacttccaggataaggttataaaaatctgccttctgtcctagtcatcctttctatttccctctctcttggatctcttgctctgggagaagctatgctgtgagcagtgctgtggagaggcgcacacagtgaggaactgaagccccctgctgacagccatgcgaatgagcttggaagagtatcctttggaccagtcaagctgtagatgactgcagccccactaacactgcagaggtgtgagagatgttgagccagaaccacccagctaggccagtcttggattcctgacccacagaaactgtcagataataaatgcttattgtttgaagccaataagactggggttacttgttacacagcaataaataactgatacaaactggcaacataaggttggttaatccatgcatccatccatccatccatccatccatccacccatcca

SEQ ID NO: 13531 - DNA, 1412 bp, Homo sapiens
aagatatggttacctagtttaactaaaatgtcaagtttctttacttttaggtagagtaaggttaactctgtgtggttacagtggctctctcgggggcagataggttacttattagttcgaaagcacaattggggaacacagacttctcgaactgggctgtatttgcaaaacatgatgcaactagttcttaatggcaaaacgattgtggagcattggtgtgtcctattgtggcttaaaagggaacttagcaatcagataataaagaaaggaataaaccaacattaataccatgtgtagaaagtgatttgagatggagaaaacgattaacttcccaaggtggtctgaaagtatatgttaaaatagacttgttttattcatggaatatttcaccatatatttgccataaggcctgaagactctgttaggtgcttttcccatttttttcccctcacacttgaggggtaaagaaagatatcggtaggtcataatcatttatacatgtgaaattttgatattgcatatgcttggcacattgaaagtaagcatatcagtaccatagatgaggaagcatattgctcccagattttattgattctttctcatttctgcctgtctttcctctccttatccccctaaattataatttcattgaaaaagggcttcttttcaacacacactggtgcctgtcagggagtgcggggttgtgcggaggagagcatcaggaaaaatagctaatgcatgctgggcttaatacctaagggatggctgataggtgcagcaaaccaccatggcacatgtttacctacctaacaaacctgcacatcctgcacatgtaccccggaacttcaaataaattttttttttaaaaaagggattcttttatagcccttaccttgagtgataaagggtcagaatgaaaaggtacttctagaatgtaatgcgattttatccccatttagatgtgattctattctctgttaagaaatgaaataactgtaaacacaatatgtaagtgaactgttaaactacttccattaaatgtttcaagtaatggaaatacatcaacactaaccctacaagctatgtgccttaaaagttcatagcctcatttttatgagcttcaaggctttttgcattagatgaaaggaatagtaccctgtaaaaattggtatcttatgggcttgaagctttcaccagcattttaggaaaggaaagggtaaaaaaaaagaaaaaccccccaaaaaaaccatcaaatggtttcagagtataatctacaaatgggataagtgatcattatcttttggctctagtcaaataaggaaggcctaacagattagtcttggtctcttaaatcttaacctctaaatatgtaatttttattaaaggagtatattctagagtaaaaactaggc

SEQ ID NO: 13532 - DNA, 1663 bp, Homo sapiens
aggggattcttcctggactttagcaaggttgtatcacccggactccacagagctacagcctgcatcttcattaacttcaggcagtccagagcgcgcggaagcccagtacttgcttgtttccaatggccacctccccaaagcatgtgacgccagtcccgagtccacgccactgacaggacagctccccgggaaacagagggtgccactgctgttggcaccaaaaagctaggttttgtctacctcagttcttgtcataccaatctctacgggaaagagaggtaggagaggctgcgaggaagcttgggttcaagcgtcactcatctgtacatagttgtaactcccatgtggagtatcagtcgctcacaggacttggatctgaagcacagtaaacgcaagaggggatttgtgtacaaaaggcaaaaaaagtatttgatatcattgtacataagagttttcagagatttcatatatatcttttacagaggctattttaatctttagtgcatggttaacagaaaaaaattatacaattttgacaatattatttttcgtatcaggttgctgtttaattttggagggggtggggaaatagttctggtgccttaacgcatggctggaatttatagaggctacaaccacatttgttcacaggagtttttggtgcggggtgggaaggatggaaggccttggatttatattgcacttcatagacccctaggctgctgtgcggtgggactccacatgcgccggaaggagcttcaggtgagcactgctcatgtgtggatgcccctgcaacaggcttccctgtctgtagagccaggggtgcaagtgccatccacacttgcagtgaatggcttttccttttaggtttaagtcctgtctgtctgtaaggcgtagaatctgtccgtctgtaaggcgtagaatgagggttgttaatccatcacaagcaaaaggtcagaacagttaaacactgcctttcctcctcctcttattttatgataaaagcaaatgtggccttctcagtatcattcgattgctatttgagacttttaaattaaggtaaaggctgctggtgttggtacctgtggatttttctatactgatgttttcgttttgccaatataatgagtattacattggccttgggggacagaaaggaggaagttctgacttttcagggctaccttatttctactaaggacccagagcaggcctgtccatgccattccttcgcacagatgaaactgagctgggactggaaaggacagcccttgacctgggttctgggtataatttgcacttttgagactggtagctaaccatcttatgagtgccaatgtgtcatttagtaaaacttaaatagaaacaaggtccttcaaatgttcctttggccaaaagctgaagggagttactgagaaaatagttaacaattactgtcaggtgtcatcactgttcaaaaggtaagcacatttagaattttgttcttgacagttaactgactaatcttacttccacaaaatatgtgaatttgctgcttctgagaggcaatgtgaaagagggagtattacttttatgtacaaagttatttatttatagaaattttggtacagtgtacattgaaaaccatgtaaaatattgaagtgtctaacaaatggcattgaag

SEQ ID NO: 13533 - DNA, 1181 bp, Homo sapiens
gggcttgatgatccagtggggtggggcccaccctcaagactctctcctccataaatggtgcaaatgagttttggagaagtgctgcttcaggagagggtgccaggggcttggctgatttaagctgtttgtttcacccgaaagaggttcttttctgtgctgtcaggatgtgggcttattaggacttagtgggacacttcttacaggagatttgacaggaaaaaaaaggcattagacttctgtgtaaacatggtagaatagaatagtcttcttttacttctaacaaatctggtgcatgagtcaaatcccgttcagttatgggtaattagcatctctgtagaaccattagtacctttccagaaaaggcctagcttaaatagtccgcatttcggttgaataattggacatttttcctagaacataggaaaggcacagcagtaaccttaggcatgactatggctgttttaaaaagagaaaactggtgtcacaagttgtaaccagcacctgtggcttgatcgaagaaaatgtggcctgtgttctgactaccgtgaagggaagaaaagttaattccttttaaatgtaaagatcctgtacctctcaaaatggggcacgaatctttaacttggcccgagacactgctccatgaacaagtactacagagttctgaagacaaccaggaaccctttagttacagttaggttttcaatatctacttcttctgtggaatttactgagttagtgaaaatcagtggtcgtagggtggaggcagagcttttgtgaagtactgggagatagagcccagtattgtccttaggtagtctcttatttagtctggggtattgtgatttttcccttacatacggtagtttttttttttttttttaaatagaatcatgtgggcaaaatcagattaacttcttaagtgttcacctgttggaagagtgactcccaatgccatgtgtcagtggcattgtggggaaagcacttagttccacagaagtaacttcccagagagggcagggtgtcctcttatttgcactttcctatggtcacaagatccactttgccttgccctttaatttttggagcaaaacatactggttatttctttaggctttctgttgcctaggagtgacatttcacatggcataaataccttcaaaattgaagtccttctcttttac

SEQ ID NO: 13534 - DNA, 1062 bp, Homo sapiens
aagagaagtgcaccttccagaaatttttgctaaatgcatacgttttcctctgatggaagatacctttatagagaaaattccacctcagtttgcacaggctatagccaaaagctgtgtagaaaagggaccatccaacaccaatggctgtacacagaggcttggaatgactgcttctgaaatgatcatatgttttgatgctgcccacaaacactcaggaaagaagcaaacagtgccttgtctagatatagtcacaggaagggtgtttaaactatgcaaaccaccaaatgacctgagagaagttgggattcttgtatcaccagataatgacatttacattgcaggagggtacaggccaagcagcagtgaggtctccatcgaccataaggcagaaaatgatttctggatgtatgatcattccaccaatagatggctatccaaaccatccttgcttcgagccagaataggctgcaaacttgtctattgctgtggtaaaatgtatgcaatcggaggtcgtgtttatgaaggtgatgggagaaactcactaaaatctgttgagtgctacgacagtagagagaattgttggacgactgtttgcgcgatgccagttgcaatggaatttcataatgctgtggagtacaaagagaagatctatgttttacagggtaggtgcctaagtgatttagtttttcatggaagggtaacacatcaagtggtggtttacttaattatactgaaacagttgtgttcccgttaattgaggaatacctccagcttccttatcaaactattggaacagtctgttctgtaaagagctataaagaaaataaactcttgaattaaaaaaaggcaggtattgttaaattactaaaataatcctataatttttaatgattttgtgtcttgatatcatgtagaataactatttttgaaaacattctttaataaataatagttcggcattttgggataactatttcagagtagtttgtaggacttgaaataaatagcaaggttgttacatggctgtttttgctcttgagtaaaattgagatgttgtagcaa

SEQ ID NO: 13535 - DNA, 1150 bp, Homo sapiens
agtgattctcctgccttagcctcctgagtagctggaattacaggtgcctgccaccacacctggctaatttttgtatttttaatggagatggggtttcaccatgttggccaggctggtctcaaactcctgacctcaagtaatccacccgtctcagcctcccaaagtgctgggattacaggcgtgagccactgtgcctggccagaatcaagctcttaacaattctgccatcaagcccaagtaactccttgtaccttcccaatacaaacctcccaattcaggttgattataatattatctgttatattgtgtcatggaatgacaaagttttaaggtattttgtaacccatatgaatgtatctctggagattataaaagaaatgttttagaaagtgaaatatatagcaaattatgccctttaatctttagaggttgtagttacaacatataaccaaaaaccaaacataaaaatttacatattcttgttttcttttttttttttttaggagaattttttctcttctatgagcctcaaaaagactactggggtttcttaacccccatgactgtgcctagaatccagggcttagcagctgtatacaaggactctatctactacatagctggaacctgtggaaatcatcaacgtatgtttactgtagaagcctatgatattgagctaaataaatggactcgtaagaaagactttccatgtgatcagtccataaatccataccttaaactggtacttttccagaacaaactccatttatttgttcgagctactcaagtgactgttgaagaacacgtcttcagaaccagcagaaaaaattccctttaccaatatgatgacattgctgaccagtggatgaaagtgtatgagaccccagatcggctctgggaccttggccggcattttgaatgtgctgttgctaaactgtatcctcagtgtcttcagaaagtactctaaatgagtagcaggccttagtgcatcactggcatctcattcttaggaaacttgtctttgatacaaaagagtgctgacagtatttcagaaagctgagagagttttatacatggaaaatgggtatgcttaaagattgcagggtagggagggattttccttcatccttgtgacatttcatttcagtaa

SEQ ID NO: 13536 - DNA, 2369 bp, Homo sapiens
ttgatgtgacttttaattttaaatacgggtaacaatctgaggcaatatcactaggactttagctgtgacctctctaacacagagaagcactaacttagatcctcattcttaatatttatatgtatctatttttgtgtactgttttcaagtgtactgagatttaaatgtgttctattattagagtagatcgaagaaaaaattagtctcagaaagagcttttagtctgattgtttccatttcccatgtaattttaagttaagctaaagttttaaagtggcagttttctgtcgatgactttttcaagtgctaacactgtctcttttgtgaaaatctggaaaagtgctcatattcacaggtggctggtgctagtctaacttaattcatgtgtataactagatggatttaaatggtctgagcctatgcctatctttcaaattggtgtggatttcatggccatagtactttacctgttgaactcttgtgatttcacaagattctctacttatgtgataggagggtatggccagttattcatctaactggactcaatcttagaatagtaggaacattatacccagtttgcactaacatgggccatttgtagcccaaccttctcttccatctacctgtccattcattattggtacaaggaaaggtaacttatttctcttctgcacagagcataatgtgaagttttatacctacttttaaaattctgctttccagaaacaaaattcctgcagtggtctaatttaatgtctttaagtttcatattacaattaaaacctcattttttttttccatttttgcacttaacagtgatgaatacttttacgttggaatcctccttctagctgaaggtgattgaaaaggaaaagagtgagtgaacagaaccatagctttctaggtactaaagcattttttgcatttaactgatgaaatttctaacaatcatcagttaggaatattaacatgaaggataaaccaacttatttgtatacctaaggcaggcatttggatcagtaacatgttttactaagcctagagtaattcgtaaagggtataagcataggacagattttgccctcaatcacaatatttgtattcacttgaaagcaaactggcatggttcgtattttaaaaatcttgcacaaattgtaatgtgatactgtgaaacaaattgaaaacattgcctctttgcatcacatacctcgtttttcagaaactttccaaactgctttacatagacctctacaagtagggaatgttttctgaagcagaagttaaaatggacagcatttctagaattaacattttaaaatctagtcttagctagatatgtggtttcttcttattggtgttgatagtatgtctgtaatctctgtataaactttgtcaacatttttacctccccagttttatcttctgttttgtttttgtttttatcatcatgatgttttggagttattactgtgtattttagaaatcattctttacagttttgcattgctgaggagagagaaaaaacaatttttttgcaagagatgttcatgtaatttatttttgaaagctttgttgaataagatttcctgccgctttttgacaatcttgtgtatttagaaaaatgtattacttgaaaacatgacatagaacattgagttagcaatttacatgggctgtatgttatataagagaatgacatactgtggctaattcaacagtagatttattcttttagcctgcacaacagttgatcttttggctatgacaatttgtatggagggtacgatctaagttaagtgtgtcaaaagcaaggcttaggatttgttatgggagtagaatatatattgaattttgtatgaagaactatttgtttaaattatatagctgggatattttgccactgttaaaatggattcagaagaggtcctagaaaagtaagattagtgacatgtgtgggtttatatttagatatttaaggtgcattttcatagtgtggtaagaccttaagtaaaaggcacaatgggtactacagaattaaaatgtaggtctaacataatgccagttccactttaactttgtttttgcatttgaagaatgtatgtagcactttcctatatatttgtcacacattgaaaactggactgggtataactatgttataggaaagtagaaattgtattctttattttccatctttgttttctgttctacaaagttgatgcttaagcatcaagctgattttattggtcatgagaacaaatggatgtgatcatgaaggaatcagattccctatgtaaagcagtttaaaatggaattcaatgttcagtgctcaggtatgtagtaagtactgtagtcctgtgggggca

SEQ ID NO: 13537 - DNA, 1332 bp, Homo sapiens
gtgattgttccctgtcccccttctaggaaccaacgtccaagaggcccagaagatactcaacaacagcggactccccattacttcagccattgacctggaggatgcagccaagaaggctgtggccagtgtggccaagaagtgatgtctttgtcctgatccaatggagaaagaaagccatttttccgtaaaaagggatggttcatcattgtgaaagaaatggttatctcattggggaagaaaaggggagggggaaggcaagaatcactgaaaaatcttaaatctgtgttttctggaataagatatctagacagcctaaatctgattttggtctttataaaaataatatcttgtgttctcatacttttctgtcactgtaagcctgcccagtaggcagtgttttgcagactttggggagtggtctatgtggccaaatattgtgtgtatagacagaatttgaaatcaagtcctgcttcatttacaagaattttggtgggcatctaatcctacataatgaaaaagaaaaacagaccatttaaaaactcagacaagattatatttaatatattaattactaaaaaggcataagattacactgaacatattagctactaaaaaggcactgctaagacattcaagcaaatagctattacacactactgcagattttacaggtttctaattctaacatatgtttgaaaaatccgtgagtattccaaaatatatttaataatggaatatctgcattaatataccatccatgtgtttttaccatttgccttaatattgaatatactgtttacctcacactaaaaagaaaaccagaagccttatttgtgattttgggagtggaagcttccatttttgtgtcaaaaatgaatcctgattcttatggaaatctctgttattaagatatttcaagatgagacaacactgaagatcaaattgtgtttagtatcactatcttctctcctcgtttctctcttactcctcatcctcccagaatctaccagtttatggtagaaagatgggaaccttatttgaatgtgttttttttttccatgatgtccaattttgttgtgggaaaggatttggataaaatttttgtttaaattttggtagatttttatctatacaaatttaaataaaattatgttttgtaagctgtaagatctgtgtgtatctctcattttactcaattttattcctcaaacattttttttttttacaaagacactagtcttagtgtcttaggtatgcctctaaaatttgataatttgggtcattccaggattattccagttccactcaactttatcagatacccatttctgt

SEQ ID NO: 13538 - DNA, 1190 bp, Homo sapiens
tagaatagcttttaaaagtagctatgccttcttccaaatgttattttattcaaaaaggtaaccaggttgtgttttaaacctgtgaaatattgtgatgcattttattactgaaagttatttaactgcctttacttgcacataaaaactctcatttacggccaggtgctgtggctcatgcctgtaatcccagcactttgggaggccaaggcgggcatatcacctgatgtcaggagttcaagaccagcatggccagcagtttggtgaaaccccatctctactaaaaatacaaaaattagcctggcgtggtggtgtgcgcctgtaatcctagctactcgggaggctgaggcaggagcattgcttgaacctgggaggtggaggttacaatgagccaagattgtgccactgcactccagcatgggtgacagagaaagactccgtctcaaaaaaaaaaaaacaaactcttatttaatttttagttaaaattaaaacactagtacttcagaatatagatacaagtacaccatcttgaagaatttggagtttttcagggcaattcaaatgacctcattttttgttctttttgtattccagacagtgtttctgtcattggatctctgattggtagtgttaataaatattctttcagtgtgagccagattcataaaattaattttcttcattttagtagtaaaaagtagtctaatagctttttgtcagcttgatttttttgtgtgtgtaatattcaagggcagaatgacaggacagataagcaataagaaatgtatagaattagaaaatatagtagttccctcttacccatgggacatacgttccaagacccccagtgaacgtctgaaaccatggatagtatagacacctctatacactgttttttcctatacatatatacctatgataaagttctatttataaatcagggacagcaagagataaacaataactgcaaatagaacaattataacagtgcactgtaataaaagtgatgtaaatgtgatatgtctgtctctttctctcaaaatatcttattgtactgtactcacctgtaatcagactgtggttgaccgtgagtaaccgaaaccacagaaagcaaaatcgtggataaggggagactactctatatgaaacttaagttacaaaattctctgaagcatttgaaactagacgttttg

SEQ ID NO: 13539 - DNA, 1634 bp, Homo sapiens
aggatgggatacttcaacctgggggttgaaatcaaacactgaacctcagagtccaccaatagcctctcctaaagcaatcacaaagccagttcggaggactgtggtcgatgaatctgaaaatttcttcagtgcctttctctcgccaactgatgtccagaccattcagaagagtccagtggtatcaaaacctccagcaaaatcacaacgaccagaagaagaagtgaaaagcagcttacatgaatccttgcacattggccagtcaagaactcctgaaacaactgaatcacaagtaaaagactcttctttgtgtgtttcaggggaaactctggcagcaggtacttcatcacctaaaactgaaggcaagcacgaagaaactgttaataaagaatcggatatgaaggtgccaactgtaagtttgaaagtatctgaaagtgtaattgatgtgaaaacaactatggaaagtatatctaatacgtctacgcagtctctcacagcagaaacaaaggacatagctttggaacctaaggaacaaaaacatgaagacaggcagagcaatacaccttctcctcctgttagtaccttttcatcaggtacttctaccaccagtgatattgaagttttagatcatgaaagtgtaataagtgagagctcagcgagctcgagacaagagactacagattcaaaatcaagtcttcacttgatgcagacatcttttcagcttctctctgcatctgcttgtcctgaatataatcgtttagatgatttccaaaaactcactgagagttgctgttcatctgatgcttttgaaagaatagactcatttagtgtacagtcattagatagccggagtgtaagtgaaatcaattcagatgatgaattgtcaggcaagggatatgctttagtgcctattatagttaattcttcaactccaaagtctaaaacagttgaatctgctgaaggaaaatctgaagaagtaaatgaaacattagttatacccactgaggaagcagaaatggaagaaagtggacgaagtgcaactcctgttaactgtgaacagcctgatatcttggtttcttccacaccaataaatgaaggacagactgtgttagacaaggtggctgagcagtgtgaacctgctgaaagtcagccagaagcactttctgagaaggaagatgtttgcaaggtaactctagtaagtggaagggatttttagatgtgctttttggagattaaatcatttgttttaaaaaatactttcattgatgcataataatttatacagatttaaaaacatacgcattttgccatttctgtgtagcattaagtaccttgaagttgaacaattattaatataatttggaatttctccaaggcaattatggtagaataagttgatacttcaatacagttaagcatgaaagttttcatcttacatctttatttttgagtccttatcacttcaaaattctgttatgcttattagtatgtcaatttgaaaggaatattttcttacattaacatgtatcttcacctcctttgcagatagatgtgccaaaaaaactaaatgttatggtttttcttgtatcagaatttgtttttacatgtttacattatttgtagcaaatattaaatga

SEQ ID NO: 13540 - DNA, 1260 bp, Homo sapiens
ttagacatattaatagaattaattgctcttttagtagaatattttaaaatctctaagaaatcaaatattactttgattaaagaggattggattttgatgtttttctagaccgtaatactctgtagtttgtttacatgtgtattatcctttctgttgagttttttttgcttgtattaataatattttttctgttttagaattggggcttgttgatggacaagaactggcggttgctgatgtcaccaccccacagactgtactattcaaacttcattttacttcttaaggaaaatctccacataatagaaaactcatggaaataatatactttgtggatgctaagaagttgaatcgatgtcatttttagcaatagtgttgccacgatttgtctttttttatataatgaaccactcttttttaactttgtaaccttcccttgaagacagaattttggtgttggtgcttgtaagcattttcattaataatatgagaaatgatacctggagagagagattatgagcaaatgtattgcttcttttagaggaggaagcatacaacctcttttgtgtgaattttgttattatggtcaaagaatgcattcctaagttttcatttgagtacccaaatacacaaaaggtgtccctttaaggaaaataaagaattaagttttaaataacattacattttacaatctgacatctggagtatattgaacataggctatttcttgatataacactcatttaattgtggccatccaaatgaatattattgcagaatttatcttgttcataatgatttgtaaatggtgttatagctgaatacctgtgcatgaaaatgggcaatattttcatctgtttacttgtagtgccatagaggccaatatgcacaatattaactaatgccaagacatggctgtttaaaaaatttaatgttcaaacagttatcactgatgcttttgcactatttattaataaaatcatatattgtgtacttctttcactgaagtttttaaaagtacattaagggtaatcagtagttccatggtaatataggaataatttttaaatgtgtagcagagttatatcaaatttttattgcacttaatacttttgctacagcaatttctatagtaaaaatttactggtttaatttaactttctgtatcaatataattttttttttttttttttttgcgacagagtttcgctcttgttgcccaggctggagtgcgatgatgcaacctcagctcactgcaac

SEQ ID NO: 13541 - DNA, 1108 bp, Homo sapiens
taatccaagaaactttgggaggctgaggcgggcggatcacttgaggtcaggagttcaaggccagtctggcccacatggtgaaaccctgtatctactaaaaataaaaaattagccaggtgtggtagtgcacacctataatcccagctactcgagaagctgaggcaggagaatcacctgaatctgggaggcggaggttgcagtgagccgagatcccatcagtcactccagcctgtgtgacaagagcgagactccgtctcaaaaaaaagaaaaaaaaaagaaaaattaacattgaaacttcctgaaatcattagagttttagaattcctggttcaatagaattcacaaatttcaaataattgagcaaatacaaagtctcctctttatcctagtggcattttttcctggaaacatcagaaactattttaaagtttgttgctttatttatagtctttgcggttatcacccagcttttaatatgcctttccattctttacagtctctccagttcttgttagatacatgtaaagttctagtcattggagctggcggcttaggatgtgagctcctgaaaaatctggtaatatatatacatatatatataaatatttttttcttctttgtgataagtaaaccttacttatctgtcatactagggaatttctcgtgattcttaaccttttctcttgagcctttgttagataagtttagcatgccaaattccaaacagtaattaaaatggtagaactttggaactttttaaattctaaagctctcagctataaagttattgataaaatttcatacttcagttttcttctctgatctttaacaaacaacttttggtgcttcctctggcaaaacgctcctaacttcaatgaagtaaataacaaaactggcaattcatattttaatgtatagtttcaaataatttattatttcttttgcttccccaaataacccagctaggtgggtaaggcattaccccattttatatagagggagacattgaggtttagagatgttgactgagttgctgaagtttttgtggattatagcgatttgcctggaattgaatccaggtcatcagttcttagttaagtgttctttt

SEQ ID NO: 13542 - DNA, 1157 bp, Homo sapiens
agcagactggactgtggctaactaaggcagtttactaatagtgtgaagagagggagtgtaatattgatatggcaaaagagaattgttgctttggtgttaaccaggtgtcccttctctgcagtgatgtttatccatgcatcgttgagacttcggaacctcaagaacaaactggagaataaaatggaaggaataggtttgaagaggacaccgatgggcattgtcctggatgccctagaacagcaggaagaaggcatcaacagactcactgactatatcagcaaagtgaaggaataaacataacttacctgagctagggttgcagcagaaattgagttgcagcttgcccttgtccagacctatgttctgcttgcgtttttgaaacaggaggtgcacgtaccacccaattatctatggcagcatgcatgtataggccgaactattatcagctctgatgtttcagagagaagacctcagaaaccgaaagaaaaccaccaccctcctattgtgtctgaagtttcacgtgtgtttatgaaatctaatgggaaatggatcacacgatttctttaagggaattaaaaaaaataaaagaattacggcttttacagcaacaatacgattatcttataggaaaaaaaaaatcattgtaaagtatcaagacaatacgagtaaatgaaaaggctgttaaagtagatgacatcatgtgttagcctgttcctaatcccctagaattgtaatgtgtgggatataaattagtttttattattctcttaaaaatcaaagatgatctctatcactttgccacctgtttgatgtgcagtggaaactggttaagccagttgttcatacttcctttacaaatataaagatagctgtttaggatattttgttacatttttgtaaatttttgaaatgctagtaatgtgttttcaccagcaagtatttgttgcaaacttaatgtcattttccttaagatggttacagctatgtaacctgtattattctggacggacttattaaaatacaaacagacaaaaaataaaacaaaacttgagttctatttaccttgcacattttttgttgttacagtgaaaaaaatggtccaagaaaatgtttgccatttttgcattgtttcgtttttaactggaacatttagaaag

SEQ ID NO: 13543 - DNA, 1179 bp, Homo sapiens
aatcagaacagtggttgcctaggaatgtgagaagagtggattgactggtgaggggtctaaggaaacttcctgggctgatggttgctctagatctggatgcaagggtgggtcacataggtgtaggcatttgtcaaaacttactgcatgcagattatgttccattacaaaatgaaagcttgggtactagcactttattggggagtgcaatcccagggaagcaggtgtgagtgtgaataagaaggagtgagcagggagggcaaggaggtgaatacaaggaagtgcatcatagatgagaaagctggctttgtgacaagctgactacatggtcttccaggggtgtcttgggagaagccatatgaaattattatgcttctgagcagtgcagggggagagaggaagaagagttcattggtcatttccctgagaggccaggaggaatcgcctgccacaagtacctcagttggtgactgtggcagaggccttggctacctggctgtacagcaagccattgccagggcctctcaggccagaaacaaggccagtgcacagatattgggtgatgcacaagtgactcaggtgtaggcacagggagttctatgcatggttaagggtaagctgtgcagagccagaatgcatgagtcaagatcctgtctccaccactcaccaattatgtagctttgggcaagtgacttaaccttaccaagcttcagtctccctgtagctgtgctgttagtggccctgggcctaccccagaagttgtcttcagacagttctcatgcaccctgacaaggctgtttgtgtcttttacctgagggctttctctagccacagaagtgaactgcttcttgctatgggacaggccagacatcagggaaagagagggaacatttccaggagtgaccctcaaccaatgaggagtaaaactgcaggataaaactgcggcctcctagcccctccatgggaacattctgaggcatgctcacacagtctctcagacagttcccggcaagactgagctctggttacttgcggctctggttactgttcacgaagacaccatgttttggcatccttcccttccctgactccattcctcacttccctacctatgcttcctggtaatatttcccagaaaaaatcctcctccctgactccttgtctcagcatctgctttttgaa

SEQ ID NO: 13544 - DNA, 2487 bp, Homo sapiens
aagaaaacttttatgcaaggtcttgcatttaaaagacagctttgcgaatattttgtaaattacagtctcactcagaactgtttttggacacatttaaggtgtagtattaataggttaaaaccaggctttctagaaagaataaacttacatatttatttttaggacatgaaaatagcaatattcttggagattgataaccatagcattaatacgcccattatggtcatttaaattggggtttatttcagcaaacttgttgaatttatttttaagaaagaaatactgtattgggaagttactgttacttgataacaatgttttaacaagaagcaatgttataaagttagtttcagtgcattatctacttgtgtagtcctatgcaataacagtagtgttacatgtatcaagcctagatgttttatacagatgccatatagtgttatgagccaggctgttgaatggaatttctcagtagcagcctacaactgaatagcaagtggcataaagcatatccattcagaatgaagtgccttaaatatagcagtagtcttttttggactagcactgactgaactgtaatgtaggggaaagtttcatgatggtatctatagtcaagacgaacatgtagcatggtgcctatgtagacaatataagagcttccaattttccttcagatatttttaatattaaatatattttagtgacagagtgccaacttctttcatcaggaaaccttattcaggagggtttttaaaaagtgtttaaatgtcaaatgtgaattggtgatgggtgatggagggttcagagaggagtgatcgtcagatgtgtgaatggacggtttaggtgaaaataatcaactgcatagttcccatgcacgctgggcaatgagaatccttggaaacattggtgatgctatcagttttatagctttatttcttaagggggtagggaaaattagttcccattctttcaacccccttaactgtatagctcttttcctagaatagtgacgcaaatctgcatgaacagctaattgtaccatagtgttcattgatacaatcatagcattgtctatttttctcttcatatttatatgggggggagggcgctggatgcaaaagttgaagatcgtgatgctatgatgttagttttccttagctgattttgagggtttttaaaaataaagcaaggttgactaacctacggccacgggaacaggaccatggttaagcaaccatatagaaagctttgttgaaagaaagtatggcatcttgtaccactgccctgactgtcacaactcctaaccttgccattgcctgcctccccctccccttctccttaagagacaatttctgcaggtggcaggtgagcaagcccaggagaatgctgcaatcttgggggtggttttatttatttcttttttgccaaatagagtgtggattcatttcaggggctagctaagccaagaggcagtggtttgggcttgttgtttgtaacaagaaaatgatccacaccactcccccgattcccgggtgcagaattgtaactcggggttgggcctctatatggagtgaccaaaatgccaaaattgtccatctgcctctgagtagggcaatggaaataccaaaccttctgactttgccaaaaagcatacaagcaacctggtcatacataggatgacaaaattctttctggttgtttttaaacaataaagcaataagaacaaatacaatacataggaagttaaaagcacaaaggaatgaacttattaatatttttgaaaaatgcactgggaaaaagttgatgtcaataacagtataaaacagccctatttcttgataaaaaatgacaaatgactgtctcttgcggatgcttggtactgtaatgttaataatagtcacctgctgttggatgcagcaataatttctgtatggtccatagcactgtatattatggatcgatattaatgtatccaatgaaataatcgacttgttcttgatagcctcattaaagcatttggtttttcacatagtggtggcctattgtgttaatgccaattttgaatgctatctgccatatcaaaaaatggtagtgcacattttcttctgatttaatgaataacaaattgcatgaaaatttagaaaatgccagtaagtactttttttgtttaaaatgccactctaagatgttactttttggttttaaacatttttgattactttttgacttacactcagatgaggtgtaattatgcaccttttttatccccctctgaatttggggagattttaaactcccaaatgccaagacttcattttagatataggagttttatttaaaatgtttcattgagaggtggctttaaaaaagagaaattgtcagagaaacccttgcatatttacagaaaagatattgggtttttaaaatacaaatttacaataatgaaagcttaatatacccaggctgccagctcctggttgccttttt

SEQ ID NO: 13545 - DNA, 1304 bp, Homo sapiens
ctgcactctacacatgaaggccctctcacacagacgtgacgtcctgccagaaagagaatgaatgacagaaaaaaaaaagagagacaaactctaggaacaatgccgattcattccacgcagcagtattgggggtggttcgggggaggggtgtttcggattttctttttttcttttcttttctttttttttttttgcagcaaccattaataaatgccaccacattctaccagcacaaggaaacataggcagcactgaaaaaaaaaaaaaagctcatattaattagactgacaatatggccttggaaggctctcccttgtggaaccaagttgccatgggccttgggtgctctgcgataacgggtgtgggttggttttgtttgcaaaatggccaaaaaaaaaaaccggcttccccgagcagctgccctgaaagtaggggtggcggcggcggcgctgagtttatacattagttcagacctacttggtggcattaaactgtttgaatgcaaattcgatttcagattgaacttgttaagggagttaacgagggctgagttcagcaaatgctaaagtgttaatttcaaatatgcaaatttggtactgcagtttgttatgcaatattatatcaccaacccagtatcacaaaaactcatagaagatatcatgtaggccctgggctttgggggggtcccaaacatggtatgcagaaatgtgatggttacaggtcagtacaacctcagtccttagaacccctccacacttcagctctgcacccactttcctgtcatttatttatataggactgtagttttttttagttcgagagcctttcgaagcttaatttatattctttctttgtaccttttttctaaaattaccaaagatattacacaaaggtaaattatgttctctgttttatgctttatctgatgaagccaaatatcctcttattgttgatcaaaggaggcaaaagaatttagaggcaaatgacaagcgataggctattgcaacctgagaaagagaactgctccttcatcgtaaatttagaagaccaagtagataatggaaccaaagttgttacttttttctagtagttatttttcctttttctttttgtgtacctctacagagaccaaaactcattctcttaaagagattttatggggctactgcagataaaaataggacacaatattaaaggagctacagaaggaagggagtcccatctcaaaaaaaaaatgaatgtatgccactgcaattagagtatccaataaaggagacagtttagagtcaggacagaaaagcttc

SEQ ID NO: 13546 - DNA, 1198 bp, Homo sapiens
aaatgttccgtctgtctctgtgctggccagaattaaccgctagtcacatggggcctttgaacataaatgtggctagcacaactcagaaactgaatattaaatgtagtaagatttcgttcatttcaatttaaagagccacgtgtggctaatggtaacaatactggacagagttctagttctagagtgcggcttttctgttgccccaaacttttcagtgcacctgagctgcaatgggctgggaagtaccctcactgaacctctgcatattttttccaggcatcctgtacacgtcaaagaagagcccctcgatccagaggaagctgaagggcccctgtccttagtgacaacagccaaccacagtccagattttgaccatgacagagattacgaagatgaaccagtaaacgaggacatggagtgactatcggggcgggccaaccccgagaatgaagattggaaaaaggaaaaaaaaaaaaacacgtcaaaagttagcagtgaaattgttctccatttgttgtacagtctggaggattttcactacgttttgacaactctgaaatgtgttaactcttagtgccatcaagaaccccatttgggagtatttttgatttttctactttttgttgaaaaaaggaatttgtactctgtgcattggatggacttgtttggtacttgggattttcctctcttaaccgtcaacatcagtgttgtaaatttgctaaactgattcacttttagcagcagactttgaactgcagtcctgccaacgttggacactgaggacgcccgacagagcttgtgcacctaagctgcagaccaagcctttgcccagaatttaaggattccaatggacgacctatttgcacagtactgcatgttgattatcactgcctttactccttttttttttttttttttttttttttttttgcttccagttgggatggggaaggcctttgtgtgtgtattggggggaggggttaaaaaataattatcccaaactttttaatgtattgctttttttttttttttttttccttctactataccattttaagttctgacctcaggcctccatttgggccgatggcctcttggaggcttaaagttttctgtaccttgtgatgaatgttaataggtgtttttattatacaaagctgaatgtcatttctcgtttgtagctttctgtcactcattc

SEQ ID NO: 13547 - DNA, 1105 bp, Homo sapiens
agcggtactgacgtcttttattccatgtgtggttcctttttttctttttctataaaggctgtactaattttcttcatgcaacgtttcctaaagaccatggccagttttctacagaagctatttttgacaacctcaagtggcattacattttgcagtgaagtagaggaacctagggggacttcttcacaagttagatttcttgaggatcttctgttggaagcaggagaaagtggggggtggggggaagttgtccgaaatgccctctgaattgccggctgcagggtccttgtgctgcgctggttctttgaaagtctcagtgttgatattgaacttaaagagcagagatggagatcagtagcaaggcagtcatttttttaaagcagtaagtaacaagtaagatttggttcccggtttactttctgctgctaaaaaccacgtcagtgacaactgctctctgtattatagcaatcttgaatggaaacatttctgtcaagttgtaagttttaaaagagtaaagtgttttggttagtaatgatgtggagaaaaatacagtattgcatgtgttcgtgtgtatagattgtggttcgaggattgggagggctctgagaagcagagtactacatcaaaattgttttaagtattttttgccaataaaaaattaattttatggaaatggcttgtgctttgagaagcccagttttattctgtcttatgaaactaatttccactttgaaaattgttcttctgttgtttatggtataaatgaatggaatataatgatatcctccttctaggaaacaaagcatttccttaaaatgtttgctaggttaagctgtgctgttctactgatggttgttttaaattaataatgagaactataatttaaataatatttctttgttagacattataatgttaaactgaaagactaaattctgcaagtactatataatatttttggcttataatgctacatttttattaatgtaccttccgttttgaggatttatatctgtatttctctttgcattatacaaatataccagtattttcattctggagtggttgttttgttgtggtggtggtggtgtttgaggctgtaata

SEQ ID NO: 13548 - DNA, 1268 bp, Homo sapiens
tagctgggtatcttaagtacatacctcaaagatgcaaaaggagacataatggggcaaaagaatcaccaaaatttgaaagaaaatgaactgtctcctaagtgtaacctttgagatagattgcaatgatgtaaaggaaggaaatgggatttaaggaaagaaaatggagatgatgctaaaatatgctaattgaggactgaaaatcctcaaaagacaacccctgtttctggccaactggatttaggtcaactatgtctcagagatgtgaataaagtgtgttactaacctaaaagccacacaagctcacttattgccccatgcgagggagactcctgcctgctgctgcaggtgctgaggcataccagtctataaccttccaaagaattaagaaaccacttaaaacatgtcaagatccatccccgattattttgtcctgggtctgcacctgaactagcactggaaggaagagagtgtaaatagcgcaggatgttgagttgaaaatgggtctgttctgataaaacagcaagttccattcttcgtcctcattttttagtactgaacgtgacccaagtttggcccctcagaagtcttggaaaggatctggaagggttgaaggacagggattggatggggtctctcatgtttcccacaggccattttggatacagacgtgcgatctgctaaccccatgcccctctgcttgcttttgtgcctgaggagttcactgtgagggcccccactgctggtggcactggtaccatcctttggaggaggatgggaattgtctcccataccaggtgtggaccaaagcaagcacttggtctttacaggggaggcacaaggaagagtcgtttctttccagttgtgtggacggaaagggaggcaaaaaggttttctctaatcctcagccaaactctagtgttaacaccaagtgtccagatccccattgagaaatcccatggctagagtgtgacaggatcatggaagcagctcttgctcaattattcttgatcaagggtggaatgacgacttcagccagcaagggcccaggcttgtgctctctgatttcatagccctacggcgtggaaatggaaaccagccagactccaccttgggcagtgaagagaacataagggacgtccaggaggcccttggtctagcacgcccctgacctcccagcggttctggaaggccactcctaacccttcaaaccatagcaaggaaggttagagctatctttgtgttaggatcaaaactcgagaaggttctgt

SEQ ID NO: 13549 - DNA, 2785 bp, Homo sapiens
cttgccatgggcatctggccaccaaggaatttcgcaccctgacgattactcttgacacttttatgtattccattgttttatatgattttcctaacaatcatttataattggatgtgctcctgaatctactttttataaaaaaaaaaaaatctgctgtgcacaattttccatgtacattacaactggttttttgtttttgttttgttgccggtggggagggctgggagggggagggaacttttatttattgtgttcacaaactccatcctttcagcatatccttttaagtttagttctttcttccagttatactatgtactatcagttttgatataactatatatatataaatataaaattatatataaagggttatttgaaaccaatccatggcaacgctggtgcttgatacactgtgaagtgaatacaacattgaacagttacagatctgggacagtcccttctatgaaagtgctgaaatttaattaaaatcagtcttatatgaagtatgttccaatccatgtgggaacttgactctctcatctgtctaaagagtactggacgatataaaaatatatattttttaaacaatgtgatctcaaatttaaagactgctccagatagcctgcatttgcaatggaataactgacaaatcacaagtggtttagttgggcagggctttgatcattcaaaagtaactaaagtagctccagaatgccaagtattcgtgtaaattacggttacatgttatcatttgctgttcttacataagcactcatgaaaatatggtattctgtaacttgaattccatccattttccagacctctactcatgtctgaggtaaatctagaaattgtcttagttttaggattgaaacagtctataaactgtatttttggtccatccaggaagctagtcccttgtttctcctttctacatgacattgcagtggtggtttctgtaattaaaatttgtttgcctcatgtccctttgtctgataaaccttcactctaccgattcagttgtgagcattctttttttccttctcaaaacctactatgatttgttttactgaacaaaggttatcaaccacacatccagtcctgacatggagcttttcagtgtttggagacatttctcaatcccctgctgtggtaggaactccagtggtgaacggcttgcgcgcctgcagccagagttgcagggaaagctcgtacttactgcgagcagcatgtaatcttttttcttcctggacataaagatagcttgagtaaactgttctatttcattctcttcactctttttactgtcttgcaaaaaaaaaaaaaaaaaaaataatcaaagaccactaataagattccacctctccttattaaaataattttttaaaattttgttttgcttttgtttggatgtggggtctctcttctatttgacttttacatttagatacagagtttgtagtacttcagagacatttcaagcatgagaatttgaggttacctctctttatttgacctttagggactcacgggagggcagcctgatttgtaatgaagcaccacattttggtgttaaaaacctggtttgcttaataatagcagtaatttctgtctgtggaggcaacaaataaaaaaattaacagcttgaattgagtagccaacaggaaaggttcctttcacatttacattaaaactattctgtagtcactaatgtaccataatttaaattcttttctcaaaggtatagattataaagcagtgccatttgttgctgtggtcctattctcaaatgcatggacaatgttcccccctttttaaaataatgcttgtgtctgggatgcaagctttgcttatctttttaaatacatttttaaagtatttattaatgaaccaaaggaaatcagatgctttctataagcatcagaatatataatacatagtgatttgactatgaattttaaatccacattttaatattggtgggatattgcaaagacattccttctaaagttttaatattccttttattaagggtctcagggagggtaaattagtcagccatatttattttccagaggtttaagaaattgctgtttttaactttttgaaaaaacttaaatgccaccaaactcatgtaggttgcactgcttattgaaccaataactgttggtatgcactttgttcagacacactgtgtactttttcaaaaactagtttcatgtaaagtgattggaccccatagattagtggaaaaagctgattaaccagctactcataggctgctaattcattcatgccaatgttttggtttttcagttttgcctccgtgataaattaaagaatggggaggggtgaaggaaggggaagaagattgctttagaacaagtggcatgaaattaccatctttgtagaaaccgcagctaacagtgggagttatctaagcaatcagatgttacagggccagccctttagctgctgtggtgtattctgttgggtagtgaggtagtaggtactttatagacttttaattttggaaattgatgacatccctcaggcatgtattctggaaatggaattcctgtaacttcctgtgtctgcagtatgccctacaattagtaggcagcgtgtaaaaacactagtgtagattataaagatatacattaaaagaggaccagaaatacttggtattcagtggcacagaaagcaggttaaacaaacaaaaagcacagtgttacgcttgcaagtttccatttgttttaataccacgcaatctttcacactc

SEQ ID NO: 13550 - DNA, 1194 bp, Homo sapiens
gtatttttagtagagacggggttttgccatgttggccagggaggtctcgaactcctgacctcaggtgatccacccgcctggagtcccaaagtgctttacaggcatgagccaccactcccggtgagttctacatttttgatctgtgccatcttgaatagccttagctgacaaaaacatgaaatgtaaattatattaaaatgtcctttatgtgcatctgtattttgttaatgccatgtgttttagattcttatttgtaatctttaggactttatttaaaagctttcttgtgacatttgtgatgtattgatagtgtgagaaattacaaaaactaagattctgttttattgtaaagtatacaaaaagaatcttatttcatggttttatgtttctcttctacttggcttcacaatgatccgaacttgcagcttttaaatgagaaaagcttcctatttcattgtgtacttttgtttgtgtaacattttgtggaaatgactgcttattaaaatgacacttcacagacttggactaacgttcatgatatcatggtgtcttttggaagaagggtgttgtgttacccactctatcgccatttcaagctggtgatgaaggcctacagggacactataaagatattgcaactgggtaagatattactgtacttgcaaatttgggagggaaaaagttgtaagtttttagtctgtgaagatataataatgatttttgcttttttactgtatataaataagtaatgaaaaatgaatccaaccacttttaaagtatagaattcctgtgtataagacatatgtagataagtaattgcatagaggcataataaagactcttttccgagaggagtaaggaaggtaaacagagaaggcacacatagtattgcaaaccgttttacattataatagctgcatcattcagtatttcttggctgcctataatcttctaggctctatggtgggactgtgggtctaataataaagaaggcagaaaagttccctgctctgttgaagtttacagttttgtcagacagatgatgggtaagttagcaattccaaagagagtgaaaagtactctgctgggagaagtccagggatcgtttaggaggggacatgtaacctagattcggcatgtcaagaaagattttccaacaaaaagctcagctactctgagcacttttgacttgct

SEQ ID NO: 13551 - DNA, 2292 bp, Homo sapiens
ggaaattgtgttcaaatgttagcttactattttgtagaatgaatgtttatgaagctgatatgagaccatctcagaagaaccaagtaggttccttgaccttttgcttgcttttctgaacattgtgaatattacacatgtctttctaaattattctagggtatgcaaatgtcaatggtatgaaacaccactgtactggaagaattaatatattactttagtatgtacctgagctaaatgactgaagctttaggggtgcatagaaaccaccataatttgtatgacattttgaagtgaattaaatatttttgaacatgcttcttcgacagccagtgttatatttttcagatcaacacaaagcacaatgattactcgaaattcagtattttcaaatttacatatttaaagtcatgcaagctgtaacttccctgtcaaaattactggctgccaaatttatacctgtttcttcagctgtaccttttgatatttaaagtttttaaatttctgtaaagtagattttgtagaatgtaatgtgttcactgcctttgtgaagcggtatataattgtataatttctgtgtgtaaactgaatgcttgggctttcaatacagtattcatataaagcaataaatattaatgttatgaaatatttgactacatttttatcaaaatatgaaagaatccccccttttttagtttcagatacctgaactacacagatgagcttctaaaactgatgcaaacagtttctgacactgtataatatgcttttgggtgatttggggggcaaccacaagttttgcgttttgactacttaaatcatcatggctataaataccaaaacgatttggatccatttatgtttgtaggataatatactactgactgacttgactgtcaggttcacaacagctagatgatatatttatgactatgtctaatagttgaaataaaatctgaatattgatttactatacccaagaggggagaaaaattaaccattgtaaatttttaaaaaatttttcaaaaatgttaaaatgaggcaaatttaagtttacaaattttgaaattttcttttgaatatttatgaaattgtcagtaaacttacctaagatcctgtgaccttttgatattttttattttaattgtagtgccatggaccatttgtaaacaaattgatttacttttgttggttgtaagttgaagatttagcattatgactttgaggtctgtggttttatttgtaaacttgcaattgctatatttgcaagggcaaatgtatttctttattaaataaagtacaataatggtgaatgtaccaaaatgacatcacttaactctatgagagatctgcattttaatctatagtttaatagttttaatatttattagatattcatatgttgatcatagatcaaacttgttgctgtttatacagataattgtagaatgctcatggaatatctttagggtaggtggaatacttctgtagttaaattgggaaaccttgttcagctggttttagatattgatggccatttggaagtaaatttccgcaggtattcataggtgcacttaacacagactttgcttaatgaaaatgtcagttctaatagtaactgattcacttctgaacagaagtgattttaggcatatttcttaacatatatcaagcaaagtcctgttaaaagatctaaatgaagaatggagacctcagtgattaaagatattttgtttctgaccttgagcagattgcttacctgttctctagactataacccaacatgtaaaaaaaatttgaagatggtgatgaggaaagtgagatatatatatatatatgtattatgtttctagcacttttcccttttaaaaagtgaaaatatccttgtacatttttgaaaaatatattttcagttctgaaaaatgtagcagaagtagtgaaaatgtcatattttaaatgttgattattagataaatttaacctgcttagggtttattgtaactacacctttcagacgtgtgttttggagtagtggaattgccagccaggccctgtggcttggaaaggcatcccagaaatcctcggccagaaggtgtggcttgttaaagcattgagattcagagtattttgttttgccggtgtagataggcatgtatttatgcatttttgcatttgtaaaatcaacttttcaaataatgtaaatgtaatatactagtttacttaaaggtacttgggcagaatctaaagctgctacaatgtttgattatgaaaaaaatgtaacatggtaaggatgaa

SEQ ID NO: 13552 - DNA, 1189 bp, Homo sapiens
ccctacaactctgggtgtcataggtctattttaagggaagagagagaaaaacacccttactatcttggaaggcaatattaacaaacagagcttttttcaaatagcaattgtacttttctacctgtacccttttacataaagtgtttaaatttcagaaagatcttttattaagcatactttcacagaataacttgtttaaactatattcatataaaaaagttaaacacgctttttttcctgcctaaaacacaaatacaactgccagtatgtatttttaatggaaccctattttataatggtacgttactgaatgtgtttcatatgcgtgaccgttaagatattatcatttaggtgaaggtttcaactcaaaaccacccaacccggtggttaacgatttaatacatataaccaaaccggcagcgtttagagttgggatatacatttaaacattttcctggttaaggttcccaagagagtgtaaaggttttagcagaaagcaaaatatcttgcatctttatggaagtttaaagcatgtttgcaaatattgcagcccattgaaagaatttgcatgtacaggaaagttgtggatggagacggtttgtggaattttaagtgctcattgtagtaaacttttgctttgtagatttgaaggtacagacttatacaggcaagttcacaaaatcatgattagttacaaacagtaaaatgaagttaaaataaattattattttctatttgatatgttttgatgtgattcctcattttgcagtggtgcctataaaataaaagccttttgcagtgtttgctttttttcccttggttgtggttgtattacatgctactttggaaggatttaagtattttagaccatctgatgtcttcacattcagcctcaaacctaatgatggatataaagcgaaggtctagcagtgaagaatacagggtcaaatttacaatacaaccctgcattctcactgcctgtctcacaggaagtttcagcctggcccaatatcctataaacaagaatagctatgagcaactttatcaatcaatcagggtcatgtttacagtgaaatctctttcgtttattgcaaccattactgcctatcagtaataacaactccgggtggctaggtccagctttccatttctaagatgcatctgcaaatcaggcaatattttcatagaa

SEQ ID NO: 13553 - DNA, 1977 bp, Homo sapiens
gacacattaaattataataataataaatgcatataaataaatataacacaatcctcttaagatttattttcaaatgtgacaataacgtatctcttacaggaaactgaaagctgaagacaaccaagaggcttatgagatctaatgtgaaaatcatcactcaagatgcctcctgtcagatgacacatgacgccagataaaatgttcagtgcaatcagagtgtacaaattgtcgtttttattcctcttattgggatatcattttaaaaactttattgggtttttattgttgttgtttgatccctaaccctacaaagagccttcctattcccctcgctgttggagcaaaccattataccttacttccagcaagcaaagtgctttgacttcttgcttcagtcatcagccagcaagagggaacaaaactgttcttttgcattttgccgctgagatatggcattgcactgcttatatgccaagctaatttatagcaagatattgatcaaatatagaaagttgatattcaacctcacaagggctctcaaagtataatctttctatagccaactgctaatgcaaattaaaacatatttcattttaacatgatttcaaaatcagtttttcatactaccctttgctggaagaaactaaaaatatagcaaatgcagaaccacaaacaattcgaatggggtagaaacattgtaaatatttactctttgcaaaccctggtggtattttattttggcttcatttcaatcattgaagtatattcttattggaaatgtacttttggataagtagggctaagccagttggatctctggttgtctagtcattgtcataagtaaacctagtaaaaccttgttctatttttcaatcatcaaaaagtaattataaatacgtattacaaacaagtggatgtttttaatgaccaattgagtaagaacatccctgtcttaactggcctaaatttcttctggtagtgtcagttcaactttcagaagtgccacttaaggaagtttgatttttgtttttgtaatgcactgtttttaatctctctctctttttttttttttttttggttttaaaagcacaatcactaaactttatttgtaaaccattgtaactattaaccttttttgtcttattgaaaaaaaaaatgttgagaagcgtttttaacctgttttgttaatgctctatgtttgtatttggaatatttgaataatgacagatggtgaagtaacatgcatactttattgtgggccatgaaccaaatggttcttacttttcctggacttaaagaaaaaaagaggtttaagtttgttgtggccaatgtcgaaacctacaagatttccttaaaatctctaatagaggcattacttgctttcaattgacaaatgatgccctctgactagtagatttctatgatccttttttgtcattttatgaatatcattgattttataattggtgctatttgaagaaaaaaatgtacatttattcatagatagataagtatcaggtctgaccccagtggaaaacaaagccaaacaaaactgaaccacaaaaaaaaaggctggtgttcaccaaaaccaaacttgttcatttagataatttgaaaaagttccatagaaaaggcgtgcagtactaagggaacaatccatgtgattaatgttttcattatgttcatgtaagaagccccttatttttagccataattttgcatactgaaaatccaataatcagaaaagtaattttgtcacattatttattaaaaatgttctcaaatacatctttctttcttgtgttgatttcttttttcattgtgtgctgatcaaatttattccatttaatcacaaagtcgttctgtcttaacatttcacccctgtattatcagatgagtgaaaattctcaattagttgtatgaataaccaggctttactgtaagcaaaattttacctaagtcctctgaaattaaaaa

SEQ ID NO: 13554 - DNA, 1179 bp, Homo sapiens
ctactatgtatccacaaaaattaaaaaataaaaaataatgaaagcaatggaccaaaagttctaagctgcacaggaaaagctgtaagtctaggagataaatgataaaagcaaaggtggggtggagtgaggtctaagacctggatgtgttggtaacttttggtgtcctgacaccaggtataagaagaacaagaaagttagaaaacaaagctgtcagacatctgagagagacctgagagattatgttttaggactccaacagtccccagtattggtcaaggttcatggtatgtggacaatagaagacaaagctgcaatagaggagattaaatttattataaaagatcttttaaaaaagctgtaagtttgcatgcctcgtctgtatagatgttaagctagcccaagatgttggtccaatttgggaggtcatgcggaggatgtttgagactgaattatccaaattctgattcaacaaaggtggtggctgaaaatgatgaaatggcatagccagttgtatatatgaatggcttgagctctaaagaggggacagttttttctcaaaagtatagattaatgaactaaaagtccctgtgagatcaagaagaaaatgttagcactccttctagcactggaaaactgaagcagtgagagtcgccccgtgttctctcaagttaaccagattttacataagacaaaaggtatgaagagtgtgaaagagattgaaggtaaagagtagatcattcataatttccccctaacatgtagggaaaacagaacatacaggatttctgagaccataaaatgacacttatcatttatattttaaaggcattatttattttcattatgtgtgaaatataatttatgctactcaaaatgtcagtcgcaaatcattactgagagtgaatctattctttattccaaagtgctgagagattatggaaaagtcctcattcttagtcgttaaaaaattgttcatacttgaaccctaatttcatttgtaaatttgagcgaaaagttgaagtcgggtccacattaatgcttttgaaatgagaatgctattatcaatatcaatatcttagctttaatctttctcttatttttcaccattaaaagtgataatcttacttttattcattctgttcccccgaggcacaaaaccagtgatgacttgttgaattt

SEQ ID NO: 13555 - DNA, 1195 bp, Homo sapiens
taaccaaccaaagttaggatgtgagagaagaggaggtaggaggaagtttgagaatatataatctctttatcatagggaactccatattgcataaattgaagtgtgtgtttgaaataatatataaatattatgtctcagttttatgatggttttcctattttcttttccttacctcagagggatctaatacaaactaacattaacatcttaatgtgacagaaaatgtattgacaattatttgatatttagaattccctttagtatgatttcactttttgccatataatttagctaaaattaaattaaatctttaaagtgctttgtttttctcatgcgtgtgcatttgtcaaacaaaattgatttgcagaattgtctgaactctgaatgttgacatgtagtacttttctaagtcagtatatttgctgatgcttatgttattaaactgctacaataacaaaattcatataaacaaactaattggtgaatgtatttgtgcagagttaagacttgcttgttaacataatatatccgtattgattttctttttctaaggtcaaggtttctcaggtgattacagtgaatatttcggactacaagtagatgaagatgccttgacttacctcatgttggcaaatcatttggttcacacgctgtgtcccgattctataacaatagctgaggtaaagccatagtgaagtcttaccttctgaccccctttaatagagagtattttgtcagcatacagtatttgattaatcaatctcatgttgtcaataattgcgtaaatgaaattctaccctgagtatagtgcagctatcttgtatgggtggcacattatttagaattcactgtttccctattagaagataatgtatactaattacttgtcaccattctgttgttaaaaaagaaaatgccagtggttggagagttaaatgtcctaatcagtggacaggcccttcgctatgagaccttcagcagagaaaagaattgaatattaatgtgtgtctgtccatttattattatttttttcttttttggctcaatcattaaagataggatggattgctgcctgcaagcttctctgaagcctttcttgttctgatgtgattacctttcttgtttatgttattgctctcagattgccaaatgttcactagttattcatgattgttgaaggttcatgattaactgt

SEQ ID NO: 13556 - DNA, 1281 bp, Homo sapiens
ggccccggaccgccgcggctcgcctcggcttgcctcgacacgcctaggcgccctccggctccgccctagccgccgcgtcccagctagagctccagcgcccgctcaggccccactcgacctctcgggcctcggctacttggactgcggcggaatatggcggctccgatgactcccgcggctcggcccgaggactacgaggcggcgctcaatgccgccctggctgacgtgcccgaactggccagactcctggagatcgacccgtacttgaagccctacgccgtggacttccagcgcaggtaccgccggaatcccaccacccccacttagacaggcagcccgcctcccaggagccgtctcgggacacgggccgcccctcggccctcgcgcgccaaccccgccccaggcggggaggaacctgagtgggcggggctcggggtgactcgggtaaccgggttctgtggcttccgtagtggcaggtttgacagcgctggtgcccggagcgggcgctgaagaaacttctttcctcatcccctttcccctctgttctaatcagcggtcttgcgccatagggtacgtgctgtggctccaacacttattccccagagtgctgctggggagtgactcaccgccgctgcaggttttctgactttggcacccactagcgtgggcctgtggagtaacgtgggcataactcctggcacgtgtaattacgcatttaaaactttctagtttatttcatagcaaatgttgtgattttatatctaagaggattccttcaggcagacactatatccttttgttttttccttgctaatattcctcatttaggggaagattacacctacattgatcaattttttctccccttggatcaacattgagaagttaaatgtacatcaacatttgtccgtgtgtgactttaaccatcttgaagagggagaaaggtcaggaaagcaacttttacaggccaatgtcgttttagcttgtcttctaccattgtgtaccatacaactttagttactgggctaataattctattcataagttccactaaaaaggtacaggtctttttctgttgtcgttgttgtttgaagtaaaagagctattatacaagttgtaatagttatacttgtgaggttaccccattttgatttaatagtttctccccttttaggagagacactgcagaatggaaactatcctggcaacagaatatacatggccaatttttcgagtgatggaaaacatccaactagttaactggcatgaaggagcgttgag

SEQ ID NO: 13557 - DNA, 1239 bp, Homo sapiens
aagttcttgatgaaattggaattgaaatttctggaaaggtatgaacatcatcttttcttagttggaaatagtttctgcctaccacgtttgtcacttaattgttttgtttttactaggaggtgcatggtttttatttctgtttcaaaagtaaattaaacagacctctttacagcacatcctgtatgtcctagtccaaatgtttcctaatgcacgtttgtctttttcattgtttaatatagatggccaaagctccatcagctgctcgaagcttaccatctgcctctacttcaaaggctacaatctcagatgaagagattgaacggcaactcaaggctttaggagtagattagtcaaaagaagtcatactattttgcttacttataattatgtagtataaaccaagcacagtgcagatttcttttacaaaacacatgtattttgcaaaaaaaaaaaaaatgaagaccatgagtgaacagttgtttcctaacccatggctatttagaatcttttgccaaagaatgacaatgatgcaaaaatgggaacagtttggattttaattagaactgtttaggagtgatgatgtgtaaaaagttgacttctcttttgcatggcacagagaaattatattccttacttcatgtcagtttatgttctaaatctttttcactgaatataaaaatcttgttaaatgccattaggcaccaacttaaagagggttgtaaaaatattaaaagtatatcgttaattctgtatctgttgcttgtcttttgtaagtgattatgtgttatgaccataggtggttacagctgccaaattatttttaaatggtcaaaaagaagagtgctatttaaacatctgtcttaaacaaaaactgtcataacttttcttttttctttttccattaggagaacattctagttggtaaatttcaaaatgtgcttgacacctgccttaaatagcacagacctattgtgcacatctttaaattatttcagctggcagaaaagaattacatttaaaactgaaatcaaggcctcaatacaaagattatcctggctcttttctatctctgtgggcctaattgaaatatgtactcttattttagacacgcctctgttaaaacagaccaggttttcctggtctcagacctatgatgacttgtccctttgatgtcactactgtgaattgaatataattagtaaaaatagacgatgaataaataacactttatagtaagaa

SEQ ID NO: 13558 - DNA, 3499 bp, Homo sapiens
tttaccctgttgccatgtatgattattccttgtgagattacttaattacttggattgaagactagcctattgaagctgctgccaggcaacaccacttaacagtaacttaaaggaattattttctttagaggatcctcttcaaaaaggaagggagatagtggaaaactgttcttatatcttcagatccctagcagaaatgactgtttatttcaaactatgttttacttgtatatgatgtagtcaccttaactatctttcaattccatacttcccccgcccccattttaaaggcttattgttgtattttgtagcagcttcaagtgaccaaaagactaaaatctttcaacgtcaatgccaaaagccaaggggaattttgcagtgacaggattttagtctcttactatgaatactaatttcgaaccatagctttcattttaagcatcatcttgaatttctaaacttttttctatgtcttggtgttaaaagatttcaagattggcatttttacttaaacagacattttatggttgagttttctctttattatagagaattagtaatttttttttggctgacagatcagataaaattactttctattcattaatttttctctacaactttatgagtttatttaggtgaatagtctagactagaaacaagtttactttatctgctttgcctctggtggtacaaggtttttaacatggatggtaaacaattgtctagaaattctggcaggttttttgtattggagatctggcagtatcctgcataactttgggtgaggaaattgttctcttaaagatcagccatgttcaggaaatgatctctgtttgaacctcactatcctgtaaggttatccaagtagcttagcccagctaagttctatcagagacccaaattatattttttaaaaatttaacagctggaaacttggactagagctttaataaaaaatcttaaattctttgaaattcaagttaaaaatacttatatatttctattacaaagcagtgacaaatgatgccctgtgtgacttggagttatctttgacttttaccacaaatcttcatttataaaagaaaaagccaaagtgaaaaaaagttagattgtgtatttttcagtaacagctttccatgtcttaagatttttttacagacttaagtttctaattcaggttgtcaaactggccatttgacttcagagatttgttttcattaaaaaataagcctgccgccaaaataaatcacttatcaaaatgtgaactgttttcctcatgttcagttatgttaaagtagtatgataaatgcatgcctagagtagtgctctcgttgatgaagcacatgtatgaggagaccagcagcaaaacataaccatatgtgttttgcgtttacttcctctagaaaagaatttgcaggcaaccatgtttaatttgaactatctaagatggtagattttagaagctaggaataattgagttttatagcactattttcagaatacgaaaagatacacaatcattctgttttttgaaattccatgtgattcaaactgctccctattatttgggtattaatttgcactaatagcaaaatgtaatggcagatcagctttgagagtggtcctaagcagtaaactggatgatgttgcattagaaaaacatcaataattcatatttaagttttagtagttactactgatttgataatcacttaaattttatatatcttaatgtattttttcagactcctaattaattcccacattcactgtaactaggggcatagtccattctgttaggattatatcctctccttagaaatgttttccatcctgttgtggggatttggtattaatgtttcttcattgattatggaacttttgttccctgaagctagttaactgtgtctaaagttaaataaatacagcagaatgattgttttagcctgctcgaactgatacaaatccctgaaaccatgattggcatatgttagataacaaatgaggatgtctaagaggcatatgctgctttggaggtgtagtgaacgtgtgtacagaagttttcaatcttaactatatagtgttagtgtgatgctatactattggaaaaatagcagcttttttctattttataagttgtatgcataaacataagatttgtaatgtttcatttataaactgccttcttcaacacatgttaatagtgttttctcaaagtattgatagtatgtcttccagaatttcacaatatgcttacagtaaatatttcctagcttgttgaaatgttcaattctttgttggctttcttcttgattctgtgggggtgtataacaagcctgaaggacattgtaatcatttcttacaaggtgaaaattaagaaagattgtgtatgagagcctatatagttgttttatccattatcatctttgattaagactttaaaaaaatgctatttccagttaatgcatttggccctattgaattttcagggaccagaaaacattaaaaagttctgcatcttataatggtaaccaattaagcttgagattgttctgaaagtatcaattgctttaaaactgttgtaagtacagttggcaagatctccaagctgaaacttccacgttaaaacttttgcctgtaagaatttgcacatgaatgttaatggaaaacacaaaacttaagatggcccaaaacaaaagccacaaacagttcatcatttggtgcttagtctttgtaagggctctctgtggtttgacttaccccagctaccgttaaatgaggacaaatcaccttaaaacatgttcatttgattcataacaaggaaaattgggtctatgattttttgccaatcttagcctaaaagaaattgctttagcttctggtcagcactgattaaaatgtgaatagtgaagtggctatcctaaactggtttatctccacccacactatcatagatttcttaggtaaatacaattcttatctagtggtattctacttgtattcagaatactgtattaaaattttactatttcatttttgtattctgtgcttattttttttgctcacgcatgtatgcttagtataaatgtgtcacttctaaagttttgtctctgacttttagaaataaatttcagaaaaattgtttcaaaagattttgaaagcacattttgttttgtgagtcaatgacaaatatatttcctgattacaaaacagcagaatcttactgagttatttttctactagttatagctcccttttataatactagtcattatactcaacgtaaaagtatataatctgtcaaatcagattcacatcatagctacagatatcccttttgctcccaagttgtatagatagatagtatttaagtttaatcattgcttctaattggaaatattttagttttttttacttttggaagtattagttattaaaggacctaatttataagtttctctgctatattctcattaccacttgtaacaaaaaatgc

SEQ ID NO: 13559 - DNA, 1957 bp, Homo sapiens
ggatagtgggcttgtcaaatgtgaaaattaaataaattagaagctaaaatgctatctattccagattattttcaagtttaagaaaaagagaaaggtatatatttaaaagagttaaacaaggctactaaatatggaaaattggacattggaatactatgtttattcagctttcattttaagagttgtgttttttaaagatagactagtataaccatttttttggaaaaaaagtatttagcactaatatttttctttttacaggttgaagaagaaggcttgcaaatttgtgttgaaatatgtggttgtgctctacaactcgaccttcatgatgatcccaaaactaaatgtctaatttataaaacaattgcacattttttgccaaatgatttggagatcctcaggatttgtgcactctcaatattttttctggagcgctccttagaagcgtatcgtactgttgaagagctttacaaacgtccagatgaagaatataatgaaggcacaagtagtgttcaaaatcgtgttcgttttgaattgcttccaattttgaaaaagggattgttttttgaccctgaattttggaacttcgtaatgattaagaaaaactgtgtagcattattgagtgataaatcagcagttagatttctaaatgaaagcacactggaaaataatgcaggtaatctaaaaaggacggaggaacagcaaggtttggatgaagggtttgactctcttacagatcagagcactggagagactgatcctgatgatgtatctggagtgcagcctaaaggtcatattaatacgaagaaaaatcttacagctctcagtacttccaaagtagatcacaatgtcccaaggcatcgttgtatgttatgtaacaaggaatttttaggtggtcacattgtaaggcatgcccaggctcatcagaaaaaaggcagttttgcatgtgtaatatgtggtaggaaatttagaaacagaggacttatgcagaagcatttgaagaatcatgttaagaagatacagaggcagcaaattgctgcagctcaacaggatgatcaggaagtcactgctttggaagaaataaattgttctagttcttccatttcatttgaaaatgggaattctgatagtaaggatttggaagtggagacacttactgcttctagtgaaggaaacaaagaagtcatccctgagcatgtggctgaattcattgaaattcccataagtgtaccagaagatgttattgaaaatgttattgaaaatggcagtcctaataattctttaaataatgttttcaagcctttaactgaatgtggggatgattatgaggaggaagaggatgaagaaggtgattatgaagaagatgattatgacctgaatcaagaaacttcagtaattcataaaatcaatggaactgtgtgccatccaaaagacatatatgccacagatcaagaaggaaactttaagtgtcctgctcttggttgtgtccggatatttaaaagaattgggtttctaaataaacatgcaatgaccgtacatccaaccgatttaaatgtgcgacaaacagtaatgaagtggagcaaaggaaaatgcaaattttgtcaaaggcaatttgaagattctcaacattttatagaccaccttaatagacatagctatccaaatgtgtatttttgtttgcattttaattgcaacgagtcgtttaagctgccgttccagcttgcccagcacacaaaaagtcacaggatatttcaggctcagtgtagttttccagaatgccatgagctttttgaagatcttcctctgctgtatgaacatgaagctcaacactatttaagtaaaacaccagagtcatctgcacaaccaagtgaaacaattctttgggatgttcagacagactcaaatcctaatcaggaaaaagactcatctagtaatgagaaacaaactattagtctgc

SEQ ID NO: 13560 - DNA, 1212 bp, Homo sapiens
gttcaatagcctatatttctagatattaaatattttttgtaagatatatgcacatagaagggggacttctaggaatttataaccaaaattttaaaactatttttatatttttttaaatctttaaaaattttaattactgtgatattgattatacaccttttttatagatgatttgtttaaattatatctggaaaatagagttgatttactttcagacatgaactatacaaacaggatatatttatatggcttgaggtatgttttgtaatagcgttgttctttaagtgtacatcgtaatttgacctaatttaaaaataatatattttcgaagtagtagattctcagatctttattctaacaattacatgatttgaaaacagtactcaatgagactggaaataccttttgtacctaaatgttttttaaattaatcaaaatacattctgtgagatactattaaaagtctcagtaaagtcctattttaaaggttagacactttcagagatcaaggtgctccctatactcccttgttccatcagaagctgcagtgactcttttaggtgattctaattctttcatgccttgaaattaaactatgaaattaaaggcagaaaaactggaaaacctactgcaggtccagagacttctgttttacaactgggaaacagcttgtgtactaaagtaatgagaataaaaatgttggcccaaaattacttttataaataaataattccaaaataatttcttaatttaaaatgatagcacttctcttgcacttaagaatggcatccataagattctgtatttggcatttagactaacttctagatgtatatttttaataatagattcataatgttacatttaattgaaaacaaacctttatatccaatgaaaatagtataaacagaatgatttttataccaccttgttaagattggtgcttttggtaacttgtactgacacaacagacatgtgctagtatctgataacattaagtacattttatgtcgtttaatataattatttactttaaaaattgtacttcagaacatcagattttattcacattttttaactcactgaactttaataatcaggtcacctgtactctagtcagcactgtatatattcttggagtttgtacatgggacttagcaaccacactgagtgaggtaaaagcatttgatttcagatctaaaattcgtaaca

SEQ ID NO: 13561 - DNA, 1405 bp, Homo sapiens
gtatagatattcaacacaagtgtgggtatgtgtgagtgtcaaaatttgtcaagaagcatatatagtgtcatatttcttatttaagatattttaattagttatcacaataatccttcaaggaaggtattttaacaataagtaaatctcaaaaccttttttgatgttcttctttatgaaatggccttttaagttacattactacgttagccttatactgaaatttaagtatagaccacctcagatttaaagagtaagttgaaaacaaataaacaaataaaaaggatctttcggcagacgccattatcctctgtttctctgctgcaccgacctcgacgccttgcctgtggcccacttgttcactgactataggctactgcagcactggggtgtcagttgttggtcccacccagaacgcttcagttctgctctgcaaggatatataataactgattggtgtgcccatttaataaaagaatatgtaaactgaacagccggaagaaaccttcccgaacactgaaaccaatggtgaatttggtaaacaccctgcagaagatatggaagagtaacaagcatttaaaagatctagaaacactgatgagatggttgaattacgcattctgcttcagaccaagaatgctggggcagtgattggaaaaggaggcaagaatatcaaggctctccgtacagactacaatgccagtgtttcagtcccagacagcagtggccccgagcacatattgagtatcagtgctggtattgacacaattggagaaattctgaagaaaatcatccctaccttggaagagggcctgcagtttccatcacccactgcaaccagccagctgccgctcgaatctgttgctgtggaatgcttaagttaccaacactataaaggaagtgactttgactgcgagttgaggctgttgattcatcagagtctagcaggaggaattattggggtcgaaggtgctaaaatcaaagaacttcgagagaacactcaaaccaccatcaagcttttccaggaatgctgtccttattccactgacaagagttgttcttattggaggaaaacccgatagggttgtagagtgcataaagatcatccttgatcttatatatgagtctcccatcaaaggacgtgcacagccttatgatcccaatttttatgatgaaacctatgattatggtggttttacaattatgtttgatgaccgctgtggacgcccagtgggatttcccatgcggggaagaggtggttttgacagaatgcctcctggtcagggtgggcgtcccatgcctccatctagaagagattatgatgatatgagccctcgtcaaggaccacctccacctcctccaggacaaggtggtgagggtggtagcagagctcggaatcttcctcttc

SEQ ID NO: 13562 - DNA, 1166 bp, Homo sapiens
ccgtgttatcatttctgttcccattgctttaaatatccattttgtgtaggcaattcccaagtgtaaatcttcagtccttagtttctgccagaacttcagaccgacttaaagacatctccatgtgggggggggggggggggtcttagcattccaaacttaacattcctaatataaaactcttttttttgtcctgaaaacttgttttttagtaagtttttcccatctcgttacgtggaaaggggaactgattgcccaagtcaaaaacccaagagtattttttttaactccgctcctttacattgagtctgtcggcaagtcctgtctgtgctgcttctagagtgcatcccactcttctacctccctccttgcctttcttaccaccccagtcacttctcgcttgagctgctgcctgagaagcttcctcactagtctctctgacttccactcttttctacagtgcattcttcacacaataaccagggtgagctttcaaaaatgtaaattggattgtgtccttccctgcttaaaagccttccggactcccaattgcccaccttgtcagtcatccctttatctgttcacgtctgttacatggtgtttctgcactggaatggaagatttttgagaccatgggtattggctgtatcattgcataattcccagtatctggtgtataatagttgtgcagtaaagacttcctaagtgaacaagaacatgctcttattcttatttctaatacatttttcactcccccacgccgaccctttcttttttccttttttgtaaaggatgagctttggaggatccaggagaagctggaatgttactttggctccttggttggctcgaatgtgtacataactcccgcaggatctcagggcctgccgccccattatgatgatgtcgaggtaagagatggagaaaattgccccatgttgggaagaatgagttgttgagagcctggtttagtagagttgtcagggtgagttcacattattctctaaggctcttaggtctgtattcgctctttctgtgcagtttctgagatattgatttcatcaaaatgttgggccaaagtaaatcccactaaactggtttcctgctctgtctcaaaggaacagcttgtttccaaccttactaatttaaagagccacacattcgtctga

SEQ ID NO: 13563 - DNA, 1807 bp, Homo sapiens
aattgaactactccaccagaaactagagctccctgacaatgtatccggtgaatttggatggtccttctgcctggcttgtgtctctgctcccttacagttcatggcttctgctctcttcatctgggctgctcacaccaaccggaaagagtacaccttaatgaaggcatatcgtgtggcatgagcaagaaactgcctgctttacaattgccatttttatttttttaaaataatactgatattttccccacctctcaattgtttttaatttttatttgtggatataccattttattatgaaaatctattttatttatacacattcaccactaaatacacacttaataccactaaaatttatgtggtttactttaagcgatgccatctttcaaataaactaatctaggtctagacagaaagaaatggatagagacttgacacaaatttatgaaagaaaattgggagtaggaatgtgaccgaaaacaagttgtgctaatgtctgttagacttttcagtaaaactaaagtaactgtatctgttcaactaaaaactctatattagtttctttgggaaacctctcatcgtcaaaactttatgttcactttgctgttgtagatagccagtcaaccagcagtattagtgctgttttcaaagatttaagctctataaaattgggaaattatctaagatcattttccctaagcattgacacatagcttcatctgaggtgagatatggcagctgtttgtatctgcactgtgtctgtctacaaaaagtgaaaaatacagtgtttacttgaaattttaactttgtaactgcaagaattccagttcagccgggcgaggattagtattatttttaactctccgtaagattttcagtaccaccaaattgttttggattttttttctttcctcttcacataccagggttattaaaagtgtgctttctttttacattatattacagttacaaggtaaaattcctcaactgctatttatttattccagcccagtactataaagaacgtttcaccataatgaccctccagagctgggaaacctaccacaagatctaaagttctggctgtccattaacctccaactatggtctttatttcttgtggtaatatgatgtgcctttccttgcctaaatcccttcctggtgtgtatcaacattatttaatgtcttctaattcagtcatttttttataagtatgtctataaacattgaactttaaaaaacttatttatttattccactactgtagcaattgacagattaaaaaaatgtaacttcataatttcttaccataacctcaatgtcttttttaaaaaataaaattaaaaatgaaaagagactcaattgtatatagagtgtctgaattgatttaaatctcaacactttaggataaagaagtggaggcaatctctgtggttgtctgtgcaaagtgcatcttgctgtacagggctgtcgttacatcctgtgtttgggtctcttgtttgatcttctgggaaatgtaggaaccccttccccctattagaaataagaaaatctttatcttttatttttcagaattttaaaccatgttctcaaaagtagttttgttatctctacatgtcatacttaatgtggctagttttcagtaaagtcatttagtggctgtggatgtttgtgttctatagtaaataaccaagtcagcttctgacttagaacaaagtcagcattactctgtagccaattattgcctgtgaaatgactggttactcaggtttctatctaatcttaattcttgaagattcattaccct

SEQ ID NO: 13564 - DNA, 1289 bp, Homo sapiens
cagttacccgtgccttagtcttctccactctgcaccctacctcgtgggcagatgataacatgttttggatgctgtcagtgatgaatggtgagatggcagattgtcagagtcaattgattaaacctcatttatacttctagtgtcattttatatgactagtttacaaaataggacattgagtttccaagtattgagataagggaatataaatagtattatatgtatcaggaaatctctcatcttgtttttgtttcatgtattttttaaagttttcatttgtgccacaaaaatctgtcgtggaatatattttattttcattaattcagtgaagttgagacttcatagtaattttagaatgcaacttgaaggtaaaaattttactttgtcaatactgaagtctctgctgtaatccttatatatctttctccagagaacataatattgtcaaatagatacacatttttctaataggtatttagaagcacttgaaataatctctgcatgtgttacaattcagttatttctgtagtttgtaaactctaaagtgacattactattattttagagatgtctaagttgtaattttgatttttgtggaaccattgtttgttaatgttgggattctctgcacttttgaatgtgaaagcttatatccctgaattctgatacttaagagttttctatttcagacatctctgtgtggaagttgagactaagaataatcctagggatgtcatgaatttaggcaatgtttctcatttggaaaatgaaatgagaaataatttccttctttaaagcaagtatatatagtatgagaaacttggaggcatttcatacacacgtttcttaggaaaatggacacattgaaaatgtcctcttttttatattagagattctgcagctctttgctcttaagagcaaatcacaacaggattcttaatgtatgatttctttgttcatatattatgaatgtattattttatttgcttcgtaataaagtttataaggaagagcatctcatacatatcattatcgtggaacacgttgaatgtttgtgattctgtgtggcctttttggggctggaaaatgtatgaattcttcaactgtcttacaagagatctgctaataaattttattattaaataagactaagaaatatttatattttttgttgccaggataatataggaaaacgcatatatttcttagtacagttgatccttgaacaacattagggctaggggccccaactcctccttactgcatgcagtttcaaatccttgtataac

SEQ ID NO: 13565 - DNA, 1378 bp, Homo sapiens
tggcctagcaagagaatggcttttcttgctttcacatgaagttttgaacccaatgtaatgcttatttgagtatgtggggaagaacaactattctctgcagataaatccagcatcaaccattaatccagaccatctttcatactactgtttcattggtcgttttattgccatggcactatttcatggaaagcttatagatactggtttctctttaccattctacaagcatatgttaagtaaaaaacttactattaaggatttggaatctattgatactgaattttataactcccttatctggataagagataacaacattgaagaatgtggcttagaactgtacttttctgttgacatggagagttggggaaaagttacttcacatgacctgaagttgggagtttccaatattctggtgactgaggagaacaaagatgaatatattggtttaatgacagaatggcatttttctcgaggagtacaagaacagaccaaagctttccttgatggttttaatggagttgttcctcatcagtggctacagtacttcaatgaaaaagaattagaggttacgttgtgtggcacacagcaggttgacttggcagattggcagagaaatactgtttatcaacattatacaagaaacagcaagcaaatcattcggttctggcagtttgtgaaagagacagacaatgaagtaagaatgctactattgcagttcgtcactggaacctgccgtttatctctaggaggatttgctgagctcatgggaagtaatgggcctcaaaagttttgcattgaaaaagttggcaaagatacttggttaccaagaagccatacatgttttaatctcttggatctaccaccatataagagttatgaacaactaaaggaaaaacttctttttgcaatagaagagacagagggatgtggacaagaatgaatgtggcttcttattttggaggatctcttgcattcaaataccccagccaagaaaaattgcacatagtgtatataagctgttcattctgtacagtgaattttctgaacctctcaaagtatgttttccattcttccacagcaatatgcaaaacatatttcatccttttctactttatttgttgtcctttgaaatgattgaccaggaaaaagatcatccttaaattttgaagcaagtgagagactttattaaaaatacatatgtatctatataagcatatgtgatagtggctctagttttatagagttgcaagtgtattaaacatgacagctgttcattcataaagatctggatttgctttaccttgttaatattatctaggcgaaaaagtgcaaattgctccatgttcttctctcccttgtgtaacatctcctgagg

SEQ ID NO: 13566 - DNA, 2962 bp, Homo sapiens
gtgtcttgccccattcttgtgtttataaaatgtttgagtatttctgatgagtgatgcttgccttagtctcatgaattcagatcccttcatgtcctttaagtatgctcctcaatgtgtaaacaggaacaactttatgatttgaaagctttaaaggagattcttctcccacccccaactttatttgcaatgggatttttcctaggagagttatgaaaagttgaaggcttctaagggaatactgtaaacatgacccacttatatttatcacagtgaaaggcaaaattattcactcagaagtaatataaattacctctttaaaaagtaaccagaatttgtcctttttggttttatacattcacaaacatatacatttttcttgagtctcaaggtattttatatttttagtcagaaaaaataatttttcatttcagttttccataaactgttacacaaaatataaacctaacgtgtatttttcaggactgcgtgatcgtgcactttgtgtggtaagaggtttgagtagtcctatatgtcacctagggaacagacattatagcttactagcaaatgaatattcatgccttgtttttgatacctcctggcagcttccatgtcaccacttgttcatacctgcccagagctagttttagacatggcaaaatagaaatcatctgtaatttattagctaacaatgtaaaaccatcttttaaagccttcagactgtcaagacgacatgagcagctcaccatatgataaaaatacataaatttgacattccctcttccataaacctttgtttgtagatttaatgttgaacagtacttttccataaagttctagtcacttctgttggcctgagccaccagattatgatgttgccagaattcactcaatttgaataaagatgaacagtatttgttttcttgtttccatgaattatatcagtattctaaaacatcgcttcagaaagagaactgtttatttctgcaggcttcctgtccttttgtggtatggttttttggccttattttcactggcttttccttctccaaactttgaggcgtgatttcattcattgaagaatcaatacatattttgtttcaaaatgtttgaaacaaaagacatagatggtagacttttattaaaacatatatggatgtggaaagcacatatattaatgcagtcatcccttttcaggtgggaagagagcaaaccagttgattttttaattcatccttagtacacagagaatatacttttcctcaagtaatatacctgtttgaagctttaagagagatgtttttggtaactatttcattttcccaaagaagtttgctattcttgtgttaattgtgtatacctgattgttttttcctggaggtttttgttgttgttgtttagttttgggtttttttttttttaagaggggcaagtgttttctgaaatgatgcatattttaagactcgattcatattgccactgtgctatccttgaactaccaataatttttataaaatatctagtttttactacttttatataaactttactttccagatgaagagctgagcctgattcaaatggtttttctgctttatacttctttttagttcattggtttttatagtagaggttttctattttttttttttttttttttactacatttatatgtctgatacatatacggctttggagacaatcaagtaacaactgaaaatgtgaaagtaaccatatctgacaaaattcccttgaatttttatcctttgcttgcaacatttaagactcaaagtcactggtatattggattaagttttttcctgttaatgcaattatagaaatacatcggagacacaacaaatgtggccattacaggtttcataaaattacactgacttggctgttacttgatcttaggaaacagcacagtttaagatattgtgaattctgacttatactttattaaatgctgtaaatctaaatagatcctgttggatgtgatgggtctagtccagtttatttaagttcatgtttcactgtttgcactttgcattgaacaatgggtttattcgctgatgtaaacggttcgagtgaagaattaatgcagtaagtatgacaacacatacacacttgcctctccccatctccagaagaggggagcagagtccgagcttatctaaatatgaatgtggccacaaagctgtggaaggtgacaaagcttaaacacctttgccctggctctgcattgtcacctagagagcaagaggtctatagaaacatcatgtcacatgaaacgattctctgctttttggttctgaacttgaagtccctaaactgcaaaatctaagagttgggtggttattaaaatgcttttaaagtcaactgtggcaccaattctaatgtaatccaacttgtgactgtttttttttgttttgttttgtttttgtgtgtgtgtgtgtggcactgggaaaagtggaaacaaacatgtattgaaatacatattggaaataaaaatggtttgagcgtcagtgatattctcccagaatgtacttatcttacctcggcatgtactgtagtcactcagtatttgtatatgttgctagaatttagattgtaaaatagtgaaattttaatgtgttcatttgtttttaatgtatatatgtcttgctcagattatttggtttaaataaaacaaccttgaggtttgtagcttttccttatactataaaatgccagattcttctattttaacctcactaatttatggccaatattgtgcttccagcaacatttgaaaatgacactgttagtttactttgactttttctatgaccagcgccatcctttttttaaaaaaataatttcaacttttattttagattctaagggtacatgtgcagagtgcaggttgttacatgggtatattgtgtgatactgaggtttgtggtatgaatgatcccat

SEQ ID NO: 13567 - DNA, 1253 bp, Homo sapiens
tctcagccccaaactgatagcatacttttaccccaaagctaacagttttgtagcttgttttgcatctttttccctctgataggcaaatatgtttcctaacatttaacactaccatttgtttctttctcacatatccatactcaagttttgcatttattttcattcttttgacttgctggttcccatgaaatatgttagtattatttcctccttttctttagctatattctgaagaatagaggaaagaggattagggcttctactccttgtatgcccttgcctggtacactacttgcctggttacattactaatgtgttactcctgaaacatcagtctcttgacccagctatgactcagctttccaagtgaggtcatagttatgtgaccactgtcttcaggaaccaatattaatagccctcatttgttgagcttttagatcatacctaccaccatacttagtgctctacaagcatttcatcatttaatcttcacaacacattttgatgtgatatgatccattcttttcagataaagacatttagaaggctaaagtggcttgaccaaggtcacaccgctactaaagtaatgatacagggatttaaagcaatgtttacatatatagccttctacatatatagtcttacatatatagccttcttctacataaatagtcttgtcttctcctaatagtttgttcagaatctctcagaggtatgtttggtaaaggagtgttcagatttaactgagaagtttctgtttattttctagactgaatcttgaactgggaaagccaagactcatcctcttttttgtggatttgtggatttactgacagttttctggaaggtggcagcaacgtatcttgttctagtaaaattagaatatcatcaccatttcacttcaaacgaaagtcaagggttttgagggagcaggacctttaactgatacaagagtaccctgggtggtgtattgcaaactccaaccagctgttggcattgtgcgccattggccacataagtagatgagtagacttttatttccttccctctttcaaccaaaattctttctgagatgtaatttttattctcttggtttctgaaattttcttcatttgtgaaattctcttggtttcatttgtgaaaatagtagagttatgatcactgtgcctcaaaattggatgagagagttttacttcctaaccttgttctgtccaattacttttgtgactttcttttcattttttaatcaggaa

SEQ ID NO: 13568 - DNA, 1192 bp, Homo sapiens
catctgtgcttggcccaggggtgcatactagggtaaagaaaaattttgtaatagcaacagtggtttgggattttcagggtaccaaaaaaaaaaaaaggaaagttgctttttgtgtatgccaaataatgatactttactcttcatgaagtgctgacctagtacctagtgagtttacaagggaaaaaaacctgcttagttgtcagtttaacacagcctaatgtgttgttatctgtgactgtcataaccctagaacgataaccttcaggagtgtaggctgggaatcaggaaacccagcctctgatcccagctctgcctttaattagccagggtctgtgttgttgcttataaaatgagaatactgggataggttgtcccatgagatcactcaggctggaacaaggaccaaggattgtttcctttgacctctaccctgttcctcaccccctgatggatcccgtgatagcagggttaggacctgagactggatgatctttgaagtcccgggatttcccgctttagaattctgggactctctgttgtcttgtatctatggatacaaatacagtgcagttggcagtgagaagtagatcctgctttgttttcctatgtagttcctttagtcagttttacttgggcttaagttagttgaaatcatggtgtatcttggtaaggatgtgtccatgcaagaggactagaagagagtttgtaattatttacttaatttatttgcaggaaatggccaaatgtaaatagaagtctattctactcattaccttcctccagcagcccctcagccaattacttattataaaatttaaattttaaaaatcattctttattaatgttgtatattaaaaattactctacatagttaggtgctacttagacatactttttagtcttcattttcttactcatttttgttttagaattgtggatgtgactagaggatatttttgcttgtatcaagtaagtgaaaagcctcaaaaaagaaatcatttttggtcttggtcatttaatatggtatcgaggtagccaagcaaaactactccaatttagagaaagaaaataatagtaataatggtagctaacatgtattcattacttatcatatacaagcccattctaaatgccttcctttgattaactcatttattttgcagaggaaggaactgaagcttgaagccttttt

SEQ ID NO: 13569 - DNA, 1372 bp, Homo sapiens
attcactcactgtttctattcttcttaaaaagagtgaaatctttttaatggaatggttgaagattcctgccaactcaaaatacagtacagctagtaaaatgttgaaacatcagtttctaaatcacctttgctccattagctaattttttggacactaaatgcttcaaagataagaaacttcatcctaatgatttctaaagagcagttaaaagcattaaaataagtaggtaggctgttaagattaaaattaacattttggggacagaattgtgtctgtaaaaatgtcattggttttattacaagcggattattttattcatattttaaaacaaatgtttaagccacattgatttatcctcattgaggattatggtctgtgaccacagtaatatccacttatataaatgccaaataatcagagagcttataaagtacaattgtttttgtcatcattttctgaatttctttctcttcttttggttttgtcctctcattgaagttccagtggtttgaaattagttttggacacattgtcttaatgtactgaaaattgctctgctgtattttgcagcgttcttcatttaatttataatggtccatattagacacatttggtaagagaagtccaggaacacatttagggccatggaatagtattttgtaaaatccatttgggaagttgcaatacccacaatctgacatgtcctaaaatgtaagggattatctctaaggggttgatgggagaaatatttagatgtaccctgttaacagccagtcattttgatttacttatggaaatcaagtgaataaaaggcaacataatttgggaaattttattctaatatctaataaaaacagtttgagtggttgaagacatctgcatgaaattgcacctaggtgcattacttgatataactctcccctaaaactgttgtaattgcattttttcccttttcttggcacccctttagaaatgtactgaagtctcatttttcacccatttcagccatgggacatttttcataatattaatgtaaagatgtttgtgttactgtttataaattacaattgtaaataaattactagtttgcccaaaactttgttcttaaagacactgtctctctctttcttttccctatttgcaaatctcttaaggtcacaaaattagagaattgaaggcatgtagtaagttacctactaccatgaactacacagttacaggattatttatgactattaaatgaaaatacatttcattgactgttctaggcacttgtgtagatcatcctcccttcactggcccactgaccacagagctgggaatcactctggggtggccacctctcatgggctcttgtgattgcaaaggttg

SEQ ID NO: 13570 - DNA, 2851 bp, Homo sapiens
tgtaatagtagttgacattcattgagtgctttcaatgtggtaggtactcttgtttattttaaaagaagcattttactagaatcatagtagaaacttagtggtcagacttcatgtagcatcacttacaaccttcattgaatattgtgaagaaacttagtggtcagacttcatgtaccatcacttacaaccttcattgaatattgtgaagtgcttgttgaatctgagacttaaaaattttgttcttttagaggaaacatggagaaagccattgacatgttcaacaaagctattaacctggccaaatcggaaatggagatggcccatctgtattcactttgcgatgccgcccatgcccagacagaagttgcaaagaaatacggattaaaaccaccaacattataaaacagggggaaagcagactgaccctctttttaaaagtttaccccctcttcaactgaaccctaaagacactgtcatgaactgtgttgaatggtggaaatcagtatttctgtttgtggtgttgttatttgttacatctgtttcatgtctaggtgttgtgggtgtggctgttgaaggaagtttgcagtcttgcagcttttattccctgtgcaacaaaagattagaacatgttaaagggatttttaaataaagttgcaaagagtacaaatgataattggccatgcaaataaaaactgatttgttgattttttttttaaggggggttggcagttgattatgttctggatgattccgtctatatatgtgtgaataatgtaagtattttacagcatgttgatttttaaattaacgtagtaaatgctgtaaaatagatttatattcagttaaccgctttcagttgattttttgaaagaaacaaaggttaaatgggggattaaagtaaaattgagagaccctttaaaccattgtcagcatgcacaatgcctctgattctgcagttttagaaacttggtggcacttattaatcctcttggcccctttccactctaatggatagtgtacattcttcttaaagtccacaacagcagattttcttgcagtaaattatgcagatgcaaaatattctaattgatatatgtgttggaagactgagtattgatgggggagtggaccagacaaagaggtaagatgaaacagtagtgtgtttataattgtctgtgactattttctataataattagtactatttaatggtgagcttttaaaaatgtaggatagagggtacagtggcactgtatatactatttatagtctcagctactagggaggctgaggcaagaggcttgagaccaggagctcgaggctgtaatgtgccatgatgattgcacctgcgaatagccactgcactccagcctgggcaatatagcaagaccccatcctttaaaaaattttagaacttttttaaaatcaaagtgcagattgcttgtatgtaaaacccaaataaaggtagagtaagtgtgatatatgggagtattaaaatagcttaaaatttctcgtgaaggacatgtggctaaagggtcaaaaaggatgtaagacttggagccagagcatagtatttcctgaaataacaagtttagtgctttaactatggctacatgtgcttaaggaattttgagccacttatttttgaagatgctgaggacatgtagagtgctttttgtagtgagctaaccttgatctctaaggactaactacccaggtccaggtcttcactaggggtactgacagtgtttaagctttactccacctccttacttagaaatcactttacgatttatttccattttccacttttatagaccatccttttgcttatatgctagatttttctggtgagggaagggttgtgttcttcaggggtcttttgttttgaaatactcaggatggggagaggtttatttaagaacgaattataattatggtttacactgttgggagtaaaggagcatttttacaccccttaagggtgcttaattctgttgaaaccaaaaagatttgtctacaaatgctatcttttttagaaactattagaaatgactccctttcaaagtcaatctttggaaaatattgaggaggtcactaattagttggtgcagttaatataattcaagatgatttggatgatgggaagtttgagaccgctgcattttgtttttaaattatgcaccttctgataacccccaaatacagaaatgttctacatctctgaatgacctctgactttaaaaaagtttttatttgcatggctgtatttacattaacactgacattttcttctactcttctcccttctttcatcttggggttgggtagagaaacacaaaggaaactgaagcatgtgccattctatactgtcattccaaattctcatggactattgcctgttgtgaaaatgtttgaaactgcactgaaagctgcatctgtctgtatctttcttttgtaaatgacctcacatgtaaattcaccaaataaatattacattcaagctcttctatctattctttaaatagaaagataggtagtttaggctgggcatggtggctcacacctgtaatcccagcactttagcaggccgaggcgggcagatcacgaggtcaggagatcgagaccatcctggctaacacggtgaaatccgtctctactaaaaatacaaaaaagtagccgggtgtggtggtgggcgcctgtggtcccagctacttgggaggctgaggcagaagaatcatttgaacccgggaggcggaggttgcagtgaacctgctgagatcacgccactgcactccagcctgggcaacagagcaagactccgtctcaaaaaaaaaaaaaaggtagttta

SEQ ID NO: 13571 - DNA, 1164 bp, Homo sapiens
atcatttatttaatttataaatgaaatatcctaggattttaaattctgattgtagaatcaatgaatttattccaaaagcatgcagaacactatgacagagccaaagaaatagcttattttaatgaacattcacattaaaaattctgtttccataaaggcagagcaatgtaaaaaaatgactttcatatgaggccttaagggtcagatagtttctgttttataggagattggaaagaaagcactgcaaatgaagctcctatttgttggatgggcttttctctcctaccaaggacaagaattttgaaggttcattttataaagttgtatggtggtgaatgccattgtttccacacaaacactcctttcccccataagacctcaaatgtttggttgtgcagggggatttaaaatcagagaacatgaagaaattaaaaatgaagcaattagttgtaggctttaacaattaacagaaaaaaaccaggggctagaaggcagtagcatatgagtttgagaaacactgctttacctcattctttctttcactgggcattagctagtcccacactcagcatagccttgattcagtcatttaacattttaaagtgcaagcttggtgcttgaataaataagcagctcctgggtagcgggaagagatggagactcaaagaggtcatctcagcatagtgtgggaggccatgctgcagcgaggggatgtgcaagcgctgtgggggcatagtgggaacagcctaaatcagactggaagttcaagatcaagagaagaatcacctccaagactagacctttgggttgtaactgctcccttgtgagtcttggagtcaaaacctcagatttctcaggccagcctttatttttacttttatttttgtgatagggtctcattctgtcacccaggatggagtgcagtggagtgatctagctcattgcaacctttgcctcccaggctcaagagattctcccacctcagcctcctgagtagttgggactacaggcacgtgccattatgcctaacttttgtatttttttgtacatatggggtttcattatgttgcccaggctggtctcaaactcctgagctcaagtgatccacatgcctcggtctcccaaagtgctgggggttatgggtgtgagccaccatgctaggcc

SEQ ID NO: 13572 - DNA, 1199 bp, Homo sapiens
atgcttgatattttgaaattatcaacctaaaagaatgtgtaggcaatttcacatcatttcaagttttaaacataaagataaaactttcatatcactttccttcagataggcctgaagggccactgtatggcgaagtatatactgtggatgtgaagaaatccttttcatttctgtgttaaaaataatggaacttttgcttaatatttgtgagatttgggcaagtggtctaacctctctaaatgaggatccctaaagaaaaaggggtaacagtgcttcattcatgggtatgttgcataaattaggttgaagactgaacataaaacacttgacacagtgcagagtacatggtaagtattcaacaaatgtgagtttttattttgtttttattggtattatgatattgtactggtatttactagtatgcacagtaatgtaggatcctcagaatcatcctcagtgatgtatccataataatcagaagacagtgtactttatggaaacaagtgatgttttgtccagattctggcaatgaaatgtcttttactttctgtgtgttcttatatttgtagatcatggggaatttcagaggtcatgccctccctggaaccttcttttttattattggtctttggtggtgtacaaagagtattctgaagtatatctgcaaaaagcaaaagcgaacctgctatcttggttccaaaacattattctatcgattggaaattttggagggaattacaatagttggcatggctttaactggtgagtggaccattctgtgttctatttttaccttttaggtgttttcattcttttaaagaattggttggagcttctgaaataattttatatcaattgttctgatctctgaaagaataaaccctatcaaaaaccattttgcaaatgatatgaaattaatcaagttattatggaaaagcttcagtaataaataatttctgataggctgtagaagactttagccttctgcactcatctttttttcttggttcctaaattggagaaagagattaggccagatgacttctaaggcctttccactgaatcttccatatgaagattcaatgaaaatgttctgtgttcttgagagttccactctagcctctccattataaaagataaaatttccagttttcccattagatttcttcatgctttattcatggcaacaggtctttgct

SEQ ID NO: 13573 - DNA, 1169 bp, Homo sapiens
tatctttaaacatgtatagagtaaggtatttttgtattattttaagaatagcgtgaaataaaatgagctttttaagttatataatttttattaaatttaataatttctattaaatttaataaatatttaagaacagcatgaaataaagtgagcttttgaagttatgatttttattaaatttaatcatttctattaaaaagtagagctcggattttcctaccaaacctttttaccagtaaggtcataggctataggtatggcatcaagaaagactgataattctgctttttttccaaaataagttattagccatagagaattctttttttttaaaaaaaaagttactccattacattgatatcttgtttttgtttttttaaaggaattgtatttatttttccttgttgcatattattagtatacttattcatgaacttctaattttaagcaaataaatgtttttatttcagttaatggccagccaagaccccttgaatcaagtcaggtgaaatatctccgtcgagaactgatagaacttcgaaataaagtgaatcgtttattggatagcttggaaccacctggagaaccaggaccttccaccaatattcctgaaaatggtaaaccctgaatccattgtattctgacttattgttcttacgtctttttggaggttttaaaaaactctttttaagtaggagaaggatggcatccccaatgtcactcttgtttcttcctctgcctctctactagtatttatgtctgtgttcctaaactttgctgttcatcagaattactaggaggtttcattataccaatttctggatctcatcatagacctactggagcgtagcacctggaaatcccatttttaaagtgttttttgggtgattctttcgcaactagtcttagacttttggatttgttacacaggtcagttttcaaatccttttgacacatgaaccctttttagtataatagataagtaatgaaccttgggaattgaaaatcatttcatgaataattacatagtgttggaagtattttcaactaaaaatcacttagattagtaatgttcattaaaaatggtatgttgtaaatttgaaacacagtttttaataataattaaagaaaaactaattttttccccattgtataatgacatgtactgt

SEQ ID NO: 13574 - DNA, 1592 bp, Homo sapiens
aatttatgtcaaagtacttctataaactacttagtctaattctcccttttcaggtaaattgtgtgtaggaaatataaacatatattggtgactccatagcagtttatgagccttttgacattattaccataccatggataaattgtcaaggtgaataaggcaggtctattgatgcaatgatgatgctttcatccttagaacaagcacacactcagttttcagacttggtttcccaaaaagatttacataaataattatacttggtttgagagatggaatgctagaagtaaaggaatggtaatttttaattaataaaaaccaagccacattttcggaaaggtttgcacatacaaagttgttttatcttatgggagacatatcctgaagactttgcatgcttcacaacatacatcattcccctttagctgccgtcttgcatctccgcatgtgtgcgcctaatctcagctggtccacccaggaccctcttagcaccaaccctagttctctgcatggccccttatctgctctgataggatgaaagaaacaatcatgaatcaggaaaaacttgccaaactgcaggcacaagtgtgcattggtgggaaaggaactgctcgtagaaggaagaaggtggttcatagaacagccacagcagatgataaaaaacttcagttctccttaaagaagttaggggtaaacaatatctttggtattgaagaggtgcatatgtttacaaaccaaggaacagtgatccactttaacaaccctaaagttcaggcatctctggcagcaaacactttcaccattacaggccatgccgagacaaagcagctgacagaaatgctacccaacatcttaaaccagcttggtgtagacagtctgaacagtttaagcagactggctgaagctttgcccaaacaatccatggatggaaaagcaccacttgctactggggaggatgatgatgatgaagttcctgatcttgtggagaattttgatgaggcttccaagaatgaggcaaactgaattgagtcaacttctgaagataaaacttgaagaagttactgggagctgctattttatattatgactactttttaagaatttttgtttatggatctgataaaatctagatctctaatatttttaagcccaagccctttggacactgcagctcttttcaggttttgcttatacacaattcattctttgcagctaataaagccgaagaagcctgagaataaactttgaaacaaaggttaataaagttctttgcctagtaaaacaaaacaaaacaaaacaaaacaaaacaaaacaaaacaaaaagcttatatcattaaggccaggcgcagtggctcacacctgtagtcccagcactttgggagaccaaggcaggtggatcacttgagtgcaggagttcaagtacggcttaggcaacatggcgaaacaccatctctacaaaaaactaataaaagtaaaatttaaaaaatacttatattatttaaatctcacttttccataagaatgcttgtaaagtggtgggcacaggttctttgggataacaatcaataattttgttacatattattatttta

SEQ ID NO: 13575 - DNA, 1497 bp, Homo sapiens
tacctctctagtatgcagaggtgtgcagcctaaatgagaaggtattcaagaccctactagtgtctgacataataaatgtcaacttcattgacgcagttcttggtataaccaaaaaagcttgagatggccatgattatgtatgactagctcttctttaacatttttcttaacattatttctcctaacattatttcaaacagctacaaagatttaaccaaagggaggagaaaaaaaaactaccaattttaccctattatttaaagcaggtagttcaaataagtagcttctctcatagacagaaattaatgttggccgggcgcggtggctgacgcctgtaatcccagcacttcgggaggccgaggcgggcggatcacgaggtcaagagattgagaccattctagccaacatggtgaaatctcgtctctactaaaaatacaaaaattgctcctccacaggaggcctacacgccgccgcttgtgctgccgccatgtcgctagtgatccctgaaaagttccagcatattttgcgagtactcaacaccaacatcgatgggcagcggaaaatagcctttgccatcactgccattaagggtgtgggccgaagatatgctcatgtggtgttgaggaaagcagacactgacctcaccaagagggcgggagaactcactgatgatgaggtggaacgtgtgatcaccgttatgcagaatccacgccagtacaagatcccagactggttcttgaacagacagaaggatgtaaaggatggaaaatatagccaggtcctagccaatggtctggacaacaagctccgtgaagacctggagcgactgaagaagattcgggcccatagagggctgcgtcacttctggggccttcgtgtccgaggccagcacaccaagaccactggccgccgtggccgcaccgtgggtgtgtccaagaagaaataagtctgtaggccttgtctgttaataaatagtttatatacctatgaaaaaaataaaaaataaaaaaaataaaaaataaaaatacaaaaattagctgggcgtggtggcccgcgcctgtagtcccagctacttgggaggctgaggcaggaaaatcacttgaatcggggagacggagtttgcagtgcgcccaggtcacgccactgcattccagcctggcgacagagctccatctcaaaaaaaaaaaaaaggaaaccattcataaaaaaaaaaaacttatacttccaacttagtagactgctcgacaggaattaaaattcagaatattctctagttaagcccctaagacaaacttgacagtgttttcaaaaaagtgactatctgccacaaaattaccaattttgcaatatccatggtatgacatattttaactatgattcctatgcacaatttcattaaaaatatctgacattcaaaaatggcttaaacttaacagcactactttcttgtaacggcaaggagacaaattatgtagaagttaagggatatttacttac

SEQ ID NO: 13576 - DNA, 1653 bp, Homo sapiens
actaggtattgcattgctatccgtggatacagacgcttagctcttaaaagattttttttttatgtaaactgttgaatatttgaaatagtccacttcaccttaatgggtcttgtctatcttcattagtcttcaaagaaaaaccatttgctaccaaagtaaatcagtattttgaatgtgcttctcttgttttttgtttattagctagttcctgtaagcatttccaccagaacttgaggcaaatcgtaaggaagctgtttcttttaaaacacaaaccaccaccaaaaatttaaatgtacatattgcttaagtatttggctgtttttattttttaaaaggtataaacaccaaaaaaaaaattaacattgtatgaagatggaaaataagaagatgcactttctgtaactttgtctaaggatttaaattactaacttatgaactccaatttgaattgaacttaactatcggctttcttactggtaaaattatatggtttattttaaatgcgtacatattgaccaatggcctctgaaaaagcacattttagatactgaaattgaaggaaagaaaatgcatcttcaaacattttttggaatctcaccacatatactttgttagatttgtgtattgtagggtgtttgttttgtatttttgtattgtatatgaactttttttaaatgtgacagttaaacacatctttaaaagcatagtcacagacaaaagcatacagtataaaaatttccttgaaaactcctacaatattatatttggaggcagcttcagactgttttattggtggtagctgcttgctgaggtcttttagttggtaataactccagagaagcagcctgtgtatattcctaacactttgttcactagcatttaagtttagaataagcccaagtaagacaatggaaatgtatatagaactcttagttcttacatgatttaattatatcgatacatgaatttaacttactttaatgtaggcaaactatcaattttttgtccattttcctgtttgttaaaataacatacctctcctacgtattattttcttgacccaaatgaaatattaacctaaggtcaagctgggagagagaaatgactgagatgaatgtctttactaaagtaccaataaatttgtcaaactcaatagtgtttttattttctattccatttaattgttgcttactggtttttgtttttaaagttgagacaaatgtcaagtgttgctcttgttcattttgttgaccaaagtaatgggggatttaaaattctgaattactagtgtctacctagctcagcacctagttctatagcattacagaatctcagactcaaaaagacttaatcctcctccagtgccaaaggattgtctgtccagttctttagaaaatcttgccaaagcttttctttgacaatcactaaatattagaaagtattcttttttttttttgagacagagtctcactctgttgcccaggctggagtgcagtggcacgatctcggctcactgcaacctctgcctcccgggttcaggcagttctcatgtctcagcctcccaagtagctgggactacaggtgcatgccaccatgcccagctaatttttgtatttttagtagagacagtgtttcaccatatggtcaggctag

SEQ ID NO: 13577 - DNA, 1183 bp, Homo sapiens
tgaatgtataaagcatttatttgtcaataaactgccttttgtaaggggttttcacataacatagaggagcttcccttttttgtttaagttttgtaacctttaatcctccatattctcatgtctgtcatcccaggggtgtcacaactgtaaaaatctacaatattagaaagcagctactacagatgtggaagagagaacacttgtataagacaatgctgtactgaagttatataacaaggtcccctgatacttatgcctgcattactttgagggatgctgaatgagaggaccatctccctgaaatatattaataattttcagataaaattatgaacataacataccttttctcaagtggaattagagttcatttcccatttaagtgattacactctatctcctaagagctgtgggaaccagttcatattgcagtggaaacattaactcttcgttgcactgttgagtgtcaaggctactgtggcaatgttttttgcaaagttctcagtaattttctctctgcaatcaaattagagttcatatttaatttgcagattctctcattcattgctccacactgctttatcaaatcaggtgaaagaaattaatgtagttttgcctattttacaaaatggtggttggttctttaaacaccatgttattactcttaataaatctacaaatatttattgagcatctatgatatgcttggtgctgttaggcactgtgtttttaaagcacaaactctcaaaagctgattccagcgtaatgttttatttttgtttttctgtgttttttatgacaaagtctgtctgatagacaaagcctggaaggtttcccccagggctttagaatttagaattagctggttttcatttcaaatgggaaattaatggagaaatgagataaaatcatctctgtgtaaatgcttgaacccacagaaagttttctaaatatggactaattgtgggtttgtgcatatttctgtgtctcctcttttcacttcacacccaccatgatataaaaagatgcatcagagagtgagcctgccttcaggacctgaaaggacatgactgaacatctagtagatctggtggaaattaatgttatacaaaagacacgtagactaagttgaccctgggagaggagttaatacattcctttgcaaagtgacatgtgccctttt

SEQ ID NO: 13578 - DNA, 1212 bp, Homo sapiens
acaaaaacagtgctagtcacaggagtactgtttcccagcctatgactctggagctgactggtggtttgttgttgttgttgcccctggccagatctctgatggtagcctatgtagcaaagttattttagggctagatggctcctttaaagctaatacagtccaacctccatctctgaatgaagaaacagaggcccatggttggttggactgctgttagtaaatttaaaagtcagtagtagaattctggtctctctgtgactgttacttccattaccccatggtctctgtgtaaaaagcaagtcatctttcccaaccgacttggcctttttctggtatccatgccttttcattgacctccttggttcttctttccgcagtcagttctaatgtaagatatgatacacctttccatctttggaaccccactatatacccttatttctacatgttctgtactttcctgggaaggggaagtagaaaagggaagaggttaatgttctttctggaatgtccatccacaatgtggtgattctattggagaggtaaacaagactcctgtaatcagaagggacagctgatggatctggataagaaattcgaaatctcgaagcttatgaatgtgcaatagatgttatttaatgctcattgtaaattcagattttgggcttctttatacttaaaggaggctttgaattttaaggctaaaatagaatcatgcatcttctttggagtgtttcttaccgaattattttttattttgctggaagcttttattgaagtttaaactaaaaaaaaaaaacttaaaatatgtaccaccactggcctatgttaagctaaatatcaaagtataaatattctaagactaagtataataactgagtaaattaatccaccattgaggtagatctatttgacctgggaatagatctgcaatctaaaaggagtatgttttctgacctttgattacttacttgaaaaggtgtttgggagcattgccaagtagttttttaaaacaactgttatcttaagcctgtctgcacacagccatctgttatgcaatattgaggtaaggccaaaccacaaatgatggtgtgatttctgctttacatactttcttttgatgtaattgaaattatttcccacttgtttaggaatgtgaagcctggaatcagcctttcttttgaaacatcttttaaagacaaggtgccatga

SEQ ID NO: 13579 - DNA, 1905 bp, Homo sapiens
atattgacttaaccacctgacattcacagtgtcttgtttcctagcaacagatgcaaagtgataaatcaaaattagtctgaggctacagattttacagggtatttgttctatagcacaaagtatttccccactcttgcgtcacagcacaaactaccaaattttaattattggattccagcaataatttttaatggttttcaaactggcggaattttgacagtgctagttcgagtttgaagcttttgaattagatctctaaatggtgacagtttacatggttttatctagctttcttatttatacttgactgaattgtaatgattttttttctaattgtaatttgacgtaatagccatacaaaaaatgactctattcatactaggtttagcttctcatggttgtagatattacttcagttccggtgctggaaaatatgtacaacatactaacaggattgaaaaaaaaatagaggtttttcttcttgtttttttttccaaagcaggtaaagagggtagcaaagcatcggaatgatgtgctcaaaaatgcatattcctggtggggatggaggaagaaggcattagtaaaaggttaatcaaacgttacaacttaaccccattcatgtaggaataaatcaagtgagcagttccagacttttgcataatatttttactatgatgctgttttattaatattttctaaatttcaaaacaaaaagtgaatgtttgaaattgctgggtcccgatgttggtggctgttggagttttggaccactcgctagcagtgatttgaagattataattagctaaaatccaaaacaaaaaaccaacaacaaaaattgtatggtgcggaacatgcaccttgacaatggtactaacttgttattctatagaacacgttagaatagatctatttttgccagagcaccctccttcagtcctccgattacatttcactagagttccttacgagattgctgtatattcctgggaccttttttaaaaaaaaaaaaagcaaaacaaaagattactttttttctatgtgattaatatcttacttgatctgcttttcctaaacctcagtggcttttcccttaggcagggttgggggtgggagggcaacttactggagatgactgttttcagatactttaaaacaaacctttttgtagaaatgcttaatttttaagcggttaggcactgagagtagcagaaatcctgcaaagctttatagttccttagactcaccttgtcgattctctgagtaaagtcttgatttcaataattgtgcttctcatgccctgaaactgctggagaggagtgttgttattttcaggtaacaacattcgttagcacaaatatttcagaccaatattagtgctctccaccccaccttttgttatcattttcatttcatttctctcattcttttttattttggaaaatcatattgctatagtgtgtactttaatctgccagcagataccatctacactaacatttgtcccacagcatcctcaagagaaaaagttgttgcaccttatatatatctcaagcaaaccaaaatatgatgctcttctgctttgttttattctaaattgttgtatcatatctttctgaaaccattctgaatttagttgaaattatcaatatttatgcttttaaccttaatttctggattcaagcctgtatataaatcttttgaaaaaaaattgtcctagcccttctctgcgatgctggaagtagaagattgcgtctcagatggagacgcagtactgttccagttttctttagccttttatttatttagttattctgggtatttcctatgtaattttgaagtgtgtagagtatattatagtaactgaagctgcagctgtaagaagctgagtgaaagaaaaaatactgt

SEQ ID NO: 13580 - DNA, 1101 bp, Homo sapiens
gttgtaattccgatagtctttttcccacaaatatcagaaatatatttatttaattctgtcagatgagctttctaccgatgccatgtcccaaagccatgttaaaataattcccacgttatcattgtgattctacttcctgccactaaaattgctggagaaacaaaataatgatggaacactatgaacaaaaaggagcatctgaactggtctggttatttagaatccaatgtgttcaaatccttttgttttcttattaagtcagatgctactgtaagtcagataaaattttgtttgcactctgcagtctttggctcaatgtatggaaatgtttgcacctatgtaaagtcacaagctaattacaaattgctacagaacaggagtaagctgaaaactgaatgccatgttttgtttataaggtggggaggggagggaaaataccaaaaaactctgttccaagtttggcatttgacattaatgtgaagcagtgggaccatgctgcctgctaaactactgtatgaatcgtaaatgttctgaagacgagcagctggaggctggaggatggcattccatacagcaaaggagaagcacccaccacttcatctgggaaaaggaaggaaattgcaggaggcctggagccatcatttgtaaaggggatgttgcggggtgtgatgctgttgaggagattcaccttcaattgcactgctccacagagccctcatataaggccaatcctaatgggctacctcggctttaaaagttaatttcagtaagtcctgtttcaaaagtttgtctttttttgcttctaccttcagtgccactattttccactgcagtgttttgacttcacaaactgcctcctccagagagaacaatgtattgctgaaaatgggcagtagaagcaaatgctgttgttacatttgacctataaagtattcagagtgactgctaggtagaaattaaaacttagctttcccaaatagctccttattttgcaccttataaaaagtatactaattgttaattagatgttgcttttgtttatacaagcattcccaaagaactagatttggattttgttttgagtttttggatttttaaaaa

SEQ ID NO: 13581 - DNA, 1262 bp, Homo sapiens
agtactctatatctgaaatgacatttatttctcccagaaactctatgggcatagacactgttgttattcccgttttgtagataagaaacaggcacagatagattaggcaatttgcccgcaatcacccagccgtttcctgatagtactgggatttgaactagtactgtttaccactgcactgtactgcctccccgttttgcatttattttgaggattttatttccatgaagggtgaacctatatctaagcacataatactgagtagctaaaacttattaggagagcagaatgttgacctgatttgtttacttattctgcaaatacctagtgacagggtgcctactgattgctggacaccaagctacatgcctgaaatgtgggtgtgatgtgcatattgccctggttttgtagcacccacatttaagccagggagacacgaatgtatgtgcatcccatgccttgtcacatctttgagatagtcatggatccaaatctaacttttctgttagtgcctctgttgatggcctgagcattccaccaaatagaaatagaaagcacctctattctccacctgcttagatgtatattttttagaatccagtatggtaaatcttctaaagcattcataataactcagacccatgacttttattttatagatttctagttctgcttaacttttcctgattaccatttatggtctgtacttggctacaggggatttctctcagtggtttttccagctctgcatgtgagtctttgtggtccaagacaaacctggacctttaccaggctaaactttcagtaaagacagcaggttatgccctcatttgctcactctgaggagaaagagtttctttataccagagctgtatcttgaaagatgtctcaggatgccattggtcctactgaggaagaagcctgagaagactcttaaactcccagagcccagccagcacttggtgagccctggaccacgtttcaaagataaaggcctcttacagggaaatgttcctaaataccttcacctttagcttagctttaacttaggaacttttaagcagaatctctatgcttagcaaacagctcagagattgctagaatcaaacaccaaggcttaactgatagtattgaatttcagacgctttgtttgtgttctgaaaactacaccaactcacagtttgccactctactgacaattaagttcctggctgattttcaggattcttctttctcactctgatatcattttaagtgctgtc

SEQ ID NO: 13582 - DNA, 1134 bp, Homo sapiens
gcacaattagaaggtcgtttggaagagaaagagtccttggtgaaacttcagcaagaggaattgaacaaacactcccacatgatagcaatgatccacagtttaagtggtggaaaaataaatccagaaactgtgaatctcagtatatagacattatggcattttggaatttgtaatctcatgatatttttgatgtatttatctattggagggggggtgggtaggggagttaatttgtgacttcgtaacaataagaagttattatctaatttagtaaagaccctgatctgttgcatgttttttatttgatagtttgaatagaaatttaattttctaagttttactttttgtttctggcttttatggcttaaggttttctttggttcttacattagaaaatcatttttaacctccattatcatttttctaaggttctttcctttttcttagttgctttctattctgttttgcctgtcttatttattctcatttgtgattatttagatcttaagaccaaactttcttggtataacagtcctaaagattacaaaataaaaatatagagagagtaaaagtaaaaagtaaagtaaaaagagagaaggtatgattttactgctagagaagtttgtctctgaagaagcacaaaagaaaatattagtgaatttaaaataatttttatactgctgtagcataatttctaaatttgaaaaaaatgcaatggtaataaaatgtataaaaattagaaaactgtcattgtgttaaactattacatttaaatgattacatttaacacaatagctgtctcataaaaaatctaagaacttgtagaattatttgtaaggtatatttagtgtttttttctcttttttcaaatgttgcatagtggtccagatcatctataattaattataagtttcttatgatttacataaggataatttggattctactcttgctgcatattcagaaaaatattatttactgttaattctgatatgaattgtatttaatttgttgtcctaatagtttttaattggttcatttaattttaaagcataggttaaatatctttattttttttaaaatacaagggtccttctgtacttttcatttgaatcatatcctctaactactctg

SEQ ID NO: 13583 - DNA, 1149 bp, Homo sapiens
gccatgttgttgctaaaggtcatttacttgaacaaaaccttggatgactgaaagacttctgtggtgattagtctttgttattacttttgcttgggaacatgttgtttttgtttaggttttttgacaggcagaaagcagcatgctaattgagcactggctgtggcaaagcactgtactatccttcattcttttggaatagtttttatcctacaggagcttaggatacaatgtgagagaccaaatagaaaatgagcattaatgtggaatgtcttgacttctcaaaatttattttcagatgaaatgcctatcttcaagcttgattataattatttctatcatctgcttcatataattattatttctggtactgacattgttcgacaaatatttgatgaggctatgccacctcctcttttgaaaaaagagcttcttatacacaagaatgtgctggaatcctactacaaccatctttggaccaatcatcctttgggtggatcatggcatctgctttatcctcctaacaaggagttaccgcaatccaaacagtttgacttatgcctcctgttagctcttataaaacatttaaatgtgttccctgcacccaaaaaaggatggaatatggaaccgccatcttctgacatctctaaatctgcagacatcctgagactgtgcaaatacagggatatcctccttagtgagattttgatgaatggtctcactgagtcacagttcaattcaatttggaaaaaagtttcagatattcttctgcgccttgggatgatgcaagaggatattgacaaagtgaaggagaatcccattgagaatatctcccttgattaccatcagctatctgtctacctaggcataccagtaccagaaatcatacagaggatgttatcctgctatcaacaaggtactaaatgattatttacttcagccaataaacttccattgattgaatgtctgctctgtgccaggcacagtgcaaagggcaagagattcagtgagctcatggttttgggaaaatggactcatcaggaaggtaatagaaattatagtgctagagatgtttccagaataccatgggaaatcctaggctaaagaagtccaaaaaagctttctggagagtatcatagttaaagaactatt

SEQ ID NO: 13584 - DNA, 2406 bp, Homo sapiens
agcaacagcaccacttgaaattgacatgctataaataccacatagtgtcctttgtccataattaatgacagccccctttcataaagcataagatttatcagtctcttcaggcttctatatttgcttttgaaagatactcaggcttgagttttgatgttagaaaaatgtgaggcatggtggctcacacctgtaatcccagcactttaggaggctgaggtgggtggatcatgaggtcaggagatcgagaccatcctggctaacactgtgaaaccccatctctactaaaaatacagaaacaaaattagccgggcgtggtggcgggtgcctgtagtcccagctactcaggaggctgaggcaggagaatggtgtgaacccaggaggtggtgcttgcagtgagccgagatcgggcccctgcactccagcctgggtgatagagtgagactccatctcaaaaaaagaaaaagaaaaatatgaggttggcatgtcttttgttgattcttggcatttatatagattaaattctggtgttactgccacacagttgctattggtatataattaatgatccaagtcctctgttgcagagatgtaatttgacacaggaaaaggtagtcatagtaaagaaaggcttttcagggaagtaaataatagccagttcagtcaagccatgtttgtaagacatcatttcaaagatatgatatgtggtacctggtacagaattatattttgtatttgctctaatatgaagatacatccacaaaatgcctaatcccaaaagttttctaggaaagatccttagccattgactttcccctttgaagtttataaggttctgacaatttaggaaatacatgtttaacaaaacttatcctactctttgccattgcccacaagtagaaagcatataattcattcaggtcattttttatgactatagttagtgggcctattatatatagtgcttattattaatcctctctcatctgacctggccctccattatttatatacgtaaaaatgatttgtttttggagagtcagcattcaagcaagtgacttaacagatagttcatagccgaaaattactgtcattatcgccaaagaaaacaatctgagaagtgtattcatgatctagggattttaactgcaaacaccataagcatttcataccaggtactagtgacttttgtatcattagttatgactttttctggattataaatgagaacagtatatagtaaaccaaagaatatagcaagtttctccaatttccttgtcaggaaggattgctagtcatcttgaaaattgaggttgaaggaagcatttctagtagaataaactggctaaaaggtattgtgcagttaccacctattttgtttagcaaaccacagggaaggtgccatggttgcagcaattggtttgacgatccacagcgtaaggctttaaagatccaccagaagacatgttggttggtaaccctgatgcatagagtgacaactgcctctgctaggctacatctgagagactgacataaatctttttgctccttagtgcattagaccatggttgatgcaacaggggacatgtccaacgtgcagactccacgttttgctaccagaagaattccctggtcaccccagccggcagttgcccaagatctgatacaaggtcggggtgtctatgcaaaggaagctcagttttcttttattatgagctgcttgtttgagtggtgtaaaactatgtgctcttcaatatagtgctaaagaagccagctaattttatcaaagcagcagccaaagaagtcaggacaaatcttcaggacttgtgaaatgaactgaaagagcttgaagcagatggaattttaatagttacactatatatgctcttagtaggtttttttcttgtagtggaaacataactgttagcatatttcttaggatgttttttcttgtctttttaaattcttatttcactcatcctttactctcccctcaagtattctacactttaatttcctgaaataaatttaaggaaaagggaaatagtaaagaagtaggaatgggtgcagcacaccagcatggcacatgaatacacatgtaactaacctgcacattgtgcacatgtaccctaaaacttaaagtataataataataaaagaaaaaaaaaagaaagtaaaaaaaaaaaaagaagtggatattcacggagagctatgaggggataaaagggtatgatctaatggtaagaaactggaagaaacatagcaagtcatttgttcagattcttctctgtgtccctgtgtctccagagataaggatgtccttttcctccaggtatacagtgggtacctctagaatgagggtcttatgacctgcttccagggaaggtcagagaatccttcctaggtttt

SEQ ID NO: 13585 - DNA, 1157 bp, Homo sapiens
agagaaaataaaaaataatagtaactcattttctttttcctagaaaaatggggctacttggttacagtatgttttaatttgttgctttttaagtatatccattgtagatttttgccatatggttaccatgaggcttacaaaaaatattgtatagttgtttaacaggtttaaaaagtctctttcatcaagtgaaagacaagtagtatatgactactgttaaaaataaattatcaccaattccatttaattgtcactacctaaaaactttgaaaaaaatatgtgactggaataaatataaattcttctaattaagaatttgtttcatgtaactacagtggtggcagttttcggcattacacgcatgttcttgttctcatttgttgtatatgaacatttcactcatttttgtatattagtgtttctgaaattattaatacctaacatgatttctactttgaaatgacaaacctcagcttgctcaatgtgccgatggaagatgtgaatctaagttctggacacatagccagagtttctgtgagtggcagttgtaaagttgcttcttcgccagcgtcttctcaaagcacacctgtcaaggaaacagtgagaaaactgaagtctaagttaaggtaaagatatttactcacatatttccacatgctttgtttaactttctaagcagtgacaactcctgttgttttccctactgagttttaatgatactgaataaattcagtagagtgacattatgacttgtctcctaactatgctgatttagatatactatgggttaaatatcccttgtaatagaactggtaactgcctgttgttacatagtctggcagtatggtggacattagtcttctcttgaatgtaataaataatttttactgaattttctttcttttttccccaacaaaggctcttatgacattgtatggccttttaaaaactctgggttttttttggtttgttttagtcttggatactgaacttattgagggaaattgagttttacttgttttgttctgtgtagaatgttaacatttgtggacatggtatttgaggaatttaaatgtctgggtctcatttctcaaaggatggagacaaggagaggaaaaagttcatgattcagggtttttccaaatagagactgataa

SEQ ID NO: 13586 - DNA, 1164 bp, Homo sapiens
atctcttagcaaatacatctttcattggctgcagtagcagctagcaaggggcaggaagcaggatgtgaatgtgggtagggatgacgaccagccttgtttgcagcggggagccaaaggcaagcgaacctctattgggggaaagtcagaatgcacagtatgttctcaattgctgggctttttattcctcaaaatcagatttcttgacccagcacaactttgcagctatttatgaatcaaattcttaatgagccattgtggcattatacattattaaagttgtttctaagcttctgatttaaaaactttttagtagtaataagaaatacctattataatgaggttatgagagaagtggtgattaattataaataggctatctaccaaaaaataaaaacatgttctttgttatttaaggaaaataccaaaacccagaaaatcaggcttttgggcgatgacttgaagcatgaatctctttcatcctttgagctttcagcgagccgtagaggacagaaaagaaacatagaagagacagactctgatgtagagtatatttcagaaacaaaaattatgaaaaagtctatggaggagaaaatgaactctcaacagcagagaattccagtagctctgccagaaaatgtcaaactagctgagagatcccaggtattattattgtttcttattcacaaaacaattcactcattctggaaatagcattcagtcaaggttttgcttcattttcacattttaagacactttaattataaaatatacattgcaatctgtgtttcctggacaaggtcccaatttctaatttttttttctgtattctctgttttgaaagagaagtcagattgctaatattaccactgtctggagagctcaaccaactgaagggtgcctgaagaatgcccaggtgggaaaaggcttttaaatttgtatttaagggagaaatattcatataggataaacctttaatctttaagttttgcattcaatgctttataggaaaaatgcttaactaaatcatacatattgttaccctgtaatcaaggttctgaaaaaactgggatataatgttaatgtattactaagtgttgagagtcatgttaacaaatgcacaactctagaattttcatgtgtccaaatgagtttacttctttgaaa

SEQ ID NO: 13587 - DNA, 1189 bp, Homo sapiens
agtgcaagtttttggaagaaaactttttgataaaacactgtgattgatgtgactttatttttaatttaaacgatgaggtggccagaagaaagatgggtctaaaatttctccccatgaaagatgtaaaactatggctttttttaaaatcaaaatttcatcttttaaaataatggtttgaaatactgtatggatctgaacagaataatcacatttaggattctatataaatctcaactggagtataatctgaaggaaattagcagtgtattttaagaaatatatttcaaaaatataaatactgattatgaacttccttttacattgtggttatttgtgcgattaggtttttttgtttgtttcttttgtgtttgtttggcgggagagggtgacctggaaagccacaagtgagtatttgacatattctgtatccttaatccaatcatttggcaaactaaaaggtttctgtgttgtaagaatctgatactagtgcttaagactttgggaagcattgcactgttgtttattagaactttatgtatatttactgtacatagagacttgtttgaaaacatgaatagtcattaaataaagacattgttaaattagtttttgaataccagtgatattcataactacttgacaggtatatatgaaaattctactatcgtgaaaaaaaatgaatatttgtactatttttggccatatttatatttatttctttcatatggtttgaactgttttagcattttgtaaattcacttgagagttttctttcatactggttaaaatatttcaatgatataatgaagatgaatgcaactcttatttttctgccattttttattaaaatacattgaaactaaagtaggctcggggttaactttaaaagtgatatttgagaagtgctttagagttgaaagatttagtattttaccacgtgcctagtagggttctatttgctaactctaatattgaggaaactattaaggttttcagtagtaagtgttgcttctaatagccatatacaggaaagttttataagataacccacggctaaatattttgcattaaggagctgtaggagtacagtgtataagtacagaaattgagagaaatgtagtcattttatatgtgaaaacatctgatttgagtttttgataaatactgctaaaacacagtatatgaacaa

SEQ ID NO: 13588 - DNA, 1229 bp, Homo sapiens
cagaaggaaaggtcaagacaagaggatatttttggcagagtttcttttcagttttatcaggcatatgttcaaatgccagttcattttgctgtgtccgttccccagttccccagagctgagtcgaggtttcttttgtttggttggcttaattctctgtatgtctcatatgttcatttcaagcttgagccttgcttaagagacttctgaggtttataaccctgttcttctccagtttaccttaactgatagcaactccaaattttaaaatgtgaaactgatcccagtccccattagtcacaattttgtatttaggagctactactattcttattcagggtattgtaagcgacaaatgactggaaaatataagttgttgaactttaccttgccattcaatagtttttggcataatgaatcagggacactaaactgtagtgaattctattcttgcctgtttttaccagtgctagaaaaatgcaaacagctgctctgctaatgtaagcaatgtttgaatttttagaatggactaaatagcaggagttttgactatgaagatgagaatccagttggggaagatggcattcagcagatgtaccccctttacaatcaaatgtgctaccaagaccggagccctggcaaacatcatcaaaataacgaccctaagagagtctacatcgacccacgagaacattatgtgtgatttttctctttttccaatgggcgttctaacaaatgtttattcttagattggggagagaagctaaggccaatagttattttactgtctctcatataagaacagtcccactctaagggtattggaagtcttaatgaatgacgtaaagccaatagcaaatttcttttcttcattaagcgtttcttaaccaccagctgtgtttgtgaacttgactatagctttgtgtgtttctgtgatgatggtatttaactgctaacatttggcctacaatggcattttcatttaacagtacagcatctgcctgtgataactgcagtgattctccagaaagaaaggccccagctgatactattaacctcgttgggtctcaggcatgctagcctgttcatctgtaattcacacaggcataaaaatgagttcagaatctatttcactaattatttagctgggatttggatttccctgacatgcttaatacaattacaatacctgtgtacaaacagaggcctgaggaaagaggcaaaatttgctt

SEQ ID NO: 13589 - DNA, 1163 bp, Homo sapiens
acgtagtagagtattctggaattaaatgcagttttatggcgtggcgggactttccatctctcgttttgagaatcttgccatgagaaagtgcttcccaatgagacattactacctcccagctaggaggcttagcacaatgctaaaggtggagcaacagaagaaattcagatggaaatgaaactacttcttcctgggaagtaaaagagctacatgaaaccagtccatcctgcagatttagttcatgccacagttgaagtttgtgtgatgtttcttagtagctaatttcaaatttttactgttagattctaagaaacagagtgggctaatgattggagcacagccatgagactccgctccgttagctgagcatgtgatcctgtgctaaatctttcttggttccttcatctttgaagatgctgtctgctactttagtgctgactgatttgcaaatcttggttgattagctccccaatcataaggtccctaatgattagattaaatgccttatactcagggggtgtgcagatatgctattcttccttctgtggcttgggtggaaaagctgcttgggcttatttcccaacagtgtgatgtaggatggcagaacttatctaggaatggcacctttgatgatccatataatgaaatgtgtagagctcaaagaaatctgccaacatgtatgtggactcttgagaggtgggctttcccagtacatgctaaacagacttgttatgccaagaggaagtgaatagaaatgatagcatcaaatatccaaactgacaggaagtttcttttgcatagcatagaacatggttgtcttctgagttccactaatgttccaggatatcttggccctctgcctctggctgctccctggtgtttggcaccatagcgttgtcacttacaaccattgccttgggacacacagagtgaactgtttgagtgataagtaatttaggtagaaactttacccttaatttcaaatgataccaaacagctcattactaccccaagggacgctctccgtagcttctggattccccagtttccttctagaaacaaggactccaatagcactataaccctaaacaggccctaacccagaagaatacaccacaaaatgcgattgattttctcaaaatatcacagtcttagacactata

SEQ ID NO: 13590 - DNA, 1222 bp, Homo sapiens
gaggctgaggtgggacgatggcttgagcctgaggagtcgaggaagtccaggctgccgtaagctaggattgcaccactgcactctagcctgagtgacaaggtgagaccctgtctcaaaaaaaaaaaaaaaaaaaaaagaaagaaaataagggatgtgaaacttgtcaaacaaaaaataaatttaaaaacaaagccaaaaatctcacaagagagggctgaaactattgcgggtaaatctgaatgttgattgatactgtttagaatacatgataaagcagtaacaagaaaatgtttttcgattagtctctgtcttttgttgtcttgaaattcctaccgcattgtgtattttggaagaatcaagattggactttgctcaaagaagttactgatgttggcatgattttaaaactggagatctcatgcacagacttacttagtactttgagtctgttcttgttttttctattaaatggaaatagtatttaacatcaattcattgagataagaaagttaagatcgaaaatatatatggttttccaaagactgagtttacaaaccatagtttactttttgtgtactttgtttagcttgtagacaaaagacgtcactctcattccttaatcgaccagaccttccaaacctggcttataagaagctaaaaggcaaaagtccaggaattatcttcatccctggctatctttcttatatgaatggtacaaaagcgttggcgattgaggagttttgcaaatctctaggtcacgcctgcataaggtaggaacaacacattactgagaaaatattgctactgttagcattacagtggagaattacttctgttctaatcagttgaagtaaatgccagcatttttatacattattttaatggtctgtaaacttgcatcttgtgatttagggtaattttaaaagcaacctttaaaagaccttttttaaaggcctttgtgccacgctgacaaccctggcagaaaaggacatcttaagggaaatattggtaactaagctctttagaggcaataatgtatgtgacaacaaacagatatactagttggctttcatacagtctcttatattatcattttccactggggacttaaggactttatttgatcactgtttatctaaaagtaatacatgtatttaaaagtatcataatgcaaatttctgctgagttttctcttccctctcctgtaatctgaatatgtata

SEQ ID NO: 13591 - DNA, 1178 bp, Homo sapiens
gaaattaatctttatatattatttcttgcagaaacattcattattttattaatattgccctaagtacaactaggcaagtgattgccacctaaatcagaagacgttctaaagtcagtaagaaagtgtgaaatgctagtataaaggttattttttttctttcctaaataactaaagtgaggtgtagattgagccttgatattatttagttaatgttttttattaattaattttggctggactttatttagcttgattaggttattatctgtcaaaccttttaagttgacaacatgactcatatatatacatgtgtataagatgagcatgtgtcgaagacttattcgactcattaatgaggaaaccagcagatagtaaacctggttcaaagtacaattcaagaaactgagtatttatgggcattgaagaaaaaatgttgagataaaattgctgtgcagaaaaaagtgttaatgaagccgacctgactacttaaccttagagacctgctttacaaggttggcccttgattggcatctgggaacttggagttcagggggcttccaccattcccagaactgatcaaagtagcttactatatctaaactgtaaaacaatatagtttctcctgaacacctgctttccttctgggagtctggaattttggtatgtgccaggcagagactacctttgtgaccagctcccagtaaaaaccccaggcactcagtctctaacaagcttttctggttgacagtgtttcacaagtgctgttacaactggttgctgggagaattaagctcatcctctgtgattccactggcggaggattcttggaagcttgcacttagtttcccctgacttcaccccatgtgtcttttttcctttgctgattttgttttgtatcctttcactgtaataaatcatggccgtgagcagaactgtatgtggagtcttatgagtcttcctagcaaatcttcaaatttgggggtggtggtgagggcctctccacagatacaaaactggtttatgtcctacggggcaattaaactacaatccatgggttatcttttatactggacaaaaattacaaacagcaaagataaatcatctatgagtgccacagtctctggtgctggagtgggttgatagaagatggcactggctattcaaggacttactttgcc

SEQ ID NO: 13592 - DNA, 1212 bp, Homo sapiens
atcataattactaagttcctagagaagtgatttctttcaaaaaagtaataaagtaagacatcctaatgcctgtgtattcctctgaagaaaaggaagtgtagctggatttattttagtagtctagacaatatcttcagaaagtctttctttatccaaattttgcagagttgccaaataaagtgtcttattgtcattctatatttcctcctataacagtgatcatctagttctacactgattgtacggtaaatggcttttaggtttttcttgcttttttcctcctataatcttttttaaggtataaagtacgtgattagttacacacacacattcggcatattcttatgtgcttgttttcctagccagtctgctgtaatagctttctttcattttctaattccctctactttcttctcaacgacgcagtctctgccaatatctaagataccctttcttcaaaatcacccccactttgtctcaccatatctggccatggtaaacctttccaccaaccctaatgttcactatccctgtgtatgtgcgtgcacgaacgcacacacacccctttcattgagttggaacccttccatgagacttcactaggtcttttcttgctcctcacttcataaaatgattctctggctccatcgctaatgattcttcccattacttaaccctcccatccttactcctgccccgcctcaccaaataaatcagccaaatgatcacttctaagtagagtgatctccttccttttgtgagaggacaatggaggaaatgtattcttgacattcccaatctgtaattctaaaatcattttcctgtagacaaataaactgactgggaacttaaaatcaccatttataaaaatctttcctttgataatatttgttctaagatccaaacaattgacttaactttaaaaattgcctatcttgccgggcacagtggctcatgcctgtaatcccagcactttggggaggccgaggctggccaatcacctgaggttgggagttcgagaccagcctgaccaacatggagaaaccccatttccactaaaaatacaaaattagccaggcgcggtggtgcattcctgtaattccagctaatcgggaggctgaggcaagagaatcgcttgaacccaggaggtggaggttgcggtgagctgagattgcaccattgcactccagcctggacaacaagagtgaaact

SEQ ID NO: 13593 - DNA, 1804 bp, Homo sapiens
aatatttcagtgtgccatatagctctgtcccttggtttggttggccttgttttttcctgtgaagaatgaaagggcaaaggtgataccaaaatgaaacagctttggagtgatatctttaggagcctggaagccatttttgtaattttgttgtctatataaatgctacctttgcctggaggtagtgcgcctgtggctgtgtacatccagagggcaacagtaatagccaacaaccagacaaactagtgaagttaatctgtgagtgatgattttatgatacttatatgcaaattaaaggcagaagttagtttcttctcaagatgcctttttggctgaacattaccatttttctttccccagggtttgaaagaaaagggccttttttggatttaactatattctgtctgcattctattcttcatgcgtaggtttctactagaacctgtggaggggggacaccaaatttagattgagtcagtccatgctgataagaagcgtgaggaccttgttggacacagagcttctagatctttccacctgtagcctctaccctgttcctgcactttacctgaaactgtgcctctggtctttagaccagctgttggaacatatcactcacccactcctctgttatagcaaagggccagctgggatggtacacgctgtgtaatcagacaccttctcgacaagtacagctgatgtttctcactgttgccttaccattctctgagccatctttgatgttgatttgtaaaaaaaaacaaaaaacaaaaaaaaaacctagtagcaaaactcctgttaaactcagagcttgtatgtggtggtcattcaacatccttatttctagatttacacaaactgtaccaactgtaatctttttctggcacgcgtatgtggtcagatgcttcataaacgtgagccaacttgggttgtaaacattggacataatatacaaattggggaattttggatgactgcataatcctgtcattagagatttcataagacagaagataactgtttatttgtaatttaacacatttttagaaaagatgatctttaatttctttccctcagttgtgtatacagctatacaccatactaacaccgtactatgtcataggaacttaaagttagatgtatctaaatcccttcacttttctaagacttctctgtgctcccacccctgaagtcttcaaatcatttttcatctgtgaagtcactgaggtactgggcttgactatagtggtaacagttaaggggagttgaactattgatcttccaagaagaaagggaccagatagtgttaagatgctgcagttgtgttactgtgaagaaaagattcgcttccactttcagcaggctatataaatatatatacatatatatatatattttcactttggtaaaaaaaagttgaaaaatctgaggagaacataattaccttcacaaattatttatagatacactgggtgagaagcttactgtagggcagtcacccaaaaaaaactaattttagtgctttcaatagtgtaatatttgtatctattaccatggcagcagtgtctgctgcacactgtgtcctattactgtaaatctcctggtttataattcttatggaaactaatttgttttgtaatggaatccagagcagatatgtataatatgatcaggattgtcctacagttgtaaataagaataggtcctgtttattttgacatctttttacaaatgcattgtattagggtgtgaatattctgaaccatcctcttgtttaaagtttggaaatttttattgttaaatgtaa

SEQ ID NO: 13594 - DNA, 1767 bp, Homo sapiens
ctgccccaacactgaaggctcagcagagccaccctgtaatgatggactgctagaaagcttccctgctgtgttaccatctgtctctgtgtctcaggcaaatagtgtgagtgtttctgcttcacattctttgggtgttctaagctctgaatcattaatacctgagtctgtatcgaaatctaagtcagcagaaaagtccagcccaccctcccaagaatctgtaacaagtgaacattttgcaatggccgcagcaaaatccaaagattctacccctaatctacaacaagagacatctcaggataaaccaccaagtagtttagcattatcagatgctgccaaaccctgcgcttcagccaatgtattgattccatctccaagtgatcctcacattttggtttctcaggttcctggtttgtcatctacaacaagcactacaagtactgactgtgtttctgaggtagaaatcattgctgaaccttgcagagttgagcaagattcatcagatacaatgcaaaccacaggtctcttaaaggggcaaggtttaactacattgctatctgatcttgctaaaaaaaaaaaccctcagaaatcatctctttctgatcagatggatcatcctgacttttcttcagaaaatcctaaaatagttgattcaagtgtgaatttacatcccaaacaggaactattactgatgaacaatgatgatagagatcctccacagcatcattcctgcctccctgatcaagaggttattaatggttctttgatcaacggtagacaggccgactctcccatgtcaaccagctctggcagtagtcgtagtttctcagttgcatccatgcttcctgaaacaacaagagaagatgtgaccagcaatgcaacaactaatacatgtgacagctgtacctttgtagagcaaactgatatagtagctcttgcagcaagagctatttttgaccaggagaaccttgagaaggggagagttggcctccaggctgatataagggaagttgcttcaaagccttctgaagcatcattgttagagggagacccacccttcaaatcacagatacctaaagagagtggcacaggacaggcagaagcaacaccaaatgaatttaattctcagggttcaattgaagcaactatggagaggccccttgagaaaccaagttgttctctaggaattaaaacatcaaatgcatctttacaggattcaacttctcagccaccaagcatcaccagtttaagtgtgaataatcttatccatcagagcagcatcagccatcctctggccagctgtgcgggtttatccccaacttcagagcaaacaactgtgcctgcaacggttaatctgaccgtttcatctagctcctatggcagtcaacctcctggaccatctctgatgactgaatattcccaagaacagctaaatactatgactagtaccataccaaattcacagattcaagagccactcttaaagccaagccatgaaagccgtaaggattctgctaagcgtgctgtccaagatgaccttttactgtcttcagctaaacgtcaaaagcactgtcagccagcccccctcaggcttgaaagtatgtccctgatgagcagaactccagacaccatttctgaccaaactcaaatgatggtcagtcagatccctcctaattcttcaaactcagttgtgcctgttagcaacccagctcatggagatggccttacacgattatttccacctagtaacaactttgtgactcctgcatt

SEQ ID NO: 13595 - DNA, 1159 bp, Homo sapiens
tggcatcagaccacagttcctgcattggctaccaaccagcctgttcctctttgtcttcctgctgccatttctgctcagagtattctcgagcttcccacctctgaaagcgaatcaaatgtgcttggtgccactagtggctcactgattgctgtttcaattgaatctgagcctcaccaacatcattctttgcacacatgcctaaatgatcaaaattcttctgaaaataagaatggacaagagaaccccaaagtattgaagaaaatgaccccttgtgttacaaacatcccccacagctcctcagcaactgccactaaagtgcaccatggaaacaagtcctgcctgagcatacaggacttcagaggtgattttcaaaacacttttgttgtttcagttaccaccacagtctgctcgcagcctcccagaactgcaggtgattcttctccaatgagcattagtaagagtgcagacttgacaagtacagctacagtggtggcatcatctgcccctggagtagggaaggccaccattcctataagcactctttcgggaaaccctttggacaatggttggactctttcttgttctttgccttcttcaagtgttagtacttcagatttgaaaaacattaatagccttacacgaatctcttcagctggaaacacacagacaacgtggactactttgcaactggcaggaaacactattcagcccttaagccagacaccatcttctgctgtgactccagtattaaatgagtctggtactagccccaccacaagcaaccacagtagatatgtggctacagacatcaacttgaataattcctttccagcagatgggcagccagttgagcaagtagttgtaacattgccttcttgtccatctttacctatgcagccactaattgcccagccacaagttaaatctcagcctcccaaaaatatccttccactgaattcagcaatgcaagtgattcagatggctcagccagttgggtcagctgttaattcagctccaactaatcaaaatgttataattcttcagccacctagcaccaccccatgcccaacagtgatgagggcagaagtttccaaccaaacagtaggtcaacagatagtaatcatacaggctgctaatcagaatcctttgccactcctcc

SEQ ID NO: 13596 - DNA, 1809 bp, Homo sapiens
ccattgattcctcccccaccccaacacttttcttttaaagcttttctccctccttgttcttgtttttctttcttcctttccttttctctgagagttttaatactttcaaggactttaaaaaaataatcatgtttgaattgttttctcttatttttgtgaggtggtttgaaggaaggacaaggtagatctgtttagttttgcagttgaagttagatggtcctaaacatttaattgtcaaataatttcaaatttaatgtcctgctttcacattgaagggcagagcctacaaaacattgtatatttcaaaagacaaaaagaagcagcagcagtatcttgttctctaattcatagacaagttgagtgtgtttgtggtactttgggtttttaaacactttgggatactaatccctagacattgccttcactccacctttagtccttctgagcactctctcgggagttggaacattgttatccttgtaagaaatactaagcttatgttgatttttaagtaattatatcttctcttcttgctggtgggtggggcagtttggtttagtgttatactttggtctaagtatttgagttaaactgcttttttgctaatgagtgggctggttgttagcaggtttgtttttcctgctgttgattgttactagtggcattaacttttagaatttgggctggtgagattaattttttttaatatcccagctagagatatggcctttaactgacctaaagaggtgtgttgtgatttaattttttcccgttcctttttcttcagtaaacccaacaatagtctaaccttaaaaattgagttgatgtccttataggtcactacccctaaataaacctgaagcaggtgttttctcttggacatactaaaaaatacctaaaaggaagcttagatgggctgtgacacaaaaaattcaattactgtcatctaatgccagctgttaaaagtgtggccactgagcatttgattttataggaaaaaatagtatttttgagaataacatagctgtgctattgcacatctgttggaggacatcccagatttgcttatactcagtgcctgtgatattgagtttaaggatttgaggcaggggtaattattaaacatattgcttctattcttggaaaaatagaagtgtaaaatgttaataatacaaatgtcactgtgacctcctccactgagaggactggtttatgccagatcattttccggcacacacggagtggctttgacagattgataactttgtaagatgggagacatctgaaatattcatgttttccttttgtagtcccatctccactatttagaaatgttctcagactttaaaataatgcacagggcttgagctttctgtcatttgactttaaaaggaagtttcattcatatttatcctcttatgtaaaattgcggtataaagtctcatttccaaatatgttaaatgacaaaattattttataaaatgtttatgcacactttataaccttaagtttttatttgagaatgtgaaagtacaaagtgcagtagacttcaacaatcttgagtgccaagaataatacagaaaaagaagacagttgatgaatgagtttatagggttctaatcttaagatggtaaaaatgtagaaagaccttgctggttttttgggggtattcgtttcttaaacaatccaaatctaagcttagaagaaaagtttagcgttaagcacctttatcttcatgaataagcttcagcttgctcttggcaagagaagagtgcttgagttacagaaggcataagtagtttgaagaat

SEQ ID NO: 13597 - DNA, 1061 bp, Homo sapiens
ccaagatcgtgccactgcactccagcctgggtgacagagcaagactctgcctccaaaaaaaaaaaagtaacttaacatacgtaatgaaaattattttccaaatgcgagttgaatttgtaatgtcttctttcaggatccactgaaagatggtgaggcaaagatcaaaagcgactatgcacaacttcttgaagacatgcagaatgcattccgtagccttgaagattagaagccttgaagattacaactgtgatttccttttcctcagcaagctcctatgtgtatattttcctgaatttctcatctcaaaccctttgcttctttattgtgcagctttgagactagtgcctatgtgtgttatttgtttccctgtttttttggtaggtcttatataaaacaaacattcctttgttctagtgttgtgaagggcctccctcttcctttatctgaagtggtgaatatagtaaatatacattctggttacactactgtaaacttgtatgtagggtgatgaccctctttgtcctaggtgtaccctttcctcatctctattaaattgtaaacaggactactgcatgtactctctttgcagtgaatttggaatggaaggccaggtttctataacttttgaacaggtactttgtgaaatgactcaatttctattgtggtaagctcattggcagcttagcattttgcaaaggaattgctttgcaggaaatatttaattttcaaaaacataatgattaatgttccaattatgcatcacttcccccagtataaatcaggaatgtttgtgagaaaccattgggaactatactctttttatttttattttttattttttttattattttttttttggggacggagtgtccctcttgttgcccaggctggagtgcaatggcgtgatcttggctcactgcagccttcgcctcccgggttcaagtgattctcctgcctcagcctcccgagtagctgggattacaggcatgctccaccatgcccagctaattttgtatttttagtagaaacggggtttcaccatattggtcaggctggtctcg

SEQ ID NO: 13598 - DNA, 1907 bp, Homo sapiens
gttctttttaaaatgacacttaaaacaatcactgaaaacttgatccacatcacaccctgtttattttccttaaacatcttggaagcctaagcttctgagaatcatgtggcaagtgtgatgggcagtaaaataccagagaagatgtttagtagcaattaaaggctgtttgcacctttaaggaccagctgggctgtagtgattcctggggccagagtggcattatgtttttacaaaataatgacatatgtcacatgtttgcatgtttgtttgcttgttgaatttttgaacagccagttgaccaatcatagaaagtattactttctttcatatggtttttggttcactggcttaagaggtttctcagaatatctatggccacagcagcataccagtttccatcctaataggaatgaaattaattttgtatctactgataacagaatctgggtcacatgaaaaaaaatcattttatccgtcttttaagtatatgtttaaaataataatttatgtgtctgcatattgcagaacagctctgagagcaacagtttcccattaactctttctgaccaatagtgctggcaccgttgcttcctctttgggaagaggaaagggtgtgtgaacatggctaacaatcttcaaatacccaaattgtgatagcataaataaagtatttattttatgcctcagtatattattatttaattttttaggtaatgcctatctcttggtctattaaggaaagaagcaatcagtagagaattcaggatagttttgtttaaattcttgcagattacatgtttttacagtggcctgctattgaggaaaggtattcttctatacaacttgttttaacctttgagaacattgacagaaattatgcaatggtttgttgagatacggacttgatggtgctgtttaatcagtttgcttccaaagtggcctactcaagaggccctaagactggtagaaattaaaaggatttcaaaaactttctattcctttcttaaacctaccagcaaactaggattgtgatagcaatgaatggtatgatgaagaaagtttgaccaaatttgtttttttgttgttgttgttgttttgaatttgaaatcattcttattccctttaagaatgtttatgtatgagtgtgaagatgctagcgaacctatgctcagatattcatcgtaagtctcccttcacctgttacagagtttcagatcggtcactgatagtatgtatttctttagtaagaatgtgttaaaattacaatgatcttttaaaaagatgatgcagttctgtatttattgtgctgtgtctggtcctaagtggagccaattaaacaagtttcatatgtatttttccagtgttgaatctcacacactgtactttgaaaatttccttccatcctgaataacgaatagaagaggccatatatattgcctccttatccttgagatttcactacctttatgttaaaagttgtgtataattgttaaaatctgtgaaagaataaaaagtggatttaaattaacatttttttctttttctcttttttatggcacaatctgctagaaaatatgtaccttgtatcttgacttaatgttttggtatgaccttttaaaattttttccttccttttttatagattgttacttaagattatgaaattgaattggagccctcattatagcctgcaaaaagtcccataactgtatcacactatgttttggaaatataatctacagaatcccatcccattctgaattttactttgagaaagtgaatggtttctataaattcacttctaagtgcaaggaaatcagtggtactcttcagtttttaacaagtaaactaaagccttgtaatttatgattttgcaagccaatttaaagtccaatataacaatgtgc

SEQ ID NO: 13599 - DNA, 1951 bp, Homo sapiens
aaacaaggggctaatccatgagcagtgttctgtaggctctgtgacatctttggtttataggattttggagccttttatgatctggaactatttgaggggtttcattataggccttggttctctccaggggccagatgagtttattgtggaatctttgaaaggacaaggcctctgtgaatgaatcagtcccagggaagcatttggtggtggcggcagtggaggattgcccggtgaacctataaatcagcagtctcttgggcagaggagcaagcccctcgaacatgatttcaaacaagcaggtcctcttctctcatctcacgtccttagtctctgttaatgaacatactggatgtggagtttaataaattacctactatcatctggccacttagattattatcacaccactgtggactgttcctggggggagaagaacagaccgatttgaaagattcaagggagaaagattaaggatcaggattgcatgaaagaagaaaatccttcaatatttaaaatgtttcttacaatacccacggagcacttttatggttccagccgagcgttcctgaaatgaactgaccattaacagcgcctctttgataggttaccctgatgctgctaaagtaaagccttaagtgtgtttttgggacaacgtgctgcttattccacctcagccacatatgtgtttgtgtttaggatattgtaaatctttgctaagtagtgttttccttggtgaatgaagtcattgttgtcttcaagtgtaccatctgcctagcaaaaaattgctacaaactttctcttatgcaatagtccttggtacttctaatatttttagcaagagacaattttctgtactagaatcttccactgccagaaaacacagtgccagtaaggttctacataccactgaccatctgcttaatagacatgtatttcctttgagtaggacattagcttttgattataaagctcaactagtataagcaaaaatataacatctagaagcacagttttagccaggatgtttaaaaattacagttttgtgagacttaagggtctttttaacctaggtaagtttatatgacctaacttaattgtagccatattctggtaccttccattttgaaaagtagaggttgcttaagcaagcaatggataataagagacttttcctgaggcacctgtttggaatctggttttctcagcggcagcttgacatgtgcacccttttgtattaaacactgcaagggtgatgcaggggagcaggaaagccatcctaaactcactactgagtacgattcagtatgttcctgtggatgtctgctgtgactaatataaatttcttgcagaatcagctacacttaattatgttgctgatagacaagcatccacgcttcagctggcactaagtgttttcattgtaggatcagcagcaggttaaagactgaacggttagtgaagacaaatgtcttaagaggctgcgatgtctaggttgggcttgtgacttcttagtggcctagccttcttgatggcaccttgaaagtgaacttctagaaatctacatttaaaaggcaaagctttaaaagcagagctagtctattctagttactgatgcaactaaaattctgtatttcttaagatggagccactgacgagatgtcacagtatagagcctgcagtctcaactcattgtgatcctaatggtctgggtgattggatggtttgagttgttagggattttgagtttttcattttattgcatatctgggttggatgttagactaaaggaaacccaggaatatttacctggtgttacatttaatatttaatgtaactggtctagcaacattaagggggatttctgaagccaactccggaggctgtgggctgcacattttgcactgtttttatatacttgtattcatatcctcttatcacctcagactcagac

SEQ ID NO: 13600 - DNA, 1267 bp, Homo sapiens
ctttgttaacttttttttttcttttttgagatggagtctcgctctgttgcccaggctggagtgcagtggtgcgatcttggctcaccacaacctctgccccctgggttcaagcgattctcctgcctcagcctcccgagtagctgggactacaggcacgcgccaccatgcctggctaatttttgtatttttagtacagacggggtttcgccatattggccaggctggtcttgaactcctgacctcgtgatccgcctgccccggcctcccaaaatgctgggattacaggcatgagccaccacacccggccctttgttaacttttaaccatattgccattttaagcaggtgcacagcactgaacatttgccagtgatgttattaaccactggtaactttaccagcagaatagatagctgaggttgtggatttcttgtattccgtactttctggaatgtcactgtgacttctttcttaggtaccaggaggactttaacccgctggtgagaggatgttcctgttactgctgtaagaatcacactcgggcatacatccaccatctgctggtgaccaatgagctgctggccggagtcctgcttatgatgcacaactttgaacactactttgggtttttccattacatccgggaagcactaaaaagtgacaaactggcacagttgaaagagctcatccacaggcaagcatcttgagatcttgcaaatacaagtctcactcttcacactgagcctgtaccactgttgtaacatgggaagacgtgaagaagaaataatctgagctttaattatttatatttggatataaggtctgcttaaataaagaatctttgtaccaaactgcccacatgagggtgaagagatttcctcaaaagacttaaatgacctggattgatcagagagaattgaactgtgacctttaagacttctagactaattcttttagttgatagagattcatttagtcaaagacaaaagctttaactgtgagggcacagccttgaagtgggagtgatgagattctgagggacccatgaattggattgaggcttgaggggaaatggtgtgagacgaatgggctctggacatatgcctgttgatttgagaagaaatctggctggtttgagggtttcctttagttcaccctcatactctcaggagactcttctggatacttttgtcttccaccctgccctggcagtgcagccaatcagaaatggctcttgtgacttaactgggcttggatatccctggaat

SEQ ID NO: 13601 - DNA, 1140 bp, Homo sapiens
atatgatgtagaagtctttgccttggcctcctccacaaagccccttgcttgtgcacattttagtgtggcagagggcagtaggatgtgctcctttcaaaaacacatagccttgtccatattggaattacttttcagcctgattatgcttctccatccctgggtgaaacctagatcaggctaaccaaagaggaaggctatgcatgtggtaaagtcctttaagatgacagatagggaacagtgcaataaacactgaaaaccagtgaagtgaaaggtttattttgaaacaagctaggccaacttggacattggaggatggattagaacatactagctgctccatcatagactatccttactaagcagaagaccttaatagtgcctaaaagtttagttttgaaattggttttttcctaacttttctttgttaaatttatttttattatcttttttaatcttagaagtaatcagagtttgacagctctttagtaactgttaataaaagaatctttcatcacaggataagcaatagattgtgtgggaaataataacacaagagtaaagatgctgaaggactcttctggaactcaaagtgacagttttgaaggttctggcacagtaggaaaggatcacaacccatataaatggctaatgttgaatttctctgaacactgtcacatatggggcatcaatttggaaaattctcaattgaggccccttccctaagattacaacattgataacctgtctttttctctctcttctttactatccgtccaagtctactattccaagtttaaatattgttcagaaagttgtcagccttgttagtcagaaaaactccatttagagccatccaaactagcataagaaattccttaagcactcaaagcattatctctgttttaagtaagaaactaaatccagagcttttaacaggtacttagaaataagtattgggtaatcactaagaggacattgactgcaccaaaccaaagctatagaaagaaatgattgactttttaaaatatattcacattaactgtcctaggatacttctcttgaggctttggaaaacttcttccttgaaatttgcatatccactccagttctgtcaccaaagattttaatcttcagatcgca

SEQ ID NO: 13602 - DNA, 1181 bp, Homo sapiens
atttattattgcttatgagcctcctgtctttccaagctgacacctgtcaggagcatcaatagccctaacagtaactaatgcatcaaaataatagacagaaacactatagtatatattcgtgaggataggaagatttttttttcttcttttctccaggaaaagcttgctttgctcccctctccctctgcaacacacacacatacaatgcatttcagaaagtctgcatcttattttacagatatgtagctctagaatttacaaatatagcttaggaaatgttctgagattgaggctggtagcaaacaagtttattttctgcactggacttcaggataagtgtgcatagatgcaattccttcaaagaaagtgaaacatggtagagcaaagggataatactttcacacattcaaacagttgtttgctatctataaaccttgatttaagcataattattactttttagaaatctgaaactggaggaatgtgtattttagtaaggtttttttgttgatttatttgtttccctttctttcttctcaagatagtaaaggatttttatttcttaatttgttactgtccatggacagtcaaataactgctcacccttactgtattattttccccttagaaagaaaagccttccatcctaccatgaaggaatttttcctccaaaaaatcttatcttccatttcaaatagcactcatgagcttttaagagagaaattctctctttactttgaggatagaacagttaaaacaaaaacctgttccttgagaaagaaaccgtatttacctaaactaacaggtctggggccaaagaatagatttttttattgattgcagatgaagaccatgcattttgtactacaaatccttattgcctcctcaaatcctttttggaataaggctgggaataaattagtttaattaaattctttgggtatttctaattaatatctactgcaagatacccaggaaagaaaaggaaggggtgctgccgaaatgccaaaatcaattgatctgttgatttttatcattgtagttgttgcttttctagccatttcaagactgtatgtgttcatgaagtcttaagtagagaaacacctgtttccccattgcttctctctccttccccacacccctgcacctgccccaaccccaggcactagagggaacagtaa

SEQ ID NO: 13603 - DNA, 1191 bp, Homo sapiens
gaataaaaggcaactaaagttatatttgaaagagaggaaggatattttcttcatattttttttaatttttcttaatttttattattttaagtattgcctgggttgatgagggcctctgtggccagcccatccctgctgtaatttgaattgctgctttgtattttgatatgtagttctttgactttagcaagcttaagttgccccactgaataattttttcaactgattcatctagaattctgttctttttcatggaagagactttatctttcagaaagagattgcttgcttctccaaaatttcattgagatcttacaattctagaatttctattgactttactttttttcttagtgaaacactaatagtctagaagtcttgataaatggggtcttttcttttgtgatcagccaggaagaggagttcacaaaactctgccatagctcctcacccttcccaactacaaagagcatcattatgagaagcctgttatagatcaagatgcattgatgccaaaattacttttttccttccaaatatcaccttctgactgtttccaccatggttaagagggctgaataagatgatcattctttagatgacgaattaacccttgcttcttcgaaaggttttagggaaattaacaaaaaaattcccagatgccaacagccaccattcaaaagaccaccaatctattgcatcataccagatgccactctctcttcctagtagggatttctctcctcggtcctgatcaaggtgttataatagagacattttcattatagacagtgtcctgaagggattccagctcaaatataggaattcttaaacctagctgaaactcccaaagtgatttcattgctgggcatattttaacatacttaggggaaagcaaatctttaaacaaagcaaaacaccaaactacagttttaaaaagaagaaaggagagcgtattttagtttcaaaattacattacattttaatttaattttccttctaattttcctgtcagcattttatttacaaaaactgtgcagcaaacgagggaaaatcttccaacacaaacaactctgtaatgactaaattggttttattcatatattttagacatttggttaacttggatctttttcataagttctttgtgatgctttgtaaggttagtgtaactgaagtgtttgtgagttt

SEQ ID NO: 13604 - DNA, 1099 bp, Homo sapiens
ttgtaaatacattagaatagccccagttttacttttattcattcattttatttcccttacccgtagtgttgaaatggaatttatcaatgctttagcattataagattttcaaataatttaaaagaaaaattatcttcactttaagcattgaatgcatcacttttttccataaacccgaaactcagaacctgtaggaacgccttcatttgctttatttctgacattaaatttgcaaaaaggcactttccaggtaacccatcagctatgtcaccctgggtatttggccagagggcagtcatgttgaccccatctgcaaaggctggctaaactagagtcttggactattagaatctcattcatcaaggtccacataaagtacggtaggtgggaagcaggaggacagatggtagggtcgggcgcaaggaacttgtttgttgacattgatgtagacgcttcttcttgccagagtgactccatgcacttattttggcatggaagactaggccaaagctatcatcttaatagaaggtgagctgcaggcaaactagagagatccatgcacagtaggtatttagagttggcttagattttatctatcagcttgactgtcatacatacttgattgatgtgcagcagggcttgaaagtgctgcattgatgttgaggactgtgtcataaggttcctgatatggtgcacatgtctgaatggagttggacattggctgtctttgcccatgccaaacaacaccagacttcagtgcattattctgcagttgagtagcagatggtgactgcagacgtttggagggggtgtgccttcaaacacaatatggagccagcaaacttacttagaaggttattacatgtcttgactttggcagctattttttaagcactgttgaaaatccaagttccatccattgttattcgcaaaatactaggcaaggttggtattccatggaaaagaaatgtgaaaacgcaaatacactgttcactatgctggttacagttacttgggggtgttttccttggtattgtctaaatgggccaagtaaacattctcagattgattattcctgaaattggtaccaaaacaatta

SEQ ID NO: 13605 - DNA, 1109 bp, Homo sapiens
atgtggtttttacagaatattcgatgcattatggccaaagaagatatggtctctgtcgtaaagatttaagattaggataaattattttacaagagaaaacagaagaagtttagacaaaagaaagctgattgaagcagagaaactattggaactataagattagtcaaggaaattaacaaaaagtagattttaaggaagctagagtctttggtgacatttagaaaaaaagtgaaatgattcattgaataaaataattactgatcagagtgcagcaatgtatccattgtcaaatgtcataaagcttcaattaaaaacacagaaataagcaaaatatacttttaagaaggcaaatgagatttgatgaaatccaagaacttcacatattagatagccctgcagggtatcagtgattaaattcattttatggataaggaaacagattcagggacgttaagtgatgagcacaaaaacacagtcaggattcaaaccaggtctgtctgactccaaagctgctttctcttttcattaccctatgcaatcttttgcagccaatttaaagccacagaaaacataccaaagaaacaaagacaaaaactatacaaatgtactggagaagaggaggcgggaaaacagaaagtgttttttctagaggcagactcactgatggcaatgagaactgaaatagaagtgagtaccttggctaaacaactaggaaaaaacacacaaaagaatcatgaaagtatttatataacttccctgttagcctctattatctttgatagtagtgtaatattttatttggattatcttttattattaaggctcttatcattttctagttgttagtatacaaagtattttgacacatattatgtcattttccactcacagaaaacttatattgcaagaaaggaagtattgctattcctgttttacagatgggagaactgaggcttgggtgggctaaatgatgtgtcaaaactttattaataataagtaacagaaagaacttaagaatctggaactactcactccagtacatttctaccatatcaagtcacttatttgtttcagaaaataggaactcattgtaaagattttcatcttaa

SEQ ID NO: 13606 - DNA, 1118 bp, Homo sapiens
gcatcaaaattttactgtgcaggatggaatactaatttggtatagttgaaattttttttggctaatctttctatttcttctttactctcctcaccaaaggcactgccaggacttaccgtacaacactccttggcttctggaattttatctctgctcacagtctacattacaacattagttcattctgggcactttagcttccttgaatctccagttgatctcacacccatgcctatgatattcttctcctggttaatcaagaattctctatttctgctccgtcatccatgccactgtaagtaggaaagtaatttaggcttttgaatcacagccttgtcatttgtgaaatgacttcccttgactctgaaattctctgtccaaaatataagctaggatttccagtaataacaatttatatgtataagatgattgatagtttgcagagtgtctttatatattttattttatataattctgactacagttttgtgaggagagaaccattattattatcttttttttttcagaaaaggatactatagctcagtgaggtgaattgatttactccatcacataagtagtaactgcccgaacctgaactttaaattcagttttccccaccaagaggtgatggttttctctagtagggagaaagtttctttcttaaaaccttaatttctttattaattttaaaagttttttttattttttatgtgagtatatatgtttatgctttgggtaggagtcttcttatgctgaattgagtttggggtggaattttgtgctcttagtttttgtcagtgaagaagtctcctacaatttctaattaaagaaagataagaaggaatgtattacttttctagtgtagaattttggtatcattgtgaacctccctgctaaatttgtttgtatttttccatggtaaatccattcttccagaaagctaatatacctattaaatagtattgtttataattaggaaatggtaggtatacagtagactccctcttaggttattcctgcttctggccaacagaatactctgaaaaaatggtgtgtttctgttcatctgtttacctgctgccatgcttatctacagtcatttgtgtttgtttttg

SEQ ID NO: 13607 - DNA, 1161 bp, Homo sapiens
aggatttaattcaacagtttatgtgaagaaattttataacttatgtgatagagaagtatcaattattgatgtgaatcattagtagttagaagagatctataatacaaaccaggaacagtagcacacacatgtagttccagccactctgcagaggctgaggtgggaggattgcttgagcacaggagtttgagtctgcagttaagttattaccacacaactgcactctagcctgggcaacagagtgagactccatctctaaaaaataaaaattaaaaaagagatctacaatacaacaaaatttgagaatttctggtttgggaagaaaggtagaaattggattactatgtaatgaatatttcctaagggttaaacactttatatatgttctcatttaatacttttgccttctctttgctatgaggaaactgaaattctggaaaaatagtaacttgtttaaggtcacaggtagtgaatgtggaagcttctttcaaatccaggctttgactttaaaagccacgttctttctaccgaagcactctgcttcccatacacctagagatagagtgtatggcccatgaataattaagagtaagatgaaaagctaatctttcagtttctcattgagacacagtgatgccttgcatttattattcctccttttactatatttaaacatttcacaataatttatttatcttttaaaaaaataagagcactatgaatttgacaggaaaacttgtgagatatcagatggattacataactaaatattgtatatcacaagctagtttttctctacctctggtttcttaactgaaaaaaaaaagagttgtggagaacgttaatggattgtaatacacaaaggaataaaataatttattaaaaataaaaattcctaattttgaagcagatgacatattttatatttctgttgattgttttttaataatacctaggcaaacttgatttcagatttattgatgagaattccctgctttatacagaaaatattcctgtagaaaccaacatttagataatctgataaggtctgggaaaaggtgagttctatgtagctggagtaatcaaagtggtataggttacacagaagtgttaaggaaaaagataagagaaactaatttgtgttaaaattaaacttttttc

SEQ ID NO: 13608 - DNA, 1169 bp, Homo sapiens
gggggaatagatggaatagaatatatatagtttttttcttgccacaattccctaaacaatacagtgtaacaacgatttattaatacatggcatttacttgtattaggtgttataagtaacctagagatgatttaaagtatgtgggagaatgtgattaggttaaatgcaaatactacactattttatgtaagggacttgagcatctgtggattttggtttcctagagaggtcccagaaccaatctcccatggatactgagggtcaactgtaagtttgtccagtcaagatgtggctactttttgcttttttgctttaaaatgaagaatctgtatttttctagtgaaagaaaaaaaattacattgattttcatgcctttgttctttgtgattcttagaatatatcaaagttgttgcacacatagtgcatggtgatatccctgtgccatctttccagtagtctcccaggaaagcttttgaaattgcccttgaggaattgctgatgtaactgttcagtactcaaggcttaattttcaagattggggttttgatttttatggagctcaattttggagggccttaggtttggggacacatggtgttgaagtaaacaggtgagaagaagaaaagtgagatttctagaactatattagctgctcagtgagttgggcaattggatatttttggttttatgatttcagattttatagaccagtggaatacaggccttgtgcatatgaagatcaggtgacaagtttgctgcctaccagcctccacagcaatatgccctttcacggtgaggtcctaattttaacaagctaaagaaagtatcaggttaaaaattgtcaaattttatccatttccaggaagaagtctttatgcttacccatctaggcccgtgttttaagattactacaaaaccaagaaaatgcacatataggtcatgtgtacattgactagctactaaaagaaaatacgagattaaatggaatactagaggaaagagaaactttcatgtgagggctataattggggaagggggtgtttagaactaccagttgatgtgatgccagtttcttctataattggatcagaaagtttttgaggcccgcaaacatctaattcctcttgttgtcctgttaataagaatttgactacttggtataggaagaa

SEQ ID NO: 13609 - DNA, 1174 bp, Homo sapiens
ggcagtgctgttacttggccactaagatgtgtaaaatggactgaaatgctccatcatgaagacttgcttccccaccaaagatgtcctgggattctgctggatctcaaagatgtgccaagccaaggaaaaagatacaagagcagaatagtacttaaaatccaaactgccgcccagatgggcttgttcttcatgcctaacttaataatttttaagagattaaagtgccagatggagtttaaatattgaaattattttaaaaggtaggtgtctttaagaaaataacaagcaaccctgtgatatgttccgtctctcccaattccctcgttatatagagggcttaatggtataaatggttaatattggtcccaacagggctgactcttctatcatataatcaaaactttttacatgagcaaaattcagtaagaaatgggggaagacaaaggaaacgtctttgagaagccccttcatatttatttatttatctcttcctgaaccatgaatttcatatgtggaatattgctatattgacagattcttgcctgtctgtgttattctaggatctgttacaggtccatggcaattactgtttattttttcctggaaaaatatttttttataaaaggcttttttttttttttaaatacatgagaggcattgggctaagaaagaaaagactgttgtataataccttgttcaatggttgtatttagtgagctcatagaggtccatcatatcatgaccgagctaggttgtgtgggcaggaaggtagggctaaggggttgtagccttgctgggcagcctctcagagcaaggttgttcagatctcccttgctattacagtaggttactattaatgagggcagcacctgatgccttttgtactgaggtatgtaactttctccttatttgacaagtagaagttaacttacttgtcagggagggcagacgtttttttgttctgtttcgtttttcaaaataatgctttttgcaaaagaggtaagactgagactaaaggtgttatcttctggtgtgctcctggaagtgtctaccctacatttgtgtcagctcagggttgcagtgttgcccagatgcattttacatcactgtaaagagattacttttgtggttactacctggcttggctggccttgcggttcaccagattaattta

SEQ ID NO: 13610 - DNA, 1100 bp, Homo sapiens
gcagaggttgcagtgagccaagattgtgccactgcactccagcctgggcaacagcaacagagcgagactttgtctcgaaaaaaaaaaattaaaaataaataaataaataaaacactggttaagttgttaaaatataggttgcttgactcaagattttattccttaccccttgagaggaaagttgttaggagtttacatgtccaattagtagcccaggtcattctgatggaacaaaataatgtgatccgtggaacatactttgagaagctccaatgttaataaattagatgatataaaaagaccttaaaagagttctgtagatggcactctcggggtgcaagaaggaaacaactgtgcctggagaagtctgaattttcaattattacgaagataaggtgggatggggcagtttttcttttatttcactttttaaagacacattttagcttccactaaacctattaagttcttacttgaattacaatgcttttgaagaagatcatttacaaaatgttcattttggtgcttccaaactttcaggctactaaggcaggtgcagcatcaatgattcactacatggttctgatatcagctcgcttggtactactcactttgtgtggatgggtactttgttggaccctcgtcaatctctttcgaagccattcagtcctcaatctccttttccttggctacccgtgagtactccagttttaccatgttattagtaaatctttagaaattatttcggtcacgtaaacgatacttttaagagtgaaaaatgaaattcttcaaatataaatgaagcatttagaaaactgggaaatccatgagcatggtgaacatataatttgttttctaaactggagtacagttgggacaacaggcataaaccaggactgtcctgggaaacctggaatgtagggtgtgttgccagtggagaatattttaattgtctctcttcaccaagtaaaggcccctcttgctatctatatttgggtaaacggtagttaattttagatgaatgcactggttcgaaaaccagtcttacccttggttggtcatattactttgatcttctgtttcctgtaacagaagtacaa

SEQ ID NO: 13611 - DNA, 1235 bp, Homo sapiens
gagcttttgtggtattcgctttgtaaccacagcatctgtctagttcttagcaaacaataagcgcagggttggatgctgacgcatgacttcatgacttgggctccctcacttagcagtaacgtgaccctaggtgacacctcctaatctacactcatctgtaaaatggcggtgataacttgtacatggttactacatggagtccaagagacagcaagaaggatcagtagcatggtgcccgcacctagcagccgctagctgactgaggccgaaagaggaaatgctttggccaacactggccggaaggggcgggaccgcgagttaagaggagaaggcgcgccccactgcgcaggtgcaaatggtaggggttgtcgtgccggctgattccggggacgcactcgcggctggggcagaccgcggtcgcgtagctgacgtcatcgccgtgcgctgccacgtctgctcagctccgcggtaatggaggctagggatgggtgctgaagtatcaggctctggctctagctttagctctggcactggaactgcgtcggagtctgggtctgagtctggcagcccgaagcctggacaccttttcttgattctctaggcgggggctgcctgcgtccaagcagctggtttgcagcgttccaacgctgggagggagttcccttacctggggtccagtctgtaaagttgtcgccgctttctagggaccccgccccaccggctgggactcttccatgcgtgagtattactgagctgccccaaggtccggctgtcctggacctgcctcggccctcttgggtgtgcggcggagactgctttgtctacctttctgccgacttctcttagggaccagtctgttgaagtttgtggtctcctgcagtccaccacaccgcatactctcacctcttccgtcccagttttttccctgcacttttctttccctttgcttgttaatggagcaaggaccagcagcccctgcatccagcggtttgaatgctttgtttgacttggggttagtttacagccgaaggctgttaggaatagggagcatttgaaaacacgggttttttccagtgtcatccttgggttttagttgtattgtttaggaaacattggtatccatgttgacagaatcatgatttttgccgtagaatgatgaaaagagcttttttttttttttccagtgaggatctttatcttttacttgcttcttaatcttgcagtttcagtaattt

SEQ ID NO: 13612 - DNA, 1642 bp, Homo sapiens
gtgcctgtaatcccagctactcgggaggctgaggcaggagaatcacttgaacccgggaggcggaggttgcagtgagccaagatcgcaccattgcgctccagcatgagcaacaagagcgaaactccgtctcaaaaaataaataaataaataaataaataaaggaaaaagattgttaagttgtattgctacatgcatgtatgtggatatgattgccatagggttggttcttgaggctcaaatgaattaatttatataaaatgctgaataatgcttggcacaaggtgagcactcaaatgcagactgctattatcattaaattctgtgctttaacattttcttgttaaatcttgtctctaggggaagccagtttattaggaaccatttgcagatggatgacatcacctgttactgggagaacctcttgagtgaatactctaaattcctgtcttataatgtaacgagaaggaaaggttatgatcaaattattcccaaaatgttgaaaactgaactatagtagtcatcataggaccatagtcctctttgtggcaacagatctcagatatcctacggtgagaagcttaccataagcttggcacctataccttgaatatctgctatcaagccaaatacctggttttccttatcatgctgcacccagagcaactcttgagaaagatttaaaatgtgtctaatacactgatatgaagcagttcaactttttggatgaataaggaccagaaatcgtgagatgtggattttgaacccaactctacctttcattttcttaagaccaatcacagcttgtgcctcagatcatccacctgtgtgagtccatcactgtgaaattgactgtgtccatgtgatgatgccctttgtcccattatttggagcagaaaattcgtcatttggaagtagtacaactcattgctggaattgtgaaattattcaaggcgtgatctctgtcactttattttaatgtaggaaaccctatggggtttatgaaaaatacttggggatcattctctgaatggtctaaggaagcggtagccatgccatgcaatgatgtaggagttctcttttgtaaaaccataaactgtgttactcaggaggtttctataatgccacatagaaagaggccaattgcatgagtaattattgcaattggatttcaggttccctttttgtgccttcatgccctacttcttaatgcctctctaaagccaaaaaaaaaaaaaaagacaaagcctcttaataaatttaatggaactatacatagaacagcagctcttcctcaccctttgcatacctttaatatttttccttcttaaattggccacagcaggggtcattcacactctcactgtcttgcaggaatcacaagaagtcttcatatgtgaacgtgccattcagttggtagttaagagcattcaacttcaaatatatagaagatatttgttttagtgcaaatccatgatggagtgcctcccttttccttttttcactttttgaaaaagatgttttgggtagtagtttaatatctcagggtgctctttctaacatagtaaaaaatgaagaaaaatgtttagattaaaactctgtagtctgatgacttagaaccatccttgacccttaggcccaacct

SEQ ID NO: 13613 - DNA, 1173 bp, Homo sapiens
atgtgattttgaggaagtttcttaagctctgagcttaaaaggcttatttacttaaaaaagagaacaatatacttacttcttaatttttttgtgatgtctcagtaatgactggtaaagattccaaggatccctatatgagtctgctgcctttattagcgttatcttgccaagggttatacataaagaaaggcacattgttgggtggggtttggagttttggggcatgcatcatcatattttttggctctccctttccatcaaaaatacttggagacagagtttagttatttattcctgctggggcctttgctttggttatgctaacccccatcccttatccgactcttccccaggtggtgcctcggtgcacaacgccatgcagctgaagccgggcaagcccaatggctggaggattcccttcaacagccatgagggcggctgtggggctgccatgcgggccatgtgcatcggtctcaggttcccacaccatagccaactggacacactgatccaagtgagcatcgagagtggtcggatgacccaccaccacccaacaggctacctgggggcccttgcgtctgctctttttacagcctatgctgtgaatagcagaccacccttgcagtggggaaaaggactgatggagctgctaccagaagctaaaaagtacattgtccaatcaggctactttgtagaggaaaatcttcaacactggtgagtctgtaagcgcacgccctgctcaaacacggttgaatctgtgcgtgtacatccacctgcacatatatgtcttgtattcagagatcacagcaaccctcatggttttcacccccagccccctttctacccatctgctaaggatttcaagttcccttccagtaatgattctacaaagtagccaagtggatacctcaatgaatagggcagctgtggtgtttccctcttacacggaatcctgtcatttttgtggctatcctattctgccatgaattttcatgcctatttcctactttcctggaatttgctttttcagtgttgtcttggtatacaaataatattttgaaatccttggttaaaattccagagatacgtttttccactagctaactaataagtggtaaggccacatcttccccttctcgtgagttcacttcacattgtctttcttagaataaa

SEQ ID NO: 13614 - DNA, 1149 bp, Homo sapiens
tcactttatttttttcaattgactctagattttttcctttctacaggtcctacttccaaaccaaatgggaaaattacctaaaacttagagggattttggatggagaatcagcccctaccttccctgagtctttcggtgtgaaggagagggatcagttctacacctccctgagctactctggctggggtggcagcagtgggcacgatgcccccatgattgcctacgatgctgttcttgctgcaggagactcctggaaggagcttgcccaccgagcctttttccatggtggagacagtgattctacagctgccattgctggctgctggtggggagttatgtatggttttaaaggagtgagtccctccaactatgagaaactagaatacagaaaccggctggaagagacagctagggctttatattctctcgggtcaaaagaagacactgtaatttccctttagggagacgtgatgttcacttctgatggattcttcttttgtgtatttccttttctgctatttcttttcagtttttccaaagtcaagagtcttaaccttgtactcagggaattttgagataacaagtcccttgggcaccttaagctcagttttttcaggctcatcctgttcttccagaatctatcccttttcttacactgaagagtcctttagctcaattgatagggtcagcgtctcgcaagcaaaaaatctcatgacctcatatttgagtcttcattttcatcatctacttgttctaaaagttttttctgtttgtctcaagttgggttcccacaaagtggactttgagacaaagatctgaatgcaagcagtttatatgggagatgattccaggaaataccgatatgagaatggggaaatgaaaccaggaagggaagagagctagtatggggtatgttaatgagcaggtttccactgtgggcggttggcactctgccatctgagtcctctgcctaaagcattcctcagaactgtcccatttgaagggcaagcaaacctggggtatttatccactgacttccatctgacactggttgaggaccactgccagggatgctaactccctggtaattcttggcttaccctttgtacaaaccaaaccttagtgtcttcaggtaaagactcagagata

SEQ ID NO: 13615 - DNA, 1136 bp, Homo sapiens
ccaaaggaagtttggccaatgccagatccccaggaatttggggggttttctttcttttcaactgaaattgtatctgattcctactgttcatgttagtgatcatctaatcacagagccaaacacttttctcccctgtgtggaaaagtaggtatgctttacaataaaatctgtcttttctggtagaaacctgagccactgaaaataaaagagacaactagaagcacagtagagtcccagactgagatctacctttgagaggctttgaaagtaatccctggggtttggattattttcacaagggttatgccgttttattcaagtttgttgctccgttttgcacctctgcaataaaagcaaaatgacaaccagtacataaggggttagcttgacaaagtagacttccttgtgttaatttttaagtttttttttccttaactatatctgtctacaggcagatacagatagttgtatgaaaatctgcttgcctgtaaaatttgcatttataaatgtgttgccgatggatcacttgggcctgtacacataccaattagcgtgaccacttccatcttaaaaacaaacctaaaaaacaaaatttattatatatatatatatatatatataaaggactgtgggttgtatacaaactattgcaaacacttgtgcaaatctgtcttgatataaaggaaaagcaaaatctgtataacattattactacttgaatgcctctgtgactgatttttttttcattttaaatataaacttttttgtgaaaagtatgctcaatgttttttttccctttccccattcccttgtaaatacattttgttctatgtgacttggtttggaaatagttaactggtactgtaatttgcattaaataaaaagtaggttagcctggaaatgaaattaaaattcacaagtgtgtggtctttatttcagtacccaaccctcttccttcaccctactattttgccgctgcaatatgtagtcacatcaccatttccattcctctaattagggaaacattaatctttgttatacagaacaagatatcaataccacttcttgttctttccaatgattttattccattgtgtagccccaagaggtgcagcttccaccttggaaacctttgg

SEQ ID NO: 13616 - DNA, 1199 bp, Homo sapiens
ccactgtgaataagtttgtccagatttttttctaaagttacttcccttggaaagatacacttgagaggacattgtagttaaataatgtgaactgtaacagtcatctactggtttatttttcatattttttaattgaaaattgagcttgcagaaatagccacattctacacatagttctaattttaaatccaaatctagaatctgtatttaatttgttttttaacctcatgctttttacatttatttattgatgcatgtcagatggtagaaatattaaaaactacacatcagaatgatacagtcacttatacctgctgactttataggaaagctgatgatataaatgtgtgtatatatgttatatatacatatattcaatactgcctttttttttgtctacagtatcaaaattgactggttgaagcatgagaagaatgtttcccccacacccagttaagagtttttgtgtctgttttctttgtgtatcagtgaacgatgttaagaatcagtctctctttttgaagaaaaagcaatattccttggaaagcaaggagaattgaaggactatgtttgccgtgaggaaatagattttcatgactagtttgttttatacttttaaggttggcatctatgtgggccttatatactctaaaatgaactttagtcaccttggtgcttatgggccattacttgacctatgaatctttaaggcacaatcagttgtactttacatttaaagatcacttgagtgatggccgcctttccctcctacccgctccttccccacatgccttccaaggttagctggtaactgtagggctgcagagctgagcccatggttgtgtgtaacttgccctcaccctcctcattgccaccttaggtcactttatgggtctcgtcctccagagggttcggaagtggagtctgttggcagccctcctgcaggccctagcaccctgtcctgctccttaactgtgtgtgtgactctccaagagagttgtcctgcctgctgaagtgaaccagtacccagaaagacaactgtgagccatcttggttttcactcgctgtttagctgaggtcttgggccacaaaaggggtttcacaaacctctggatatatcagagtttatgagaaaggaaacatgctcagtcaaaccaaatcaaacaaattgaattttatgttttataaagtgcttctga

SEQ ID NO: 13617 - DNA, 1187 bp, Homo sapiens
ttcttttctttctttttttttttttttgagatggagtttcgctctgcattcactttttctaaaacttagcaactgagctcttttcatggagttgatgctcagttttttttttcactgcatcttagaaaacaataaggtcaagctatttgtggtaaagtaacagttcttacagttttgaattcatgggagactgttgtttttgtgaaatatacaaatgaattgctagaaagatgaaatttttaaaaatataaaatatggatcctaattcttattaccatattcttagatatcaatttattctctcattgttataaaagctctaaacactctcaatttctgtatttgtcttattggagagcagtaacagatagttcatggactagtaacaaatattttgcagatcagaaccagtctacagatcacactttttagtagcatatctatagcttgctaattttagtgcttaatgttatttcagaagcatcttgttcaatatgatgaatagctgttatcctttaaaaatatatttttatgtgtttccttttcagaatcgagagctccagatcatgagaaagctagatcactgtaacatagtccgattgcgttatttcttctactccagtggtgagaaggtaggtttgacacaaagtgtgtactgaatattgtgataaatttgttatttttctagaaattaatctccccaccgctcatagacagttttgctaatggaatggaaaaattccgaaacacttgccccagcaatactcagcccaaggtatggtcattgatatcattagttatatcaggaaagcattagtaagataaagggaatgcacttttaagaattttcttctttgttaaagtatgtcttcacttctcaagaaaatctatatactttttttttttttaaagacatctatgttccttatgtgcttacgcagccctctgatagtttacctatttattgcagggaggaaaattaagtcattttgttaagtgaagttgataagaggtaaagaggtagcaagaggactgataggaacagaatgagagttaaacatttggaagcaagttgagccatccttggccagtgaaaaagttggaaaagatgtaatattgcagagcttactttaagtgatccctatgtctgaccacattgaattctgcgaaaccaaaggataaagaag

SEQ ID NO: 13618 - DNA, 1257 bp, Homo sapiens
attgtacctcaaatttgagcagtttttgtgtttgtgtaaattaaagtaaaaagcagtccacaataatgttttgtaatactgcacaccagttctaccagattttgtaactatcagatttaaatgaaaaaagagaaggaagaggctgattgctggagtgttaaagaaatcttggccgggcgtggtggctcacgcttgtaatcccagcactttgggaggccgaggcgggtggatcacgaggtcaggagatcgagaccatcctggctaacacggtgaaaccccgtctctactaaaaatacaaaaaaaaattagccgggcgtgatggcgggcgcctgtagtcccagctactcgggaggctgaggcaagagaatggcgtgaacccgggaggcggagcttgcagtgagccgagattgcgccactgcactcccgcctgggccacagagcgagactccgtctcaaaaaaaaaaaaaaaaaaaaaagaaatctttagaagccacagggctagaagagaagtcaccaaacacctagggacagtcctaggcctagaaagccctttaaagtaatagtgaattgttttaaaattaagttattgagtggcctactgactaccatccaaaaacctttatcaccaaatttgttcagtgtttgctattgggagattgtccatatccctccgtaattaagggccagcaagtaatacgatcttcttacagccaaccttgctcttcccaaagggagaaagtaatacatcattaacctggaatttgtgatataacaggtagccttggttaatgtttaccttttcactatgtaaaaaagaaaaaacacacagcaaatagtgcaaataaaatttggtcttttaaagcattttagcagtagctatgtaaaaaaagttaatggttattattcctaaattttcataagacccttggtagacaaaactatcggttatattatgtatatatgaggttagttaagctgcatttagttaggaacatttaatttttacctaaatgatccttttttcatccagaggtagagattttattgtcattatgaatgttactccccatttagtccaaaatagtgagcttttaagttgtgccaggtacttaacaatagtaaaagctattgtatagatttttattcaatgtgacctataatacatttctgattccttctgtattgaatgtcccagtttccatattaagtgctatgccctgtataacattaatgaatttaatagtgtacaattttggg

SEQ ID NO: 13619 - DNA, 1825 bp, Homo sapiens
aatcttgttactagaacaagaaatgtcagatggccaaaaacaagatgaccagatttgatctcagcctgatgaccctacaggtcgtgctatgatatggagtcctcatgggtaaagcaggaagagagtgggaaagagaaccaccccactctgtcttcatatttgcatttcatgtttaacctccggctggaaatagaaagcattcccttagagatgaggataaaagaaagtttcagattcaacagggggaagaaaatggagatttaatcctaaaactgtgacttggggaggtcagtcatttacagttagtcctgtgtctttcgacttctgtgattattaaccccactcactaccctgtttcagatgcatttggaataccaaagattaaatccttgacataagatctcatttgcagaaagcagattaaagaccatcagaaggaaattatttaggttgtaatgcacaggcaactgtgagaaactgttgtgccaaaaatagaattccttctagtttttcttgttctcatttgaaaggagaaaattccactttgtttagcatttcaagcttttatgtatccatcccatctaaaaactcttcaaactccacttgttcagtctgaaatgcagctccctgtccaagtgccttggagaactcacagcagcacgccttaatcaaaggttttaccagcccttggacactatgggaggagggcaagagtacaccaatttgttaaaagcaagaaaccacagtgtctcttcactagtcatttagaacatggttatcatccaagactactctaccctgcaacattgaactcccaagagcaaatccacattcctcttgagttctgcagcttctgtgtaaatagggcagctgtcgtctatgccgtagaatcacatgatctgaggaccattcatggaagctgctaaatagcctagtctggggagtcttccataaagttttgcatggagcaaacaaacaggattaaactaggtttggttccttcagccctctaaaagcatagggcttagcctgcaggcttccttgggctttctctgtgtgtgtagttttgtaaacactatagcatctgttaagatccagtgtccatggaaacattcccacatgccgtgactctggactatatcagtttttggaaagcagggttcctctgcctgctaacaagcccacgtggaccagtctgaatgtctttcctttacacctatgtttttaagtagtcaaacttcaagaaacaatctaaacaagtttctgttgcatatgtgtttgtgaacttgtatttgtatttagtaggcttctatattgcatttaacttgtttttgtaactcctgattcttccttttcggatactattgatgaataaagaaattaaagtgatggttttattggtttcctttcccccaattaaggccaaataaagtcgtgagaacattacccatttacttcctaagagtggatttgagtttcaggagccttaaaaaggactgaagagtttctcctgggactacagcttggatggaaagtttactcggggactggtagaacaagtttctttgaaaggatcatggatagtgggtctggagtagaaggtgatgacaagtcagaaagtgtcttagtcccttcaagttgctataacaaaatgcctcagactgggtaattataggcaacagaaatgtattgctcacagttctgaaggctgggaagcctaagatcaaggtaccagcagattcagtgtctgatgacggcttgttgaagcttgcctgcttcaaagaatgcacctttttgatgcatccccacatggtgaaaagggtga

SEQ ID NO: 13620 - DNA, 1177 bp, Homo sapiens
gaaatcagtttgggatatgtgacgttttagatgcctgttagaccgtatgtcagagttcagcagttggttggatattaagtctggagagttacagggctggaggtaaaattttgggaatcatcagcctttagatagattatttaaagttatctgaccagatgacatcatcaagggagtaaatgtagataggaaagaccagcgaggtccaatattaagagattggggagatgaggaggaaaagagcaaagaaatgaagagagaatggccatagagttagcaggaaatccaagcaggtgtgggcctggaagtcaagtgaagacatgattttcaggagttttcaccatgtcagatgctactgagagtgcactggacttttagtgatgtcagaggaggaaaactctcttcatagtgtgtcttttggaacctctcaataacattaccgggcttaatgaactatggtcatggggcaattggtatttttatgaaatgaaatgtctgtttctggaagacagatctggcagatattaaagcacagagaggtgactagcaaattgagaagtctgccatttgatagtcattcagatacatttatagtagaaaggatgtaagaatagatgcattaatcctttcagctattgagctttaacatccccttggacctaatctgtgtctttaccctcttttttcttgttggcagtataggcataataataaacaatgctgcagaacacttgcatgtgctttcattttaatgtggtgtgataatgtcaatagtttctagaacagcagaagatattttgggactttgtatctagtagtgagtgcttacaccgttgaggaatttcagtctgattaaaaggaacggaagcatttccatcataaggtttttttttttgtttttttttttttttaaacttctgagctgcagctgattatctcagggtaaattgttgtaatttagtttgaaatatgactgtggaagaccttgtgaaattattttagtcctacaaatcatgacttcttgatgttggttaggaccttgaatattcatgttatatattaaagtcttaaagctgattttatttgcttatttttatctgtcagttaattggagagactaattttgtaaaatcacttgggcatttagctaattaaatttatgtgtttgtgggtagat

SEQ ID NO: 13621 - DNA, 1212 bp, Homo sapiens
ccttttaacaaaatcatcttaaaatgctacccttcagccttaccctttaatggaaaaatgaaaggaagtgacaatacgggaggtccaaactttgtccctgttctctgtgttccttacctttctgtccctgtgtatagattatgtaaaagccttgtgtaaatatgagatgttgtcaaaatgatgcagtaaatgagcaatgacagtgtactgcagagaaaatttactcttgcctagaactggagggtttttatgggtctgtaattttcccacactcattgctgaaagcttaattaagtacttcaaaaacgtatctccattgttttaccttcttgaggggaacggtcttgttaaccagccctgagttgtctaccccaaacaatctctgtcattttcaaagatgcaaaatggtgttatttaattgtctccaccattgtcacacacaggaatgcctaataatagcaacccttgtctccctcttctctcctttgcaaatggctcagtgactggaagaggcggactaatagccagagttaaatataaatacaaattaataatacatagagaacagcaataccagaaaaaaagaattctggtaaaatgatgtgaaaaattgacagctccctcactcttaaggttgctgctatatacagtctaggttttctgtttggaaataggtagggtaaaatctaagacctgcacaagggcagtgagagacatttacagcctcctctctatttgtttttttaaggaaaagtcaactcctgaaatgtcccttagctataatcagaaaactaagaatattattctgtgtcaacaatgtatttatggagagaagtaaaaataagttccacagcaacacatttacatgaattatgaactaggattcttggatttcataatcactccaaagctttttggggatggtgtgtgtgtgtgtgtgtgtccgtaattgttcatcattactttttttaacctatctttttgcttgcttaatcttctctgccccagttcttcctgagtatatgaatttgatttctaaaaacaatttattcaacactctatcacccgtattctctctctggctctgctgcaggtctctgcactcctgattttgctccatacttttaaataacaataataaatatacagttttcatttctcatttaaaaaataggtggaaaacaccaaattcactttctgttccattttaat

SEQ ID NO: 13622 - DNA, 1775 bp, Homo sapiens
gcctcccgagtagctgggattacaggtgcctgccaccatgcctggctaatttttgtatttttagtagaggcagggtttcaccatgttagccaggatgatctcgatctcctgacctcatgatccacccgcctcggcctcccaaagtgctgtattttcttatctgatttttttcttgccttattaagacataattttctcccttctgaaatgagtgagggaagttcataaggtaaatccttcccatccatctgtttactacaataggttacaataattcactgatcacatccattttatctgttctagccaggcattccaaacaatttcttatactgctgcccaccaaagcagcttgccaacagtcaaatcactgattgggggaaaaaatcctgaaattttgcttagaatttgagcatttcctcaaaattgagatggatcaatatgtaaggggaggtgggagcgtgtgtggaagggggagagatatacttgagtcttatgattaatgtctaaaccagaatttgtgtctttagaactgaccagactggtagattttattgtattgcttaatgtcttttggtttggatttaggatgatagaaaacagaagtataattggtaaacccttaggaagaaattagaaaaacatggacgtaagacaagaagtctctgtgaagggttgaagagtgacaagcattggtaacagtgccttagaactgtgtcagttagtctgatttggaaatcctttatgtaaagctgagactggtcctggttttgttccctttgggtacagacctcttgtcagtgctataaattgtttaatgaggccattccagcagaaatcaacagaataattgattactcttctctctctctgtcactctccctctttctaaacatcattgaaggctgtctctcttttaatttttgtcagacacagtattttagggtgcatccagtataccattgagcattgtaacctcaggaaacagtttattttgggttctgatatgtagcatggtattttccctaaggcagaactttaaaaataaagaactttcacacaagggtctgtaacaattgtatatcttacaatatttttccttgcattgtaatttttaagtatttatcattttatagtacacatgtaaagaatatatgagccttgtatggagtgatgtttcatttacctgggttgtgttaatgactgaatgttgacaataaatctgttttatactgactgaagtttgttcattttaagttctgtaacatcttggggcatattaaaatgaatattcttcccattaaaaaaatgttaaagacttttttattagtcatatttcaaatgatagatgcatatgggatctaaactttttgtgcaataagatgcctttgtaccttgtatacgtaaagtattcaacttttacacttgatcttagccaaaagaccaagaagcaatgctcttcagcttttaaacattgttttttaaacttttatagttctagaagttaatttaaataaaatggtaatcagatgttaatttttaaaatgtagttaattttttaaactattttttgtaagtgtgttcatgtatatgtagaattcgtgttatgggaaaatgtcacaagtgaatatggaggtaagaataaaggtattcattgcagcagtatttgaaatagaatagaaagatagatatactcactaaatctgtatttagtcctaagtactcaggaggccaaggcaggaagattgtttgagccaggagttcaaggctagcct

SEQ ID NO: 13623 - DNA, 1175 bp, Homo sapiens
aaattgtgagaaggtaaatatatggggcaaactaatggaagatagaagttattttagtaggtagagtttgtttgtgcagacccatctcagtgctgacctgtctccagtgataagggttgttgtcctgtgtgggagagggaatggaaaacatcatcacaaagggaaaaatttattcttgcttttaggcagatagggagaggacaaagagttctttctgtgtttgctgcttcccaatggccttcagctcaaaataatccttatgctgaagtggcatattttggagtggcatattctgatccccttctgtccaaagttcaaaaaatagccataattttattaccataacaaccactatcatctcttgtctgcttttaagcaaagtaaggcaacttaaaatctctttagcagatatcttatggaactatattgggattttgcaaatgtgtatcttttggttataggcgagagtatcttaatttgtaagaactctgagaaatcaaaaggcatagctctccttcagggttctctaaagcctgttcgcagctgtctgcaaagacgagaaggagaagaagtaactggcagcatgatacgagctattctggaggtaagagagaatttactaaattaccatttgctcttttatgcctaaattagtaaaatgttagtatatgaaaatcttagctttatttatttattttttttaatttatttttgagacagagtctcactctgttacccaggccggagtacaatggcatgatctcagctcactgcaacctccgcctcccgggttcaagcaattctcctgccccagcctcccgagtagctgggattacaggcacacaccatcatccctggctaatttttgtacttttaatagagatgggatttcaccattttggccaggctggtcttgaaccagccttcaggtgatctgcctgccttggcctcccaaagtgctgggattacaggtgttagccactgtgcccggtgctttatgttttttttgttttgtttttgagatggagtctcgctgtgttatccaaaatttcagatgaatttaatgattcatttctttttctttctttgtttttgagatgaagtctcgctctgttgccaggctggagtgcagtggtgcaatctcagctcactgcaacctctggctcctgggttca

SEQ ID NO: 13624 - DNA, 1408 bp, Homo sapiens
ctgaggcaactttcctctcagaatacccctttctacagtggttgggtcagctttgcttaagtgcaagactagtaggagggaaagcaacatagccctatagggtgaaaactctctgactttcacatttttctttcagacccggagtggcgttggatggaagcgagtcctgcgttcactctgtcattcacggacccgagtgccacttctagcagccatctactttctaatgattcatgtcctgctcattctgtgttttacgggccatctatagacttagttgttactctttggaccactcccctcaaaacttggaattctctcacctctaacatcagaacatcaattccagtggaacagtcttcccatttacaggtcttctctccaactcttcacggaaagtgcctgcaaaaacagaggtggatacgaggacaggttggagctgcagggactggcgagtctgctttcttctactgccctgagcctgaacgcttctgcttaatctgagaatcacatttggtttgttgagcctaatatttgttgagattttgcaggaccctgatcttttgtggtcctgtaaaagatactgaggaatgtctttcagccaagccaagaggatggtttcaataaacctaataatctgaagttcagtatcattttgattgataactttctttgccttgtttgcctgtattttctcctgtttcagggggaaggtggctctgccataaacagagttcagggaaatgaacatgtcacctcataggacatctgatttaggtctcttgcagaatagggtggtgaaagctgaaggaactccctaggggttttagctgttagatcacatgggaggacagcatcttcttccctgccaatttcagatataattggagggagaatttcaggtcttagactataaggatagaatccctttgcttttgcccttgatcacatgtatactaaggtattaagtggcccaagtctttcctttcaccaaagggcagggagaagtgtctatggacagcagggttccaattcttgtcattccaggaatatctgaatattcctggaatgtggaccctgagacagtgctcaggggccactgggagccaatattaggcattgactctcagccaggagtctgactggtctaacaccacactgcaactcctgacctcttgaagtactaagctactttgctgttagtgacagttattacagtttctcagccccattgtctctgccctctgtggcaatggaaggagaatatagagaagacaaaattaaatatagatagacctgagaaggacagccaggatagaattccatttgtgcctattccctgcctcccctcccctcccccatcctaccagttggttattttctcattgcatacgtgatgtgttcactg

SEQ ID NO: 13625 - DNA, 1161 bp, Homo sapiens
caaaagattataagcctgctttctggcaaggaagaggcaatccaagtagctattgctgaactgcgtcagcaacatgataaagaaattaaagagctggaaaacctgctgtcccaggaggaagaggagaatattgttttagaagaggagaacaaaaaggctgttgataaaaccaatcagcttatggaaacactgaaaaccatcaaaaaggaaaacattcagcaaaaggcacagttggattcctttgttaaatccatgtcttctctccaaaatgatcgagaccgcatagtgggtgactatcaacagctggaagagcgacatctctctataatcttggaaaaagaccaactcatccaagaggctgctgcagagaataataagcttaaagaagaaatacgaggcttgagaagtcatatggatgatctcaattctgagaatgccaagctagatgcagaactgatccaatatagagaagacctgaaccaagtgataacaataaaggacagccaacaaaagcagcttcttgaagttcaacttcagcaaaataaggagctggaaaataaatatgctaaattagaagaaaagctgaaggaatctgaggaagcaaatgaggatctgcggaggtcctttaatgccctacaagaagagaaacaagatttatctaaagagattgagagtttgaaagtatctatatcccagctaacaagacaagtaacagccttgcaagaagaaggtactttaggactctatcatgcccagttaaaagtaaaagaagaagaggtacacaggttaagtgctttgttttcctcctctcaaaagagaattgcagaactggaagaagaattggtttgtgttcaaaaggaagctgccaagaaggtaggtgaaattgaagataaactgaagaaagaattaaagcatcttcatcatgatgcagggataatgagaaatgaaactgaaacagcagaagagagagtggcagagctagcaagagatttggtggagatggaacagaaattactcatggtcaccaaagaaaataaaggtctcacagcacaaattcagtcttttggaaggtctatgagttccttgcaaaatagtagagatcatgccaatgaggaacttgatgaactgaaaaggaaatatgatgccagtctgaaggaattg

SEQ ID NO: 13626 - DNA, 1197 bp, Homo sapiens
acttcagtgcaggattggcagagtgcccttggaggtccagctgggagatacaaactgattttaaaaggatttagcagtgttatggtacaaagaaggttttgaccaaaaagtctgaagttttagaagatgaaatacaagtttttagttgggctatttttttaatgttataaaacatttgattacagctttttttttcttttttaaaaatagatcagcattgttgatattgccaacaagaggagctcttctgctgaggaaagtggacaagatgttctagaaaacacattttctcagaaacataaagaattatcagttttattgttggaaatgaaagaagctcaagaggaaattgcatttcttaaattacagctccagggaaaaagggctgaggaagcagatcatgaggtccttgaccagaaagaaatgaaacagatggagggtgagggaatagctccaattaaaatgaaagtatttcttgaagatacagggcaagattttcccttaatgccaaatgaagagagcagtcttccagcagttgaaaaagaacaggcgagcactgaacatcaaagtagaacatctgaggaaatatctttaaatgatgctggagtagaattgaaatcaacaaagcaggatggtgataaatccctttctgctgtaccagatattggtcagtgtcatcaggatgagttggaaaggttaaaaagtcaaattttggagctcgagctaaactttcataaagcacaagaaatctatgagaaaaatttagatgagaaagctaaggaaattagcaacctaaaccagttgattgaggagtttaagaaaaatgctgacaacaacagcagtgcattcactgctttgtctgaagaaagagaccagcttctctctcaggtgaaggaacttagcatggtaacagaattgagggctcaggtaaagcaactggaaatgaaccttgcagaagcagaaaggcaaagaagacttgattatgaaagccaaactgcccatgacaacctgctcactgaacagatccatagtctcagcatagaagccaaatctaaagatgtgaaaattgaagttttacagaatgaactggatgatgtgcagcttcagttttctgagcagagtaccctgataagaagcctgcaaagccagctgcaaaataaggaaagtgaagtgcttgagggggcagaacgtgtaagg

SEQ ID NO: 13627 - DNA, 1223 bp, Homo sapiens
cagctgtctggggaggtggtgtggatttagaagcacatgaggttctttggtagaagcaattctttgaaaataagactagaaagatagattggtatttccagttgtagagaatcttgaataaatgatatgttagtttgaattttcatttatagggcatgagaattttactgaaagcttttcagccatgagcaagaagtgtccagggtttaatagaaatctaacttaacttcaccttatgtgtttaatatcttaatctttttagaactttaaaaaatacacttcttgtatatttaaaacatttctagtaaccatgaacatataatttttgatcaaaatttatgtttaggctaacttctgaatttgaaaataggctttctctcgcatttcatagttactgtccagcctatctctcttccaacatcctcatccttgacaatcaaaatttcactttaaaaagctactatcaagtctcagtgtctgtcttggaaagtagtctgtgagttttatttgtgcaatattcggggagtgtaacttgcatagtttctctggtatgtgtcttcagttgagttccatgcagcaggtggtccgagagaaagatgcccgctttgaaacacaagttcgtcttcatgaagatgagcttcttcagttagtaacccaggcagatgtggaaacagagatgcaacaggtgtgttgctaaaactcggtagaatgactgtcattttggttaatatttaatccatcacagccaatttcctacccttacccactgctcttcacttggtgttagtgttttccttattggcctcttttgtgtccttgtcttctgttgcataaaaattatttattttttcttatccttttcttgccttttacccctctaatcaggttgttggtgctcaaaagctgagtttagttggtgaatttatgtggtagtcaaaaattggtttctcttcagttttctgattatagctacctttgtgcattacacacctaacccaaagcttcaaatcaatgaagtcagttttaaatatttaaaaaattagagaagacaaagaatgattttgaagacatgaagtcttttattagatcagtaattcttttttaaaaaaatttgagtagattttgaaaattggcttcattgtatttgagttcaccatctactaactcaaagtattttatttcacttagtgtgtagtgcattgtggtactgaaaggcacttcag

SEQ ID NO: 13628 - DNA, 1200 bp, Homo sapiens
ggctgagggcctgcatttctccttctttccctgcagccctggcccgccaccgctacatgaagcaggcccaggccctaggtcctcagatgatgggaaaacccctgtactggggggcggacaggagctcccaggtttcatcttatccaatgcacccgctgctgcagcgaggtaaactcttccagagatttgggataggggagggcagagggcaagggcgggaacatgggctacatcaagacctctgtgaccgatgcggcaggcatcttcatgatggagatgggagggattcatgctaaccaatgtcacattttgatgtcctgattctgaggtgtatgttttgggccatttgttctattgtcctgtccttgtttccattcagatttgtccctgccgtccagcctcccgcagatgccaatgacccagaccaccaatcagcctcccatcgccaatggtgtcctggagtatttggagaaagaactgcggaacctcaacctggcccagcctctgccccctgacctcaaaggcagatttggccatccctgcagcatgctgtcctccctgggctctgaggtcgtggaacgcagaatcatccacctgcccccactgatcagagacctgtcatcctcaaggaggaccagtgactccctgcaccagcagtggctcaccccaattccctccaggccctgggatctgagggaggggagaagccaccaccattaccctgatttccaccaggagctccaggaccgggggccaaagtcttgggcattggaaagaagggagttggacccatcgtggagtggaaggcaccgtagctctaggctgaatgggtcacccatacactggtcagacagggacagcctaagcgatgtcccctcatccagtgaggcacgctggcggccgagccaccctcctttcaggagccgctgtcaggagaggccccgcaggcccagcccccgggagagcactcagaggcacgggagacgacgcaggcaccgcagctactctcctcccttgccctccggcctcagttcctggagctctgaagaggacaaggagaggcagccccagagctggcgggcccaccgccgcggctcgcactccccacactggcccgaggagaagccgcctagctaccgctcacttgatatcactccaggcaagaatagcaggaaaaaagggagtgtggagaggcgctcg

SEQ ID NO: 13629 - DNA, 1541 bp, Homo sapiens
aatcgtggtaggacagcaagttttgtggagttttaacttgctttattcctgtcttctttcagcttcacaatagtcttgaaaaccaacagcctcacaaatcacagttactttgaaaaccagcagccttgcaggcactgaagaaggcagaatgggtttaagagttttccaaaacttccagctgcagagaattgttactatttgacttgtctgacagttcgctggaaaccccactcacagggcttatcttttttcacctgacttggagtttattcactgcaaacagtgttttccctggtgcatttgttgaaaataatcagcagcacttgtttgacataacatggagtgggtaacagctgggtcaaacaagaagctggggaatgagatgtccatcctgacatctggaaagctctgacatatttctagaatgtaatatgtgtaaggttggacacattttccaggaaaaacctgagaggtctctaagctctcacctcacatttagtctctgtccgagcacgaatggaaggtgtgttaggccagtctcgcattgctaaaaagaaatacctacgactaggtaatttataaagaaaagcagtttaattggttcatcgttcttcaggctgtacaggaaacatgatactggcatttgtcaagtttctagggaggccttaggaaacttacaatcatggtggaaggcgaagggggagctggcatgtcacatgtccagagcaagagcaagagagatcagggaggtgccacacacttttaaacgaccagatctcataagaactcactatcacgaggacagcaccaagaaggatggtgctaaactattcatgagaaatccacccccatgatccactcacttcccaccaggccacacctccaacactgggggttacatttcaacatgagatttgggtgggggtacagatccaaactatatcagaaggctaaggcagtgttgcagactgcctgcctgagggtagaagacatgccccaacatgcacacacagcccgtaggcaaacacttaataaacttaaaggcatttattagtctctccagttactagctgaccactaagataaccagacagacctctgtggccaaacacacaaaggatacaaggagagactatgaacaactctatggcaaaaattacataaaccagatgaaatggacacacttttagaaaaagaaaaattatcaaaactaagtcaagaaaaaataaaatatctgaaaagtcctgtaacaggagattgaactagtgattttaaaacttcctgcaaagaaaaagtccaggcccagatggcttcaattgtgcattctaccaaacatttaaagaaaaaaatagaattaatctttcacaaattcttccaaaatacaaaagaggagggatcacttcccaatacatttgatgaggccacattatcctcataccaaacccctcccaaaaaaatctcaagaaaactatagacccatatatatcccttaggaatattgatgcagaaatcctcaagaactgctacaaaatgaatccagt

SEQ ID NO: 13630 - DNA, 4180 bp, Homo sapiens
ctgcagactggatattacttgcatatgtatttaagatgtcagtttataatactagctttcagatgtaatcccagcagtcatttctgtgctattataaaatacttatgagatacaaataatctttctttacatcaagaacagagatatatgacaaaatatagtttaggaatatatagttatggaatttccaatatttattgaagttttcaataaagattttcctttattcttcattttaggtctggataaaattgagttcttacagagtcatgaaaaccaggagatctaccaaaaggcctttgatcttattgagcattacttcgggaccgaagatgaagacagcagcattgcaccccaggttgaccttaaccagcagcagtacatcttccaacagtgtgaggctcctatggaaggtttccagctttgaagcaatactctgctttcacgtacctgtgtcagaccaggctacccagtcgagtcctcttgtggagcccacagtcctcatggagctaacttctcaaatgttttccataatactgtttgcgctcatttgcttgccttgcgcacctgctctcttacacacatctggaaaacctccggctctctgtggtggaatacccttctaataaaagggtaaccagaacggcccactctcttttacggaaaaatccctaggctttggagatccgcacttacattagagttatgggaatatacacatattaatgtggctccctttttcttgtgggggaataaaagaggactcctcctcattccctttaacatgggggaaaaaactgacattaaaagatgagactaaatctttatcttgaattttacacaactacttacgacaagggagatgtttagacctgttgtgtatacttcagagtacttttcatgagttcttccacagtgaacccttggattacctggtggctttttctagccagatttgcattaatccttactgagattggatggttttctttcctctattggcgccattcttcagatattaaagttaaaccatccactccctcaccttcagccttcagtgaatgtgctttctagttgtcaggaatgctgaagaattaacactttgactcctaaatgtgatactggtttgtagattcccttagagcagaaaggagaggggcacatattaatttgtatcgcttttgcttctctttggtcttttgtgtcttagaatttggaagtggttcatttctgttgctggtatgaggatttcgaatacttagtaatcgaaaaccatatcctgtaatttaataaaaaaaactaaggacgaaaaaaccctccaattttcccaaatgcaatcagtgtaactaggggctgtgtttctgcattaaaataaatgtttcaggctttgtggtcctgatcaaggtcctcattaaaaaattggagttcaccctaggtgcttttcccctctgtgactggcagataacacatacttttgaaagtaactttgggatttttttcttaggtgcagctcgattctaatcttttcatgctgcacacgattcctttaatgtagcatccttatctgaaagaaataaccatcttctcaacatgacctgcttaacccaaataagaacagtgatcttataacctcattgtttcctaatcattttatttcatctcctgctagtactgtgccgcttccccctccccccacacaaaataaaaacagtatctgccttctggctcatttaatgatgactgcaatctgtacctgcaaatggcgcttccagtactgtgttcagtgatccacatttgtgcttggactggaatgaaaaaatacgcttaattgccaagacaactgcaaatgagttcaatacgacttctcggtgctagttggccatcttgactcaatgttgggatacactaccagagaagatttttttgttgatgtgctgttcaaagtgaattctgaaggaaaaggttgctcacctctgtttcagagcatacccttttaaacctttttagacttgtcctcttctagaattcattataaccccaaagtgtaaaaactatttggaagttgcccctgacaagctattatacatctctggtaaatcctgctgaatgtaagggatattcagagcttttcatacctcatcatgatgttatttaagcagccaacttatgtgacctgatttaaacttttaaaaaatccacttcattcaaactagaaagagtcaaagacaaaggacatttatcagccaagagtgtgacgcattcttcgcatctagtctgtagtagtgtctgtgctctgggatggataccgtctgatgtctgtttgttattgatggcgcagccactgcaaaactagtcaactcccatctataactgttactttttctagtgctgctttgtgctgagagaacattttagtttactgcacttgacctgtaaaagactgattctttgtaattttagggataaattaggtggttaatttaaagaagaaatttcaatgttgcctttacatcacattaaaatataacttctttcagaaggataatagaagcactgattcatagtaaaaatcttgtttttagctttgacttttttgtggctgttttttaaaattgtaaattactagtaacatgtcatttctataggatgttttaaattatgtaccttccattggatagttaaaataatttcattttataagccaatttgagtgggaaagatacaaagcacacagttgtctccccacattaggaagagtagtgtgcattcagacattcggaatttttgctagtagttggagatgtttcagtgagtgaattaaaacaaagtctatttaactgacgtgatctattttgtgtctaaaacagaggaatttatcttgtcctagaagttcatgaactataagatctaagtttttttttcttttttaacaataaaatgattttttcttaaagtatcaaagttggaattggctaaaagtgaagtagcataactcagatatgttggaacttggtactgaagcaggctttttggtaacagaaatgacattttaaggggtaactgtatatcctgtttttagttctttgcctctcagattctgttaacttagtttaaattcactgaataccctaccactaaggcgttgctcattacaaaagcatgttaatttcaatacaggaaaactcttttgtagttttatatatggattggggaaagtgactttgttttacttttcctttttattcccctccatcctccaaacttccaatctatattatttgtaatgagaactttggtgggggaaaaaaagcattaagagaattttggatgtaaaggcatctggtatctgatggaccagcaggtagatgtggttggattgagaaattttgggtaaggtagatgatagaagaaagagattttaggagacacagttctctgtggaacactttctttcatgttcctgtaactaattgatcaagacccttttaaacgcttatctttgtcagttccgcttttgaaaaaactattgccctaggattgtttcttccatatgacagatgaaggttattggctctgagtcatttttggcattatcgtcacagataaaaagattggcaattaatctcataaaaaatctgaattattccagattgctgccgatttttgcctaagaaacaatatgtaagtatattttataaaccaaactttgtcaaccaattctattgtacgtctacccacaggcaactttgaatttacttctctagtgctaaataaacatttcagcgatttaatcccccaacttgggggatgcattatgaaaaggttttcctggagtcaaggggtttttctttctcgctagttttgtgaaaatttttatatcaataggcaaatcattataactttttaggggttgatggtttttaagtatattggaaattgtggtgtctaaggatgatgttcagtgaagaaaagggatccacttttagaaaccagcattgtttgctttcaactttcatactgtatgctaactcctacgttccaaaatgtgctcatttgcagacacaggtatgcctatatacatggaagtctcaaatctgaatttttatccatctcaatatgaccatttctctctgttgtgagctgaacagattaagtatatatctgccaggttgggaaatat

SEQ ID NO: 13631 - DNA, 1193 bp, Homo sapiens
gatgtgaaagatgacaggattttgattgagtttgatacacttaaggagatggtaatcttagcagggaaatcagaggatgtccaaagcattgaggtacaagtcagggagttaatagaaagcactactcaaaaaattaaaagggaagagcaaagtttgaaggaaaaaatgatcatttctccaggcaggtattttcttttgtgtcacagcagtctactggaccatttactcacggagtgcccagagatagagatttgttacgatagagtcactcaacacttgtgcttgaaaggacctagtgcagatgtgtataaagcaaagtgtgaaatccaggaaaaggtgtacaccatggctcagaaaaacattcaggtttctcctgagatttttcagtttttgcaacaggtaaactggaaagaattctctaagtgtcttttcatagcacagaagattcttgcactttatgagctagagggtacaactgttctcttaaccagctgttcttctgaagccctgttagaagcagaaaagcaaatgctcagtgccttaaattataagcgcattgaagttgagaacaaagaagttcttcatggcaagaaatggaaagggctcactcacaatttgcttaagaaacaaaattcctccccaaacactgtaatcatcaatgagttaacttcagaaaccacagctgaagtcatcattacaggctgtgtaaaagaagtaaatgaaacctataaattgctttttaacttcgttgaacaaaacatgaaaatagagagactggttgaagtaaagccttccttagttattgactatttaaagacagaaaagaagctattctggccaaagataaagaaggtaaatgtgcaggtaagtttcaatcctgagaacaaacaaaaaggcattttactaactggctcaaagaccgaagtactgaaggcagtggacattgtcaagcaagtctgggattcagtctgtgttaaaagtgtccatactgataagccaggagccaagcagttcttccaggataaagcacggttttatcaaagtgagatcaaacggttgtttggttgttacattgaactacaggagaatgaagtaatgaaggagggaggcagccccgctgggcagaagtgcttctctcggacagtcttggcccctggcgttgtgctgattgtgcagcagggtgacttggcacg

SEQ ID NO: 13632 - DNA, 1197 bp, Homo sapiens
taaagccacgtttagatggatagccatctcattcttgtagccaagcatgtttattgtaatttttcttccatctctgaaataatttgcttgtcagactctatagggattattcctctgtatgtggtactttaaaaaaaaaactttaaacatgtcaaataatggaaaagattggagaaaatatcataaggtgattcatacttaaggccatgacttatagatagaatacatacttaaatttgattggtgaaatattctgcagctcttctagatggcaggtgatagtaaatacacaaaaattgtggttctaccaatagcatattcattccttctataacaaagcttatattaatgagagaacagaagatgaaattaaaacagactttattatctcttaaaaagccatgagacttaacagaagttaaaagcgtgtttttttaattcaggaagaggatcacctagcccgggtagaagaggcaatcacccgtatgcttgtgtgtgccctgaaaactgcagagaatccacaaaataccagagcctggttaaaccccactgaggtaggcggcttctggtcttcatcatggcagttagtttcctgtggtaaaccagccctgactagaacatatgttttccagtgtaactaaatgtatgtaaccattttaaaaggtttttctcttcccttaggttgaggaaacgtcccatgcagtcaactgttgctacttaaatgcagctgtttctgcattttttgatcgctgcagaacatctgaggtagtagaaatccaagcactgagaacagatggagagcacatgaaaaaggaagaattaaatgtgtgcaaccacatggaggtgggccaaacaggtagccagaacttgaccacaggaacagacaaaccggaggcagcaagtccctttggccctgatctggtccctgtagcacagaggtccgaagaaccgccttcagaaagaggaggcatatttggaagtgatgggaaagactttgtggacaaggatggagaacactttggaaaattgcattgtgccaagagacaacaaataatgagcaacagtgaaaatgcaattgaggaacagattgcctcaaatactactacgactcctcaaacattcatttctacggatgacttgctggactgcttggtgaatccacaagtaaccaggatagtggcacaacttttgatacaa

SEQ ID NO: 13633 - DNA, 1140 bp, Homo sapiens
aggtcagagtactaacttgtatcttttttttttttttttaattaggaaacgatggcatctctttcctcctgaagatactcctttcctttatccaactagaatcccttatgaagaatctagtgtgttcagtaaaatcaatgttgtcaatcctgatttaaagcgttttcctcagttccggaaagctcaaagacatgcggttacactgagcccaggacaggtaatagggctttaaaacattaatgacctgccaggggacaccacagctgtaactctctcaagtccttatgctgtgtgcttcccctccctgcgcagtgcaaatgagaatggcttccttccctctgctctgctgttggaaggtagcttccccagttgtaggcttcagacacatacacctctgcttcacaggtcctggaaaggaaatggcaagagggaacacagctcctcctattggtaaagaggagaatggactttggaggaagacagtctacaagagtcattttcatttaggtcaggagaaaatgttcaaggcatgggtactcgagcatctctggaacatttaatcacagttagtatctgttcaattatgatagcactgaacccagacacataaacacaggtcggaatgcctccaggtgtgggccaacgggcagaaggaaccgagaatgtttgcttttaagcaaaaatggatgttgttttcataaattactaactctgaaacatttccaaaggtactgtacatagtgctgcttcccagtgaggaaaatttccttttcaacattggcacttgctgtctgatatttcattaataatttgaaaggttttcttagtcacttaagaagattttattctctcgattatccctctcccttgcctgtcttccatccattgtaccggtctcactggctcttttcctgcttccttcactcaagtactatcaactcaaacaatttcacttgactgagttgcctcgacctgttagtcactctgcattcccctctccccacagcccctgacaacaactaatctttttctatctctagatttgcccattctggacatttcacacagtgcaatattataatacagggccttctgtgtctgacttctttcacatagcataatgtattcaagggtcatcca

SEQ ID NO: 13634 - DNA, 1124 bp, Homo sapiens
ttttccaaattgtatttaatgtgtgtgtattaacttataattggaactatatatactttttattgttaataagttaaatcataatttctaagtaagtattttggaaaacactatacacattaaaaaaaaaaaacaacaaaaaaaactacctgttgagtactgtgctcactatttgggtgataggttcaatagaaacccaaatcttggcattctacaatatacccatgtaacaaacctgcacatatacccctggatctaaaaaaagaaaagaatcaggtcttttgaggccacatgtgtatataaacagcagtaaatgacgtatacattattgtaattgtagagaatgatttgccatgataaaaacaatattagctattttttctccatattgtatgaaaaaacttgatagttttctatctattgctgtattcatttctctttctaggtgaacatgtcaaaccttttaagccagagaaagcaaaagaaattatcatgtctttacaacaacctgcaatcttctgtaacatggtgtttgattggccagcacgacactggaatgctaaatacctttcgcaggtccttcatggcaagcagatacgattcagaatggggatgaaaagcatgagcacaggtatgactataggtaatcaccatcataatgtctcttcaggagcatccctacattctcagcagtggcctcctgatctcttgagaatcctttctttctaatcctttttttgaccattcactgcacatacaggaacattttattggaaggtttggaaaacagtttggcttaagtgttttttgtttttgtctgtataaactatagactgttttgtctatagtttataaccccatacaaaatgtatttgttcatgtatcttatatgtatattgctagacattattgtggttcattaaatgttagacacttaataaataaatatttgttaatgtgctcttattcatgttcctattagaccaatactaatctaatagtcccgtccactttttactcaagtagaatgtgtccttttatttgtggcttcgggcactatttatagttgtatataattacttggttgtaattttatccctctgctttattgactgactgacctg

SEQ ID NO: 13635 - DNA, 1160 bp, Homo sapiens
gcactcctcaaaacattcctctctccctggagcacatgtgaatgattatctatgaattgatcttgagctttcctgtgtatcctttcaggttatattttttcttctgagtttttagccctagttaaatcacacagtcaattctctagaaataggattgtgcagtggaaagagcactggacttggactgaggggacctgataaatctggttccagtcctctgacatctaagcttccatttcttccttcaattaatggaaatgaattaccgtctctgcctgttttacaggcttcttataagatcacatgagcacttttaatgtctgtaaaagtgcattgtaaacagtgaagcattaaacagttaaatgtatggtattgttatgatgcctgtgttcaaaatcaagctactcatcttcccaaaagaatgagctattgctcctgacttctcttatggcaagtcaccaagtctagacacctcagtcttttggctacatctgactcccaccccacatctctggttgtaatagcctttgatattattctcttagtatttcttcatcttcaccatatctgacttactcactgccacccctgttgttcaggcctgtatcatacttatcgcttggctattgcaatagctctctgagtcaacttcaggtccaactctcccttcccacctcatatctctacatatttctagacagccctcatttttagtggatatagtatactatgggattgccttgtcataatttagtaaatatttttctgctttggggcatcaggttgtttacattttttgttgttatagtgtggtagtagacatttgtgtgtgtgtatgtgtatgctgtacatagcttatgattaattatttgttacagtaaattcctttaacatgagttactgagataatgaacagttctttcatttttcccagttgtttcccaaaggatgattccaatttatatcccatgaaaaacagaatactatttatcatgaatatattatagcttttcatagtgtagggatcaaaatatgccacccccaaatatgccactttggtatattgattattttgggtaaaaggcattgaaaaggctgggcatggtggctcatgcctgtagtcccagcactttgggagaccaaggtgggtggatcacaag

SEQ ID NO: 13636 - DNA, 1804 bp, Homo sapiens
agtaatttattttgtaaccaaagtcaaggtggattaaattgatgaaaagttatgaacaatattgattaaaaatattccacatggaagccccgtcatatattacacacatcacttagtctccagattgtcactatttattgaaagccagtttctaggccttccagggtacatttattataagtactttttaatgcagagcagattccttccggcatacaggtggtggtctgctggtgatacatgaatgtttaaaactgcatgtttttttgtcttacagagttgtcttggttcaactggtgccttcccgggtcgtgtttgctcagtctcctcctcattctgtgcttcagggaatcctatgacagactctatcttgatgtggttgtctccgtttaatagcacagacttgaaggagtttaaaaggaggctggaaatcaatactgcacactgcacatttgctcagaattgcacatctaacaggaaaagagggagaagaaagaaacttcattcagaggttttgttaggttacagattatcacattaatttaattactactaggtaataataatgggagacttgagtgataataggggattttaaaactctacagatggcatacctgtgcctgcttctggggttggaagtgtgacttcttacacataaagcactacctaagtaattctctctctgttttgtgccagtgctaaactactgattacttgtaattatgaaaagaaataaagggtgtctatcatatgaagataacgccttccctaagtcacatatcagaataggaagatatgccactaacttctaaagaagttcaaaccctgtatccaattttaatgataaaatagccaagaggtatatcgatgatggaaattagccacatgtacactacattttttctaataaagccatttcttatatgactccttattttaatcaggtcagaagcccttggccatctttactatggtgatcaggtgctttccagtgacttctgagcataggcactgtgtctccatctcaacttatccttgtttctgtgaaatacaatttcatctactaggcccttaaataattatgtgagggtgtctaaatgtttaatatgattacattaaatattgtatgaaaaaatgtaattccattaggatctagcactttgttacaagtgaaatgacaagtcacatggacatactgtgtcttctgcctgtatatggtggcatgagatgtaatgtccagagccaacaattatttaccagggttagattttattcagtgacccttgtttaaaaataataatttatcacattgaaactttcagctctgtcgaatgatttctgaattacatcctgtgtttcagcttaggttgtaaaatactccgttctctgtggagtcagcatatttgagagggcagcgttttgccagtacctatcttctttctacagaagatagctttttaagaaataagagttccacattgagtggctgtcagacacagatttcactgtgacgtaaaatacactgcagtgagaatatggtatcaccactattcatatttacatcattcccctcacacagaaaaaccaacccttttcccaaaaagtcaagaatactgctatacctttattattctcagcttcctccagcccttcttgtttttcctcacttgaaattgaaccttcattgtcagctaagtatatatacttttgtgttttcctggacagagtgcaagtggctcttatcagccaaggtggtgaaggttcaggaaagctgggcagcactgggccctgctcctctctg

SEQ ID NO: 13637 - DNA, 1155 bp, Homo sapiens
gttcatccctcttccatgccacagttcttcaaacattggaagttgatgagcctgccacctcttccccagttcagcagtcctcctctggcttgtctcttcatctctgggcataggactctgaagatctcccacttctctacagttgaggtctccaggaccaaagatggccctccaggtgaggcctgaccagcatacccgtatgcttagctagtgcatctcctgttaacatagcctcaactctgatctggctgtctttagcagccacacagcactgctgatttcgactgagcttacagccaaccagcaccccagggtctctttaacataacgcactcagccacatcttcccaattttacctttgtgtttgtattagttttctagggcagctgtaacaaaacaccccacactgaggggcttaacaacagaaacttattgtcttccagtcctggaggccagaagtctgagatcaaggtgtgggcagagctccttctgagggatatgacagaagatctgctccgtgcttccctcctggcttccggtggtttgctggcattctttggtgtttcttgttttatagaagcatcaatataatttctgccttcatctttgcaacatgttctccctgtgtgcgtgtgtgtcaccaaatttttcctttttataaggacaccagtcatattgggttggggcccaccctccagtgtgacttcatctaactacatctgcaacaatcctatttccaaataaggcaataatctgacatacagggggttaaaacttcaacctgtgagctttgtggggggacacggttcatcctacaacagtgctgcagctttttgacctcctgtttcgagactacatttttccctaatttattttatcttgaaaaaacctttccagctgatgaagatatttcggatcctgcctctgtcagccaacgtatgtgctattgctctcagcttcaagtgcttcttgtatattgatccaaggatttgctaagaggttgaatggggtggtgtgggttggagctctgcagcatggcccctggacacttccctgcaggcggccaggatccattgctaagcccccttggggtacaactgtgcaaccagctatatgtcccactaatgctactgccttccagcttcctctttcta

SEQ ID NO: 13638 - DNA, 1190 bp, Homo sapiens
ggatctaaacactacagaaatgtcaaatagtaaagtcaaatgcctgatagaggtctaaaggaaaagcagcatacccacacgttcctgctccccttctagctgcctcaccccaacatcttacctcccctcacatctctccacctcccacatcccttctcccaccatgtctgcccctgcatcctgtctccccagcttctgcacagctcttcctcctgctgtttcattgttccttttacgctgaatggtctggtcatggtgactgcccttctcaggccagcttggcggagtctctagaactgcaattgtccagcctgtcctcagtctttgttcctctttccccactctgggaggcgtctttggttttctgctacacagaggcagtgccttttttttttttttaagcctacattaaataaaaaaaatcatccacatctggccctcctgacacctcttggaagcatcttcatgcactttctgaaacagccctccctcccattactcattggccccactctttctttcggataatgagaaaattagatgcaacagaaagccattaatctgaggcctagatattttaaattgatggtaacaggaatttacactaggctgacagttacctttagactttcaatgaacaaagaggttaaaaaggaaaaattaatagtgaaaccaggttttgaggaaggggggtggttattttcgccagcctaatgctattatgggcataggccacacacaaggggcctgcagctgcctgcaggagctgtctgtgacataccttgttaaccagtagattgcgctctttaagtgttttgaaaattttataacatcatccctttatagtgtgacattttcatgaatttgagctatttttctttctgttatgtcaaattagtgaagtgttacttgtaatttccattttaggctattaaaaaatcatccagtctctgccatgagctaggctgtgctaggcacattgctaagctgtgcttgtctcatttctgatataacccatcactggcccaggtctcttctgctccttctgcatgagacttggcaaagccctctacacccccaccccccatcaccccccacaatgctctgggccagctggccactctgccagccaggccatgtgggtggtcctgctcatctcaagactggctcaaggactaaattcagattaa

SEQ ID NO: 13639 - DNA, 1274 bp, Homo sapiens
taatcgtacctttggcaaagcagtgttgtgacgattgagtgcgtaaatgtaaagcacttagagactggcacatcaagtgctaggagagcgtttgccaccacgttgtggtcttccttgttgcagttaaaggtgctaagagtcttttaaattgcaaatgcccctgaatgtcgtaaatcattgcacaaaacttttcagaagccaccacttaagtaagaatcccattgaaatatctagcaggcaggcacttgtgggcagacttctggtcagggcactggaggtgcatccaaagagagaagagggggttgaaggactcacatttgccaaatgcctgctgtatgccaggtgctttgcccaccttaaagtcctcctgagggaaggaagcaggatgaagccctgtgtcacacacctgggagtggtagactgtgctcgccagtacctgcagagtctcccaggcactggggtgctggtgagtgagggaggtgcctctaagaaccttgccctatccagcatggaaccagcattttggtcccaacacacctgacttggaacattcgaatctgatctacaatttgctcatggatggcagcagcccttgtgcccacactctgagggccctcgtgagtgtgcacacgcgttgatgggaagatgaggggtgtggggaggcagccacagccttcagctgcagtatcatgcagatgctggggacgtgagagctgaaaggcgctcttaaattgcacaaatgcaacatggcttttaaaagaatctgaggcaaaaggcaccctccaaaaaaacccatgtgagccgggaggggactgccactatagctaacaaagtggggaagcaattttgcaaagtaagaaaactagtctcaggctaaccagagatgctgacaaacctgagattccaggcagatctaaattagaaatcggtcaagggaaaaccgtgatagtcccccttatggattccagtgagaattctttaaattcatggccctgatggagtagcagtaggagagagaggccctggggatgcaaatgccctcagtggatcagctctgctcactagacacttgggcaggtgaggttgggcgctgggaatcccgtggggacaggatgcctgcctacttggccctcaactctaggtgaatcctatccttctcttcaccgtcttcctccccttccctctctggaccctctgcttgctctgtgaacctggattgatctccactcacccgtcactcctgaatggggccctcgaagggagacacccctgac

SEQ ID NO: 13640 - DNA, 1408 bp, Homo sapiens
tgcccaggtacgtcggcagtggctgggcatcagcgttttgtaatgctgtgggtgattctgttgtgcgccaggattgagaactactgccctgagcctccctcatcagcggaggggtcatgtgatgacaccgagtctgatttatggctgtattgaaaggcaagttgtttatatctaaggggtttattgtggtgattcagtaaggagtgatggccactaaaaatgattgcaggcgtgtaagaggggaagaaaacttggttggtggttggtataaaaaccttgtcaggcaaggctgtggcttagtatatttatgttgctcttatcaccagcaattaaccccaaatgtggctggataaatggcttagtgcagtgctataataactgcaagaatattttaggaaatgactgttacacatggctgatagactgaccatcttagcagagcagcaaacctcactcaacattcctgaaggcttgttagctacaaacaaatgcctattgatccgtcaaatattaactctattagctctttcctcctctctctcatttttttttttcttttgagagaggcttgctctgttgtccaggctggagtacagggctattcacaggcacaatcatagtgcattacagtgttgaactcctgggctgaagtgatccttctgcctcagcctcctgagtaggggggatatgatatttcactgttgagtagggagaaattgtataaacacctgtggccttaataccctcagcagtgttcattagtctttgtgaatctgtctttgactccgctgtaaactagaagtgtctgtagtagatgctcaataaatagctgctggctggatgaatgaatttgctccagtttactcaacaggtagatagcagtgttagtccggcactagtactttttcttcacctctgtagctcatgagaagcacagaattatatagccggcaactccccatatgcgtttgttgttagcatgtgtggccaagactaggaaagttaagaaaggtgatgtgcagggtgaggaaaggatggggcttgtaccctcagaggatttccttcctgtccactgtgtggacagttattttctagcacctttggatcagggcaagaagggcaaggacccttctgctgcaggtccgggctctgggaggacagagaagcagatgaagttggggtctgtctgaggactgaaaaggttggcaagcaccagctgtggggctgggacctggggcctgggaagcatccctagtcaggacagggagatgtcctcaggttaaatcctccacgaatgaccacatgtggatttgtgatgtggtctttctttggaaaggggttatctggggagagttaattttggattttgctttacacttatttttaaagtggaatatttctccagcat

SEQ ID NO: 13641 - DNA, 1201 bp, Homo sapiens
tatggggctaggctgagggtcaggagccaagagcctggtcccaactctgtctgtggcttactgtgagaccctaggcaagttgcttaccctctctggggctcaaattcttcctctttgaaataggaataataacttcatcactagaattcttcacctggttgttgtgaagttaatcagaataaatgtggagataatacatgaatgagcgtacagaatattatttggctgttctgtggcatcgatataggtcatgatagtgacaatagtgtctgtcattgtattccacaccacttcttccctcagctaaagcaggaaaagaaaggaggtaagtctctctgtgttttttcttcctttccccaagcccactttgttaccttccttggttgctggatgagaaattagtcagagggtcagagaggacctcaacttcatatgctttaaatagagcatatgcaattttaaaccatcctcttaaccaatttttcttttcttttcagtttttccccagttatacttccacatgatacaccagagaagaaagatcctttctcatactgaagaacacaagaaatttgaatagttcctgctttctgcacctcccaccaaaacaaacttttcaatgatcaaaaaatgctgcagattttttgagttcccaatacgtttcatagaaaataagtaagaactatttttaaaatattcaaacaaaactaaaacaaaaatccagtgtcacatgggcctgagattttattttagaaaaaggttgttacataaaacaccctggccagttcatttcagcatgctctttcaaccagaagttcttaatatttatgatggcactagaaagggatttggcattttatgtccttctgtgtccttcatgtatctgatcaatgaagacctgtaacactaagtacttgagagttacagtctgaataatgaagtcgtaccagctgaatagcccagcttgcagtatagttatgtttcagtctgcagtgtgtttagcattcccttgtcaaagtgcttgactgcatgctggaaactttgtatttttgaagcggcaaactctgttctctggaatgctctgaagttatggctgggacctatcccctcacatctaatgaatgaattataaaatgtatatgtctatgaagcttcggggtagtgcctgtaatcagaaaacaacttagaacccttttgtttg

SEQ ID NO: 13642 - DNA, 1185 bp, Homo sapiens
tgtattagtatttcatatatggatgtaccataatttatgtagcattttaagttgtttccaacttggcactattaaataattgctgttgtgaacatccttgtatgtatctacaaggtgggagatgcttttgcacatgtaaaactgtttctgatgcttgataacctagaagtagaataattttgtcagagattatgaacattttacattttgttggacatttcaaactgccatccagaatggttatactgatataatcacatgaattgagttaattcatttcctgtactatcatcagaaaatgttatttctttttatttttgtcaattctatggccaaaaagtaccttcttttaaatttgcaattcttcatgttagtgaagatgagcatttttatcatatgcttataggccatttctatttcttaggtgaactgctcattcttatcctttgtcactttttactaggttgccttccttactgatttgtaggagttctttaaatgttatggaccccttgtctataacatatgtgcaggtattttctttcaggcttttaattctacaggtttcaaattttgctatggttaaatctttcgttcttttccttgatgcttgctggatattgagtttcacttagaaatgccttcccgacttcaagattatgtagatttccccctaaaacttgtatagttgggttttgtttacatattttatcactttaatcaactcgaaattaatatatgtgagtgatgtgaggtagggtactatcattttagagttagtaccaaaaataaatattttaaggcaaaatatttttaggtaagtaattctggaaagataatagaggtaacttttgtccccataagcgataacttcttagaagtaaagaaaacacttgcatatgtttctatttgtgaagcagatacatattgtgaagttcattgtaacagggcagatttgtagcctgttaatattctcgttacttaagaccattaacttttccatctaataaaattattagaagcatagatttgtgtttcagcatatgacaaacatcaggcagatagatgtctgatagcagtcagtgcttgtaggtattctagttgatagtaatgacaaatcttttaaaaagtagatgattaactacagtgatgaagatacacagaaagacgatgagaaacagcatg

SEQ ID NO: 13643 - DNA, 1200 bp, Homo sapiens
gagccatgatggccccaccctgcactccagcctgggtgacagagcaagaccctgtctcagaaaaaaaagtaaataaaatttcttctcttctgctcttccttgagtgaccttctttctcagccctctctaagtttttttgtttttttgaccaccttggcgatttggaaagtggctcttgcccaccacatttatatccttgatattcagctgccttggtgcgtccccaagtgcgcctttgtcctttgtccacgtggaggccagcacggcactctgagattgaacaaaagacacaagatgcctgactgtccacatgtctctctctgctctttcaggagcggaagctgcacatctacgtgtggtattgtcagaataagccgcgctcagagtacatcgttgctgagtatgacgcctactttgaggtaagctgtgcaggctttgctgaactggggtgggaggaaaactcaggccaaaacagccactttcagaaataccagacgtcatccatccatatgtgacccccacacagcaccgttgacccattcatggcaggaatagctgcctcaacagagaaagcagcttcttagctaaattctcatgagcaccttcacttgagaggagctgaggtggcccagtctgggttctgatttgagaatcccccatttgcagaataagcctgaacacagagatggtttgagaagctccagttcttcttaagtgaccctggagcagactgtacccaccagtcccccagggaccacttactaaggagtcttctgttggttgaagggtttgcagccacttcctagtctgcttggtctagcccagaaggatttattttgctgggagaaaggcagcatcatcacttagaaaaagcactcagctgagtgtttggagatctaagtttagggcctggctccataggcttgtgtgtcctagaagaagccccttttccctgcctttgccctgaagtggtggagagaataaggcccctccagcttttctcccaggactgggatgaagaccaaggtgtggaagtactcactgtaaaagcatgggaggaaggcaggaagccagtggtgatgtgtgttatgtgttgttcataacaagtgaacagtcctctaggcaattttacctctcacattacttaaagattcttcaacttcattggaaaacatgcagacctgtcttccatgcctttga

SEQ ID NO: 13644 - DNA, 1166 bp, Homo sapiens
agacctcatctctatgataaaacagatttttttaaagtaaaaaaaaaacctctctatttgaaaatttgatcataaaacacattaagcagtgtttataatgtgaaataatttacttgatttactataaatatactgtatgtgtaactggcaagtttggtatacagagttggctttatacataaatatactgtatgtgcaactagcaagtttggtatacagaattggtatacacatatactgtatgtgtaactggcaagttttgtatacagagtgtgtgtacgtatatacgcacatatacatacatatttaaatttggaatcagcaaaattttttcttttctaggaactaagcgtcttgtagaaggaactattaatccaggagaaacctgtttaatcattgaagatgttgtcaccagtggatctagtgttttggaaactgttgaggttcttcagaaggagggcttgaaggtcactgatgccatagtgctgttggacagagagcagggaggcaaggacaagttgcaggcgcacgggatccgcctccactcagtgtgtacattgtccaaaatgctggagattctcgagcagcagaaaaaagttgatgctgagacagttgggagagtgaagaggtttattcaggagaatgtctttgtggcagcgaatcataatggttctcccctttctataaaggaagcacccaaagaactcagcttcggtgcacgtgcagagctgcccaggatccacccagttgcatcgaagcttctcaggcttatgcaaaagaaggagaccaatctgtgtctatctgctgatgtttcactggccagagagctgttgcagctagcagatgctttaggacctagtatctgcatgctgaagactcatgtagatattttgaatgattttactctggatgtgatgaaggagttgataactctggcaaaatgccatgagttcttgatatttgaagaccggaagtttgcagatataggaaacacagtgaaaaagcagtatgaaggtaagtgtattattcaggaatctgcaagaatcagaaatccagcttaaactgaagaagaaaaaggaaatgctcatgtcattgaaagtccattcatagagcaggctgtcaagcgtggttggatccaggagctcaagtgatatcttcatgacttg

SEQ ID NO: 13645 - DNA, 1387 bp, Homo sapiens
gaggcgctgggcgtgcctcaggaagagtctgaccagtctcagagagagcacagaccaacaggaaagctcagattcttatggtccattacaacactcacacctgcagtctggtcaccccaggcagactgcaaatgcccagaggactgagcgcagtcagtttctgctgaacctgggcttggtttctgttaaagctggaagggacttcagagaccttctgacccaactcctccttccagaggtggatagtgaaagcttagagaaggcgatggctttcctggggaacacagagctgtcctagagcccacggccgtctcctcctgagtgctctgcctgctgctgtcgcagggggctgacctgggaagggatcctagggcctgcgtctgtcggtttgagtgtgtgagctaacatgtgtcctcatcctcttccccgccgtgttctgtaggcttcaaatccattatacagaaagcctatctccacgcacactgtggacttcaccttcaacaagttcaacaaatcctacaatggcactgtggactgatgtttccttctccgaggggctggagcggggatctgatgaaaaggtcagactgaaacgccttgcacggctgctcggcttgatcacagctccctaggtaggcaccacagagaagaccttctagtgagcctgggccaggagcccacagtgcctgtacaggaaggtgcctggccatgtcacctggctgctaggccagagccatgccaggctgcgtccctccgagcttgggataaagcaaggggaccttggcgctctcagctttccctgccacatccagcttgttgtcccaatgaaatactgagatgctgggctgtctctcccttccaggaatgctgggcccccagcctggccagacaagaagactgtcaggaagggtcggagtctgtaaaaccagcatacagtttggcttttttcacattgatcatttttatatgaaataaaaagatcctgcatttatggtgtagttctgagtcctgagacttttctgcgtgatggctatgccttgcacacaggtgttggtgatggggctgttgagatgcctgttgaaggtacatcgtttgcaaatgtcagtttcctctcctgtccgtgtttgtttagtacttttataatgaaaagaaacaagattgtttgggattggaagtaaagattaaaaccaaaagaatttgtgtttgtctgatactctctgtgtgtttctttctttctgagcggacttaaaatggtgcccccagtggggattgaagcggccgtgtacttcctcagggatgggacacaggctggtctgatactccagactgcagcttgtcaagtaagcatgaggtgctcggggcagtgagggctgtgcaagggggaaca

SEQ ID NO: 13646 - DNA, 1142 bp, Homo sapiens
ctgcacatcctggtcactgagtggattgacatgacaagattatgtgatcctgtgatcctttgttgcgtggcagcaacattgatgtagaagctggttgcatggagtaactgcacttacattgccctcactgggcatcatccatgttccttagcccagaggacacttcctctccactctgcctaggctggcccacaccccgggtcccacatacctttcaatgcctatgtcaagtcttcctccaaccacagtagcctactattatctctgtttcctttgaacaatttgtccataccattcatttataacttggcatatactgccttgcctgcagtttagggctgatgtttggagaacaggaactatgttatttatctttgctctctctgctgtgcctgtcctggggcatgtggtaggtgctgggtaaatagttattggtgcctctcaaggcactcagtgaatgctcagaacacttggttaagatttacagacaatgatggaaaagtgactcttctcttcttcctctctagttacaagttgtttccaaattgcgtcccctcctttgggttccgccatctgctgcctctcacagacagagtggacagcttcaatgaggaagttcggaaacagagggtgtcccggaaccgagatgcccctgaggggggctttgatgcagtactccaggcagccgtctgcaaggtaactttcctttctggtcctgtccctgcatggggaggtcaaggtagagagcgtcagtgggtgttggtacttcctgcaggagtctttgagtgccccagcatgtggctcctgaccactctgaagtcagagggtgagctcagtggaacttctgggaaatctacagcagtcaaatcagccggagctcgggaatggattgggctggtctgtgtctctgtgtcagggtgtggttgtgtgcaatggagtactgtctgctagaagacagctgtctgcatttatacattggctttttggtttattttcaggggaaaaaagtaaaggtcaagtcataggcatagaagcttgtagagctttctggaccaattttggcaaaccttagagattgctctcttgggaaacccagttgaaaaagaattgtgtgaggccgggcgtggtggctcacgcctgta

SEQ ID NO: 13647 - DNA, 1168 bp, Homo sapiens
ttctcctgaatgattatccagcatccaatgcctgtgaaagatgataagtgaacaacttaaaggttaactcttgaatgcccaagggaagacttttcagctacttatatgtcatcttatttatttaactatatattatttcatctacttatttatttatttttagagaggaggtctcattatgttgcccaggctggtctcaaactcttgatctcaagcgatcctcccacctcagtctcccaaatagctgggattacaggcatgagccaccatgcccagcaatatataacaacttttaaaaaattttagctatacaacttctgatcatttctgtttctcttgctaatcatgtaggcagttaggagcattttaaccatcaaaataacaacaaaaccgaacatttttattatgtgtttacagtttacaaaatgctgtcatgtccagcagctcagttaatccttacaatacttggtgaagcatctgggatagggattaccatttcctccattttcagacaatgaaaatggaaagtagagaatttaaggtcaaccagatggagacgcagccacgacatgcgatgttttcgggagacaccctgaccacctcctgctctcttcctctttttccctgcctaggacttcggaagcccacggtccatcacctctcggtgtgatctgagggcaaaccttgtcaaaaatggctgtggaggtgagatagagagcccagccagcagcttccatgtcctgaggagcctgcccctcagcagcaagggttcgggctctgcaggctgggacgtcattcagatgacaccacaggagattgccgtgaacctccggcccggtgagttgcccacagaaagggctggatgctctgggatcaggaaggcccatgggggaggtgggacttgttaataatgggacaatgagtcaggccaggctgagatcagagccacgagatggtgatggggaggcaaggctcagacctcaggaagcagagtatattcttattgatgtgtctgtggacaggctcctgtggacagaggaagatctttgctatttttaaacaattgtggtgaaatatacataacatttaccatttaagcgttttcaagtgtacagttcagcagcattaaattcacaatattgtataaacatcagcagtatctatttcc

SEQ ID NO: 13648 - DNA, 1209 bp, Homo sapiens
tgagtaaaatgaagtacattcacctagatagtccttgggtagcctttgccacatatgacgttgaaaaagacgtgccactcacttttttttttgctaagttttagataattttaaaaataatactgacctatagagaaatgaagaaaaatctggtttactgcagtgtccttttaaggctctgtagatgggaccccctgtgtgttcttgttctatatttagttcttgaataactcggactgagaaatccggaggcctctttagcccagtgtcccatcttcttcctcccatagtcttttcatctttgttatcactgacagccagctctcagcttgggttcctccttcattctttagttgagatgtagacaagtagaaatggggcctgaggcaggttcacgggtgggaagggctggtttaaccctgcactggtcccaggcactgtgccttggtgccagtgagtgtgtccgatgggggtgcagggttctcagcgctgggcggttctgcccatgggcccatggctttctgtcctgctgactcttctacctggaatcgcatgtcagtgtgttgcaggtgccatgtatatcaccggctttgctgaatccatctcggatttgctgggcctcgggaatatctgggctgtgcgaggaatttcagttgcggtgcttctggccttgctgggcattaacctcgcaggtgtcaaatggataatccgcctccagctgctgttgctgttcctgctggccgtgtccacactggactttgtggtgggttctttcacccacctggacccaggtaagcctttcagagtccagtatgtggccttatggatcttcactgctttagagatgtttgtaggtgtgagtttgcccaccccatctccccctaacccccataggctttacctacaattggtgtgagctgttcctggatcaggtgagcaggtgtgtcttggagcagcttcatgaggctagaagctcctcttcacacagacatcgcctagcacattttctatgtgtccttttattttctttttttaatgtatatttatttatttattattattatactttaagttttaggataacatgtgcacaacatgcaggtttgttacatatgtgtacatgtgccatgttggtgtgctgctcccattaactcgtcatttacattaggtatatctcctaatgcaatcctcccccctccccccacccca

SEQ ID NO: 13649 - DNA, 1099 bp, Homo sapiens
gaagagggctcatgaccatgagccccaggaggtgaaacccagaatctcacactcacttagaagtgtcatctattgcttctgcctgcattccatgggctagaactcagtcacacagccacttctagctgcaaagaggctgggagtctacctgactccctgactacttgagtgatgaccagaggaaaaggactacgtttgtgaataatgagtctctgctacatatggatacggaatcactgttgttacaagagaacagtgatccttttgtagaggtatgcttcaagatgtgtgtgtgcgcatgtgtgtgtatgtgcatgcatgtgtgtatacacacacacttgccctggcacaataagacaggactgtttttaagctgagttctcctacctccctcctcctgttccactctcatgccatccctggccctcccaatggcccctcagctgatttctgtgtgttctgtttgcaggatgccctggcccagccccagccctggtggaagacccagctgttcatgtgggagcctgtgctgtttgggacctgggatggtgtgttcacatcctgcatgatcaacatctttggggttgtgctcttcctgaggactggctggctggtggtgagtgctgagttggtggcctggagcctctcacgggcccaagacaggaaagctctgccactcttgcattctacagtgcaggccacagattcctgaagcacagatgctcctgaaacacgaaacagaagcaagcacgatgaatagctagcattgcttgttaaatgagcatcctgtgaagataggcttccgaatttctaatggaaacctcacaccatagatttaactgcagaataggagcacagaagtcagggctcatcatgagccggacttgagatgggtcagagagatcagattgatggcaattttgcctccagcttgtggccctctgtagttttcccggtattcttcacttcatcttgggcccgcccacatggttgccttcccccaccacactgcaaccctgtaggtaagactgtgcatggggatgcttggtcagaggtgtgggccgcctacctctagggatggattgcctaggatggactc

SEQ ID NO: 13650 - DNA, 3060 bp, Homo sapiens
taatctttttctttctagactcttgatagattggataattaaacagtatccagagaaactaaagaaatgggcattttaattgcatattttatcttgagttactttttaatgaacactgctcattacaactttacaaaccaaaagtgtttactaattccagtaactaccatttctttttcagctagatgagtgatcggaaaatttttgttgcatttcaaaatctaaataaactacagactttatccttataccatgaatgtttttttttaatactctgtcttaaaataatacagcatggtacaataaatagtgcttttatgtatatatacacacacacacttttctgaagaatgatggtttgagttatgcgttgggcagttttgatttttggaagttatattagttattgactctttgttacaactttttcatttttacattttaaattttctgccatcgttgtcacaatgcacatcctgatatagcaccagtgaaaatctaaaattaatacccttggaaaatgaaaatattcttaatttccattttgactcttatactggccctatagctctgcagtctttgtttcaatatagaatatgttatccatttaaattattttttcttttatttaatgttatcccaagactgttctcataaagaaagggaagaaataactatccacccttaacatccttcatttattttgaatatattggtgtttttatgataaggaatataaattatatttaatgtggtttcctgtatactttggttattaagttttgcttgaaatagtagttttcccgtttgacagctttctttgctgccaaagttttcaagaatttaagacttctttgaagtaaatatttaagttctgccattattgactcttaagattgtgtgtgttgtgttgtgcattacataattacaaaaaggcttcattcaggtgatacgttaaaaatggaactgtgctcaccctaaataggcattggtatttttctcttttggtgagagtaggcatttatttcttgagttgttttggagcctgatcaaaaattttgttcatggagaacttgatgcaattttgatacagtggagaggtttttttcggttgttttaacatcaccagcatagtttttagaatgtgactcttgctgagcatttagggtgagcttgggaaggaaggcctttgaaaatggtagttatgcaagcagactttcaggtgttgcattcctgttttcaacacatttctttaaatctacataatggcagacttttctaccaggttataagcagtttttagataagtgatactcagccagcataacttattgacttaccatttacgtatagtcatcactctcttactgtgaaattccaaatgcctaccagagttaccttgttctatcataatatgacaaacatctcaacagttttggatttccccactttggttcagaaggttatttaatttctatctgggcattaatggagaaaataagtagccttgtgtgctgcttcagattgaaacatggaggatatgagatattcttctgcaattcatgtttctcatttctcaaagtgagcacattgttctataaaaacatgctggtacacccttaaacttttgatcaatctgagtgaggtgtgcttttcctcttgggacctactcacgtttgaagattggaaacatcacgttaggcgaggcagtatctcttgaacatcttctaaagggttttttaaaaccttattctcacatatttcatttgtcttgaatatttaagtggctcttaaacgttttgggtctacatgcaaatgtggtacttaacaaggtaggaatccatcttcttagctctggctgagggtgccagccatcggtcaggtcatttttatctcaagaggcagaaggcagttatgtcaagaattgtgctcagggcaggatttcgtttccacagaggagagacacttgcagagtgccagctaggttagatcttttgccgcttctttcatttgattaatttgggtttttaaagggctgtttaaaaaaaaaaaaaaaaggccgggaaactttaaaagtaggcattactgtagtactgcatttcttagaacattttaaactagaactcatttttttttcacagtatatttacttgaagaagcactataataatcattgagaagtattttgagtctgaaatttaatttaattttccgtttcaaattgctttatttcagggaaataattttccagttgttttgctatattctgcaaataaaaaccgtgtttccttttttcacttaaactttggtaggaaacaaactaaagcagacaaacatttcttgttatgtttgttgctttctttaatccaatggataaaaaagtaaaaccctgtaaacattattttatttttttatgcaataccatgctgtaaatatggttcatcaaataaggatgtacctatgattgaatctttaattctgcacagttagagtttatatataaacgtgtcttgacaatcaaggacttttatgtgagtcttcctttatgatgtttattaatgttatgcattccatttgttttgaagtgagtaccaatgtgctaatttgtattgtctgaaagtatgtaatgtttttacagcttgtttttaagaatctgtaaatatgtacaaacaaatcacagtactgctttatgttagaaggcatatgatgttgtactgtatgtaagcaataatacatagcagtgctaactttacaagtagcatcaggaaagttctaaaaacatttcagagttattaattatccttatttcatttaataatgattatctttaatcagtttttataagcaaattccattgttcctcctattggaacgtaacactgtttacacagcataattgaagttgcaggggagacaggctaaatctgacttcatctgtactcactttcactaagcattgaatggccttaccactcttctgcaagatggaggaagaccgcaaaacttagtgcccatcacactgaaggaagggatgtggttttttttcctgcttctgtactg

SEQ ID NO: 13651 - DNA, 1446 bp, Homo sapiens
tacttcaacattggatgtattttttaagagtcattatcagtttggtagatgaaatatgatagtgctgtttaatggtaatttcttggattactgctgagactcttttttatatgcttaatgactatttctaaatttttaaaaatgatttgcttgatgatgttctgtcagtttattccttactgaattcatctctatttttaacacatttcaatatattattaatatattaaagaatatggatcccttgactgatgttacaaatacttttccctaatttgtttttatgtcaggcttatttttcaataataaagtagttaggatttgatgcctttatatgaaaatgaaaatttgtgttttattctaccagcctttggaaaccgatattggtattataattttaaaattggaggcagttccaaagtacatcaataaaatctttgtatttgaatgttcaaattcttaatttgaaaatttaaaatgaagtagtcatataaaactaatttactatgttttgttgccaaacttggttttctaggcagttatacttaagcatgaacattgacgacaaactggaaggattgtttcttaaatgtggcggcatagacgaaatgcagtcttccaggacaatggttgtaatgggtggagtgtctggccagtctactgtgtctggagagctacaggattcagtacttcaagatcgaagtatgcctcaccaggagatccttgctgcagatgaagtgttacaagaaagtgaaatgagacaacaggatatgatatcacatgatgaactcatggtccatgaggagacagtgaaaaatgatgaagagcagatggaaacacatgaaagacttcctcaaggactacagtatgcacttaatgtccctgtaagtaattcctttataagatattaaacttagaaacataattttttgttacgtaatactgcaagtcatcgaagaaatttcagaaaatgtttcagggctaaatagtgttcttgaatagatatactaaaatattgacataaatcatatttgaaaggcaaaattaagttcttgtattatattattttagaagcttatttctttcaggataacaatatttctcaggattattttggtattaaattttaaatgcttaattttaaaagatattttatctaacttctaggtttctccttaaagagtaaaacatttgaatcttcaacgtaactagaaaaatatcacacattcaagggtttttcctacaaattctgtaattcttgccttcttaaatttttctaatatgctcctattctctgttctctttgtatcctccgcttgcttgatctgtttatctttttaaagtatatcagccctttactctttcctatctacctcagacgtcatttaagatgtttcataagcacccatatgtttttccttcttctacctttatttttacccaata

SEQ ID NO: 13652 - DNA, 1099 bp, Homo sapiens
ctctgttgcccaggctggagtgcagtggcgcaatcttggctcactgcaagctctgcctcctgggttcacgccattctcctgcctcagcctccgagtagctgggattacaggcgccggctgccacgcctggctaattttttgtatttttagtagagacggggtttcatcatgttagccaggatggtctcaatctcctgacctcgtgatccgcctgcctcggcctcccaaagtgctgggattacaggcgtgagcaactgcgactggccggcaattgttctttataaggccaagtttatttctcatttactgtctacttaccactattgtattttcccaatttcaaacataaaaacaagtcagtacattggtcattcagtcataacttactgtatttagaaagaattttcacttcagtattcataccaatttgcacatattatatttgtatagtatcttttcctaccataaataatgtttgttgtgtgtgtgttttattgtaggaatcggatggcataagtgattaaggtggtattgaggatttctgaagcctatgaaaggtagaaactcaaccatgatttctttttcaactctacagcattcctttccttgaagtcttcgtttttaccttagtctcgggtaattttaatacttatttttcataatcttgaataaataagttttttcaaatatgaagtcattgtgttcagctgctagaattttatactgaatttatataatagtttcttaaagttttggtatttatatttggaagaaactagtttttttcctgagaaaagaaatttaaatgatgaataatgatgtcattttagactctaacacaacaaaaatgtgtagtcttaagtgaaatttaattgagagttattttcttggtttaacactttttctcaacagggtatagcattttttaccccctatcctgaacacatatacactcattaagtttcccagaattttcagagaaactgttttcataccgaggaaagttagacatgttagtcaaatttaatgatgtttgctatataatttttaaaatgtgagaaaacatatcagtttttatacatctatacatgttgtatgt

SEQ ID NO: 13653 - DNA, 7989 bp, Homo sapiens
gcctctgctgctgatctgacaggaggcagagctcaggtggtcgcttgcctcctgctatgcagcctggttccaaacaggccatggactggtatcactccgtggctctggggttggggaccccctgctttaaattatctctagattattaatacctaatacagtgtaaacactggtgtctcatataagtggaatcatacagtatttgtctttttgtatctgtcttatttcacttagcataatgtcctgcaggtttatccatgttgtagcatatatcagatttgattccttttaaaggctgaataatgttccattgtatgtgtatgtgtatgccgcattttgtttatccattcatctgtttctgtttccttttagactgtgagaacattctctttgaagggaatgactaccaagctctttggtcaagaaactccagagcagagagaagccagaataaaggtgctagaagaacaaataaatgaaggagaacaacagctaaagtctaaaaatctggaaggcaggtaaagatgctgcgatgtttaagtaagctaggcttgtagactatatggtagattattttatttatttatttatttattttggtaacaattcccagcttcattggcatccctgaatacagcctattcctttaaaatgcattcctaagaaatttgagttatcacgctgggtgtggtggctcacgcctgtaatcctgacactttaggaggctgaggtgggaggattgcttgagcctgggagtttgagaccagcctgggcaacgtaggaagaccctgtctctacagaaataaataaataaataaataaataaataaaaataaaagaaagttgaattatcaaaaataatgttatagaaacagttgtttcaatgtgggggaaagagaaataaaagtttcaacttcataatattattttcctgcactattcctgatttctaccctttgtactttccctccaccatttcttctcccctcccctccttcagtacccagctgaagtgttacttcattgtgaagccttctcaggctatcacggcatttaattcatgccagtatggtatggcagttttgtattagatgattgattgttctgtgtgactatccctggctaaatttaagcccttcaaagtcagtgattgtatcttttccacattcacatcccagtgccttacatagggcttagcatgtaattgttacataagtatttctagaaattcagttctcagagacccactatcactgtttgactcatttttcttatttttgttttcatctgacagtcagtgaatagaccaaggcagaccaagagtgtattttgggttttgaggtggttttgttcatttttagaactactagcaccaaatatggcaaagtaatagatagaattaaaaaagacaggccgggcgcggtagctcatgcctgtaatcccagcactttgggaggctgaggtgggtggatcatgaggtcaggagtttgagaccatcctggctaacatgctgaaaccctgtctctactaaaaaccaaaaaaattagccgagcgcggtggcaggcgcctacagtcccagctactcgggaggctgaggcaggagaatggtgtgaacctgggaggtggagcttgcagtgagcggagatcacgccactgcactctagcctgggcgacagagtgaaactctgtctccaaaaacaaatacctctcgggattttaatttttattattatttttcatttttttgagacggagtctcaccctgctgcccaggccggagtgcagtggtgccattgttgctcgctgccacctcaaagtccagggctcaagtgatcctcccatctcagcctcccgaatcactgggactaccggctaccaagcctggctaaaaaagtttttaaactttggttgtgatttaaaacaagtacatgcagctggccgtggtggctcacacctgtaatcctagcactttgggaggcctaggagagtggattgcctgaggtcggaagttcaagaccagcctggccaacatggtgaaaccttgtctctactaaaaatacaaaaaattagccgagtgcagtggcgtgtgcctgtaatcccagctactctggagactgaggcaagaaccctggatgtggaggttgtggtgagccaagatcacgcctctgcactccagcctgggctacagagcgagacttggtctcaaaaaaaaaaaaatgctaaacgtgattcataatccatcttgtcaaaagagtgtatattttccagtgacccctggaaggcacttacttcattgtgactgacacctgttaggtttgtgagctggcttaaggagtcatctatgtgtattttataggaataatttaaaggtagaatccttgtggcaaaaacttagattattaggccaggtgcagcggctcacgctgtaatcccagcagtttgggaggctgaggtgggcagatcacctgagctcaggtgttcaagcccagcctggccaacatggtgaaaccctgtctctactaaaaatacaaaaattagttgggcgtagtggcgtgtgcctgtaatcccagctactcaggaggctaaggcaggagaattgctcaaacccggaatgcagaggctgcagtgagccaagatcacgccactacactccagcctgggcaacagagtgagactctgtctcaaaaaaaaaagaaaaagtagattaaaaggtacaagaatatatgactgtctgtttgctttttccctaactataatttttaggaaaataaaaaaactgtcttatacaagcaataactcttccttctacataggcaattaaaaaccaacgccaatgagaactggttaactttttagtacacagtttatttaacttaaataataataatggctataccttttatttcagagaatttgtgaaaaacgcatgggctgatattgaacgcttcaaagaacaaaagaaccgagacttaaaggaggccctcataagctatgcagtcatgcagatcagtatgtgcaaaaaggtagggtttttcctgtttcagtgaagatatatgtatattcagaagtgcttatacatgtatttaaattacctgaccaaaaaatttttcatttttattcttctcttgtagaatgtttaccaatttctctattttaattttgtaggatttctgttttattttgttttggtttttttattttaaaattttaaatatttaaaaaatagatatgggggggtctcgctatgttgcccaggctggtctcgaactcctggcctcatatagtcctcctgcctcggcctcccaaagtgctgcaattacaggtgcgagccaccatgtccagcctctactggtgttacaaccagtatgcccattactgagtctccactcatctaaagtccaaatttgtatctccatttataacttgtatttgagaatatataccaagattatttagatcatatggtactcttggaccagacagtaaaataccattccaggtatatgctttgattggaaaatagcttgaacattatttcgtgaagacctggttatgatatgcttcctcataaagtaaatcatttgtgttgctgatatccatagtgaaagatacaaacattgaagcttattctagttaaaataaatgtttgacaatgatggaagactttctaaaacgttggtttaagaacaaaataggaaacattccttaacctcttttttataacctaagatctgccagtgtgactaccagtaccagtgctttgatttgtatcacctgtcataatttatcaagcacttttacatgcattatctcagtaaattacatggtaagatgaattctcacatttatagggcaaaatcacactcatataaatatatatacaattcttatgctttagtttgtcccaaaattttattttttggctgtgggccatcactgagagaacaaagatattttgaggcataaacaccatacgcactcactggttaagtgggctccatttggtttggacaaattcatatttatgctcagtgaattataagttactgtataccgtggatctttggagtcacttaaaacaagtttagatcgtgactgttgagtctgcaggtgctaaaggttgagtatgttgtagtttggtagcatctctatcttttttttgccttcattctgtcacctcttcttgcctgcagctaggtgctagatatttacaatccattgtctttttcttttttcttctttttttgttgaaatggggtcttactgtgtcacccaggctgatcttaaactcctgggctcaagcagtcctcccgccctggcctcccaaattgctgggattataggcatgagccaccacacccagtagtacagtcctttttccaatctaactttttaacctcaagaaatctgaaagaccagataacaaaggtttttagtttttttgtttttcctgtaaaagactcattaataagctccttgtgatctctcattcacttctttccaaagtaaagtgcaagacctttatataatgtctcaaaggactttccccctccgttttgtttaggctgcagtggttgagggtgctagaaatttaatctgtgaatataaaagatactactatagctgtatttggacatactgttggatattttgtaggtttattcacaaatccttagataactagtaaaacaaaaagtttaataagagtttatgttcaccttgtttcccaagaatggtactatgcaattttgtcgttttgttttcttgcctaagtgatatagatttttatatgtgatcctagctatttgggaggttgaggcaggaggatcacttgatcccaggagttcaagactaggctgggcaacatagtgagaccttctttctttctttctttcttttttttttttttgagacagagtctcaccctgtcacccaggctggagtgcaatggcatgatctcagctcactacaacctccgcctcccgtgttcaagcaattctacctcatccagccgagtagatgggattacaggtgtgtgtcaccatgcctgactaatttttttgtatctttaggagagacggtttcaccatgttggccaggctggtctcaaactcctgatctcatgatccgcctgcctccacctcccaaagtgctgggattacgggtgtgagccaccgcacctggcccgagaccttctttcaaaaagaaaagagaagaaaaagaaaattgttcaaaaccttaataaatgacacactttaatgattaagtattaaaaagttcctttctcataaatgagtaattattggagaatatgtatcttattgaaaaaataccttactgaaaaaaacccttgccgggtacagtggctcactcctgtaatcccagcattttgggaggccaaggcaggtggatcacgaggtcaggagatcgacaccatcctgcctaacacacggtgaaatctcatctctactaaaaatacaaaaaattagctgggcatggtggcaggcgcctgtagtcccagctacttgggaggctgaggtggtagaatggtgtgaacccgggaggtggagcttgcagtgagccgagatcgcgccactgcactccagcctgggcgacagagcaagactctgtctcaaaaaaaaaaaaaaaaaaaaaaaaggaaaaaacccttaagttttactgttacatctctataaacatgtatttttgcttatgcatattaggccatctataactgtgctaagtaacttcaggtactaagagggattcagtaatttagtacataattagtttttatcaaaactttagttattagagtgataatttaataactcaatttatatttgttagactaatgaagttttttgtttcaaatattacattgaaaaaaccgagccgggcactgtggctcacacctgtgatgccagcactttgggaggcagaggcaagcaggtcgcttgagcccaggaattccagaccagcctgggtaacatagtgagattccatttctacaaaaaaaaaaaaaaatacaaaaaataagccaggtgtggtggcgtgcacttgtgatcccagctacttggcaggctgaggtgggaggatcccttgagccctggaggtcaaggctgcaatgagccatgattatactccagcctgggtaacagagtgagaccctatctccaaaaaaaaaaaaagactgaaaacttgtttgatttacaaatagaaattactcgagtatgtgatatgaaatgaattaactcagttttccaacaagttgtaggagttctttttccattttgaagataagttcgtattagagattctgtttctcttttcagaagcattagacatttgcttatattagccacttcccaaaatagtgtcatattttctcgacttcttaattattccaaaaagcaaaacttagtgtaccactaagccaagtacttgggttttcagattccttccaaactcacattttaaagtttttatttttatttttagggaattcaagtttggaccaatgctaaggaatgctttagcaagatgtaatcctgtgaattgaatttctcttcaatcaaagtgccccaaaacagaagcacaagtaaataaaagaaatttaagtcactacctagtatacataaacatatacaataagttaaataaattcagctttctttaacttaattgtggtcgtgttaatgtagcacaaaaaatatattttaatgaagattaaatattataatttgaggttttggggactggtgctgattccaaaaagttaatttaataatatataccaacagattgtttgtcacgcttctgaaccaatgactgaatgtcaagatgttcgttaatttctagatgtttgtttcaagaccagctgtttcagatctattaatgtagggaatttttccctaagattgaattcctatatttacttggtaagatccactaatctgttatagggagttgttttctcttgccttatagttgagctatttggtttgacaaagctcagcagaaacttgatgtgaaaaatctacgattttcttctacattcattgatgccccttgtaatgtttgcatacactagaaaatgccttcaatttgtgttttaccagaattttgatactggtcagaaattttatactgccaacaaagaagactcaacttctcagatctataatgggatacattgtcatcctctagcaactcctatatagaaagttttaactgaatatgttacatataagaattaaattcttctcaaataattcttaacctcagtaatgagcctaaatttactctgcttggctctctacacatggcatttcagggtataagatgtagcatttcaatgtgtaagatatatgtactaaacatatgtgttgctatcttcatcattaacatccttcttttctattgcttggctgtaatttttgtaaagataaattatattgtttttttgtatgtgtgtttgtagtatatgttcagaaggcaagcatcttcattttgctagctttgcagaatcttaaaatgtgtactcgttatttctaatgatgtaaaaaaaaatccctagtcctgtttagcatttgacttttttatatgttttaaatgttgctggatttttgtgctgtttgccaaacttatacaataaataaatgaaatattgtgctgattttcagatgatttttgttaatttaacaaagtgatccatacatattaatatctgatgctctgtaagaaaatgatatctgtcatactatgttttaaagtgattaatgccacatgttctcacttatcagtgagagctaaacattgagtacacatgaacgcaaagatgggaacaatagacaccagggcctccttgaaggggcagattcggaggaaggcgagggtcgaaaaactagctattggttactatgctcactccctgggtgataaaatcatttgtacacgaatccccagcaacacacaatttacccatgt

SEQ ID NO: 13654 - DNA, 1457 bp, Homo sapiens
aaaaaaaaatcaaccaggttgtggtaacaaggcattctatttcttcaaaaagactgtatgcctgtgtctgaggaacttacctattatccacctctgttggaactctcttttaaaaagtacatttatagattgatcagaattataaccatggagaattttttcttctgagcattttaatatacttgaaaacaacattgacttgaaaaatttcagaacatttttcagtacctagttttattaaatattacacttgagagacactttttaaaaatgtgttaatgtcaatatgatgagattttagcctttctccagaactaaggcattaaagaaaatagcaaatattaaaaaataaaactgttacttttttccttctttcttttcacctttaggttaatatccagtattatgtgttatccctttggataagtatgctttattttacctctgttaaaaattaaaataaatgattctattcatatttgtcagtaattcaaaacttatatgtgtaactgaacgcgcatgtaaggtatggttttatttattttttttttttttgaggaaatttaaatgctaaagaaacaacgaaatgaaaaggtatcaggaaaaaaagatcaggaagttgtattcaggtacaaatctttttttaaataagtattttgttgaggttgaagaattgctggcaattaaaagaatagagctaattatggctttcatcattcattcatgtatttattgagcacctacttattatggtgctcaacacttgttactgcaagctaccttaatttcccaagagtggtgccttactctgttttttctgatatggtcttccaatcagtgtgtgtaacatacctgttgtttatcagccattgtaggtggctgtgtctgttgcatcatcataagaagtttaagctttgtgctctgataaattgtgttctgttaaagaggttagtaggatgaaaacagcaaaacaataattttttcaacaaattgtaaattataagaaaaagagttggtttgtgtacaacaattttaatgattcccttgttcatttttgctgtgaaatgcactgaaaaaaatcctcaaaatgagttatagttcctgtgttgggaaaattgacaaataataaaactagagaacaaacaataatgcttctgtctcttttacgaatggagagagaaagtttatattcagtagagttattgccctgttcatttgagaggggcatggattttctgtttaagtccttcaggaatcttcagctaggtggtaaatttaataagagtttctaaaaattgaaatgtttaacttttaaatattctggagatagaagaagaatataaaatgaaaccaggctgatctgcatgcagtggcatttacaactaactgatcacaaccaattatagattccttattttgtttattgtgaggcagagtctgactctgtcacccaggat

SEQ ID NO: 13655 - DNA, 1454 bp, Homo sapiens
gcaaggcaagggtctccctcagcagggctaggtgcactacagcctctttccccgtgtcccgttggatctgagctgtgtagcacttgttgcattacaaagaaaaagacttctgcaggaaatagggtagagaacaggctgtctagtcagatgcagcttgatctgtggcaaaaccaagtgtggtctttcagcttcagtgtgttagcatcccagcacctgggatggggtttgtgggcaagttgattttgccacactgtagggcccaggtggtcccattgccaccgtgaagccaaattctagcccaagtctggtagagcagtcgggcagctagttttcgggggaggatgatgtggtgggacagaggacctcagtggcctattacggagccctcttcccagactaaattcatagccgagagctcggggggatggtagagttaaaatttaaaataattttctaaattctgtatttggatattagtgtttaagtggtaatttggcaacagtttataaagtgatgttctgaataccataaattatgtgtaggactgtgatggcgcgtgtatgttttattattgaggttgatgtgcacataatacgtcagtgtatatttttaccgagtgaggtctgtcttgtaaaaggagacaaggtgatcaccttgcccatgtttatttgtaagtctgtcaacttagcaatgacacagggtcactcctaaatgacttttttttttttttttgccttgtgccttttgaagtatgtgttcattcagaggctgttttgattctcagactgaatcattcaaactctgccctgtgtttgtttcttgaatttgggggtgacatcaagtttgagtgagtcctccctctgtcttgtctcactctgaggtgctgtccccaggtgctgttccacgtggaagaatccacacctcgtcgacaaatgggtcttctccacagaccggcgctctgtcaccaactaaaggcgaggggagaacttgcccacctggcaggctctttagccccaaggtggcccggagtcctcctccctccatgggaggcttttggccaccatggcgggtggagccgcacccaccccatctccatggggaggagagtcttcccccaggaatgccctctcggcctctatttttctcccatgtgcctccctgggaacgtcaccgtgaagtgactgggactggcacccagtgttctgggcaccaaggttccctgccggtgatgggcctaactcctagtgcaaatgaatgaaagttttcttatagtcatgcaccgaaggtttttcaccttggcttaattcaagtagctacatatatggcattcagcccattgtttctcctttagttggtagtgctggccctgccatatacctagctgcctgcttgtatttctttggtctttgcacagaggctgatctcacactacactcagcgtggaattagctttt

SEQ ID NO: 13656 - DNA, 1206 bp, Homo sapiens
gccggccttggtgcacacagcgcgtccttgtgctttctcaggagagcttcactggggacactctgtgatgtttttggagggtcatttggtaatgtgttcaggagccaaaaaatatgcataatattcagtcttacaattacattttttgaatttatctcaaggaaatcccagggatctgtgtgaagctgcacatgctgctgctgctcagtgcgggactgtttataatatttgtaactcaaatgtccagaagaactgtacactctgtgcatgttttcagtaagttcatatttgtaagaaaaagtgggtgtgttgagagacaaatttttgtgtacatttacctggaaacaagcagtagtacacatatgcatgcatgaagtggtgttttcctgagtgttaagattgtgaatgttttattatgatcatttctactttttctattggaaaatactttgtgtaattaaaacatgaagatggagctaccatcaaaatggtgagcaatagagcactgttcctcctggggtggcctggtgggcctgagggactcaggtggtgatgaggagtggccttgagtccctttcctttccatgggacagtggggacgagagctagagtgatgaggcaggttaagtgtgtgcctacctccctgtggctggagcactgttgtggccaccccgggaccccctgagcctggtgtcgccctggcttgctggtcccagcctagggagtgggcccctatgggcagagggtgaggtggctgtgctggcactgcagctcaggcacacacacactggagtgttccaatgggtgatcaggttggatggagccttgaaattaagtcagtgatgtaatttttataatctgtttcactttaaaacaaaaatctttgcacacctggtccaagttttctcccctttcttcctgttgctgccatgatgaaagcagaagggaccaccctccagggagagcagcaggaagggagatgcgggtaggggccctgggtcagcaggggcggtcagtccggaggtgcacccccatttattcctcgttctggaagagatttctagtcacatgcatgtggctcctgtgccacatgtgtcatgaggtgcccaggtgggtttggatttggatgagggcatctttgaggatgcaggggctttgtcataccctgtgggccccgtgtacacccctggggcagatgtggcctct

SEQ ID NO: 13657 - DNA, 1123 bp, Homo sapiens
agctttgagggctgctctttttctcttcatagcgataagtgttaaactgtctttcttaggaaacgttcacagacttgcaacagctgatgtcctctgagtactgtctgactccctcaggcaagttcctgaattcagtaccatcattattatttttgtgtaagactttgacaaagtatagcccctgccaccagagcagcctgtacagtgggtctctaaggtgggacctgccccgggcctgccatgcacgtgtgtgaaacagcgtgaaaagtgtcgcggtaaggtgaccctgggttacccaggcaaggctcggtgtttgtttcagaaagcagagaagtatgtaattgattttaaaagtttctgtttaaaatatttggctatgttttagactatgaaggaatgaactttgcttctctggataagaaagtcacatacattgttccagctccaagtttgttcggccctcgccacaagtggatgtagcgtttggccctttgtgtgccttgctggtgactctggttttgggagctcggatatgtcccagaagcaggcttatggcacttctgtagctcccttgctacccttcctttgtgtctagataagtgactgacatgcttttctttggtctcaggaaagtgggggctcagcaagaactgattaccgagccattcaactagccaaggaaaaaaagcagagaggagcggggagcaatgcaggtgaggccgtgtgtgctgcagccggacgagcaagggcctgagggttctctgtcactgttactggcagaagaaacacagcaggtgtttctgtgctcttggttttacttttctgttcagaatacccttttatcaactccttagttttatttgaacttaagggaaaaaattagtaacaaaattcccagcatcagtatgaacatattttatttgcctaaacaagctttgtgaaagttaagcgttcaaacaccagtgtcagttacctggaaggctactaaggtaaataagcaaagcaggccagttgtcaggaaagcagagattgtgcctggtgctgaatggccttggggcctgatcttggcatggcagagacctggggactgccactgtccccaggtacgtgtacatggagccaa

SEQ ID NO: 13658 - DNA, 1157 bp, Homo sapiens
gtggagccggactcgccttctcgcccaggagcagttgggcagcaggaaggaagccatgggctgccccagtccacgttgcccagtccagcagagcagcacggtgcccaggacacagagctcagtgcaggcactggcaacttctatttggtatgaagcactctattcagtcaccaccatataggtcacttctctcatactcggtcttgaggatattctggattaatcctttctatgcagacgtttctggtttacaaaaggacgcagccctggactacaagtctggaactgacaagttcttatgaccttgacaaatcaccttaacccatctgagccttaaattctcatttatttcctgcataaggagatttggctaaatgctttctgaggtcctttggagtcctgtggctccatggtaatgtgctcctttccttgaagattgggggttttgtaatgttgagatactttgcctctatgcttgtcagctcatgaccagtcctagaagaggagtcgagacataagccaccttcagaggttcaatggaaactttaaaaccataccaaactcttttttaaaattagaattaacaagaaaaaaaaaaagggtggggtttatgagccttagttcttggaggattataagagtacttccccagttttgaggctggacagttaatatactttatatcaattatacatttaatataatttaatttaaaataatttaaagattcttaggagatagtctgactttcctgacctagatgggaatgatcagatagggattttttttgtggcacaggctaaatttgatggtgacatttatattgttgagaatgttacatcttattttaccacaacttttaaaaaatgttacatcttttgcagtaggatcagttgtgaggcacatagtagctgaggctccatggagccacctttcatttctttcagtcagagaggaggacagtctctgtctctgcatttctggtgtcttgcttgtcggtggcagagccatgcttgccggcatttgcttaggcggccatagtagttgctaagtgtacaggtgactgggcagggatgggaggtggccacaggtcagagacaagtgctcagtcagtccctggtgccaggactgtgtgcctcggtgccttgggaaatgga

SEQ ID NO: 13659 - DNA, 1248 bp, Homo sapiens
tcagaatgtgtttttttaaaacaatactaacatctaaatatgtatttgttttctttctcttgaacaggtgttcacgactttggaaatcacaaagtcgtcaggactagacatcactcagaaaggctgctgaggctaggcctgctgctgtttagttctccttgtcatattctcatttctctcaaagataagaatgctctcggataaaatgagcctgtgctcatgacagctgctctgttactcagggaccagtgcagggctgtcttacgacacttagatgagaaagtagacaaggaaagaggacagcagtgggcatctgccttgtggtcttgctgacagcgagaagcagtgggactgcttccttgacgccttagcttggagccccgttatgaggtgagccaaggctgactctcgcaagccaggactgagcttccctcggaaagacctttgagtggcaccattcacctaagttagcttttctggtcgctattgtttttatcccctttgctttgttgtttctgtgaaaatatattttcagttaagaaatgctataaagtagtggttttctagtgcgtgggcctagaattcacacatgctcactggtgaacagtgtctgtgggctgctgtgggctgcatttggatagctgtctgcattagcaggaagctgtacacactgtgtagggttagtcatctcttttcttttttgaggcacatttaacctactgtcaaaacgctgactcatgcttcaccctcacactcactacttggtggtgataaccttgaagctattctcccctaattaatatctcgagactgagcaaaatatctcatgtaagataaaagtacttgaattgctttttcatgttcatcttaatagtattatttccaaaagtttttaatactgtattatgtgaaatctaactaatttatctgtgaaataattccatcacagtctgtttaatgatgataaagttccataaatgaatacaggtaatattaagtggttgcatgggaatttacaaacatgtcagcatttcagaggtccttcaagacagaggcccatccaaggtccttttggaaaacctctgtgttcttgagtatgccacacagtagtcaatgcaaggctcttttaggccacttgctctcatgagccacactagctgtttagcttaagattggataggctggggtcacaatttctagccatttgtcttaaaagacaaatgttaagctaacagttaggaacactgt

SEQ ID NO: 13660 - DNA, 1248 bp, Homo sapiens; identical to SEQ ID NO: 13659

SEQ ID NO: 13661 - DNA, 1214 bp, Homo sapiens
cgccctggtggctttgtgggcgtgaggcttgggaggcctggaggccgcttagctgggaagcctgacggtgccatcacctaacagtactcctacgaggggaacgatgtcagcgacctgccagtgaacctgtcagtcgtgtggaacggcaactttgtcattgacaacccacagaacatccagggtgagtgggcgccccggcggggtgggcagtgggcgggcccgagctgaccgcacccctccccacagcgcacctctacaagtgcccggccctgcgcgagagctgcggcctctgcctcaaggccgacccgcgcttcgagtgcggatggtgcgtggccgagcgccgctgctccctgcgacaccactgcgctgccgacacacctgcatcgtggatgcacgcgcgtcacggcagcagtcgctgcaccgaccccaagatcctcaaggtagggcccccagccctgcccccacaccccatgccccgccctgcaccaccgcacaccctacgccctgtgggatgcctgtaccccagcctctgcctccctcagctgtcccccgagacgggcccgaggcagggcggcacgcggctcactatcacaggcgagaacctgggcctgcgattcgaagacgtgcgtctgggcgtgcgcgtgggcaaggtgctgtgcagccctgtggagagcgagtacatcagtgcggagcagtgagtgcagccctgggtgtgtgcggggcgggacgggacggggcggggctcctgcagcccctgaggcccgcctgcccacaggatcgtctgtgagatcggggacgccagctccgtgcgtgcccatgacgccctggtggaggtgtgtgtgcgggactgctcaccacactaccgcgccctgtcacccaagcgcttcaccttcgtggtgagtctgctgccctccctctctccctattctctgctgctctgagagggtgccgctcagggcttctgtgcctcttcagggccccttgtctggccatgctctgccactgcttttccacggcctgggtgctgcccctcccctcctgtgcctaggccagctccagggctccctggctcaccttgggctgtgcctgagaaacctggaagtactggctctgaagtgcagctcccgggcatgcgggctcctagtctggggaactgtctgtgggggtaagcaggccaagtggggcctgtccccatgtggcccgagggggacttt

SEQ ID NO: 13662 - DNA, 1127 bp, Homo sapiens
atagagggtggctgccctgctctgggcagagactctgggaggtggtgggttccagtgcactctgggaggcagtgggctcttggagccctgagggggatactcaggctcatgagaggggcaggtggagccattgagggccagaggggatgggacgggtttggggtggggcccggagtcctgctgcagatgtgactggagaggctgggtccccacagaagcctcggtgccaggctgaggagttggggccctaaggcttgcggaaggcagggcagacccccttaggctggggctgctgtggcagattgggagggctgtggcacattgcaggggactatggcaggttaagtgtgctgcagcaggggcggaggtatgtccctgccctgtgctggtgctgagagctgcaggcaggccccgtcccactacactgctgtgatggaggagggaaagagggccccagcggccccaccctccagctccctcctcccccagagtggcgccagggccgcatggcgcgcatcatcctgcaggacgaggacgtcaccaccaagattgacaacgattggaagaggctgaacacactggctcactaccaggtggctcccggccctccgaccctagcacaggcctccctccccttggggcttccacagcgcagccaccaatgtttgcagcatgtgggctggacagcagctggatctgtcagggagaggaggggaggtggtcacttatgtgtgtggaccgtcccaggactcgagctgggcttgtgggattgcctagcatccctgggctgtcctgatatagagttccagactgagtgaggtggctgcctccaggcacagcactagggtgtcaccggggtccccagccggggagtgggagcctggtggtgcaggggcaccctggtgggtcacagggtccctggccctctgcccacaggtgacagacgggtcctcggtggcactggtgcccaagcagacgtccgcctacaacatctccaactcctccaccttcaccaagtccctcagcagatacggtgaggggccaggcagcgggcgagagggcagcgcatgggtccctggcctgggcaggacgtcccccgggctcccacgctgcagcagccggacggg

SEQ ID NO: 13663 - DNA, 2545 bp, Homo sapiens
cccgctgcaccgctgccatcctcagattcaccgcgtgctctgcgcggccgaggccggagcaccacatccacctcgccccagagaggctctgctccctcctatggaggggctgtgggccaggctgctcagactcctgggtggcttccagacggaccgggcagcccctctccgtcctcagggctgtgcctctgggagccactgggccaggggccccgggtcgcagagagcacgttcccgttatttattcccctccgcgtcctacacaggctgccctggcagctgtcttcaagggtaggctgagctccccaccctggagcccctgagggcggcccctgagcactcctctctctccactctctctgtccctgccccagcggcttccagtgtggcatctcagcagtgtcctggcccctccagagcagtgggacatctggggactgtttttgtgtttaggggaaaaaattctgctgcactctgcttgggccttgaggtctgtggcagggctcctctggcccgcagtggcctggatctatctgggccatgagtgacgggcagtgaccagagggactggaggccagcggtgtccacccttgccctcagcaagagagaatgcattcttaaaagaaagctgtacatgtatatatatgcatatatatatatgtggctctagcctcaggctccagccccagtggggtactgtacagttaactgaagaagaattttaaagacgatttgaacaagaaaatgaaggcagtgggaaagcaatgccaaatggttgtggagaaagtggccggagcctccctggagtggagcagccctgaagcctgtgccccccgacctgcgggccgctgttttggtttgacatgacaaggaaaggacttcctgctgaccctgagagcctctggggtgccgcggcaccacggggcatgcatgattgtgctagcgtttagtctgagttgatctttttaaaactgcaagtgttgaatactagaggttgttagacccttttttatgttttttaattaatcagtcacttgtaaaagcaaacaagcggtccatccccttttcaaggtcacttttttgatggtaccgaagatcccatggacattaagggacagctaactgtggccagactcagccccatgtccttggccaggcccaaggagaggactcggccccatggggtgtgccagtcttgcagtccgccccagctgagtagcgtgagccagatgacgccacagagacccgcctcttccctgaacgcgggtcggtgtggagtcagtgactgctgactcagggagctccttggccccgtgggcactgtgccagggctggggccttctgctgctgccacacccagctcaggcctgggccagcccctgcccccagcccactgagggggtgggcttactccctgggcagtcttgggggccagagctgaggccagtccatattacagtggctgggctgtttttttcagtagcccctagcattggctgggattcctgttcctgggtgcgcctccacctcccttctgatgtttcctggctatggtggggtgggaacctcagtttcccccaaagtcttccctggatgctggcttcaggttgaagtccctggttcttccagttcctcacgggttaggtaggggctcctgcatcaccttcagaatccagttccaacccccactctccttaggccttgtgctctgctctgccctgccaggctgcccttgtccatgtgagtagcatgggcgggtggtggggacggcagtggtgatgaagggggtgcaccacaggcctcatgaagcagttcccacatgggcgtgtggctggggcgtggccaccacagagcacatggctgtgtctaggcgcaagcactttagcagtatctgtttacatgcgcaaggatcaagccgactacctgtgctgtctactgggacagcagtctccgagctactccgtacctccctctgccaggtcgtggagttaggccccagtccctacttgtcactggttcccactgtgctcctaactgtgcagcacctgggagctctggcctggggctggaggccctggtaggagctgcagttggaggccgttctgtgcccagcagcggtgagcggctcccatgggccctgtgtctgcagggagccagggctgcggcacatgtgctgtgaaactggcacccacctggcgtgctgctgccgccacttgcttcctgcagcacctcctaccctgctccgtgtcctccctctccccgcgcctggctcaggagtgctggaaaagctcacgcctcggcctgggagcctggcctcttgatatacctcgagcttcccctgtgctccccagccccaggaccactggccccttggcctgaggggctgggggccccacgacctgcagcgtcgagtccgggagagagcccggagcggcgtgccatctcggctcggccttgctgagagcctccgccctggctttctccctgtctggattcagtggctcacgttggtgctacacagctagaatagatatatttagagaga

SEQ ID NO: 13664 - DNA, 1106 bp, Homo sapiens
tccatcatatggacagatcgtgttttgttcatccattggagatcttttctgagccttctgtgtttctgacctggaagcgctgagcctacccacaatggggctcctgaaccttagggaacaggcccagttcctggatggggtttggtgcttagggttttcctttttggcagtaaccacatctgttttggtgctccctcagggactaccgcgccatcccagagctggacgcctatgaggccgagggactggctctggatgatgaggacgtagaggagctgacggccagtcagagggaggcagcagagcgggccatgcggcagcgtgaccgggaggctggccggggcctgggccgcatgcgccgtgggctcctgtatggtaggtccagttgtctgcctgcccgagggactgggaagctgggaaggagtctgggaggggagtagaaggtgctggggatgaccgcagtagcaggtgtctcttgcctccccagacagcgatgaggaggacgaggagcgccctgcccgcaagcgccgccaggtggagcgggccacggaggacggcgaggaggacgaggagatgatcgagagcatcgagaacctggaggatctcaaaggccactctgtgcgcgagtgggtgagcatggcgggcccccggctggagatccaccaccgcttcaagaacttcctgcgcactcacgtcgacagccacggccacaacgtcttcaaggagcgcatcagcgacatgtgcaaaggtgtggcttccctacgcccccgcctcagcccctgtagcgcctccctaaatcctccccagaaagttgtctgagccgagtgaacacgtgaagcacagggcatatggctgagaggtctgtcagagaaaccaaaagttttgagttttgcatcagggctctcctgctggctatgcagtgaccacatctgggccaccaaagcgttttttgacaagcttgaaaatggacagattttatataaaaatctggattactactttgatctttgtaataggaattgactctttttttttttttttttttttttgagacggagttttgttcttgtttcccaggctggagtgcaatggcacggtctcggctc

SEQ ID NO: 13665 - DNA, 1101 bp, Homo sapiens
tgccacactgcagcatcttttcttgttagtgcatacagagcaattgccttcttttaaatgactatcatgccaccagataacgcagtttatttagctctccctttggagaacacttagattgtttctgatatttcacattcgccaaggacatctcgtgcaaccctcctctgcacccgtgtgtgtttccctgggagtgcccagagtgggactgcatggcgtagggcattgtatccctttctagagggactgtgccttaccattcctaacaagtaggttgaggaattggtgggggatgcaactgtgccctcctcctctcacttcccactctccccctcccccgcttctactcatcccctccaggtggcaagcacaaggtacgtggtgatatcaacgtgctcttgtgcggagaccctggcacagcgaagtcgcagtttctcaagtatattgagaaagtgtccagccgagccatcttcaccactggccagggggcgtcggctgtgggcctcacggcgtatgtccagcggcaccctgtcagcagggagtggaccttggaggctggggccctggttctggctgaccgaggagtgtgtctcattgatgaatttgacaaggtgggtccctgggtcacggaggctggtggaactcagggggtgtgtgtgggcttgggccttagcgacgggaatggtgttaatggggtccattgggacctcatcggagacttagtagtaggggcgtgaaccatgctaagggtgggccattttaatcttgcagatgaatgaccaggacagaaccagcatccatgaggccatggagcaacagagcatctccatctcgaaggctggcatcgtcacctccctgcaggctcgctgcacggtcattgctgccgccaaccccataggtgcagcaggcaccctgactgctggggctggggtgggacacagggaggtcccgcctgcttgaattgggagcccacggggtccccaggagccgatctgaggaagtcattgtgcagcagagggttcccctcttctgcatatcctgccagagtggggaacagtgaaagtgggacctgggacacctgggtttcctgttgagtcatgt

SEQ ID NO: 13666 - DNA, 1193 bp, Homo sapiens
gcacagcttgtacagcagagatttgaagccccttaatcggcctctccacccctggatattttcctcccataaatggaggtgatggtgtctgaaagtgcactgtaactggggcgctctggaaacagcctgttctcacaccactgatggctcactggacacttcctccttgcaggctcgtcagatcaacatccacaacctctctgcattttatgacagtgagctcttcaggatgaacaagttcagccacgacctgaaaaggaaaatgatcctgcagcagttctgaggccctatgccatccataaggattccttgggattctggtttggggtggtcagtgccctctgtgctttatggacacaaaaccagagcacttgatgaactcggggtactagggtcagggcttatagcaggatgtctggctgcacctggcatgactgtttgtttctccaagcctgctttgtgcttctcacctttgggtgggatgccttgccagtgtgtcttacttggttgctgaacatcttgccacctccgagtgctttgtctccactcagtaccttggatcagagctgctgagttcaggatgcctgcgtgtggtttaggtgttagccttcttacatggatgtcaggagagctgctgccctcttggcgtgagttgcgtattcaggctgcttttgctgcctttggccagagagctggttgaagatgtttgtaatcgttttcagtctcctgcaggtttctgtgcccctgtggtggaagagggcacgacagtgccagcgcagcgttctgggctcctcagtcgcaggggtgggatgtgagtcatgcggattatccactcgccacagttatcagctgccattgctccctgtctgtttccccactctcttatttgtgcattcggtttggtttctgtagttttaatttttaataaagttgaataaaatataaacgctggtatctgttggcttccattccgctttagtaagtaacctggacttccgctgaaggccctttccaccttctccgttcagagttctgtaggaggtaggtcgggttaaaaaagctgttttgtttgtggatgtagagaaagcaaaaatgatatagatatccccattgaacttggtttgcagtcactgcctctgtgatatctaagtggaatccatggaaatcctagttagacgtgtataggactagag

SEQ ID NO: 13667 - DNA, 1256 bp, Homo sapiens
ccttcctcccccttgacctggtgctgactgactgcttccacctcccctgggctggcgccgggctgctgtactcccgtagcctccctgggccgctccctgacatcccgtgccactcaagagttagtgcatagtgtcaacgctgagtgggttcacagcacttccaggtgcagcctggaggcctcctttgggctgcccccgcctcagtggggctgcattagcattggcgactcccctcgctcaccttccgcatcccatcagttgctgtatcccgcgactcctgcctcctagaattgtgtgccctccacaccatcaggaggcctgcagcagctttttcccgggctccctgcttctaacagggccagcttcttcctgcagtagagagctctggtgggagtgaaggctccatcacctcctctcccaaacgctgaaaggccaaaggtccagcctcggcactggctctggcttctgtccctgtagcccatcgtcccccagcactgatagcacacagtgtctgcctgttcgaccccacctccacatccttgcctgcactttgccttgagtgcctctcctgctctggtctgcctgtcacctgccctcacctgggggaggcttccccataccaaaagggatgttttctctccgttcctttccacgggccttctttctcagaccatgaacccgtcctgacccaggctctgacctccttcctgcccaggtacctgctggagcagcgagacgtggaggtgaatgtgcgggacaagtgggacagcacccccttgtgagtgctggagagaggggtggggagggtgggggttggtgcaccccttcagcactgaggactgcctcctgtacttccttcctcccttcaggtactatgcctgcttgtgtgggcacgaggagctggtactctaccttctggccaatggtgagagcagggagcccggctcacgggtgtgcgtgggtgcatgcatgtgtgcgtgtgggtgcatgcatgcgtgcgtgcattcaaaggccttgatacacatttgcaaagcaccacgattcctctcttaccacccagtcgaatcagcaagtactattattgctactttaaaaccttttctctgtccaccttgcccatctctacttctacgacctgggcccagtcatcagcatttctccccggacacggtgcctgcctctctcttgccattgcagccaagttgatcttttcacaatgaatctgatcggctaaaaatcctccagcaagttcccat

SEQ ID NO: 13668 - DNA, 1135 bp, Homo sapiens
actgcatttgattaactcatttaaaaaatatagttcaattaaattccaaatcagttggaagtgtagctcattttaacataatgggaagtagaggcttattcacaactagatacaattgtacaggctccttttccagactctggaaattatttgaatgttatcctttttttattaactgatgaagagacgaacatttcttatctctaaaaccagaatgaatctgtttatggtgaatttaaatgcagcagtctgtttagacaccatgtgacttcctaaacagaataagctgttgcctggcaggctgaacagaatgaattgaattatatactaatcgttgatattttggggttctaaattaaacacagctaggaaactgaaacacattggttttatataaggggtacccagtcaaattttgcgtattcatttttaaaataacgtactacgtttccaagctgatattgactgttttgcttccccgtttcctcaaggcacattgatggagctagggatctctcctattgtcacgtctggccttataatgcaactcttggctggcgccaagataattgaagttggtgacaccccaaaagaccgagctctcttcaacggagcccaaaagtgtaagaaagattgtgaataatctgatgtctatagttggaaaatttgaatttgctataagattttggtatcagtttttctttttttatttattttttatttttttttttttttttgagatggagtcttactctgttgcccaggctggagtgcagtgacgcagtcttggctcactgcaacctccacctcccaggttcaagcaattctgcctcagcttcccgagtagctgggattacaggcacgtgccaccacacccagctaatttttgtatttttagtggagacgggatttcactacataggccatgctggtcttgaactcctgatcttgtgatccacccgcctcggcctcccaaagtgctgggattataggcgtgagccaccatgcccagcccaaacagtattttcttttgtgctgcaacctccttggcctgccaaccctgcaggagctccatgccctgtgttagcgtgagagagcacttctggtagagcagaggtggtgggtgctggggatg

SEQ ID NO: 13669 - DNA, 1574 bp, Homo sapiens
aacttgagaagggatcactttaccccagagctaataattctgtcctctggacccagacctggatggtgagcctagagaggtggcccaaatctgtagttcagctcttgagccatcgagaccccaagtgcctgacattgagtttgggtgctgcaggtgtgacatctccagattgtgtctccggatgctgtcaggagtaggttctactccctgattttctttgaatagaacaaattttccaagtttcacttttactcctcccatgactaaaaagcaagtgaatctaggaaaaggtaaaactaaagaagaagtgtgcttttgttaaaaggcttttgattcatcatgtactttgctgatgtgatggtttagcgcgttctcagccgagccccttggaggtagtatcactgctcttcatctttgttctcccccgtgcctggcgttgaattggtgtttcttaattgtttcttttgttctgtgtagtgacccacttggaaaacacttctttctttcaattctagtatttggcatgatcattactatcggccagtctatcgtgtatgtgatgaccgggatgtatggggacccttctgaaatgggtgctggaatttgcctgctaatcaccattcaggtaattattatgctaacatctccctttgagtagcccctcacacttacctacaattctcacataacgaatctcaagcacacctaaaaggaactcctactgaaaggaagcagaagcctaagactctgggttagccctctgaattcagcagagaaaggctttactgaccgctctctggggctgaggatgtgatctcattccgtcttcagcgtttatatcagagaacccaattactgaaggacggaaccatgtccgtggggagcagtaacacatagtcttgtatttttgaatttttacagctctttgttgctggcttaattgtcctacttttggatgaactcctgcaaaaaggatatggccttggctctggtatttctctcttcattgcaactaacatctgtgaaaccatcgtatggaaggcattcagccccactactgtcaacactggccgaggtaagggccctgtgctcccctggtggcgacagctttcagcaaaaacaattgagcaatgcaaagcagaagacaaaaatccccccattccacagaaaaataatgtcagttttaggtttatctcttctggtgtttgggtccatctgcaaagttttaaaaacacaaataggcttgtaattatgatgatacctaacttgcacttttcatataaaaatatctcctggacgtttggcacgtcagaatacacaatcctgcctcacttttcttagcacagtataagcttatattgcaacgataaagcaacgttaagtcatttccaggtttttttatcgttaacattgaaaccatgactgtcctcatatgttcatctttgtatattttggcagctgctctcagtgaataagtttctaaaaatgaaattcctaaaccaaagcacttggtcatgcaaggggcagctttctgaaaaaggcctgaacttggagcttagcacctgcgttcaaat

SEQ ID NO: 13670 - DNA, 2726 bp, Homo sapiens
ccccaggtacatccccacagccgcggcctttggtgggctgtgcatcggggccctctcggtcctggctgacttcctaggcgccattgggtctggaaccgggatcctgctcgcagtcacaatcatctaccagtactttgagatcttcgttaaggagcaaagcgaggttggcagcatgggggccctgctcttctgagcccgtctcccggacaggttgaggaagctgctccagaagcgcctcggaaggggagctctcatcatggcgcgtgctgctgcggcatatggacttttaataatgtttttgaatttcgtattctttcattccactgtgtaaagtgctagacattttccaatttaaaattttgctttttatcctggcactggcaaaaagaactgtgaaagtgaaattttattcagccgactgccagagaagtgggaatggtataggattgtccccaagtgtccatgtaacttttgttttaacctttgcaccttctcagtgctgtatgcggctgcagccgtctcacctgtttccccacaaagggaatttctcactctggttggaagcacaaacactgaaatgtctacgtttcattttggcagtagggtgtgaagctgggagcagatcatgtatttcccggagacgtgggaccttgctggcatgtctccttcacaatcaggcgtgggaatatctggcttaggactgtttctctctaagacaccattgttttcccttattttaaaagtgatttttttaaggacagaacttcttccaaaagagagggatggctttcccagaagacactcctggccatctgtggatttgtctgtgcacctattggctcttctagctgactcttctggttgggcttagagtctgcctgtttctgctagctccgtgtttagtccacttgggtcatcagctctgccaagctgagcctggccaagctaggtggacagacccttgcagtgatgtccgtttgtccagattctgccagtcatcactggacacgtctcctcgcagctgccctagcaaggggagacattgtggtagctatcagacatggacagaaactgacttagtgctcacaagcccctacaccttctgggctgaagatcacccagctgtgttcagaattttcttactgtgcttaggactgcacgcaagtgagcagacaccaccgacttcctttctgcgtcaccagtgtcgtcagcagagagaggacagcacaggctcaaggttggtagtgaagtcaggttcggggtgcatgggctgtggtggtgttgatcagttgctccagtgtttgaaataagaagactcatgtttatgtctggaataagttctgtttgtgctgacaggtggcctaggtcctggagatgagcaccctctctctggcctttagggagtcccctcttaggacaggcactgcccagcagcaagggcagcagagttgggtgctaagatcctgaggagctcgaggtttcgagctggctttagacattggtgggaccaaggatgttttgcaggatgccctgatcctaagaagggggcctgggggtgcgtgcagcctgtcggggagaccccactctgacagtgggcacacggcagcctgcaaagcacagggccaccgccacagcccggcagaggggcacactctggagaccttgctggcagtgctagccaggaaacagagtgaccaagggacaagaagggacttgcctaaagccacccagcaactcagcagcagaaccaagatgggccccaggctcctccatatggcccagggcttaccaccctatcacacgtggccttgtctagacccagtcctgagcaggggagaggctcttgagacctgatgccctcctacccacatggttctcccactgccctgtctgctctgctgctacagaggggcagggcctcccccagcccacgcttaggaatgcttggcctctggcaggcaggcagctgtacccaagctggtgggcagggggctggaaggcaccaggcctcaggaggagccccatagtcccgcctgcagcctgtaaccatcggctgggccctgcaaggcccacactcacgccctgtgggtgatggtcacggtgggtgggtgggggctgaccccagcttccaggggactgtcactgtggacgccaaaatggcataactgagataaggtgaataagtgacaaataaagccagttttttacaaggtacttgatcatgttctcttgattttaaattagattttattcccaaaaaggccagtgaggcgcaaagcttggttgcagctttgtgtgtgtcaaaggcttggttggggcactcaggcattttgcctggaaaagttcccttctgatggtcatgtcaacctggtgctcacatttgtgataaagtgatatgggtgctgggccacatgtggagctgctgcagggctctgcccgtgaggcagagtgcactggctgtcccgtgagaatgcagaggcctccgctgagccagggcgcctgccaccccgtggaagagtgggaaccttctagcaggagcctagggccccataactcgaagccctttgagcctcagctccagtacccagctggtgattggagaagtcttaacttggttgtgaggctggcctcagacccgacctgtagccaagccagaaggacccagtgttgtgtgggtgggagtggcaggcttgtggctgctcccttagaacgtgtctagaagtctt

SEQ ID NO: 13671 - DNA, 1266 bp, Homo sapiens
gcatggtaaaaaaaactttctggggagagagaggaaggctccctgaggcaagagggtagagatttgctctgctgctgtcctggtgctggcctgagcctttctgagtgagtatccctctgtagaccaggtcactcacctccatcagctagccagtttcaccctttagttcttcttgtgtcttttcacaggaagcccaagacacccataaatgtgaaatgtcacagtcataggccccctggggcttcgaggctgttgtcatgggtgtgcagtgtttgaaactggaccctaagaggggaggccctctggtacctccccaggcatctccttgctggttctgtcacttactctttgcgacaggttgagagttgtttgaacatctggcttgttccgtggctttctttgatttattttcccaggattcttagtgtcctgaagatttggttaggcgaccttattccttaagctcagatggtatagaaggaaaggtggatcatgacattaattcattcaacaaactccgagcaactactgcttgccaggggttgagtttctagtggtcaacaaagcagaagtggcttctgctttcatgtagcttcctgtctagttggggaggcagatggtacagaagtaaataaaacatgcggaattataaattatgtaagtgctaagcaggacaagacaggatgcccagatagggactaatggatgtggggcatctactttagtttggaggccagggaaggcctttctgaagcaataaagctgaagctaaactgtggcacaaaagcccgtccctggaatgttgggaggtgttccagaccaaaggtgtagcacacatgagggtcctgaggctggacatctcctggggctagctacgagtgagagggtatcagctggttttcacacagcagacctggtgttgcaggtatatttggacagatgcatatatctggactctctggaagtcccagttttgctgaaagataagcgtggcacatcctatcattctgaaataggacacggtgagacagaagaaggcaggccagccttctggatatgcctggtctcactatggctatcctattggcctttatccatccttagtcttatttctggtactgtaaccccttatttccatggtagagggatgggctgatgtggaatcagcgttggcaggcaatcctggcagaaagtgaattagacatttttcacaactctgtgattgtgtttggtcattaaacattggcccactggctgcttatgact

SEQ ID NO: 13672 - DNA, 1173 bp, Homo sapiens
taaatgtccacacagaataagtatgtcttcttaaagatgcgggggctttgctagtagagtttaggcaagaatgctctgcattagaaactgagattgtagaggcgtgcttccaggtacatctgcagatactttttggtcactattatttcttgcatctcttcagaaggctgagatgtatttattggtcttcttcaaggaggtcttttattcagaagcctaggggccaggatcactgctgcctccttagggagtgctctgaaagtggaggttaatatctaagagagccctttaaaattctgatgtccaatgcagggacatttcccccagacggggaaatttggggcctccattgcatcatgtgccatgtgctagtacagtggtgctgtcttctaggcttggttgatgtggggagagaagaggatgctcactgcacttggtactgtgccaggtgcttcatggacgtgctttgtgtccatgttgctgatctctgtaactgtgatgggacttattttccatttcaggttccgaggtgcaccgattatacccgtggcggccaagccggggggaccagaggcccccgaaactgaagctccacagggcattccagagctcattgaggtactgtcatcttgaatccaggttgccctttagccccagcgctgctcaggccagcccctttgtgtccctctctcccctgagagagaaagagaggcagccctagcaagaggactcagttggttccattaacctccctgttaacaccttagcacaactcccccacctccctcaaaaaggtagacccaaactaggactcctaaggttcactgaagcccatgattcaccctccagccataaactctgcagagctcgtcacaccttgctgtgcctcactttctcctttctcttgtcatacctacactcagacaaagcagctcccacccatctggaaccctgggaccgtgacatccattccagtccttcagactgtatcagctcctccagtaccccacctgggctgggggccagtgaggcaggggtgaaagacatgagcccaacagcaggggcaatgcagcttccatcctgggcacctccaccaaagatgggaggcttatcttcggaagctgtggggctgaggcccaggttgttcttcctaacttgtgctggtagtcaggg

SEQ ID NO: 13673 - DNA, 1240 bp, Homo sapiens
agcctgtccagaggaggtattgctgcagtacaggcgaggctcagccagctggtaaaactctaggcctgctggcggctggcttctggcatacgtcagggagtggcggaagatgaggcctaaaaggtacctaggggctagatgatgaggagttttaaattctgaaggcatcaggaggctggggaaatgcatgaggccagggagcaatgcgacagggtgtcctttagtggctactctcctgcagcatggagggcctggcaggacagaccattgtagcagtcccacgggagaagacagacgaggcttctccaggtgccctttccttcagactgagcggaaagagctgagagcatggcagaagcttggaatgcagtcagggagttaggtggttttgatctcctgtccaccttgccagggcatggacctctgagctgagttcaccttggcagccttgatgaactgctggtcagccacattctctgccttcctctgccctgccccatctggctcctctccccacggactgtggcaccagtttctcttttctagctcctgacgtcccagatttccatcccaacgagagatccctcgggaccgttcctcatgtctgtggaccactgtttctccatcaaaggccaaggcactgtgatgacagggaccatcctttcaggctccatcagcctcggtgacagtgtggagatccctgccctcaaggtcagtcttaccttgtcttcccttctggcctcctcgctggcagcaagggagggggactgtccctttgtctgttcagctgctgagcctgctgctgtgcctgccctgggactcccactgcctgctccgccccacctcccctctggctgcctggccccgcccggctccaagtctttcaactcagattctaggactgctgctctccctaattctcatagcgcctgtttattggaggcctatgatgtgcctcaaggaggtgttcccaagtaggtcttctgtgtagataaagaaactgaggctccagaaggtgaggtgggcttgagatcacatggttaacaagtggggctgctggaggggaaacctccctttctggacgctgtacgtcagggtggcaagtatgtgtggagttatttctgggtacctttttcttaaccacagtaatttcaaattaaacatgacgtgaatcttatgatgctcagaatcacagaatctggaagaaatccaggttggttttgcactcctggtggccatc

SEQ ID NO: 13674 - DNA, 1676 bp, Homo sapiens
ctcactaaacatttgttgaatgttgaatgaatgtgactataccagtcctcaatgtgacgtacagtaggtgacaatgcctgtcacccccccttcccttgccattgatcttttgcctaattgaatccctggaactgatttgacaagctgcaaggagagaagtgatgttcatagaggagctgctatgtgccaggggcatgataggtgctgccaagtagtttcatactcagtcctcagagtcctagaatggagatgaggcccagggatggtgcagggcttgttcacaagggcgtaagaacggggcttgtgggtggtgaagttggcatttgaagccaggcctatcttcctccatagccagccctgctgccctgggacactgtgctgttggctgcatttgtggctgatacctgtggagctctggggtctgtaggcctgggagatggtggggcctgctgagtggggtgggaggacagctcacaagtcctgccctgctcttgcctcggccaggtgagcgaaatgcagaagctggatgcacaggtcaaggagctggtgctgaagtcggcggtggaggctgagcgcctggtggctggcaagctcaagaaagacacgtacattgagaatgagaagctcatctcaggaaagcgccaggagctggtcaccaagatcgaccacatcctggatgccctgtagcccctgcccgcatcctccagggggcccagggtgcctgcactttgctgtggcaggcagattgggtggtagtgggaggttgtgcatggaggccagtgaaagctgacatctgtaaaaggccttcaaggaagagaaaccaggccctgcgtcaggcagtgtgagtttgccgtttgtccttaactttctttttttttttttttaaaaaaagaaaactttaaaaaaactcccattaaaaacaaaacatctttgtgttttgaacaaaggaattttcaatatttgattggtattctgttctgaagtctaagatatttttcagcctataaagccccctgttttatgcccttctaattctgatgtttgggtattgtgtgagtgcatgtgtttttttttttttttttaaagcgtgtgtgaacaaatggaaataaagcagggactgtgaacatttgtttttggtctgttgaagatctctcataatttaattcttaattttgggaatagtgcttttatcaagtgctttttattcattaaataatggatttgcttctcagcaggtttgcaaggcaagcatttacattttacatattagaacactgagttattctagtaccagagtgttgaaagtggtgccagagtgttgaaagagttgacgtggcttatgtcacagaatggagtagtggagtgaggcctccatttttgtagtttttgcatccttcctgtgagtcatgttttactcagcatcaaggaaacagtgatgagcaaagcagagatggttcctctcaagaggcaagggattgaaaggtcatgtggggaatcgacagtgccagtgagtgccaggctttctgcccctctttcctctctgcaggagttcgctccctgtctccacctaatgaattcctgctcagcctcaggatgtgttacttaaggttactgtgtcagggagccatccgtggcctgccacactcagtcaagtcctgtggtaccctctcgttttc

SEQ ID NO: 13675 - DNA, 1137 bp, Homo sapiens
ctcctgagtagctgagattacaggtgcctgccaccatgcccggctaatttttttttctatttttagtagagatgggatgtcaccatattggtcaggctggtcttgaactcctgacctcgtgatctgcccaccttggcctcccaaagtgctgggattacaggcgtgagccaccaggcccggctggtctgctcatctttatggccctagttttgcccattgctgaacctggtccagattaggtatcagtaggggtttgactttgactttccaagaaggtggcatttcatttttggatggctgctggtggcagatgttctttgggagataaggtcagagtggacccaagcctggatgttgtcacacatggtgcctctccttccttcaggatccagccgcagaagccaggatgaaggtagcctgcatcacagagcaggtcttgaccctggtcaacaagagaataggcctttaccgtcactttgacgagaccgtcaataggtacaagcaatcccgggacatctccaccctcaacagtggcaagaagagcctggagactgaacacaaggccttgaccagtgagattgcactgctgcagtccaggctgaagacagagggctctgatctgtgcgacagagtaagtgtcgggcgtcacagagttgcttggcttggggccctccatgcctcactgctttgtctagggcagacactgggcagctctcttgcttacctgcatgcttgtgggataagactgcatctggccataacttttcatgtggtgccagtccttgtggaggaaaaagggatttttggggtcctggtgtgagctgggtgtggaggaagctctgctagcctcgtcagcactgcgtgcccttgtggccagtattgagagtagctgcatcctctcctggaggccagactgttctaggtcccaggctgcttatgttgtggtaaaatgaacctagactttagaatcaataggtttgaatccaggctctgattcagagtttgtaaacctggccaagtcacctaacttctgtgcctcagtttcctcatctataaaatgggaatgctgttagcccctcataggggttctgagtgtgaaatgagttaatgcatgcaaaatattcagaaccctgtcct

SEQ ID NO: 13676 - DNA, 1152 bp, Homo sapiens
ccagaatgagagaccccttgattttcttcctgtggagaatgttccatagtggaagagtagttcctcatgcaaatccaggctgtgctgtttaccaggagaagggacagtgggcctgggcagacaaaagcaggacatgtcccctgccccgtaagaagctcttattcatgtgaagagaaagaacattcagaacagctcgtgaggcatctgttcaagcctcccagggattcactgggtaggatgtacaggagagctgtgtcaactttgtgactccaaggagtggggccagtactggtgagaacttgggagtggaggattcagagggacagttgttgccccagcagacaagggctttaaaacaaagggctttctggcactggctcccctgtctcaagagagtgggtgttctccatagctgagaagggagcagagtggaggagtgtgaatttagtgatcttgaaaggctccttagccttggaattctctgatcctaaatctggtttattgatgtagttggttggaggctatattttattcccatcttcttccaggaacattgaaattgatagtccctatgaaatcagccgtgccccagatgagctgcactacacctatctggacacatttggccgccctgtgattgttgcctacaagaaaaatctggtagaacagcacattcaggacattgtggtgagtggctccactgtttgccttccatggcgtcttccccagacagtgggctctgggggccaagaactcaccttctgtccctccttgggctggagtcatttgagctcatggcgtcttctggtcttggggtggggcagcaggtcgagtgggccagcctgggtgagtctaggctcccatgtccctacagccccgatgaagcctgtcctcttgcttctcccaggtccactacacgttcaacaaggtgctcatgctgcaggagcccctgctggtggtggcggccttctacatcctgttcttcaccgttatcatctatgttcggctggacttctccatcaccaaggtaccgtctctgccttcttcctgcttgtcatttgtgtccttggtaatatttcaccagcttgagcactgatcctcacagtgagcccagggcaggacgccatggccaaaagacccctgcctgtgctc

SEQ ID NO: 13677 - DNA, 1203 bp, Homo sapiens
agtagtcccagctactcgggaggctgaggcaatagaatctcttgaacctgggaggtggaagttgcagtgagctgagatcatgccactgcactccagcctgggcgacagagcaacactctgtctcaaaaaaagaaaaaaataatttaagtcttctaagacagatatgtagctgtttctctcagggctgtttataaatagcaagagtgtaaaacagtgtaaatgttcaacaatggaacaaaagttaaaaacattctaataggtaatcccagctattcgggaggttgaggcaggagaatcgcttgaacccaagaggtggaggttgtggtgagccgagatcgcaccattgcactccagcctgagtgatagagtgagactccatctcaaaaaggaaaaggtgatctcttaaagataattgcttttgtctttggttcaaaattttgttgtgactttgaactgctactactgttttcagtatcctcagtctctcttacttctcttgccttgttcttcctttagtgggagattcttcacagtcaagctcccagttgctcttgatcctggggccaagatttcagtcattgtggaaacagtctacacccatgtgcttcatccgtatccaacccagatcacccagtcagagaaacagtttgtggtgtttgaggggaaccattatttctactctccctatccaacgaagacacaaaccatgcgtgtgaagcttgcctctcgaaatgtggagagctacaccaagctggggaaccccacgcgctctgaggacctactggattatgggcctttcagagatgtgcctgcctatagtcaggtaagctcaggtggagtccagcccatccctgtctgcttcagagaatgtcttgcagagtgactactggttgataggcttgggtggtgtggggtggatgaaatctgcagtcatttctaaggtcatcccaaaagtgtttaacctgcagtgaaatgactccatgggggtcttgtttctccttgggggatcacaggtagaggctaggggtagcatttggagaggtggaatgggtgttggagatggaagcaaggcattccacgcagaggcagtaagagggacaaaggctttgagatggtgtggctgggcagatactggggtagcaaagctgttggagtggttgagggccttccttgaatgttgggccttggttggaacttgaagag

SEQ ID NO: 13678 - DNA, 1221 bp, Homo sapiens
tgggcgcagtggctcacgcttgtaatccagcacttcgggaggccgaggtgggcggatcacgaggtcaggagatggaggccacagtgaaaccccatctctactaaaaatataaaaaaaaattagccgggcgtggtggcgggcgcctgtagtcccagccacccgggaggctgaggcaggagaatggtgtgaacccgggaggcggagcttgcagtgagctgagatcgtgccactgcactccagcctgggcgacagagcgagactccgtctcaaaaaaaaaaaaaaaaaaaaaaaaaaaaaaaaaaaaaagtaagtacactcgcactacgaacagaaggatatcccgagcagctctgagagggctttagcaatcaggcgccgggtcggcttcccggttgccccggagacagggtccttccttgttcggcgccgccatcttgtgtcaccagcccttgcccaatgaacggctgctcagtggcgggagggcgggctaccgcgcccgggccctacccgccctggcgcactgctcttcccggtcatggaggcgccagccgccggcttgtttctgctcctgttgcttgggacttgggccccggcgccgggcagcgcctcctccgaggcaccgccgctgatcaatgaggacgtgaagcgcacagtggacctaagcagccacctggctaaggtgacggccgaggtggtcctggcgcacctgggcggcggctccacgtcccgagctacctctttcctgctggctttggagcctgagctcgaggcccggctggcgcacctgggcgtgcaggtgagtgtgggcgacccctcgccgccgctcccgggacccttcccgcctcccttcctggcggtcccccgactccgcccgcgcccctctaggcctcaggaaatgcggagacccgggcggcgggcggggcacagggggtccgtgggattgcctcggggcccgcgaggagtcctgggtggccaggggccccggcgcctccgctgcccccggtgcgcgcccgccctcctgcctgggccacgtcagcaccggcctgcccccgcgcgggtcgctgctcacgtgggcagctgctgggatccgcggccgaccagcctcggagcttgcccctgtttgggccgttctcggcaccgctcgggagacctcgggccggtagaacgcacctcccttccgtaaggcgagcgcggcagcccctcggcccggtgccagcgggc

SEQ ID NO: 13679 - DNA, 2106 bp, Homo sapiens
tgcccaagcagaagtgagcccctcctgggcagaaagtgcccgcaatgagggctgaaatgtttctattccctgagtaaccaacctttctctgtttccttgtccaggaaacggaggtggagctgtacaacgaatttcctgaacctatcaaactggacaagaatgaccgggccaaggcctcggcagaaagctgcagttgctgagggggcagtgagagttgagcacagagtccttcacaaaccaagaacacacgtaggccttcaacacaattcccctctcctcttccaaacaaaacatacattgatctctcacatccagctgccaaaagaaaaccccatcaaacacagttacaccccacatatctctcacacacacacacacacgcacacacacacacacagatctgacgtaatcaaactccagcccttgcccgtgatggctccttggggtctgcctgcccacccacatgagcccgcgagtatggcagcaggacaagccagcggtggaagtcattctgatatggagttggcattggaagcttattctttttgttcactggagagagagagaactgtttacagttaatctgtgtctaattatctgattttttttattggtcttgtggtctttttaccccccctttcccctccctccttgaaggctaccccttgggaaggctggtgccccatgccccattacaggctcacacccagtctgatcaggctgagttttgtatgtatctatctgttaatgcttgttacttttaactaatcagatctttttacagtatccatttattatgtaatgcttcttagaaaagaatcttatagtacatgttaatatatgcaaccaattaaaatgtataaattagtgtaagaaattcttggattatgtgtttaagtcctgtaatgcaggcctgtaaggtggagggttgaaccctgtttggattgcagagtgttactcagaattgggaaatccagctagcggcagtattctgtacagtagacacaagaattatgtacgccttttatcaaagacttaagagccaaaaagcttttcatctctccagggggaaaactgtctagttcccttctgtgtctaaattttccaaaacgttgatttgcataatacagtggtatgtgcaatggataaattgccgttatttcaaaaattaaaattctcattttctttcttttttttcccccctgctccacacttcaaaactcccgttagatcagcattctactacaagagtgaaaggaaaaccctaacagatctgtcctagtgattttacctttgttctagaaggcgctcctttcagggttgtggtattcttaggttagcggagctttttcctcttttccccacccatctccccaatattgcccattattaattaacctctttctttggttggaaccctggcagttctgctcccttcctaggatctgcccctgcattgtagcttgcttaacggagcacttctcctttttccaaaggtctacattctagggtgtgggctgagttcttctgtaaagagatgaacgcaatgccaataaaattgaacaagaacaatgatcatctgcctttgccagagtctttttttccttcttcaagagccttggctcagtagagaccacatgagctaatcatagtcaatgccttatcaagcaagagagccctccataaatgggcacgtgtggtgcttcaaggcagaaaggccctctcatatctggtcctgtagtgcctgtccctagtttttttttgtttgtttttttttccgggggcgggggtgggtgtattttaatcacattgttggaggttgaggaccatggatggagaacgcattgtccctttaggagagcagccagaaactgctggggactctgagccatgcatatcctgtaggtgtaactgtaacctagtcatgtgttatgtgttttatttttagttgacctagttgctaacacttagatgtgtaattctgcatttgtcacaggagaggaagatttggcagcagaggccctgtattccaacatatgtaagcccccacctggaatggaatagttgccacttagaagcaattttattaaaatagtagtagttcag

SEQ ID NO: 13680 - DNA, 1204 bp, Homo sapiens
tgcaaccttgaactcctaaggctcaatagatcctcccacttcagcatccccagtagctgggactacaggcacgccctgccacacccagccaagattctttttttaatctacctttgtactcaaaagctgtactaagaggtctaacaggcatttgagattaatagatcccaaactgagttcctggttcccacccaatcctgctccttccaccagccttctttatcatagataatggtggctctgttgttccacctgttcaaacagaacacctggagtcaccttgtactcttattctcctagtccacttctaattccacagaagatctggttttctctacttttaggttcttagaatctgaccacttttaggcccttctgctgctactttggatcaggccagtgtcatctctcacagccttactgggattagagcagaaacatgggacatgatgcttagaatctcagattgtgtaggccagtggttgtcaccctgccctaagctggacccaagctattcatggagtgtcctggaactgctgcagggatgggtgggaagttgagtgggtgggatttgggtgcctgttttccctatcagcagtctcagtcagagccgcctgcttctgtctgttttacatatttggtttctgcactagatttctttgaataacaggttccacttttttagataatttacaaactgtttattgcaattgaactctcctcccctaaggcattgacctgatttgataacatcaggatctttctcccacgcccctgcaatctctcctgtgtggcaggttttctgtggttgtacctgaaggccaattagttgccaggcagtcttatctggcctgcccactggtaccagaatgatctctaacacagcccattgcacaagacccaagtgtcagtgagcctctgtgttcagtgaaggagactgagctttgatataaaaggctgcagagtgatggagccatcagcttgtttttttttttttttcttgttttttttttccttgagacagtgtcttactctgttgcccaccctggagtgcagtggtgcaatcacagctcactgcagcctcaacctccccaggctcaggggatcctcccacctcagcctcctgagtagctggaactacaggcgtgtgcaaccacgcccaggctggttttgaactcctgggctttaagcaatccccctgcgt

SEQ ID NO: 13681 - DNA, 1245 bp, Homo sapiens
acagcagtgccacggtgacccaagaggcagggttggggcctggacagggtttcctctgctgagactgagacaagcagggcttgatgctggtggtggagccagcatctcacctgccaggcttccttttgggcagggaggctacctgtggaatggctgagcctggttctgcaggggaggaaggctgccaggagctgaggggctagcacctgcattgaggggagtctgggtgcatcagattggggggcgccagaggcgaggctgcctggctccctttctcagcagctttgcttgtggcaggggtgagagtggagctgagtggggtctgggctctgcccctgcgcctccactgcagtgcctgggctccccttgcagggcagacagtgcctggcactgaggggtgcccccagaccccgctgggactggatgtgccgtgggcagtgccttcctccagcctcacaacctttctgctggggctgaagtttctggggtcacatggtcagaaggggctgagctggtctttcactgcaggcccactctgaaagagaaatcccatgaagcctgtccttgcagagcccctctgtttttgggggaacagggagcattcacagggtcttgggaacaaaggcctgggcctccccgtttgaatttcagccccagttccagggcaagtcccagccacccaagcatacttaccagtactgcccaccaccacccactgcccacctctaagaagcccggctctcctactctgcttccaggctggggcctcacaggtggggctgttaccttcctcagggcttagggagggagggaggacatggacagggccttccaccctggctccttcacagggatggtagctgaccggtgatgggttcatttgtcaccttggactgtgagccacttccacttctcgccccccaggcaggagcaccctcactccaagggcttggcctggaaaggcaggctcacctgggactcaacgttccttcccccgccgccactgtgccccccgtccctccaccccagaagccctgacctcatttgggcaccttgctgtcctctgggcttctcctctgcccaggtcaccctgtggcaggcctgggccctcaggatgtttcaaaggctccacagctccaccgctccacctggcttcactccagcaccctgtccctggagcacctctgtcctgtctgggccaacctggtctccctgccccatgccctcccctggctcttagcaacc

SEQ ID NO: 13682 - DNA, 1245 bp, Homo sapiens; identical to SEQ ID NO: 13681

SEQ ID NO: 13683 - DNA, 1223 bp, Homo sapiens
cagggtgtggggtccaaaaagggcaggaccctctgctctaggccattctatcgttcaaatgtttccaatgggagggagttaggactcttggagactattctgcgtatttaaatcagactccttgatggacttctcccacggggacttcctcctggctgggtctggcaggggttgaggggctttgctgaggagtgagccctgcactcttaatttccacagattgaggaggcactggtgcgaaggaagaaaatggaactcctccagaagtatgcaagcgagaccctgcaggcccaaagtgaagaagccagaaggctcctggggtattaggacccagctggggctctccttggagttcttccatcccccagtggtacctcaggacccagggctgcagacacaggctggtgctgcaagggctcctgccccattctcagccttccttccctctccttgtctcatgttgaccggagggtaggggtctgtccctggtcttcctggtaggttttgtacacatattttgctactgtgtggatccatttatttttattgtggagtgtatacaacaggttgcgaactggctgcctgtgtcttattttgacttgcactgccattttgaggggagaagaatcaattagtggcaaacatttaaaaatgcaattttttgcagaccaaagtataattttaaaaaatgcaaattttctaaaagacacatctcttgaaaaatgagatgatgtggccaggcgcagtggctcacgcctgtaaccccagcactttgggaggccgaggcgggcgggtcacgaggtcaagagatggagaccatcctggccaacatggtgaaaccccatgtctactaaaaatacaaaaaaattagctgggcgtactggcatgcacctgtagtcccagctgcttgggaggctgaggcaggagaatcacttgaacccgagaggtggaggttgaagtgagccaagatcgtgccattgcactccagcctggcgacagagtgagactctgtcccaaaaaaaaaaaaaaaaaaagatgcacgcaacccacaagtcaatgaccaggtccctctgtgttggttgctgctctgggctctccgttagcccccctccacctgctccactcgctcctgcctgggtggcaggaatttgagtttgctattcctgttttataacctgttctgcagaaacctatttttattaaagatttttataagaaaggga

SEQ ID NO: 13684 - DNA, 1223 bp, Homo sapiens; identical to SEQ ID NO: 13683

SEQ ID NO: 13685 - DNA, 1101 bp, Homo sapiens
ctttcaattaatcccttaggcataattcttagccctatagtccttgccaaaaatttttcccatatagcaatacattgctttcctgaaaacgctaaaccatcatagaatgctgccatccctgggtgcgtatcccagcctcattgtgtctttgctggccttagttgctgtttccccatctctcttaagagcttgttatttcagtagttttataaatggaactgctgggttgtttcagggttgtttatatttttttggttgctaatgagaatgaagttattttcaaggattttttttttcttacgctagtgggaactctgtttataattcttgtcctttcatttatttgggtggtttttcttatcaatttagatgagtgtttttatgtagtatacctttgtaggtgttgacattcattttaaggatatgatactaagtgtacgtgttagaggtgttgacattcatttttatggaatgatattgttaacctttttgttttctagctggtttaggtgaatttcgaattcgtgacctgaatgatgaaattaacaagctgctaagggagaaaggacactgggaggtccggataaaggagctgggaggtcctgattatggagtgagtacatggcagccccagtggcgggtcttgtctagttttccacccacagcagttcccagctcattcttgccatagtagtcgcttgatacaggaaagctatgaacaggatgggtaggatgatgctggaagacctcacagcacatgcatcacagcagacggggcatctgtatgtaccagccagaaggccttgtggaagctgcttcatctctcggcctcgtgtttaaaatgaccatgagcccgggcatggtagctcactcctataatcccagcactttgggaggccgaggcgggcagatcacttgaggtcaggagttcaagtcaagcctggccagtatggcaaaagcccatcttttctaaaaatacaaaaattagctgtgtgtggtggtgcacgcctgtaatcccagctacttgggaggctgaggcaggagaatcacttgaacctggaagatggaggttgcagtgagccaagatcgccactgcactcc

SEQ ID NO: 13686 - DNA, 1101 bp, Homo sapiens; identical to SEQ ID NO: 13685

SEQ ID NO: 13687 - DNA, 1736 bp, Homo sapiens
taagaccaattttcagcatatgtaactggcagtctatctgtatataattctgtattctgccctgatatcctgtggcttatggtacctgggcagttttcacaactggacttttttaatatataaaagtaagagtgttataatttgaaacttccagagacttcatagaaagctctgtaatatacataaatcttttatcatgtaaccagaaatctttgcctgtttgtgacatgtaagtgtataatttgataaatgttgttgtgtacatatctgtgaaaccttaggggttaattgcatgaaaacaaagatcaggcgttttgttctgcatggtgactgttgctttggtagacagtttttttctgaggcccattgtgaaaacttttaatttcttttttaggtgtggtgaaactggtcatgtagccatcaactgcagcaagacaagtgaagtcaactgttaccgctgtggcgagtcagggcaccttgcacgggaatgcacaattgaggctacagcctaattattttcctttgtcgcccctcctttttctgattgatggttgtattattttctctgaatcctcttcactggccaaaggttggcagatagaggcaactcccaggccagtgagctttacttgccgtgtaaaaggaggaaaggggtggaaaaaaaccgactttctgcatttaactacaaaaaaagtttatgtttagtttggtagaggtgttatgtataatgctttgttaaagaaccccctttccgtgccactggtgaatagggattgatgaatgggaagagttgagtcagaccagtaagcccgtcctgggttccttgaacatgttcccatgtaggaggtaaaaccaattctggaagtgtctatgaacttccataaataactttaattttagtataatgatggtcttggattgtctgacctcagtagctattaaataacatcaagtaacatctgtatcaggccctacatagaacatacagttgagtgggagtaaacaaaaagataaacatgcgtgttaatggctgttcgagagaaatcggaataaaagcctaaacaggaacaacttcatcacagtgttgatgttggacacatagatggtgatggcaaaggtttagaacacattattttcaaagactaaatctaaaacccagagtaaacatcaatgctcagagttagcataatttggagctattcaggaattgcagagaaatgcattttcacagaaatcaagatgttatttttgtatactatatcacttagacaactgtgtttcatttgctgtaatcagtttttaaaagtcagatggaaagagcaactgaagtcctagaaaatagaaatgtaattttaaactattccaataaagctggaggaggaaggggagtttgactaaagttctttttgtttgtttcaaattttcattaatgtatatagtgcaaaataccatattaaagaggggaatgtggaggactgaaagctgacagtttggacttttctttttgtacttaagtcatgtcttcaataatgaaaattgctgttaaaaggatgtatgggatttagatacttttgcaaagctatagaaaattcactttgtaatctgttataataatgcccttgagttctgtgttcagtctgaacaggttttttggtggtggtggttttgttttgttttggagacggagtctcactcttgtcgcccaggctggagtgcaggcttggctcactgcaacc

SEQ ID NO: 13688 - DNA, 1188 bp, Homo sapiens
ttatttctcttaatggattttcattgaccctaaccctgtaaattccatcacttttatcaaggtgtatattataataagtctataatacccaatcatgtagttgtgtgattattttatttttttgagacagagtctcaatgttgcccaggctggagtacagtggcaccatctcagctcactgtaagctccgcctcctgggttcacaccattctcctgcctcagcctcccaagtagctgggattacaggcgcctgccacttcaccgggctaattttttgtatttttcgtagagacggggtttcaccatgttagccaagatggtctcgatctcatgatccacccacctcggcctcccaaagtgatgggattactggcgtgagccaccatgcccagctatttttttaaccaatatattagctagcttttttccccagaataattttccaaaaatacatttaatagagaataaaagttaaaagaactttcagtggtttaatgctgttacttttaatatttcaaagatctgactgcagccatgagcagcaatgagtgcttcaagtgtggacgatctggccactgggcccgggaatgtcctactggtggaggccgtggtcgtggaatgagaagccgtggcagaggtggttttacctcggatagaggtattttgtcgaatagaaaaatttgaagtacttcagtatttgttagtatcaagactggtctgactagccgaattctttgtttttgctcaaaacaggtttccagtttgtttcctcgtctcttccagacatttgttatcgctgtggtgagtctggtcatcttgccaaggattgtgatcttcaggaggatggtaagtatttaacacttccttttcatacccctctagagcttggagaggtgagcacatgcaactgtgtatagcatttccacctttgaggttttgtattgtataatttaaaacgtaacactttgtaaaggttttatagtcttggcctgtttcttttccttattgttgaagcctgctataactgcggtagaggtggccacattgccaaggactgcaaggagcccaagagagagcgagagcaatgctgctacaactgtggcaaaccaggccatctggctcgtgactgcgaccatgcagatgagcagaaatgctattcttgtggagaattcggacacattcaaaaag

SEQ ID NO: 13689 - DNA, 1233 bp, Homo sapiens
ctggtctcaaactcttgacctcaggtgatccacccaccttggcctcccaaagtgctgggattacagacgtgagccactgcgcccggcctccatctgtcacccaggctggagtgtggtggtgtgatcacggctcactgcagcctcaacctcctgggatcaagcaatcgtctcacctcagacccccaagcagctggaattataggcatgcaccaccatgcccaactaatttttctattttttgtagtgatggggtctctccatgatgcccaggctgatttcgaattcctgagctcaagtggtccacccacctcagcctctcaaagtgctgggattataggtgtgagccactgcacctgaccagccttttgtttgacaggaaagagtgatagaggcccagagaaccaagtgccctgtctccaagttctgtgtttggacaactgtccttggtccagctcaggtcttcaactcttttctggagagagcaggctccttgcttagctcagcttctctctgcagggtggctttgagtataagcgcgctatcgtggactgcatcatcagcatcattgaagagaactcagagagcaaggagacagggctgtcacatctgtgcgagttcatcgaggactgcgagttcacagtgctggccacccgtattctacatctcctgggccaggaggggcccaagaccaccaatccctcaaagtacatccgcttcatctataaccgagtggtcttggagcatgaggaggtccgggcaggtaggtctgagccagggctgaacttggaaacttagcttacccttgaataaatgtcccagcaaagggacctgagcctccagtggggatttgtgcactcagtgttcttgctgcacaagctgtttttcataatattgtaggcaggaccttacatgtcatctagttgaacagttctttgttttttgttttgtttttttttttgagatggaatctcgctctgtcaccaggctggaatgcagtggcgcaatctcagctcactgcaacctccgcctcccgggttcaagcgattctcctgcctcagcctcccgagtaggtgggactacaggtgtgtgccatcatgcccagctaatttttgtatttttagtagagatgggatttcaccatgtaggccaggattgtctcgatctcttgacctcatcatctgcccgcctcggcctcccaaaagtgctgggattacaggcgtgagccaccgtgct

SEQ ID NO: 13690 - DNA, 1239 bp, Homo sapiens
agacagtgactttcacagtgaaatccctcactcagggatttcagcccagctctcctgcccgtttcactacaccagagctgccttcatgggttgctgcaaatgccatccttagcctgccctgtacagtcccttctgctgtatatatctgtacttctctcttcccttctaggtgtgttccggggtggtcatgacatcctggtgcgctcccggctgctgcttttggacacagtgacaatgcaggtgacagccagaagtttggaggagctgccagtagacatcatcttggcatctgtgggataagaggccagcctgcataggacctcatacccttccccaacactacctggaagttgtgccttcctcatgaaactggcagaaaccccttcccaagcttctgtattgaaaaacaattaggaatcattgcagatttttttttattctgctcccacctcccacccgggactacttgctggtgactttttttttttttttttttaaataggggatgattttagcttgtcctaaatcttgctgtccacccttccaggaaagggacattgtaaatgaataaaacattctcaactcctcttgaatctatcccccaagaaaccatcttatccctgtaataaatcagcatgtatttattgaatgattgctacttctgcagactcatgcttcagggctccaccttccccttcaaggcctcccctaaagaggcagaacacctgccctgtcccccttgcacccacagccctttggctgttgtagtcctgtgaggcaggaccctctccccgtcatcgctgtcccagcaccaagcccaggggtgggagcggtagagggtggttgagtgaatcagctaacaggcagagttcacactccctcccgttcgtgcttcttcacaacgcatcctcctttgatagtcgataaatggaggctccaaagggcttgggtcctgtgtctgatcgttccagcatctggtcttacatggagtgtgccctggggtttctgctccctgttcagttcagcgaatcagcataggcgaacagccctctagagcattctctgttggttgcagatgaagaatctccggtttaggtcccaaggggagcaggcttttaaactcaagccaggctattttaccaactttgaggccaaagtacacccgaaagggctgttttaaaaatctgggcctcacccttagagattcagctgaggggctggggcaggaaaggcttattc

SEQ ID NO: 13691 - DNA, 1165 bp, Homo sapiens
ccccctcaaaactgcacccagagcagggccacaagggtgctttttttctttaaaaaaaaaaaaattagaaccaattcatgttcatgccaaaaacaaattgtccccaagcctatatgtattaaaatgttaactttgcctaaaaatattgcagtgactttttaggcaggagtgccaaaggacactatgaactttttgaactgacagtttctcctaactttctgctttagcgtaattgctcagagtagagagcccccacaaagttatttaaaagatgccctagcagcaatccaccagtttttctaagctagaacctttgagtcccccaaactgcctgaagacttaagttttgtgggcactggaagtcactttgatagatggattgaaactgttcctatttgccctgggacggtttctatctatcaaaggaaggttttcacctgtagaaagccccctgcctccagccaaatagtcccatgctgactttctatcttcctttctcaaactgtcttaggaaggaccttcagtgcagatcaggtgcagtaatggctttcttgtcccttaattattcaccagacccagaagttgtacgcatttaatgctgtttgtaaccatgcatctgttttcattctttgctgtaccttttgctgcccatcctgttacttttgagtttctttcattgtggttgttcttgggttcttttgtcttgtcagagctcttctataacctcgctctaatggcttaacagttgttctgggtggaaacgtcccctcatttgaatgctcctctaaaaaaaaaagaaaagaaaactgtattcattccctttaaaatgaaacattcctggtttatttgtccatgcctctagcctgggtgagtgaagctggctgtgttggcctgggtgattgttcaggttgtagaatgcgcattttacattgtttatgataattgaagggtacttctgtctgctccaatttccattccttggtatactcagtatgtcctagtaaggaaggctttccactctactggctccttaagaagcaaaagtaggttaaattttatacttcactgactagggtcttctctctcccctgttctgaatggagtaaaagtctgatgccaagacaaatattgggagcgagccttcctcactagccatgtccaaata

SEQ ID NO: 13692 - DNA, 1677 bp, Homo sapiens
aatctgactggctctccaaacgtcagcatccaggcaaaagagaggaggaggaggaagagggagttgaagaagaggaagaggaagaagggggggctgtgggaccccacaaacggcagcaccctggccgacgagaagatgaggcttcatggtcagtcgatgtaacccagcacaagcggcagcatcctggccggcgctccccctggcttgcatatgctgtcccgaagcggcagcacccaggcagaaggctggcagatcccaaggctcaaaggagctgggaagaagaggaggaggaggaagagagagaggaagacctgatgcctgaaaaacgccagcatccgggcaagagggccctgggaggcccctgtgggccccagggagcctatggtcaagcgggccttctgctggggctcctggatgacctgagtaggagccagggagctgaggaaaagcggcagcaccctggtcggcgggcagcctgggtcagagagcccctggaggagtgaacccagttttccctgaagtcgagtttgtggtctaaggatgtcttgagccctgtgtgccccaccattcatgacctctgtattctctagttagatccctgaccataagcctgagcccctccctcccagccccatattcacacacatcccagcccctggccttgccctcttcctttaggcatgtgagaaaatcagcctagcagtttaaaccccactttcctccacttagcaccataggcaagggggcagatcccagagcccctctcaccccccccaccacaggcctgctccttccttagccttggctaagatggtccttctgtgtcttgcaaagactccccaagtgggacagggagcccctgggagggcagccagtgagggtggggtgggactgaagcgttgtgtgcaaatccagcttccatcccctccccaacctggcaggattctccatgtgtaaacttcacccccaggacccaggatcttctcctttctgggcatccctttgtgggtgggcagagccctgacccacagctgtgttactgcttggagaagcatatgtaggggcataccctgtggtgttgtgctgtgtctggctgtgggataaatgtgtgtgggaatattgaaacatcgcctaggaattgtggtttgtatataaccctctaagcccctatcccttgtcgatgacagtcatcctaatgataataaaacctgcatccagataatcacggagctctgtggttgctgttctgtcgcagctggcatgggattcttctttcgcattgagagggatatttaaaaggggatgggactagagttctcagctctgctgcagagggaatcagggaccctgggaggatgacaagtcctctctactgtccccatttcagaacacacttgggaggtggatggggttctggagcccatttgactcctggggagactaaggcctggagagaaggaagggcttgcccaaagacacacagctggctgaggtggagccatgggtctgagaggccagctcagggatttgccttgagtttgcctgatttgggaggcgggggtggtggtgagaggggaggtttgaggggaggactagtctggctcaggtctgtaatcttcatggttctgttgacagcttgtgtcaccaaacagcctgttaatgaacaggaacaaggag

SEQ ID NO: 13693 - DNA, 1208 bp, Homo sapiens
atgataaaaattgaaattgagaagatgcatagtgtgcttatatatagatatttacaaatcatgtgaattcctatgggctactgatgtggacttggggaaaatgctggtaaaggtcaatgatttaaagatttagaaagtataattaagtggcaagtggcatcattagttgcataaattttcttatcaaaataaatattttggaattgtttaatgttcaaacggtttttgtgatataccagcacaactttaaaaacagtgaaaagttgatcataaactgctgtattttatgatagaatctgtctttgtaagtggtgtattatacttagagtaacgtattttatttaataaatcacagaaaagatgtcaaattttgtagttcagggatttcagaggtagcaggtacccctgtgccttcattttcaggtaactgctgtgccttctcagatcctggagaagggccccaggggctgcctttctgaagctatttaagcaacacttaattgccaaattgatgtctcagtaaataatatctgtcatggtccagtagaccactctttattggcaactattggtactttcaaatattttagttcttatgattgttttcaagctggttgttggttattataacaggggatgatggggacattgtatttgtaaactacagtttatgatacactcctttgcttttccttaggatggcgtcctaaagggctgttagttgcccatcttcatgagcataaatctgctgtgaatcgaattagagtctctgatgaacactcactttttgcaacatgttcaaatgatggcacagtgaaaatctggaacagtcaaaagatggaggggaagaccaccactaccaggtaccatatgctcaggaatgaatcagttcattaattcaaatcaacaaatgtttattgagtgtttactctataataaccactgttttgggtaccaggcatacagcaacaataaatggacaaaaatccttcttctgtggagtttaccttctagtggaaagtgagagacaatgaaagtataagtaaaacagctaatgtgttagatggttaaaaaaaattgtggtaaaaaatacagcaggaaaggaagctaggaaatgcagtagaggtggggtagggtagaattttaaataaattaaccagagaatgcctcacagggaaaatgacatttgaggaaggacttgaaaaaag

SEQ ID NO: 13694 - DNA, 1159 bp, Homo sapiens
gaaagtattagaggacctgagtgtcataacttttttaaaaaatttaataataatggggtagttgagtgatagatgtcatttggccactccagcaaatcatcccagttaaaacctctttatatgaaagatatttcaaaattcagtcggtaggtcatgtatttcacaccgtatttgaaataggtaaacttacatgtaaatgaattggatggttttttgaaagttgattatctatcccctatcaaattgtgccaaacaaataaagaggagagaaaaagtgacaaaatcagtggttatttttgcgtaatcagccagcgttttatgatgcaacattttgtttctataagaaagcatttagtttgccgaataattgaggttagtgaggttgtgaaagtaacaaatccagaccttaaaacttgaaagtaatttatttttctgtttgtttttaagccttggagtagaaccagtggataaagatgtcattcgtaaacctcctcgcaactggaaagacagcattttgactaaaaacttgatacttaaaatacttgtttcatcaataatcattgtttgtgggactttgtttgtcttctggcgtgaggtatattcactggccaagctgctatattaacatgaattctgtatatctgataggattcttagttattttgatgggttacccagaaggctgggaagttaagggagctcttttagtgaaaaatataagaacattttaaaagagtttgatttccatctttatggataaataaaattattgattcatgtattagaataaatctgcagagaagtatcagttacaataaaaatacatgaaaatttagagagaagttggaaaatctgagtcttaaaatcatagagccactttattatttttaaataataacagtattttaatatctaatacatagttcatgagaagttttttttttactttttattatgtagattacagctattcactaggtgatttataggaaatttaggtagcttttatgtttcatgtgttaggctaaagttatttcttcctaatggaaagaaaatgtttatattttttaaaaagcagcgatttatccattaaattcagccactgaaaagtaattttgttattgcctcttgacagctacgagacaatgtgattacacct

SEQ ID NO: 13695 - DNA, 1943 bp, Homo sapiens
gttgcagtgagctgagatcatgccactgcattccagcctgggtgacagagcaagacttcatctcagaaaaaaaaaaaaaaaaaaaaaaagttgtgttaaaatgctagaaaaatgtaagctattaagctttgcaactgtaagtttcaaagaaatgtaaaacccaacttattttctcttgcagatctgttgtttcttttgggtctcacctcatcagtgtgcatagtggcagaaattataaagaaggttgaaaggagcagggaaaagatccagaagcatgttagttcgacatcatcatcttttcttgaagtatgatgcatattgcattattttatttgcaaactaggaattgcagtctgaggatcatttagaagggcaagttcaagaggatatgaagatttgagaactttttaactattcattgactaaaaatgaacattaatgttaaagacttaagactttaacctgctggcagtcccaaatgaaattatgcaactttgatatcatattccttgatttaaattggcttttgtgattgagtgaaactttataaagcatatggtcagttatttaattaaaaaggcaaaacctgaaccaccttctgcacttaaagaagtctaacagtacaaatacactatctatcttagatagatatatttttttttatttttaaatattgtactatttatggtggtggggctttcttactaatacacaaataaatttaatcatttcaaaggcattctatttggtttagaagttgattcccaggagtgccatatttcagctactgtatttcctttttcttgtaatgtaagcagctcagataccatgtgctatcatttttgtatcaagttttttgcacaggatgtgaccactgtcagatcactgttcttttctttctttttgtgattgaaaagcctatactacaatttgaagtaaatttttgtttttcttagtaagtgtaaatggttgctttatttttattttaaaaaggtatgtctttggtttggcagaattcatgcagggctatcaagtggtgttctagggtaacagtgtccataattaacgcttagtcatagagtcaaaaacatttaagactgattgggttgaagtttataataaattatattaacatgtcttcctttttgaggtaaagatatatactttgtcaaatatcattttgtcatcctctaaatataaatccaaatacctcagctaagtaattctattttattatttttactgttatgtatgtttttaatcatatttcttaggaagtataggctactggacttagaataaaaagtccccaaacccaaacaaatggtttatgaaccagagtatatgtggaagattctttgctggtcttgctctgtgtgcatctgaagcttctttggcctagattttagcacaaacctgagtatatctcttctactttcatcatgtgttctgtaccttctttttgtttcattgggcatgctagggaaataggtggattttgtgtgtaatgccatcagtttttatgaaagcttgatgaggtataggtcatttgttttgagtatgtgggccagaaatttaaaattagaaatttgtttttctgttgagtatataaacaaaaattggtcccaattctaacaggtttaatccttcttgaagccaataagttttatcttttataatctgtcaggatgaaccactccttagcttttatccaatattaaactgcaagtgttagcactgaaatattgtcattgatagggaaaatatctattctttgagtcattgttactgaggcagttgagtgtaaggagctggctgcagtttattctacttaaccctttaaggctgaattgtcaaatgtacattgttccatgtcgttagatggaacatggaagccattgtctaatcaactctatcattagtgacttgatgtctcatacctt

SEQ ID NO: 13696 - DNA, 1289 bp, Homo sapiens
caaaaatgctagtttgtcaggtcattatatttgaaaatgaatccatataaatgaaattcaagtagtaattttagaatgtgatttcatcctgtgggcaatcctagagattcttacaagttaagatacaaagtaacaattggtgattttatccttatagcttcttgagtttctgttactggattagtcaaattttttagaattaaaggaaagcattgactgagttctttttactctatttatgtaacagttgtgttattcacattagaaaatgtagtagcgagtatttctttgattatgaataatagctgaaaagtctacctttaaagaacttaattggtttcactaagatttttgccttctctcaggtcaaagattctaaactgcctgcatataaggatctcggtaaaaatctaccattccctacatattttcctgatggagatgaagaggaactgccagaagatttgtatgatgaaaacgtgtgtcagcccggtgcgccttctattacatttgcctaacatctttggacgtggcagaaccttacatattctgtgagcttcgatgagccagagtgatatcataaccaccagaaatcatactctcctttcttagtcacaacaaaatcacacatgtcatctttgtcaagggcataaatatatcattcatacccccattaaattttgttagaaaaattaccacattaaatatatgagttaagtagattggatttgctgaaattggtgttgggcatattagcaaaatattcttaatttgtggactcgattcttttttactacatatttcccaagttatcttaagatgtctgtaaatttaacttttattaaagttttgtcaatctttgtgaaatagtggttgtggaacagtagaaaaccatatggggactatagtgcaacctatttgggtaaagaaaccatttgctaaaatggagaaagtaaatagatttttatttaaattacagaaacatgttaaaggccggacaaaggaaagacaataaaatcataaattatcggtcctgtttacatttttgttgggagaggtgattactttttagttttatcactcaattataagatcagtgtgttttggttttgttttgttttgttctgtttaggcagggttttgctgtgttgcccaggctggagtgcagtgcagtggtgcgatcttggctcactgcagccacgaccttctgagctcaagtgatccttccacctcagcctcccatgtatctgggactataggtgcccaccaccatgcctggctaatatttg

SEQ ID NO: 13697 - DNA, 1252 bp, Homo sapiens
taattcacaatttatgttgaagtgtaagcggattttcatttcttaaaactttgatactaataccaatttgcatagttttattcttaagtaatgcaaatgttttaaactgaagtgtaattataagtacaaagaaattttaattgaaattatagtctcttaacttctaagaaattaccagttaagtttatgaaaacaaactggaacattaaaagattttttaatatagcagactttatttctgatatagaataatctgtttattaaaaagaccttgacagaataattgtaaaaccagaggttgttttttcctcagaatatatttaagtaaaaattcttaagtgatctctttgtaatatagttttgcccttttaatcaattggaattcaggttccttgaacacaaaatgctgaaaagaccaagtaataccagtcgtatcacttatttccaaggactccaaacattcttttcttcgaggaccttgtaggtggtagtacctattgggaaaggtactattgggataggttttaggttatgaaaaatgtttagattacgaaaaaaatgttttcctcttccagaaaaatgttaaggatctcatggattcaaatggaataagaatccttgtggacttgcttacccttgcacatctccatgtaagccgagctacagtaccactgcaagtacgtatccttgtttacgttttacaaatttaacgttctttgagtataattttagaggcaaaagaatcatagaaatctgaaaagatgtggtcacacacttatttttccagtaattacagtagtactagttctgagatttcacacagaagatgtgaaaccactgtaagaacgatccaaaatggacagtaacgattgagttttattttgtcaattaaagtaactgtatctctaatatggcttatcttgaggcaatgtgacttttaggatataaattgaattcattagatatgtaaatagtacttttaacattggcaagcagtaagaatatgctttgccttaaaggagtctggacaccttcttgataccagccaagaggactgatacttaacttatagaagaatctatccttagctcatttgatgtttttggtgttttaatttcctgatgtaaggagatgtgtcatgttagatttcgtgtgaattgtgaccgaaagtgctatttgagtatttagtatatgatgtattctgttatataccattacaacaggtactgttctggtacacatacaatacatt

SEQ ID NO: 13698 - DNA, 1238 bp, Homo sapiens
tcataaggataacacttgcatgtaactttttaatctttatgaaataattacatataaatcattttgattcattactgtactaaagatatcttgtgatggaaattactgagaaactgtaacattttaaaacacttgaagttttcatggttccagttggactcaaaattatacagttagtatttagaaataaggtagcattaaaattaaagctatacttggaaaataccaaacatagttaaatcaaggtttaaatttatgtaacaaagtttgataagccctttgggggaaaatacccactgacagtgtgttgaacaacaccaagtttaatcaattaaataataaataagagtctttggctcttctagggtactgtttttcaaggaaatcttatggaaggaaatgaagtcatattaagcagccaaatagatttaaaccaaaatacctaatcatgttcccagctgtatgagagcttagtcttcattaacaaaaaagtaaggtaacctgcttcatgcctagtagaatgtcgtatgctctgaacatacaaattttaacaaatatattaaatgttgacgtgagaaaatgttttctagggatcaagacaatgccatcattcggcctctacccaaagtgaaaagactgctgtcagatagcacttgccttccccatattattcaggtgagttatgtaatcaaactaggagcaattttaagaatcattttctctgaattttattatcagtaccagtctttgttttgttgcagtctattccattttcaaaaagcctaaataggccaggtgtggagtctcacacctccaatcccagcactttgggaggctgaggcgggagggttgcttgagtcaaggagttcgagaccactttggtcaacataggaagaccccatctctacaaaaaataaataaataaataaagtaaatggccgccaggcatgatggcacatgtctgtagtccctgccccttgggaggctgaggtgggaggattgtttgatcccaggagtttgaggctgcagtgagctgtgatcatgccaccgcactccagcctgggcaacagagcaagaccttgtctcaaaaagaaaaggaaaaggcctgtactttgaattacattcatttcacttaattttttatttttttttatttttttgagacagtcttgctctgttgcccaggctgaagtgcagtggcaggatcttgacccaatccaaccttcgcctcccatgtt

SEQ ID NO: 13699 - DNA, 1183 bp, Homo sapiens
ctctctatcattaagacttcagactaaattatcttacactgtttgctaaggtacattgttactgttcttgttgttttcatctcagcctaatactttgcagcctctaccttatttgccaacactttattcctttggcaacctgtctgtcattcccatttgactctagaagagttaagtccagtaacctatacttgcatataatatggtagtgactgggtgagaggcacacaggctttgtccagaaggatgcaattatgtcttagaatggaacccggtcttacaactgctacttcctactttttccctcaagacagtagcaccaggtaaaaatcttagatgcctgattagagtgtcctctgggtgtcaggaaatcagatttttggatgtgcagtgcacaatgaggtaggaagacagggttttatagtggttatgaatatggactttggaggcagacctgcatacaaaactcaactataccacttattagctgtgagaccttgggccggttaaactgggcatcagcttcctcactcataacatggccatgaaaatacctgtctcactggttattatgaggattaaatatgacatcctgtgtagaacatctagttaagtgcctggcacagagctggtgccaagtaaatataagctaacctgatgatgcattccttgaaatgtcttttactctgcaggtcgtcagcttgttctggaaactctttatgctttgacatcgagtacaaaaataatcaaagaagcaatggcaaagggtaatgtatagagtgctttcttagctagtcatgtgcaatataatgaagcttattttgagctgcattttacagcctgataaactagaagaatgctttggaatgtttacagtttttaaaaactacattcagttgaaatatggttgaaaatgaattctgattagaaaagtcaaattctttataagcactaattatctttttccttcataggtgctttgatctatttactggatatgttctgcaattcaacacatccacaggttcgagcccaaacagcagaactttttgccaaaatgacagcagataaactgataggtccaaaggtaggcacaaaataagttcttgaaaggaaattaattattaaagcattgttactttgatactgatttcaagaagtttactgaaatctgagatggtga

SEQ ID NO: 13700 - DNA, 1217 bp, Homo sapiens
attttgaaatgatttctagtctatagtgtaggcaaacatgaaaatagtactatgtagctgtttattaaggtatagatgtaatttaggtaattgaaatagatgattagttttgtgtgatggagtgcctgagcaggttctgacatttttataaaggtcaatgttttcacttgactgctttctagaggtgtgtgtttacctttctctcttgcaggacctggagttgctggctaccttaccgcaggtacatctacatcagtcatgtctaacctgccacctcctgtagaccatgaggcaggcgaccttggctatcagacttgaaatattcacgagagacaataaacgctgaaaggccagtgccaagtccacattcctccagctgatacgttgaagcaaactcttactgcctttctcctggtttcatgacagtgttattcctttttctataaatatatttttaggaaaaaaagtcagtgatcctaattgtatcacattataagaaagcactctgtggatcaacataagtgggtacacaagaattttttttttcttggtgtatgtaagcacatttgttcctttatatctgtttacaaaactgtgaatcaaaaagacaaaactttcttcctagtttttgtaattttttttttgaactagcatgactgtagggttgagctacagtcaacaaaaattgggctaagtcacttttccccaggaaagaatatttccctctcctgcatcaagtctgcgtggccatcctccccccaccatccaagactattaggttttgtccctgcacccttcactggcatcctcaatcattaaccttctgaaagctcacagtacacattagtatgtataactggctttaccaaattgaatgaaaaggagcttgtgcaaaaaaatttaaaaatggatgtcaagatgttatgtaaaagatgagtgtaattgtgaaatgttctatacactatcaaatatataaagctttctatattgaatgtacattatacagatcattcatatgtgtacataaaattttaaaaataaagggaattgactgctttgttaatgagatatatttgttctagtttaatctttccgtttgaagacctcatatatctatctttatttctaagacagatgtagtattaaacagacgttatcttacattcgtaactcttcatatagatggctgcattaacataatctaatcattcctaact

SEQ ID NO: 13701 - DNA, 1159 bp, Homo sapiens
cgctgggccggctaaacccggccgcagcagcaccggggtgataagtgtccagggcaggaggccagcgatgttgccttgctaaccgggtatctaagagaaacagggtctttttattcttaggctcgacagtctgacggccctttttctgaacgggaccctgcaggtcttccgcctgctgttgcattaaatttgggggtggaagaggcttctgcgttgttccttacccgcaacgatgaccatggctttgccttctttaaaattgaggcctccaactctgacgctgactggagaattgaaacccgaacacacattgggctcttttggcacttgactagagctaaaacctcgggattcagcgggcaagcgttgctcagcaacggcgcgtaggctgtgtgcggttggctggagccagaccccaccccggcctcggcccatgctctagaggggacgttgccccaatcctgaaggacttcggcactcgagacctgtggatgccgcgttgctgtggcctgcgggggtgatcatgaagccaggtgctactggcgagtccgatttggccgaagtgctgccccagcacaagttcgacagcaagtccctggaggcctacctaaaccagcacttgtctggctttggggccgaacgtgaggctacgctgaccattgcccagtacaggtatggatgtcagcctttgcctccagcggaaaaaaatttgtacattgagttttccttcctttggccctgggtggtttcctaagtttctcccaccctgattgcttttcctgcagtcagtggacgcaccctacaggcatgagctgctattgccggccctccgaattcgatgctgggggcttcccaattggagggcggtaatggaagcgcaataacgttcaccattctactatccaaaggaatctttgttaaaggatggatttatgtcccttgaggattcaccaaggcaattaaggctacaaattctgagaaatagatgccttcttttgtgatacagccattagatctttttctgagaagctggtgtaattccgtttgattggccgtattccgggaggctgagttaatgacaccagatggaggatccgaattcgagtactagcttttccacttaggaggtcacagcaccactttgggcctcaggtttttt

SEQ ID NO: 13702 - DNA, 1179 bp, Homo sapiens
ctttgacccttaacatttaagtagtagtcgcaatcttggctgcaaatcagaatacatagcttttaaaaaccaatcttgtttcatatgctacacttgggagagtttttttaaacggtgcctgggtaatttagtttcatctggtaaaaaccagcctgtaagcatcctcctctttgaaacgattagtaatgattatattttggtgtttattttctgtgatgatgtatgtctatttgtattactaatacctaaaagactgtaagctttaaaacatatttttctttgttttaagccgcttgatggcattgaaacgaatgggaattgtaagcgactatgaggtatgataaaccctttccaagtttttgtaagattaattcagtaaattaaaataacttctggtgacatatttgatgaagagctattaaccaacatatactattttatatttcacagaaaatccgtacctttgccgtagcaatagtaggtgttggtggagtaggtagtgtgactgctgaaatgctgacaagatgtggcattggtaaggtaaaaacatttctctttgcctgtcatatagggaactactcactcctggagtaaatcaggtacaagttaggattttttttctttaccagtggcttattgacttgcagtgtattaatctagattgttctttctactcgggttgagacatatccccacccaaacaaaaggtgatattagacaaagattgtctaattgtgtttagaaacgtttttgtttgaagtaatatgcaaacaatttggacttaggtgttttagatatagaaacttaggaaacaaggctgttaatttgataaagtgtgtgaaacactgaaacatctaacaaatattttattaaacatataccaggcagaatagaaaacatgtacctttcctactcttgattttgaactagagaatgctctggatggatttttaaaaattggtactcttttacttttttctaaaattcatttagattatgggttagaaagaagtaactttcttgtaccagaattcagtctaccaatcttagatttataaagccagagtctatgatgttagatacataatggttgaatgaataagctttccacaattatatatcctttaatttgttgttctggtaaaggaagcattctcccacagtttaccaatgctttct

SEQ ID NO: 13703 - DNA, 1239 bp, Homo sapiens
ttaaagaaaatttactttataaccttgttgagcatggtcaaaacttgctgattatatattcctaagcatcaagaattctatatggttcttttttcactgtatttcccttatttgtcaatagcaagaagattctgtcactgagttaacagtggaagattctggtgaaagcttggaagacctcatggccaaaatgaagaatatgtagataatggactgggatatattgtatttctcatgttaaagcctcttcccttgaaattaaaaaaaaattttaactgataaaacttagggcaacattaattaatgtatattcttacctgaattgttatactttttgaaaatcctgtgacttgcctgtttctccccgctccaacgaaatcattaactctcctaaaatgtgtttcattctagtaagaaaacctcaaaggatattgtaggatataaatcttacttgaaaacatagctgttgaaatgttttggccttttggagtgggggaaggacaaatctgatcctgtaatctttttctttccagtaatcccttgtgtctgttgcatgaggacatggacaataaagtagtatatgatcctcagatacagggagaaggacaaggcatacagcttattgattagagctggcaagcatctgctcattatgtttggaattgctttctataagaaaattgcccactactactaacttgatcaacaatgaattcaaaatagttaacctatgaaataacatcctctcaaatgtttgctgatgaagtacaagttgaaatgtagttattggaaaagtctgtaacctgtggatcatatatattcaaagtgagacaaaggcaaataaaaagcagctattttcatgaatagacaaagttgatttcaggaagtataaattatattctgcaccgaacaaggaacagaaattattgcatctgtggaacatatatctggagttactatactttactgaagagcaaggcataaatttagactaaaatccatccagattacactcattctttaggctactcctggatacttcatttaaatttgattttcgaggtagtgagatgtcggcaaggtttgtcctgtatattaggaataaaggaaaagttctaaactgcctctgcaatgacttgtagtcagtggaagagtatcactttcccctgatcatgaccactaaactgtaaattgatataaattagttttctctcgagttacacccaagtaatgaagact

SEQ ID NO: 13704 - DNA, 1231 bp, Homo sapiens
tgtctaattcattttgtggtgtcacattcattgggcaatttatatttcttttcatgtccctgaagtaatgttttatttttagatagttctaaccctgaggacattccaaagacaatggtatttctgtttttttaaaataaaggaatacataattttttaaaagcacattttgctaagggactttcaaagggacaggacagtcatgtaattggggggtgaaggtgattctgttcacttttattctattgttttcccctttctcctccataggggctagtcctgagataaagtaaaaaaaaaaggcatatggtaatccattctgaatatgtcatattcccttagtgttcatagctgagaccttccataaactatttcttaagacactgaagatgaatctcttgacacggttatagggagcagagataaggcatccaaggggttgcttttcagctaggaagtttttggtcatctgtacaatgcataccccagtatcataaatgataagattttattttcaaccattctttttcttgaattaaaaaaaaaaacagtgattaggaaattttcaactagaggaaaccaaagaacagcatcataaaccatgtgtattcagcttcaacatttacccacattcttttaatcctactaccagacttgcctatctgaatcatgaatgttaggccctctggtcaactagattttcttcaatgcttgatttttcccttcaaacagacttctgttactgtcactagaacaatcagtattagacttattccagccactcttcccttctctctcccactctagagaagaaatggcctcaaatttagtttggagtagggtgctgtgcacatatctcattaggaaatggtgtagatattcaggttctatctaaagatagttcataggagaaaaggggaggcaaagagaggtgattcatgtgctggaatgatgaaggtaccagcgctgctccttgaaggattattagcttttggatgggtgatggaattaaaaattattaattgtaatggcaacaatagctaatatttgacgtgtttactatggtccaggcactgttccaagcacttcacatatattacgtcattactatatgcaaaggtgaggaacaagaactattaacatcccatttgcaaatgagatggaacctgaggtacaaggaagttaattccttcaagggcacacagcacagggagatagaagttcaaatatt

SEQ ID NO: 13705 - DNA, 2669 bp, Homo sapiens
tagggataaagaaatggagaagagctttgaagtagtaagacacaaaaatagaggtagggatgaggtttcaaaaaaccaggcccttaaacttcagctagacaaccaatatgctgtgcttgaaaatcagaaaagcagccactcacaatacaattaaggaatgggctttgctaacccttctgaggtaactagactgcagctaaccaccaccaacagccattcatcatctgatctctgctggatctacagacaccgatgcagaccactcgatttcatgaccggccctattgcactatggaagttaaagtgtcacgactgctctatgcatattggatttaggggaattttcattgttacataaatgtgtgaactagtttcaacagtgttctttcatatttactctgcaaatacaaaaaaccaaaacctgcagccagtggtcatttcaaaatctttttatgttcagatactgagccttcataagggttgactacctcagatttgctgcactcattgtggacttcatgtggatcacaacttctggataagaagattacaactattaagtgtcgatgtgaaccttgcaaccagctctactggattcttatcagaaatcctgcataaaaagtcagccatctgggttctgatctgctgtaaaagatgaagatttaagtgaccttaattaacctgtcctgtgccctacccttaaggaatactctctgtagtaggctgttgttatattagacttcctggaacacactgctgaaaagaactgatgtgttcagatcatctgtgtagggctgtgatttgtaatttaaactaattgtattctgaggtaaccacaaaataaattcaaccaaactggggtccaccaagtgggggaaggggaagggagagaataatcttgggggttttttttttttggtaatttttttatttggatagtgcttttttgttttgtttttgttctgcattaaggccttttttgctttgacttgaaataagttctttgacagagcatattgcttggttaattaagtaacctaaagtatgcattaggattgtgaaatgtctcgtgagtatgccaatcctgagggtggaaccaaatagcctttgatgaaaagggcagtggattctggaggctctacttcaggtgctgctataatgcctcatctaatcaggactaaattgtgtaggaaactgcagtgggaagaatatgctttctgctcaggctaagagggtcactgatctgtccttagaaattcagagtaacatgagcaaaacctcagctaaaacccatttaagtggcatggattgtgcatgatctttgataagaattcctcatgtacttgtgcctagtttttcaaggtattggctgttctatagatgcagtgattgtcccagctagctctgttaccagccttttggtgtgtctttatgttcatttggagagtcagggcgaaagacaggtgatgtagcacttctgtttttaataattattgcttaaaatacctattaatagttttgggtcatttaaagggacttgaggaagctacccaggattacagaagagtgtccacctaacaagatggtctggcagtttcctagttttgtatctggttcaatagaaatatgtgaaagtggtaatgtcatcatttgatgcagagtccgggtttctctataataaatccctttgccaaatgcatgagttgcagacttgctactggcaagagtgaagcaagtgggtgagtaaaactattttgacgtgggagcgttttcagataggagtttagtcttgacgaaagtgtccgtgcaggaattggactccgaggagggttacagtatctcctgacgggacctgccactcgcatctgggcaatgttgacatttgaggtggcaggcaggatgcctgccttctaatatatttgggtgagtaactgagccagccaagggaaggttgaatgattaaatcagaaatgggattcttggtaaactgaagacttttatttgggaatgaaaaaccttaaaaaaatctcttcatcgttgaactgtgcattttccctgcattttttcccaacaaaattttgttgggggttatgttactgaagaatgaacagatgagtaagtggaggtgttatgtaaaggcatattgtactcgaaatctgaagacctgcagcagatttaaattacaactcttgttataactttttaaaagattgtgaaaatatcaaaatataaatgaatcaagttttaatatactgtatgatgggtggatgaggctgtccattgtaccatttgtttgaattctcaggcatggtttggcagtgcaagaattctgtaacattaacaaattcaataaaaagtaaatatatggattttggactgtaatggttattttaaagccttattctgtctttgaaaatggtgagttgaggtcacacctctcttgctgtgggaaggtgaagatgctctaaactcaggggtgtacttttttttttttttgagacagttgctctgtcgcccaggctggagtgcagtgatgtgatcttggctcactgcaacctccgcctccctggttcaagcgattctcctgcctcagcctcctgaatagctgggattacaggcgtgcaccaccacacccagctaacttttgtatttttagtagagacggggtt

SEQ ID NO: 13706 - DNA, 1149 bp, Homo sapiens
acgtatttcttgatggcctactatgtgccagataccatggattcacgtttcagtgttctggccagagataattatactgtggcaaaagtaaagtttataagatttattgacaaaactaagtctacagataaaatcatgcattatctgtattattttgttattttccaaatgatttcaccactgattgttttttatttgtagggagcatttagtgggtggaaggttattttacatgtggatcagtctcgagaagcaggcttcaaacgccttcttcagtcaggaggagcaaaggtttgtatcaaattaatttactgacctttttacatgaataatcatctaaccaagattgctatgatgagttcttcattttctctactttttgaaatggtaatccttaagtacacattatacagctgaactactttggaatactggtagattgtgatactaccttgttttttcattaggtgctacctggtcattctgtacctttatttaaagaggccacacatcttttttctgacttgaataaactgaaaccagatgactcaggagttaatatagcagaagctgctgcccagaacgtgtactgcttgagaacagaatacattgctgattatctcatgcaggtttgtgagattctatccttgacctcctcattaccagagatacgtttatgtgcatagataagtaactgcacaacaaaaccttcagctcatgattagtagaagattagtctcctgttattctcttctattccagccctttcagttttattctatttgtgttttttattataatgaacatattatgtaaacatttagcttggaagttaaatatgagaagagtataaaaatctaggtacctctaaaggctttaaaaataccctttaaaatgttggaatataaagcagaaatcgattccaggagtccaaggagaaacatttatccaaaggtcctttagttttcttgactgtttgctttcatgtacattaaatacctatgttagacactgtggtaaatttaagcatttgctatatggtgggcttactactctcatattcagaattggcctgtgttgtgtaatttgaatggggtaagaaaaatcttctgacaccagagtgcccaaaaggccatcaggagtcagcag

SEQ ID NO: 13707 - DNA, 1194 bp, Homo sapiens
gcatatcccaaatatgtctccatgtcagcaactctcattcccaatgtgattacttcatcagcacacctccctagcatggcaacagaataatgatatttttgttggtattttgccaaaaatcattgcttttacttgtatagaataatggaaagattaaaaagttcatttatctaataggcaaccaaattacctttgggtttttaagtagagattcagacttatcattttggaaaatatactatgaccagcaagggctagagttaaggaaatatatatttttcccttaaaatggttttgagagactgtatctgaaacaattactttgttttagagacatgttattgaactaggtgaacaattagtgtaattctgttttggtggttctcctttgtaaaaaaaagattataaatcctaaaaaatgagggaagcaatagtgatatttgtgttgtttttcattattcttctggtaaatttaatatgttcttttttaaccatttgattcccacagaaaaataactagatatactgatataaacatggaagatttcaagtgtcctatttttcttggttgcataatctgtgtgactggcttatgtggcttagacaggaaagaagttcagcaactcacagttaagcatggaggtcaatacatgggacaattgaaaatgaatgaatgtacacacctcattgtgcaagaaccaaaaggtaaaactgtgtttcacaaagggacaaatgaaacattttctctagtatttaatattttatttttatttatttatttatttattttgagacagagtcttgctctattgcccaggctggagggcagtggcacaatctcagctcactgcaacctctgcctcccttgatcaagcgattctcccaactcagcttcccgagtagcgggattacaggcacctgccaccacgcctgaataactttttatttttagtagagacgggctttcaccatgttggccagactggtctctaactgacctcaattgatcttcccacctcaacctcccaaagtcctgggattacaggcatgagccaccgtgcccagccactaatatttaatattttaaaatctttacagaacagcttttacttctgacatgtcattaatctagtttgatactgttttctctaacatcttgcaaagatgttttctctaacatcttgcaaagtttta

SEQ ID NO: 13708 - DNA, 1724 bp, Homo sapiens
ctatccccagcccaataaattaaaacaattaactgagcaaattaattaggcttcagtctggggccatctggccccactctctaggccctactccagttaaatcaaacattggttgaacacatcagcctctgaaaaggtagctctgactcttgtctttccatggccagagtgggtcgtcaacctcgtgtggagctgagaccaaggtctgtgggctctaggcagcccggcagcagcccccagaggaactgctcccacctctccttctctttccctgaaaagccttgaagggggttgagggtacaggcaaccttgtgttctctgtgccctcagggactggcagagcaagaggccatcagaaggacgaggtgctgttggcaattgcagctgcgtggtgcgtggtttatagactggggtgccatgtgtacttctgaaaatattttaaccagcccacccagcagtcagtacacatgcctgggccaagtctaagaaactcagtgtgtgatgttgggcagtgtgccatcctgaagccttcctcctggatgtcagggaagctggaccacctggagttgatcctctgtgatggggaggcgggggggggggggggtgttgtctgcagaaccaccaccttgaaagatccatgttcttagagcctcagctgctaatattgttgagtgctttctggaaaagctgatttgttgctatgttttcaccccagtggcatggcgcagttgaagtctttgtggacatatctttgtggctactgtggctgcgctgtggtcacctgaggatgtggttcaggtggggtctccagaaggctgcttgcccccagagagccatctcttccatttttgattcattcctgagaatggcttagtcctgagaatctgcaaagtctctgaagagaactctctcttcccactaagtgatataacctacttggccagcattccaaatagactcagactcactgccctgagcctgcacagagccaggtgcaatgggcagtgagtctggccaaaatgtaaaccccaccctccctgctgtcattggctctccctccaggctgctgctgggcatgtcatagatgggatgaatgaccatctggggtatggtgggctgaactccacaaggtcgttggaatgaattttgaaacttctcagaaattaatctgaaatggcaggcagtaagtgcagcagaatctggcaggactgatatttgtgcagtgggcctgccacacaccctctgcctaggaggctgtatgccagagctcatctctagcaaggaatttatcttcaggtgaagaagagaggaagcaggatcccactgagcacctcttgcagaaggcaaggaccaatgtttgaacgtgtttcagatgtcatgtgtttagtttttatatgtgtgtacataattatatatagagatagacttgtgtatacaccttccacaaacacatcctcacggagatacatgtgctcaatgtatattcttgtttctcctgctctcaagttggaacttgcattgtgataagttttggaaattcaaaagtactgcaacgtgttgaaataagaaatacttaatattgtcaaataacttgtgattgtcttgccatcaataaaataatgcatagttgtgttaaactacaggcaaacatagcccacgggaatatctccaccatttctctatgtactttatatgcacgggtgtgcatgcctgtgtgggccagt

SEQ ID NO: 13709 - DNA, 1164 bp, Homo sapiens
tctagcctattctcacagctgtcagagccatcccatcatggggggatccaagggcctgtctgggtcatcacagtgggcaagaatggcacagcttgactctccaggatagctagaaactcccacaaggctgggcaggaattccaggaggaattgcacaggaaacatcacctcactgccctggaagttgtgggtgaggggaggaagcctcagaaacaaaccaagaagccagaaggactcactgggctgggggctgtcgggagtgttcccagaaaagccgccactagctgagtggttgcctctgtagacctcaaggtctccacggctctagaaaaaggagggctggccccagcgtgacctcaggttcattttctaagcagcaggtaaggccaggggccctcttgagtttgtgatgtggtctgtccagttggtatccaatcccacagacgctcatcactgtcgtccttgtcctctccctcaccctctcaccctgcctggccccctcatcctctcctctcaccctcaccctccttttctgactctccccctgtgcctctttaaccctgccttgtctcagctctagtcagcagctccaaatctatccagggctcctagtcagcctgcccctatttcagaagaatgttctcatccctgtgtccctcctgtgaatactactgtccccttccaccctggattccccagaccttgttctatttatggtcttttccatctgtgattttcccatttttggtcactctcttcttgtctacatgtgagtggggccgtgagggccccctgccctccactcccctgacctggggccagtgccctcactttctggagctgctccctctgcaggctccagactacagctaccagattcagtgaccttttctcagtcatcctcctgactgccgaccacatcaccctgcttaaaaccctctcttccttcaacgcttctctcttggggcttttcttcttctcactttatgcacaggcttccacctctctcccactccccaaaatatcaggggtttctaaggttcctgtcccagtcttctccctcacatctgtccctcagtgactccatctgtgctcagatacctgctctgtccccagcaccccatacctggtcactggtccaggacctctggacatctctttctg

SEQ ID NO: 13710 - DNA, 2120 bp, Homo sapiens
acaaggtggcagcttttgtactgattttactctagatccagggttcatagaacttagataaaactttctcttcctccaagttcttttcttaatttaactacaggaaaacacacattctttttttactgtgttttaggtttttacatgaaatctctgtatttgctgaaatattttgatatgttgtcatgaagaattgaaattcacacataatccaaataatttcttttagcttctttctagagctgccaacagatagtaaaatggatccgtttttaatatatcatcctctccatacccacctttagacaggcaacataactggcatcaaactgagcaaaagttatgaatactgtatccttactagcccaaattttcatttttgtcactctgcagatttgctgtgatggcctgttgctgggccttagatccagaggagaggcccaagtttcagcagctggtacagtgcctaacagagtttcatgcagccctgggggcctacgtctgactcctctccaatcccacaccatcaggaagaaggtgcctgtcggggctcacttgaagcctgtcagggatgctttgtatctaacacaacgccaacagaagcacatttgtcttccagaacaccgtgccttagaaatgctttagaatctgaactttttaagacagacttaataatgtggcatattttctagatatcacttttattaggttgaactgaaagggtttttgtaaattttttggccaaaattttttaaaacatacttactttggactaggggtacattcttacaaaataaataaacagtttttaaaattgtttagacacagatatttggaattagctatcttagtgccaactgctttttatttttttacttcatcaaggtgatgtaagtgactcacctttaaagtttttttagtgttattttttatcactactctgggaaatggtttgtcttcaagatgcaatacttttcttagtaaaggaaaaacagcataaaaagatacctggtctgccttgtacaagaaaaggcaatattagaggaagaaaatttaaagaaaagctagaggaaaaaaaaatttttttaaaaatacttattagaagcaaactgcccttgcatggaaaactgtttatttttttcagtgaaaaggaattctgctttcgtgtttttgggaaagcaggaactgagttcattacatctttaatttggcagaaattagcctttctgtgaaccagatgtggtttggggcagatctgtagtaaacaatggtgattttatttatttttactctctggaaaaggagataatacaattccagaaagtgaactcatatttctaaggttaagattcccttttattgcacctagaatagtgctatgcacagagcgggtgcttgagttgttgtcgttttttgtttgttttttaaatgtaaactggtaaattttgtgcttatcttcaaggctggcttaagtataaaattgttttttaaacacttgaaaaattaaaggatttgttttatattatgacagtattgaaattatttttcataatgaatgattggttattgtgtctggtaagtctttgaacattcaacagccagacatttgtgttttatttcatgatgttccagtcaagttccaaagccctaacacagttaagctggctcagactccaggttctagtaaaaagttggaattaatgttataaggaagtattaaaacactgaaacatttctccagaaccagcaagtaagggatatgtatgtatttatgctcagttttagttggcctaaagcagagttgaatgggctttctaaatagctaggcctgcaggtacctgccactactcccatcttcagaggtatataagggagaatgtgtagcagttggaggcttttgctgtttttaaaaaagccttatgaatcagcagcacatcgggaaaaatagctcacatagtacctggttttccacaagtaagccaagggcatgattttctgtgtacatttattaacagttctttggttttatgaaatactcatatgaagccagtccctggagtactgttttttaaaaggtccctttgaaccatttgtaaattatattttcattcataacctgc

SEQ ID NO: 13711 - DNA, 1104 bp, Homo sapiens
ctttctgtagtttacctgctgattttaaataaacctgattgcttactcaagcaaggttggaagtttttttaatcctttaatttaaaactttaaatacagtaaaaatccatgacttcttatatttcccctcatttgcgtatttcacttaggatgctcttccctttaattaaactaaaattctgttcattttccacttctcaattatgcagactagctataatatttaaagttacaaattctcatattagaagaatcttggacataattcataatacgtagcttgtaatcaacagtaaactattacttccaatggatctaattacttagaatttataatactaatattggatgcactcttttttatcttagcaagggaaactaactgtgtatgatagacatttttttgtaaataacatttcgcttttccaaagcatgagttgagctgttattttttgtcctgtagctggctgtgggcgctagccccctgactgttgttttaaatgtcccctcattgtgcttctgctcctttactagtgggcctttggagtgacgctgtgggaactcatgactctgggccagactccctacgtggacattgaccccttcgagatggccgcatacctgaaagatggttaccgaatagcccagccaatcaactgtcctgatgaattgtgagtttttttgagcttgaaggcatgagttttattccatttactatattggaataaaggaaaaagagcaggtttccatattcacacagagccttcccttttgagaataatgactctttggatttaaattagactcttataaaaaaccacaaagtcagggagattcgttcactctttcatgcatttgatattagaacgtcttgcattttattttatagtgcataatctaagcactataaattagtctgagaggacgtactaagaaaattgaatgctacgtcagttattctatataaagtgagtatctgacttttatagttataaagtagttataaaggacatagtagttataaaaaacctctctcgttgtcattttgccttgccagttagtatcagctaatacagggaagatgatctggactagtaagccaaa

SEQ ID NO: 13712 - DNA, 1167 bp, Homo sapiens
tagtttgtcctaggccgtacagctagtaatcgatgatactggcagttctgacttcacggtttatgctcttcatctcttttctatattgacctatacccactgcattataaactcatatagatcaattctgtaataacgttgagccaaagaagctcttccagcactctgaccagatgatagcctaatgaatctttattatagtctctttgagttgcaaagtatcttcgcagagttgctggagaaacagggctaactgcagcatcacaagaagaagtatcaggttggtgcagtaattgcagtttttgtcattaaaagcaatagcattaaaagcaatgacaaaaactgcaatttgcaattacttttgcaccaatctaatagataacctaaaatgatggacatcttcagggaaggcatgctgggggggcatttcattaggcaaacatgtatcttgagatctatggttgtgctgagcagaatggtttgcatattataagtgctctccaaatgtttattgcaggacatttctatcttaatttttgctatgactttctacagatgtttggttacaatagcagatagtagtatattgtattattagccatagaaaggctacataaagacttacagtcctcattgcctggatgttatatatttacatttttcagatttgtgtatgggctcttgaaattgataaacattcatatataaatgttatagattacatagcagccgtgtgtgtgtgtgtgtgtgtgtgtgtgtgtgtgtgtgtgtgtgtgttttgtttcagagacagggtctcactatgttgcccaggctggcgtcaaactcctggactaaagtgatctgcctaacagccttccaaatagctgcagctacaggcttcacaccgcactcagctttattatgtatttttttaaatcaccagtttttgaaaatacagaattattatgtgggaagtggtcagttaaaagattttgcatattaaggaaagttggagacttgattgggcactgctgatcctgtagctaagagaggcattgaaagacctatcctgctatctggtttcacccttcatgctgaatttctatgtttcacgtctccactgctgcaaaattataagaactaaggcagtgagaccgaaatgtacccacgagacaaggtttctcc

SEQ ID NO: 13713 - DNA, 1216 bp, Homo sapiens
ggagagctgtgagagcaccggcacccccagaagactctgcttcttagcccacattcctccgggccttatggagaatgaggattcagccttgacttcttgcccaaggcctgctactggggtagcaactgacagctcagaaaggagctgagctccctctgccctgccagttgtcagtcaggcagggagggagtggctgtgttggtttggggaactaatttccacggacggctgcccgtggacaccaggtggactggttcactaatcaagtcagccatattgttctctggctaagtttggttccagccaacgtcatctgctcttcagttcctcactgccttcttgggatactaagacttgaattttttggggactattaagggtgttagtcttggagaagacacagcctcaccttctcacttgctgtgggtgaggggccatttaagtggactgggagacagtgcgcagtttgtatataattccctttcttgtggaacagaagactgaggcctgcaggttccgatgtgtctccatgggctgtgctcccctcttcctactgtcagtttctgaaacttctgactggcctcccagttatgcctcctcctcaagttcctggcccgtggatgttaaagctgctcgattcccaggatctcggctgccttttcctctatcttgagccctataaatgcccacgggacccccaccaccagcctcttgaagtggctccacagctcctgtccctggaacatcctgtcagtttggtcataaaccctgagccagatgaaatgagccaccgtgaacagacatctgccatgcccccaggtgggcttcggtggccctacccggtaccagttctttctgagaaactggagatgtcttgttagcataagtgtcttcattcccacctggagggtttgggagaggagcaaagcagttgaaaactagttaatgagctacaagagtcaaatagtcctctgaatggagcccccatcacaaaacagtgcccaggaggctggctcctcaagctacccatgcccagcgccctaaagcagcaccagatgctttggaattggggtgaaacacccacatggcagcctgctagcagcagtgactttgacttctggtcttaaagagtccctcacttcagccccaggagctattggtgggttttagcagttttgtctttaccgtttttagttctccttgattctttgttttc

SEQ ID NO: 13714 - DNA, 1209 bp, Homo sapiens
tcaggccatggtaatgaatggggggtgggggggtggcattcctgtcctctcagcccagcacatctgggacgtaaatcaagcatattggaaggtaagctggtgctcacagccctcaggggagcctttgagtaaatccctgccttggttggttggtgtagtaaatggtagatccctctgggcttgtaggaatttatgccccacggactgcattttacattttaattagccctctagcttgtctaatatccaagctttttcaggcttagtctactgtctacacgggagctttgtccttggggtccaggctgattggtggggaaggcttggtagtggtggctccagcccagccctgagcatctgctgccctgaagaatctttggcctcctgtgggctctgtgaagttgtgtgctgcccaggctccagtgggcttcttgttcacaggggcagccatctccccggattgggcaatgccaagaaagctccattatggtcccacaggacatggtggcagcaactgtttgcaaaatagcagcctccctcaacagcagtttgtgcccaaaaacagactgctgaatgggaccagagcctgtaagatgtgtccaattttgtctccttgtggtctgagctggtggctgacagtggtccagggattgctggctcaagagaagagagcctatgatgaaacagctcagaggaagccctggagattcccagagggaaagggaaggggactgctggttgtttctctgtgtctgtaaggagagggagtttagccttttagttcctgcattctgctgaccaaagggtaggattatttatataggatctagatgatttccacaccctggtgactcagctggaggtggatcctgaggttaacataatcacgatgatgatgatcataataataatgttaataattggtactcagtgaatggtagttatgtgcaggcacagcactagatgagctccttccacatccatgatctttcagtcttcgtattaccctgcaaagtaaatagtattttgcgagtgaggaaactgaagctcagaaagttgtctgtgatcacagagctgtaactggcagaggtggggtctgcctgccctggcaacctctccagcttcatatctttcagtgtttctcttgctgtttaaacttctgtagccacactggcatcttggctttctcagcaatgggccaggcacctt

SEQ ID NO: 13715 - DNA, 1995 bp, Homo sapiens
ccaccagtcctgcacttcatgggttatcatgtacagcagcaactccgaagatagcaaaattgaatagaaaacgatccagatcagagagtgacagtgagaaagttcagccacttccaatttctaccattatccgaggcccaacactgggggcatctgctcctgtgacagtgaaacgggagagcaaaatttctcttcaacctatagcaactgttcccaatggaggcacaacacctaaaatcagcaaaactgtacttttatctactaaaagcatgaaaaagagtcatgaacatggatccaagaaatctcactctaaaaccaagccaggtattcttaaaaaagacaaagcagtaaaggaaaagattcctagtcatcattttatgccaggaagtcctaccaagactgtgtacaaaaaaccccaggaaaagaaagggtgtaaatgtgggcgtgctactcaaaatccaagtgttcttacatgccgaggccaacgctgcccttgctactctaaccgcaaagcctgcttagattgtatatgtcgtggctgccaaaactcctatatggccaatggggagaagaagctggaggcatttgccgtgccagaaaaggccttggagcagaccaggctcactttgggcattaacgtgactagcattgctgtgcgtaacgctagtaccagcaccagtgtaataaatgtcacagggtccccagtaacgacgtttttagctgccagtacacatgatgataaaagtttggatgaagctatagacatgagattcgactgttaaatcagtgggtcttttaaacctactcctggtagggaaatagctacagttttacggcagctatggttctgttggtttaacttgccggagctcctgcatatagatcacttgtatcaagtgttttcattgctaagttatatgtgttagtgtcggggaaatagtttgcagataatggaggagtaaccctacaactatatgtccttagttcttacagaacctcatagtttgagaacaaagctgatgcaactgatttatacaaaatgaactttggcaagaaaaataacattaacctcattgtttatggccatgctttgtgcataatcaaagtttatgattaaatgtaaggaagtggtatctagtcagtccataaagattgtgctaatttttttgtggaaaagtagccattagttcaggaaactcagtgctgccttcagatgtcattgatgtttctcctgttggaaagctgatgtgtccagctcaacctttgtgctgacatcataccatttctgatcatgaaatattggctactggtgtatgtagcagttcttaaatcagcagtattatgaaaaaaaattccccctcattagaatgtttaagaaatctttttaaaaagtaaaattctgtcagactacaaatgtttagctgttactcatttctagggaagaaattctaaatccctccttcactttgagcagtgttctaattggataaatgaaggagagtagttttattctgaaggtaattaaatttagactatgtagtatgtgacagaatttttttaaaattataaaaagattttatttagtaattgggatttacttaaaataattttggaataatgctcccagacttgcccagatttgtgtattgtacttattgccactggccgccactttgacttattttctctaatagtttatttgccacagtctttattttgaatatgctcctagtttttttttagggtgctgttcattatgaaggcttctttatagaggcctaataagaatgcctttttataaagcctgtgcatttaggtaggttgaagctaggaggattttctttagaatgctcttttgcatgtaaagcacaaagtatgtttcagtttaaatgcacttcttccggttaatttttatggggaagacaagtgagtcacaaacattctgttgaagggaaatctagtcagttgcttgaaagagcacagcccaaataaaac

SEQ ID NO: 13716 - DNA, 2166 bp, Homo sapiens
tttacaaatctggaactctattatttagagctagaggcctatatactgtgatagcttgtatggggaaaaacacttttgatgtgatctgatttgttttttaatcaaatgattaaggtcaatccctttttgcagtgacagaagaggagcatgtaaattacccaagggaatgttggtgaatgtcaactcagaaagactgacctgaaaatcatttgtgtcctactattggacttatcccaatacagatgtgtgtgtttttctggagggaggaagaaattttaaatttttaaaacagctgtcaagataaacactgttatacacctgttttatgaaaactcaacattgagtaaaaaaaaacatatttttaactttattttcctgttgtacaatttaaaaaccgttttaacattttgcctttttatgttttaaaagctaaccatttttattaaacctatgagtaagcagctcatcctaattgcgaagagtgttttggagttcactggatttggttgacctttgtggaacacaaataatgaaggagcagaacattgacaagctaagatgaaattctgacatagtacatctctgccaaaaaccacacaccctctgtggatatggatatgaattcccagattttatatactcttgaataaaaggtttatttttatttataagtgggcataaaataagaaatgtccatgcagccatttttccaacagatgctgtacaccgttcattttatatagactagggagattcaaatacagtgcattttctattggtatttgttctgtgcatttttagcaacttctaccagcaaataaagtattctcagtaaaacgaaaatgattctcaagttatcagtttgctgtttttaccacttatttcatgccctgccaaattcaagttacacagacttccattttcttaagataatcaatcatgaagaaatcctttatcaatcattcaaaagtaattttaagtgtaacataactgtgtttacttcccatgcacttaatacccttatgcgctaattttgtgaattaagtttactgattatagaagtatgtgctgcatagaagtctgtgcttagagggtgaagttcctaagcttaccttgaattacagctacatttcagtgttaaatgtgcatattaagaataattcttttggggaaagaaattatgaatcttcaggacagtctacaatggtttagagttacattctgcctagacttttatgacttgctgctattgttttaaaaaccccacttagtctctctcttcctttctgatttctaaagtaagcctcagaatttccaaaccaattcatccacagctgtttctgggctggtttttaaagtagctgcaacagaatcatgaggctttccctttttatcaaatacgaaaaacattttttaaaattctgcacacccagtgatcatcttttgtgcgggaaagcaagatgatgatggatgattttattcatccttttagtaaagacacaaaacatttttctcaacatttgtacagttctgaaaaaaacctggtcaccaaaaatatcttctctgctaattcagcaattcttgggctccagttaggggagctggggcctcactttctcccagaattgtgggcttcactggaagtgaaggtgcaggaatgactggactgtccaccccagccctgcctgcctgtggttttggccagggagcaagccatgaggtgccctggcacatgcacaaattgatcctttgcgtgacagtcttgtatggaaaacagatgctgacagaattgtagactaccatgccacacaaaaaggctaaatatctactccaatgggtttccagttcagtttgaagtcaatcaaatttttgtattttcggtgtctccttgattggttttgctagtaattctgtaaattgtacatttgcaatatgaggttttttttccttttgtacaatttgaaactgatgcttcacctttcctttaataaactattcaaaatcaggcttgtggtagtcatcctattgtttctaccaggtatggctttaaagagatgattttctgtcctgtggctcttgagagagtttgcaatttctgataatctgttaaatggcagcaagttaaccttattagtgagttggtggttttgttgttttggcttttta

SEQ ID NO: 13717 - DNA, 1155 bp, Homo sapiens
gggttttactatgttggccaggctggtcccaaattctgatttcaggtgatccgcctgcctcaccctcccaaagtgctgagatttataggcatgagccaccgtgcccggccgtatgtcttaatacttataacttaggtgtttgtattttttttttgaaaagactggcataacactgcccttcatgactttataaaataaacaaaataaataaaaatattcctaagccttcatatttttgtactgaagaattagtcttttgcagttatattttgcatttatttttgtatagcagctatcatttccacaatcatttcttcctcttcatttccctctttatttgggggattcatttcactcactgttatgtgaaattaggaagggaggataacatttttagtttgctagagagtttctctgaaagtagaagtataaaccacttctaatcagccatatagcaggtggtaaggaaagtagtgaaacagaaatgcattatacttattaatttgttcgctaaaataatataacattttctagggattcaactaatgaaactactgcccattccgatgctggcagcgagcttgaagaaacagaggtcaaaggaaaaagaaaaaggggtcgtcctggccggcctccagtatgtattatgcttgtcttctttgttcctttaatagtgaccgtgttaatgagtttatatgagttgttaattctagtgctagtatggttaatacttaaaaaaaattcagtgacacaatagagattggaaactttttttcacataaattgtcttggcagtgatcagaaaaaggagatgattgtagtatgattttgttgccctccttctctttgtaaataaatggtagtccatgtgaaggcatagagaaggtcactaacagtgaatgaggtttagttagttaagacttgctgcttttcagatgcaactctgatttcttatgagctcccaagtactgttttggagtttggggccagtctcagagtatattctcattgataacctgattgggaagtttagaagagctctagataatcctactttgagagatagcttaatgtattgtacgagcatcagtcataatttaagcatgcataaaccctatagaagatactgttatctgcttgtcaaggggttaaggg

SEQ ID NO: 13718 - DNA, 1218 bp, Homo sapiens
ttttacaaatctgtaatgacacatccatcacacatgtttcactgccctaaaaatcttctgtgatctgcctgttcatcccttccacccactaaatccttggtaaccaccgattcttttactggctccatagttttgccttttccaaaatgtcatatggttggaatcatgcagtatgtatccttttcagattggcttctttacttaataatatttaaggttctttcatgccttttcaaggctctcaagctaattttaatgccaaataatatttcactgtgaggatgtgcgtagtttatttattcatttacttagtgagaacatcttagttgcttccaagttttggcagttatgaataaaactgctataaacatctgtggacattggttttcagctcatttgggtaaatgccaagtagtgtgatcactggtagtggtgtggattgattgtagtttatgaattttgtcatcctcattttattttaaaataatttcttttttttaattgacaggattgcctttgaggttattttaaaagttttgagttgtacagcacttgattattttgctgcattgtgaaaggacctctccagcaatgattacttcagaattaccagtgttacagtaagtattgtaattttcttttttttatattttttaaggaaaattttggacaacttatttctttatcaaaatgctctcttcgatgatacatttcaaatatgttctttgatattgggacaatatctttgcagtgtaagtagtagtagggtgtgtaattaccgtatccattcatggcttttgctattgaactgtcaacatgttttctgatattcaacaaaaaagatgttaatgtcctatatcaggagtcagcaaactgtggcccatgggccaaatatggcatgttgtctctttttgcaaaataaaattttggatgagagccatactcattcctttacatgctgtttatgactactttgtattacaagttgtgacagtgatagtattgcgtggaaagcctaaaatatttagtctggccatttacaaaaaatagtttggtgtcacctatcttataccatactctttctctaccccttctctaccccccctccctgctcacttccagctcttttattatgattctttctttttccttagattgagattgttgaggtgttccggctaccagaagaaatgtaagggatacaccagttgacatttt

SEQ ID NO: 13719 - DNA, 1156 bp, Homo sapiens
atcagtgtcaaatatagtgttcacttttaaatggaagcatattgtgtgcattttaggtcacattgatacgaacactgcaaagtctcagtgctatgtgaacagaatccaaaaataactgggaaatgtagttaatgactgggaaattcactaaaatctaaaagttgtaaactttttttttcttcaactcagttaatgttattgaaagttgaatttatggactgagttggaacatatcctttttttccccatagcttgatcatgatttaaaacatgctcacgaactccgccaggctgcattcaagctctatgcctctcttggagcaaatgatgaagacatccggaagaaggtgagtctgggagaggggcgtcccccagtcctgacagccagcaggcagggagtgacgtcaacctgaaagtcgtggtgaagagcactaacagtgactgtttgaatataataaagcagagtgactaaaggcataattgaagaatgaatgggacccggatttggggggttgtttgtttgtttttagaacatagagtggcatggccgtgctggaatgacaaataactggcgtgctttttttttgtgtcattaatatgaattattatgttgcacatttttgcatgtgttctgataaaaatcaattctagcactgtgaagcttcagacaccttgaaagtcctaacattagaattgtaaatgttatttatggaaataccttccaatgctattgagaaattcaaatctctattgtatattgttctttgatatgtggcttagttttatgttttgattttttttgctactgtgcaagtttaatgtgaataaaatctttgtggaatgatgattttatgtttagtgagtggtcatctgaattttccagctccccagaaaatgtatgcactggtatagcacccttatgttactaaagcctagtctaacactgaactcatgttcttgatgagaatacttctagatgaggagtatagtggtaagtaagctctgacttggctccttccacaaaccaaaaagctggaacttaccactcaaaaacatgtataacctaataaattctacacaaggctttcaagaccatcagagagcaaaaccacatgttctgtcttgaggagccatagcagaaagagcaaattagtca

SEQ ID NO: 13720 - DNA, 1198 bp, Homo sapiens
acccagatgggcttacccttgacaggaactggggaccaagagcctcccaattgccctaactcctgtcattggtattagcaatatctggccagatttagaaccagtcatggaaacttgtgctcaaactaaaagtaggtcatcacttcccagaaacagaataccttgtgcttcctgaaacagcatatatcactgtgaaactaaagaatattctacagacacccctgtagaaagaaacaaagaacaggatagtttagaaagctttctgttagctgtattcagcaaatttcatactagttgctcaggactgctagttggtatgcttttgtaaaacgagattgaaatttaataaaagatgcaactaaaatctttcctgcatgaagctaaaagcactcaagttgagagaggggcaagggaatctccccaggatgactgaagatgacttctttttacagcaagtactgttagcctttctgcaccccttagcttggcccctgctccaacttctgggtcagcagcaaggtgaactcaacagaagttgctcttgactgtttgaaggtagaagcagcctaccttttctctttgctaaaagaaggtcaaaggcttcgcaaccaggatgcaaggtctgcggtccagaagcttgcggtgagtgtgtgccactgatggagctccaagcccacccaccagccactcctgatggggttgctcacactgcagctgccctatcaccaccctgcacgttccttggaagatttaaatgtttggttgcaaatgaatgttttaaaaatgtatttaatgcaatttttcctgctctcaacatgaccacccaagattcaaacacagagacttccaagttactattttttcagaacatcaccgattttaaaatctgtcacaacaggacttggttttgtgcagatatcagagtgctaatgtgagaaacccagttaaaagaaaacttagtttattgggaagaaagcctcaggcccactcgtttctagaactgtgaaaatatccttggttggcatttttaacacaaaacactatagtgttggtattaaatagtactaggtaaatataaagaaaccaataatgaattgctgagacaatcttgaacccaaatagcattagaaagctgaaggcccaatgaaataacactttcacacttaaactctgtggataaattttgcctgtgggtata

SEQ ID NO: 13721 - DNA, 1386 bp, Homo sapiens
ctgctgttgagcctctggtaagctttcatctcccatgaactcatttccccataaatgaaatgggtaaataatgccccatttgtagaagtgggccctcatgactgaggtagcttccagataggccagagtagagtgtagagtgtgccccgtgacatccctccatcttctcctccattatcatctagcagggtcagactgggaaacctggttggccacgccacaccatgaccgaggagccaactgggacttctggctgtttgacatcctcatgttcccgttggtcttccggagaatagtgctaccctcacatcccctggagcacagccttcctgaaatgccctcaccccatgcctttgccattgtgtgctctcagatttcttccactgtttgacaccctccttagagggctgctcttttttttccagagataatcctagccatcctctccactcccacggctggggacaatggccacttactacctgtgcactttgccactcgggacacctggatggtttctcttaggactttgcccacctccttctcatggcacttgctgtggaaaatgcctggctggcctcgtggggcctgtctcacttttccaggagacatgacccactaacgtggcaactttaacccaaaggcccctcagacatgttacagcaaatctggagccacagacaggttccctccattggcagcccattgtgtttgaaattccatgtcgggtttacttggaatgaaagatacttgaattattgtgcgcctgtgagcgcccagcttctgtttcatagtcttaacaggtggccattgtcgtgaaacgagtgatgcctgaagatctcagtgatgtttgaaccttctgtgtaactttttattaagtctttgtatctctcgactgattaataaagaagagaaacacgtatctgtcttagttccttttactccagtattcctgaagttttgctgagaacattgtgagttgttggtgttttgcccagaacatccacgtcttacagagcatgaccttggtgctaaccagatctgaagtaaggaggagcccactggtggccgtggggtgtctccttcctgcatggagctggaggatgaaggcaggctagcacagcatttagaggcactacctcttgatactgggcagatctggattttagccctactaccgacctttgtatgcctttgggcaaatgacctgccttagtcttgagctgccttgcctgtgaatgggacactaatgtgcacttcaaagtagctggaggactaaagctaatgtaggagtgtggtgaggagcccagaaacagtgctctttgtccaggacacctattggattatctgcctgacattccttttcatagaaactgccctcttccc

SEQ ID NO: 13722 - DNA, 1233 bp, Homo sapiens
attccctctgcccctgtgtattgtagccattcccatagtataccaagttttggtgaaataataacttgattcttagttttcttctaatatagtattgaaactgtttttcagattcttagtctttctcacatattttaaatgtgatttattaatacttggtttgtaaataaaaacaatgaatcttttatgtgtggctttaaaatatgtattgtgaattactttgtaaaactggtaggcaaactacatttctttatgaggttttgagttgtattttttaaaaaaatataattgtatgtttgtcttctgtacatgagatttattgttttatctgggttttttgatctttaatggtattttcctccctagtttcatctgcttgataaaagccaagcatccaacatccaagttagtttttgttgaatatactttgtattctttctatattcttttattattgttagttactgaaaatgacacctttaaaaaatgtgtttaggtctgcatgaatttgattccttgaaggatcctgaagtaaatgaatttcgaagaaaaatgcgcaaattcagcgaggaaaaaatcctgtcacttgtgggattgtcttggatggactggctaaaacaaacatatccaccagagcatgaaccatccatccctgaaaacttagaagataaactttatgggggaaagctcatcgtagctgttcattttgaaaactgccaggtaggattatatttttttaagaaatattttgtaataaatttctcatttttacccgaatacaactgcatttttagaagtgtctgtcgcttgcctagcaaacactattagaaagaacaattttatatttcagatagaaatgtatttaggattatatataatagtctaaagtgatattctgtacacgtatctgttttgatacagtggaatggtgatttagaatgggattggcaaactggactgtttaattggtttttacagttttaaagggatgttaaaaagagaaaaaaacctcaaagatttgtaaagggatgtttaaaagaagaagaagtaaaaagaatatgcaacagagaccactgtgttgtatgttgtttgccaaacctggtcctttacagagaaagtttgccagttgctggtctagatagtgttccttattggaaatatttttttctcatgtgacttttctcccccatcggtagaaatgaaagcctaatcaaaatggtctctttgtttcca

SEQ ID NO: 13723 - DNA, 1149 bp, Homo sapiens
acttcatctcaaaaaaaaaaaaaaattccaaggaaaattttttttttctagaaataggaaggattttactttgcattccttattctgccatatcaccctcagatatattcagctttttattgagagatttctgatgttggataaagtaattgtctttatttttctttctgcaggttcttggtgagattcaggaaattgtgaaaacagggctttgggtaggcgattgcttcatttacacaagttctgtgaacagattaaattattatgttggaggagaaatagtcaccattgcccacttggacaggtacctgagtatcattttgcatttgtcctaaattttaaagtgtgtttagaaaaatctgttgctggcttgtagcaatgataggctgatttttcagtgttatagttttagtaggttgcctattgttaaccagaattgtgtcaatcaaatgggaaggttttgagcaagagggagattggcggggtgtgtgtttgtgtaattgcagatttgaatttctaacttggtttctgtttcttttataggacgatgtatctcctaggctacattcctaaagacaacaggctttatctgggggataaagaattgaacatcattagctattccctgctggtttcagtcctggaataccagacagctgtcatgcggagggactttagcatggctgataaggtccttcctaccattccaaaagaacagaggaccagagttgcacactttttggaaaagcaggtaagaggttttgtttttttctttttgttttttaaaacttgcaatttgaaagcaaattattatggagttgaaaaactttatttcttaattgccaactgatttcctgtggcaatagaatttctcctgtgagtttaaggcacttattacagcacatgatacacccttcttacactcttccttctcctttctcagtgccccctttaaatgttggaggtgattttcagtcttccttttctgtgcacttattttccagtctcctgatattttcatttctacactgcatttttagctttatcccatctgctttttaaaaaaaaatgattaaaatacatataaaatgtaccatgacatgactttttcttatgtaatgttttttaagcaaagttacatatgtgcaa

SEQ ID NO: 13724 - DNA, 1131 bp, Homo sapiens
aacctggagtgagatatttttattcatttgaatgatcagctttaaaatgaagatagtctttgtaataatatagtgccttcctgtggtataaatgtcatgagcaaagttctaggcatcttggtgctcaacaaatactggttgaataattggaatcctcctcctttgcatttccagccattctcaccttcctgcctccagttgcctttatttatgagaagaccattccaataacatttcagcagtaatgccatattcataatttccttttcaatttgttggctagaattttttttgtaactttgtattcaaagaaatgtataacttttaaaagatgttaaattgtaataatgaactaaataacatttgttattagaattcttttaccataacatgaattattgttccttaacttctacatgtctttggtcctctgtacttccctccctggcttctgtgatttctaggtttgtggtggtgtgtggtgatggggagtatatcatctacacagcaatggcattgagaaacaagagctttggatctgctcaggagtttgcatgggcccacgattcttcagagtaagttttgattgtatgatagccagcatgccctgattgcagatgtgttgtgtgctgcttgaagactctcaaggcttgatgtgggctgtgattctccgtgttaaaaaacagttctcaccagagctgtccattggaagatgagagtcagaggcgagtgtatagcatgagccgtcttagtgctttctttgttctgcgttaggctggctcactcaagctgatacaataattccatttaactggggacccagcacccatttctttgatggagcccatggcaggacctggtgctttatgggcttaaggcacagtagaccctcatgtctgccttggcaggccttggcatgccctccctgtgatgtagtgtcctgaggtgctactgcccctttatgagctacttgggagtgatgttgtggtttgatcattttgatgagaaatttattaaatcttttttaaaacttattttctgtgatagtacccactgcccattcttaacaaatttctgtctgaattcagaatgttcataaaatgttctcattaaaagcaggaaagatcattt

SEQ ID NO: 13725 - DNA, 1188 bp, Homo sapiens
ggcagcaaaaagaacacttcatatgcttaaaacccattctttttgaattagattttgattttaaatatttaagtctggtgtttgtgagaacacttttctctttgctcagtcttttcgatctggttgggtagggaaggtgttcctcatgctctctgggtggctgccttattcatagttgagagagctgttaggtaaaatctttatatgtgttggggtttttttggtagggggggtagcaggtaaaggtggcccatggctagggcagcaaagatgaataatttgaggaagcatttggttggtggactcatttgcagagaaacagtggtgacaacaaatcagagctgtttccctcaactctggctataagaggtcattctctgcatgtcagctacaaagatcaggcacttgaatgaatccgctgggttggcaggcattggtcatcttcgcaacaccctcttcctcaccatggatgagaacaagacgggagtggttatatcccagtaacagaagctttgggaggtatccaggtgagcagggtaatgtggcttgccctcccccagatattctgatcccaagaaaaaggtgtcattaatcagtctggcattttccaccctccatatgctggcatccaggaaccaaaacccctgaaggcctagacaccctatgacctctaactgagatgttggcagccaggcagatgcaggctcatgtccaggaggaactgctgactggtttggccacagcccagttcattgcttgtcttgccaagtggacaaccagattctgccttcctgagcttgaaaataggctacaactctcaggtgattcagatgacatggaggagaagttggaggagaagattgaaatgcttaaatcccagtgcagaatgagttgcttcagtggagtaaagcaaccggctagttggtagcctgccttaaaaaatactaaacatatatcatcatacatttgatcaaatgctgtaagcacagccaaggcccaaattcatctagataccaaaaatgtgatttcagtgaaatctcttttcattgccgctttcttttgttgttgtttgttttttgagccagagtcttgctgctctgtcacccaggctggagtgcagtggcacaatctcagctcactgcaacctccacctcccgggttcaagcgagtttcctgcctcagactccc

SEQ ID NO: 13726 - DNA, 3556 bp, Homo sapiens
aaaaagaagaccaaaagattacagtggaccatgggatacagaagccagcatggcagacagaagaaaaatagtttgggaacatgtaactattctaagtggaagttttgttgtaggaattatagtaatcacaccacattacttggcctttcggtaatgtgaaaaaaaaaaaaaacctcagagcctccaaggaaatgcctttagaagcactcctctctcaaaattgccattttctctaccatgtcccccagacacagttgggttttgttgatttatggcagtcttctaaacaaagccatccttaattttacatactgtattgtaactatccaaagatagtattggcagtcataaatttataacttctggcctttgtttaattccagtaaaataacagcaatgacaatgagatcgtcagtattattttcacatttccctgagaggacctggcacaatattttaaatttaattatttggcagtagtcactgtttttgacaaccaatgaaatagcgtctaaatatcttgtatattttttagcatcaaaatgttttggtttccactgctgacaggtgcttgttgtttagcctaatgtggatatttaaattgttaacataccaaacacacatggtaatagtttgggacaaaataactagtaaaatgttgatttctcggctttttcactgactgcggcatgtcctcgtgtcttctctgattttgtggtacatgaatgaatgcatttatctttttagtgacttactagttacgaacttgaattatcacctctttgtcatacttaagtatcatttacataaagtgtaaaagattttttcacttttgaatctttacctacttgctttcacattaagaatttgaacttttgagttttttccaggtctatatataatagattacatttattttgtaaagaaaatagtaatttaaagttttgccattttaaggtgacaatatttgggacagtataaatattatagacaagggcccccttgctgtctgctttagcaggtagtgacattaattgacttatagttttgtgtaaatgaacaaactgcttttgacaagaaatttattctgtcctagtttcctgcgtggtaaatcatagaaagattcaagttcatttgggttaaatgtgctaataggatgtagcttttaaattctgctattgagtcagctgtaccttttaatactttaaatgtgttatttgtatggcccttataaaggtgtttgctgtaattctgttaaaagacttcgcctatgccatactggtgtataaaaactgccgcaattggacgccggtgtggtactcatttcagtatacctgaactgtacattttgtgcaatggctttatctaaaagaatgacgcttcgtgaaagcactttgtggccttttttgggggggagggtgagagagtaggagagaataccatgttaagattaaaaaaaaaaacaaaaacattggtcacgtattaggcagaaacagtgttcataacatttttctgggttttaaatatgttgtttcggatatccttaatataaatgttttaggtattctgtgtaccctgtcgtacccccaacattatagaatattgcagcgtgtcattgcaagctttctctgctgtcaccagtgaaacatagtgccctgttaaattcccccactttaacttccttgtgatcaacagtaactggatgtttttgaggtgctcaattggaataaaaatattccaatctatttggagaccaaaggcaaaatcagttttcttacctttggaattattcgtaccttttatggtaaatttcagctttgacatgtattatgaggaacgtaccaaaaaccggtttgtaacaaatctgtagagaaggtctgaatctatcgtgtttgccttttcaggtgccatttctactgcctaatacagtgccatttgccttgtgaagacccataaacattcattgtgttgaatgtaagatagagactctccctagtcttactgatctcagtaccccacaaatgattaagaatgatatgaaaaccagcagctaaggaacatcttattatttagttgtagcatattcataacaagtgtccttcaaggataaacatatattctctatttgtatttagcaagtaaaacttgtgttgacctttagtgcattatattcagcttttaacagtattatgtatgtactggaaagcaaagaaatcttagagtcttggacattgtttatttgtgcaacaactagaaaggagcaatgaagtttatttcagttgtatttttccctaagcacaatctgcaatagtttatgtatgacagagataattcaaaaaggaaaactatatataaaagttgtatataaagtttgtctctgaaatatttctttgaagtttttaaaaaatcgactcatgtttaaaaacaaaaacacatattcagagcattggacttttttaacttgttttcatctgtttatcatgacttttttatttctggtgtagagtccacattatttagtttgttgtacttttaaatttcaaagttcaaatctgaagaattagcgtttgtgatttcgggataccatgcagtggttttaatcccaggaaaaaaactatcaccaaaagttcgtttgattctcattatgtaactttgtagaaccatcctttctagatgggtccaccacagtgaatttgtaactttgaagtcaggatagaatatcattagattatctgtgagatagcattactatgttaggaccagcagagtttgggttggtaaaaataatgtttgctctattactgggttacagacatttcagcatttttaggttggttttaaatcactaaaaatatttattcggatttgaaggatttaagtgctaaaaatcaatccatttcttgcccttcaataattgtccatgcctgccttttgttgtttacatgctcttctgcccagactgttagtaatctagggaccccctttggagctgataagtacagttcagccttttctcctcaaatatataatgactttaacattcctaagaatataggtatttctgaatgatttaaatttgaggaattttaatacataaaatacaatgtacaaactttctgcccactcagatctcttctccatcatgtacttagtatttcccattaacctacacactgatttttatgctactccttgtagaaacaaaattctggtttgactcagtttttgtgtttataaacttttggaatgtgtaccccgtttatgtgaagaattatgacctatcagtcatagctaaatagtgaacctcaaaagtgttaacttttgactattcatgtgaggtttggtatcttgcatttatgtacatggctgtaaattatgtgcatttactctgtatttatgttatctagctgacttttacttgaattgttcaaattttaaaaattaaaatacgctcatgaaaatatggctttttctgtaatatatcaacattttattgagaacataatcacacttttttggattatcctatgtgtggaacaaaaatccattgccattt

SEQ ID NO: 13727 - DNA, 1165 bp, Homo sapiens
ttttctacaagcctgccggcaccatttaggattttgaaaaataatctagaaatgctataccctttatcaaaattattttttactttgcaagagcttaacagttttggttttttcttagcaattctataaaattaacatctataaaatgcatcccggaccagatacatactgtattgaaagctttcttcaggaagagaatatgagagtgttctttccagcttattttcttccttagcaaaaggattgtttgattctcagaagcagaaggacacattcattgtggagcagctctgcttaagtgtatgaaatgccttctgtctggttgcagaatttggagtttactaaacagtgtttagtgattgggctcatcttgcatcaccagttgatgacatttttctttgttccctcctacccagttgaaccaagactctgaggctgatatgcaatgtcacttacaacattaatcagatactgcatttaaggtgagctgtcccttgcctcctccttccccagtgctcgtgtgctgcatgcagtgcgtatcttgcttctgcgagcctaagatggcaggcaggattagccgtgcttgtgctgtgtgtgcatgctgtgtctagaattcattacacgttgcctagtatttcagatgtgagtatgtaaatgctctgtatgccatatcatctggtagcgaagacttgtttttgcctcattacagccttagatatttcaacatcacctttcatttccaattcatttgcttctggatgtttgtttttcatcacattcaaaatatgattttacctttttttttttaacaaaaccaaaaccccccacaaaccctaaaaacaaaaacaacaacaacaaaactctgctaccagatggtgtctctcctttcttcgtgcatttgctgtcttttaaataatgtatgttgtattgttaattaatgtgaatatcaaattaaacacttgaaacttacatgtttattatgcaggtaggaggcaaggtggattctatttttaactcttatgcactccatcatgtgcaagcaacttgggttctcaaatttgtattttcaatgctggtatcagtggtttgattttcagcaaatgtgacagtggcctttgcagtggtcagctccgagctttgaactctcagaggaggaaggggaaaa

SEQ ID NO: 13728 - DNA, 1178 bp, Homo sapiens
gaatcaacatttcattggttcagaagacaatgaccaaaaggataacatacaaaccggtgtggaaaatgttgtcctttgagtggcaagaattagaaaaatcttcaaaaatatagttggtggtttttttagttatgatttaagtttagtttcattttgtccatgtgacagtcatgaaggagtgaaattaaaaaaaaaaaaaactcatttgtgaaaattccagaaaaaggatcctaatatctactttgggttttagcattaactttatgcaaagtgcacaaaaacaaaatagctgactcctccaatatcccaagtttcttgtgaaagttaataaaattcttagctgtggtatttctaccagtgaaaaaaggagtttaattttagcctagtttaaaactttctaataattgctaataagaactggctgctgaactgtctttagtcactggagaaaataagggtcagatatcctgaagatggcatcttcgtaaatatgttacgtggtaataagctgtgtgacggtctttattcccatctggcttctgcactattaaaatttgtttaaattaatggatacacatgaaatacttaaacaatataactgaaattatgtgcataatgagtaacctaaagtaggacattcatacattatgtagaactacttttctgcaacacaaaccttgtaaaatacatatataaatcactataacttttaactgtccatatcccctgtagagaattatgaggagcaatagatctgcaaataatgaggactgatgtaaaaatcaatagaaagcattttgaatatgatttaagagcatgtgaatgcttttagatggaatgctgttcccttgaagttatggctgagctgttcttagaactggtctactcaattcacagaaaacataggtcatgccttatctatgggggaacaccctcccagaatttacctgtgattacctgtgctgcatattactttgcaatggcctcatctcagagaatgaaagagggtcacattgttctgaaactctctgcagtcttccaaccaccacaaggccatggatgtgggggtctattccagacagacttaagggctcaagtggaacctgccatctcccattccactgaaggactgtccaagagatttagtgcaaggtacactgcagtagtgaattcccagg

SEQ ID NO: 13729 - DNA, 1195 bp, Homo sapiens
ctttattttatacattgtatatatgtacaccctacactattcatttgggttttattaaagagatagtcacaaagggcttacgaaaatcatttttgaattgataattagaatattgaataagcaatcctatgatccactaatttgttttatcagttaataatattaatcaaagacatttactgtatattctagtcattttgatttgagttaaccccaaatataaaattacctgtagtgatgtctctctcccagcccttatatgtggatattttttaagtggacttgtatgctgataattctagaccaaagtaaatatggcagaatatttatacatgaaaaaataattttgcaaatattttctataattgtattcatttaaaatgttgatagcttgtgttagtttcagggaggggtgtatattttgataaaaaaatacttgactttgtaattctgtatattctatacaatttatagcagagccgttttaagacagccttgtcacatttttttgttaattgtgaaaattttattgagtgatgtttaagtatgcattgagtacatgaccaactagaattaaagtaagtgtaaacagtgaacatactgtatgctgtacaagatataatgtaacttgctgttttagcatctgtattttggttagaagatattattaaatgcagatgttaaggattggaaaagtctaattttatttttagaaataatggatataaatttgtttttgcttgattaaaatagcttattcctacattaagtctctttttaaatgttttcatgttatttcttttgtgcagctatttcatctgtgtgagtcacagctttgtttccacgtattattcagtttatttctgtttccttacttgtttacattccgtggtacctacttacatgcttaggagtcaaatggattatgacattaggaaaaaagcagaataaaagagattgaagtcttctgatgattgagtgttttggataggcctgatcttataatgataaatcagagaatgaaatgctctccaggaagcattctgctccactcatccgtgggaaacaaattacatttattgagtaccaggcactgggcaatgtctttacataggctatttcattaacacacacgcaccagaattcgacctcattatcctcgttttatagtgactttgagaaggtctcacaacca

SEQ ID NO: 13730 - DNA, 1321 bp, Homo sapiens
gagaaaaacctgatgtttgcataatattttttttcccctcgagatggagtcttgctctgttgcccaggctggagtgcagtggcatgatctcagccactgcaacctctgcctcccgggttcaagcgattcttctgcctcagcctcccaagtagttgggattacagacatgtgccaccacgcctggctaatttttgtatttttagtagagacagggtttcaccatgttgaccacactggtcttgaacttctaaccatgtgatctgcctgcctcggcctcccaaagtgctgggattacaggcttgagccaccacgcccagcctaagattttatgattaaaaaaaattcaagctcaatacccacataaattataacgtttctcaggaagtagtcccttaaccaaaacgtctctgagaagtgatgcttaggtaatctctgggatccgattttcccacatgtctcactccacagtatgctaaagaagaaaaagtgagtgggcacaacactttgaccctctggctaagccctgggagtccctgacaggtccagaaacttctctgacacccattcaccagggtgctgagataggagaaagtgctcatttataatgtgtattctgtgcagctgttctcagacaagaccggatcttgtcatcttaccttttgctttacaaaaaaggcctgttgaagtcaatgctgtcttgccccttgctgtttcagcaggttagactttggtcttcactgcttatagctgcattggaggccaacgtagctgatgctcagggtcaggcctcgccccttcgccgcaggtctcaggatcggggataacatcgctcccaccctgctcatttagagatgggaaacaagcaagagcttgacttgcctcccatccctcagcctgtctgtggcagagcctgcaccaaaacccagagcttcttccctccgtgagggccacgctgtcaccacagtcctcccagatgggttttggattagcatcagtcctgtgtcaccaagtgccaaacagctgaggggtagaagtgggactcctttcccgagccccagcatgaggctgtggtgtcaggtttaggcctctctcaagtcagaaaaccccgggctgagacctccacagacaagggctccccatgctggccattggcaggggcccaagaagttcagtgaccaactggtccttccacaccacaccagctggtgctgcccatgtctgtcgaatcataacggaaaattccccagatcacgtttggatttaaaaactcatcccttgtcgtgcttcaatgcatgccatttgtcacttaccatacttcacc

SEQ ID NO: 13731 - DNA, 1253 bp, Homo sapiens
agatgatgaggaggattcctcctccccagaataaagacaagagaaagcctacgtttcaatatgtgatgctcatgtgtgtttgtagtgtgagctcttgtttttgaaatgattgcttcagtctttgcctttgtttgcactgtgtgttcagtgaaaactagagaaacacaataagcaaatcacatgaaggctgagatgattgagatgaaagttaacatagtgtgaatgaaagtctggccaacagagcagtagatgatataacaaagaaagcatgctttctgaggagatagtggggataatccctgaagagttggcagtgtgagtgcaactcatttatcttctgtgaggtgggatttttgtgttcctcacacccatgtaattattcttagaattgagattgctacacggagcagtccttgacgatcgtgtttctgacgtttctcttccttgcctggactgcctttgacaaggcagaaatgaacatgaaaagtccccaggagaggggagctgtgtagtgagggatactgagggcagtcctgtggctgaggggcacagattgaactgctgaactagttggaggtctagatgaggtgctttacgcatcagctgccttagacagcttctagaaaggagcgagcgctacttcttaagtacttaagtgacatttagataatttatagtaaaactgaaattattattagccaatgcattggtgcatagaatttactagggctacttctggaagccaaaatagaatagcatttccatgtgcattaaatactttgccagcactgcctttgccagcatcctaaatctggagttttacaaagaaggaaactgtatctttaggttaatcaaagctatgcatttcatatagctttttcatttaaaacaagacaaagaaacaaattcctatgaccaaattgcttgcctacagttccctgcagtaattgtatgatctcacccagtgtgcaatttgtgaaaatgaaccaaatgtcattacttttgtcttaaagaaaagtctatttcaagaatatgaacagcagtgtttccttgtacatgtcaccttttttcacattttcattaatcagaatgaccttattgagcctactcctggggtcaattgcatttcaaactaatccaatatttagtgtttcacagaaacactagaaaacgttgaacactcctactgcctggatatatggtagtgcagttatgttgtttatggctcaagatgtcattagaaatactgcagt

SEQ ID NO: 13732 - DNA, 1288 bp, Homo sapiens
ttcttcatgagagtaatttccagtgaagtactcttgggtatttgagtactcataaattctgatccttgtggttgcactcagctgtcttgatcaactctagccattcagtggctgttggtatgagataaaatgtgctgctttctgtgctttctcttttactaggcctgtaaacagtgtctgtgtgccatctggtgggtgtattgactgttgtgatggtgctaacagtggtgattgaaaatgggctaaacagtgaaaaaatataacacttaagaacaagaaacagaagaaataagggtcactcagactcttttaaaatgagaatagaaataagttcagtgtactagagtccacttgcatttcgttatttccttaatttgaacaaagagtcttaccagaccataagaatcatctgaggcacttaaaaatacaaattctccacctaatttttgaatctttaggtgtccagtggagctcaggagtgtgtgttttgaataagagacacctctcttccctttgtagtgaatcttgtgatcactcatatttgggaagaactgccgggaaggattgggaggatcaagttgtttgaggacatacagtaaacttcctcaattattaatcagaagatacatttcaaaactaggaaattttagttgagcaggtggaagaaaaatgagaaattgaacaattaaaaagtttccttgactgaatatgctaacagaaaaaagatttcaaaaggacatattttaactaaagataaagaagccaatgaaaaaccagcagtatcaaacctacagatgagacaaatgtttttgggtgaacacttaaaaaattattgaaggagaagggccctgcaagtgaccttagtgatttctaagatcttttaggtttgatgaactaaatgaaaccaattataatattccagataccagagcttgaattgaggagtttgcttaagcaatgaggagatactgtttaaatcttgcaatgtggtaagatggagaagaaaaaatgtttttctcctttcaaatttaagaatttagggcattcatggttctagatacaagaaaaggagggagctagctaatcgtttttagaaagtgtcccctaagtgaaaatgttcaacaaagccaagagaacaggtttgatcttctagggaaagtatgtaggaaagactgacatataagatttattcatttagaaatatgaccatagagctataaatacacttaatattatggtcatttcaaggatcctttggaaagattctggttaggtgatccatttgggt

SEQ ID NO: 13733 - DNA, 1107 bp, Homo sapiens
gagttaaactccatttcaaaaaaacaaaaacaaaaacaaaaacaaaaaaacaaaagaagaactactctgtagtgagagctagaatcctcatgttgtttatttaaaatttttggccaagtacagtggctcatgcctgtaatcccagcactttgggaggctgaggccagaggatcacttgaagccaggagttcagttacagcttgggcagcaaagtgagaccttgtctctacaaaaaaattttttttaaattagccaggtgtggtggtatgcccctgtagtcccagctactcaggaaaccgaagcaggagaatcgcttgaacacaggagtttgagggtgctatgagctatgattgtgccactgcactccagcctgggcaacagggcaaggccctgtcttaataaaataaaataaaattcttaatatgtttatatatttgaaaaactatttgtgtagagacacatgtctgtaaatacacatagatatattaactttttaagctttaattgaagcctttctcttcacaggttttatatatttgactgcagatgactaacagattgaattttaagagtgcgaaacactctggtgctatagggaaggaacttcataaatagcccctcctgtaagggaccagtctttaatttaaaacagtccagcccaggaatcttgcaagaattttgtaattatttgaggagagatgtagatataccctggagttctttgactttaagttattctagagtcatcccagagatggcctagaagacttgaatgtaccccaaaggattctgaatccctttgggaaatttagactatgattttcagtaagaattaaaagccccaggataagcgtggtggttcacacctgtaatcccagcaatttgtgaggccaaggcgggaggatcgcttgagctcaggagttcgagaccagcctaggcaacatagtgagaccccacccatctcaatttaaaaaaagagagaaaaaggccaggtgtagtggctcacgcctgtaatcccagcactttgggaggccaaggcgggtggatcacctgaggtcaggagttcaagaccagcctgatcaatatggtgaaaccccatctctacta

SEQ ID NO: 13734 - DNA, 1139 bp, Homo sapiens
agttgagagccactgatacaggctgttagaagaaaatcgaagactcagtgaatatagtgtcatactccttttctttctgcctcattttaccttaggaaatggttgttagcaaaaaaattagttaatcgtatcttgaaataaatagggtatctattttgctgattaataaagaaaaaataaatctcagctgggcacagtggctcacacctgtaatcctagcactttgggaggccaaggcaggcggatcacttcagctcaggagtttgagaccagcctgggcaacctggcgaatccctatctctacaaaaaatacacaaattagctgggtgtggtgacacacacatatagtcccagctaattagggggctgaggtgggaagatcacttgagctccaggaggtggaggctgcagtgagccaagttggtgtcactgtactctagcctgggtggcaaagtgagaccctgtctcaatcaatcaatcaatcaatcaatcaatatctcatgctgtaattgtcttctgatgttttcatccacccagccccacctctgcagccttaattactggagtaggtccatgatttcagtgtagggttaatgtattctgcagatcatctttgatttgacctgcttttttgcttcctttttatctctgaacaaaggagatcatcattctctttaatctgccttctgtgtaaatctctaccagactggaagctccctgaaagcagaaactgtctgcttccccagaacttagcactgtgctttcatgtatgtgggataaatttttactttgttagtgcaactttgtttgtacacgttatccttgatattacatacatttgttgatgggggcaatttatatttgttgtgagtaaaatacttttttgttggattaagaagaactatactcttcccagcactttgggaggccaaggaggacggattacctgaggttagtagcttgagaccagcctgaccaacatggagaaaccccatctctattaaaactacaaaaaaattagctgtgcgttgtggcacatgcctgtaatcccagctagtcaggaggctgaggcaggagaaccgcttgaacccctgaggcagaggttgcggttgagccgagatcgcgccattgcactccag

SEQ ID NO: 13735 - DNA, 1150 bp, Homo sapiens
tagtggtcaggcattctctattcttttccccctgtagacccattctaaatgtgggcctgaggtcaatgggagatgtgccctccctatggaggatgtaagaagcagaggccatttctgccccatgttgaggaaacaatctgttgatagacctggaatttagagtatatctgaaaagcagttggacttcaagaaatttaaaattctctctttgagatggggtggactaagaccacccccaaagtttaaaaatatgctcattcaacttgaatcttctgaggactttttgtgaaaatggtggactgtttagggcataggacagattccccaaattgctttatgcttccacataactagagcacttcaatctatttaagcctttgtctcctaactgaaacattatttctaaatatttctattcaataagttttttcttttttgagcaacttaagtgaattttgaagattgctccttccagtctcgttccttttcacattttcctgcattacctaataattacctcagcgttagaatttgaatgtattaattgatttaaacatcatgtagactaaagtcttaaacatctaagactcagttgtagttgcagaaaaaaattaaagtcacctctactgaaccttggtttcaatttaagatttttcttgcttttcaaaggggtaactaataaagattgaagggtttttttcccgattggtggaggaatgaagaactattgatgcaagtttttttattgtttctttctatgatcaggtacctgctttcattttagactgctacttccaaactaagctagattcttggttttaatgagaggaggcagagagagggaggcagatggaagaagaaaaacagttaaataagacatacccagtcactgcatttttggactataccgtatctttctagcacaaggaaatagataaactgtaaggtcttttttactcactttttatttatgtgttctatttgtgttagtcataactgtttatagtggttgtctaatttttacttttattatatgagatagagctgtgcagatcttcactcaagttagttctgtcacgcttcttcccattatttagagcacagttttttaaagcaactgtacaatttctcagccttatgagcttgctgt

SEQ ID NO: 13736 - DNA, 1175 bp, Homo sapiens
cttactgaatgtggattttatttctctttttaatgatgtaagaaaattgtcaggagaatggctcttatttatgtgtgttttaacttatgctttgttgcctctgagggtctttagacctgctgtgaaaggatcacatttgttgtggtgctgccagttttgctttattctaaattttgtaccaaagcaactttagaataatcagaatatttcatctaactgcttagaactataaatagcattctaaatttgagtaaatacaattttttaggttactcaagaaccagcattagtaatttctagtaaaattgtttcaaaatctacagggtacaatgattacaaattaatcttctaacaaaataaaatatgaaatattagtcatgttaattaataaactgtattattttgtatagctttttatttgcttacctgacattttatgagagcttcatagttggtcggtatgtagtgcttcttgggactgaagaaattctaattgttgtttaagttccaaggtgtgctacaatataggaggcacagtcatcagtttgtgacatacattatttactgcctatttcattctgattctatatttttagctttatgctgaactgttcaatgatgctgggattctctctttgcatgtcatatgtgaatgtgtggttcaagctgtaactgttgaaattattttagaatttatgacgatttctcagcagggcctatgtttatatatatatatatatttattctttagtttttgtgatatgcttatatttttaaggaagtaagttatagcatacttttttaaaagtaggaaccacaatctttatatggagcagcttgttatatctgattttcatgtaactcattggaaactctgccatgactcttaaagtagtcttacttgttttttaaaatgctggtattaaactaaatggactcctttcactaactgctgatttcagagtttaaatgttagcaggatatttgtgtattagcagtgccttcagtataagagagaaatattcattatctgtcatttatcatagtcgtataagtttccatgattttattttctgttattttcataagttcagatgtttatcagttcccaacattgtttctttatctgtagtgggatcttgagtaatgaggctcaagtaaatcctcaatgtgta

SEQ ID NO: 13737 - DNA, 1246 bp, Homo sapiens
ctgagagtatactgccttatttccttatgctttctttgtctacctccgttataaagtcatagaaatgtgttattggactatttctctttgatattagtggtgcagtgattcttggattttaggatatttttattttaaactatcttggatgttacattacttaatagaatcagttcttcaggacatgaaagtaaattgtcaatttgaggctaaaaatagagaactactagatgccttttagatgaactgaaatgaagtctgaatagaaaaacaatttagctgtgtgtcttgtagagtgaaaaaacaagaaaaaataatttaaaatgaatgttgagagtaaggatgactttgctgcataactaagtcagtaaaatgtataaatgatgagtagtagtgaaatcagaattcttatagttgaaaatcaaaatatagcaagtatattgtgacatatcaaaggtacaaaaatttagtttgctttgcttagaaattttaaactaacatgaggaaatattataaatacattaacaaaaaactatattgatattagttcttatatttctattatactatttcatattttcacagcatttgatgaccaatgaagactcaccaattatagaatattacccacctgattttaaaactgacctaaatgggaaacaacaggaatgggaagctgtggtgttaatcccttttattgatgaggtcagtgcatgaaataatcattacatacacatacattcttaatcagagactatttcacataggttaatgagcaatgggttttaatcaccatttatgttttgttaatgagatttagctaccctcttcattatgtgcataaaaacttccaggtatgccaattataataaggctgaagtggctttactattattagacaaagtagtcctcagaacaaggagtaatattaccggagataaagagatattttatacagataaaagagtcagttcagttcaagaagacataaaaatcctaaatatgttgtatctaataacagaacctaaaatacatgaagcaaaaattaccagaattatagctagaaatttcaacacttttctctgaagaattaataacacaagaggacaaaaattcagtaaggatggccgggcgcggtggctcacgcctgtaatcccagcactttgggaggctgaggcgggcagatcacaaggtcaggagatcgagaccatcctggctaacacagtgaaaccccgtctctactaaa

SEQ ID NO: 13738 - DNA, 1205 bp, Homo sapiens
cattatcaaaaacagtgttatggtggccaacatttattaaaacactaacactgttgtaagtgctttacatgtacaggtttccagttctttatctgaaacctttgtggcaagctacacttagaaatttaggatttttaagattttagtgcatatttaatatttgatatttccactgagggtaacctgttggagtatcccataatcaaacacataactgtttcttcagtgagagtttaatttacagagctctttggattttctaatatttgataatagattataggcctctactctctcctttaatcattaaacaatcctatgatgtaggtactattattaatgaggtaaatgacagaggttaaaatgggatgattaggaaatacttagaaaaccacagactgctgaacctttgtaatcaaaatattgtaaaagtgaaatttttgttatagtggaatttaaggtaaaaacaaattaaaatgcactatttattttttcaggttgatggaagtagttccacattaagcatgagcactcattttaaaatgcttaaaaagctggtagaagaagcaacatttagtgaaatcctcattcctctacaatcagtcatgatacctacacttccatcaattctgggtacccatgctaaccatgctagccatgaaccatttcctggacattgggcctatattgcagggtttgatgatatggtaaacttcagttttatatgactatgattttaaaatttagttgttaaaaacttcaaattaagataaaaagtgtatttcacaaaatctacgtgaatcttatttgtgaagaaaaataattggaaatacagaagagtaaaactaaactcatttgtactgatggcaaaaaaattcagtgattaaaaaaagttctgattcatgattcacattcaccgtaacgttttgatttttcaaatgctcctgttgttttagtatgactataatctttattttttcacaatttgatttttcttttcttttctttttttttttttttggaaacagggtctcattctgttgcccgggttgggtggaatacagtggtgcgatctcagctcactgcaacctctgcctcttaggctcaagcaatttgctcacctcagcctcctgagtagctgggactacaggtgcatgtcaccatgcccagctaattttttaaattttttgtagatacggggtttc

SEQ ID NO: 13739 - DNA, 1172 bp, Homo sapiens
atacatttgaatttagttttatccatcattctccagtttaattaggaatttgggattcactgcaaatccctaaatatttattttaaaagtttaatgtaattaattttatttatttatttatttatttatttattattttaagggacggggtcttgctatgtcacctgagctggagtgcagtggctattcacaggcataatcatagctcactgcaaccttgaactcctgagttcaagtgatccacctgcctcagtctcctgagtagctggagtacaggtgcacgctaccatgcctggctaaagcaccaaatgtataaaccagcataaattggtgtttacattcagtttgaaaagatataaatgtaattatttacttagcaaggatatattaaagttctaccaaagacaactgtgtattttaaattctttatttctgatttaaagtacttgctttatatatgagattaataaggctgaatatgataacattttaacataggctctatctatcttcagattgcacatgttatgtgagttggagcatagcatcaaaccacttttccagcattctccaggtgacagttctcaagaagattctctaaactgggtagctcgactagaaatgacccagaattcctacagagccaaggagcctatcctggctctccggagggctttactaagcctcaacaaaaggtttctcacactactttttttaaaaatgtcacttatcttgaatttggtatttggatattatttgggggtgtttgtatttcttaattttctgtctgaatctacatttttctatttttaatgatcagggctacactatctggttgaaaggaacctagaacttaagaatcacttttagacaccatttctttctcttttttaagatgttaaaaacatatctgggggatatgttttttactgataaaaatcaagaataaggttcataataggtaaaacagaacactgtaagaaaagttaagtcaaggctttttaaacaaattaataattaattcctttgaaatagtatatgaagaaggttctgtattgggaacagaggctttcaaaacattggaactacttgcaaagtttatgacctagatttaaattgttttaagttaagttgttgtgtacacttaccaatggtctctctcaccaatgtgt

SEQ ID NO: 13740 - DNA, 1142 bp, Homo sapiens
tgcctgagctcaggtgttcgagaccagtctgggcaacatggtgaagccccatctctacaaaaaatacaaaaattagccaggcatggtggtgcatgcctgtggtcccagctacttgggaggctgaggtgggaggatcacttgaacctgggaggtcagggctgcatgctgcagtgagccgtgatcatgccactgcactccagcctgggtgacagagcaagaccctatatcaaaaaaaaaaagtgacatttattaaatataaagtaattttaatttataagtatccattttaatttcctaaaattctgtgtgctatacatacttaaatatgaaacattgacattataagagaacttaggattcttcatggcatattatttgttgacaatatttttacagtacaaccttgacatttaatatgttaaattaggtattgtatactcttgtccttcagctttcatagataatctacatcatctttgtaagcatcttgattttagagaagatgaaacagatgtaaaagcagttcttggaactttattaaatttaatggaagatccagacaaagatgttagagtggcttttagtggaaatatcaagcacatattggaatccttggactctgaagatggatttataaaggaggttgataatttttgtttttaacatttgagtttacgtcaacctagctctaaaaatttctttaaccagttaattttattgttctagctttttgtcttaagaatgaaggaagcatatacacatgcccaaatatcaagaaataatgagctgaaggataccttgattcttacaacaggggatattggaaggtatacttggcagcatttgtgttcttccttatttattttggccattctccatttttatttgcttgctgttaaaaatggtgatatgatatttgtgatattatagacaaaatgtgagtcaacatgaatttatttgtagatttccgtttgtttctgggatattggagatacatatgtgtgtgtatgtgtgtgtgtgtgtgtgtgtgtgtttgtgtattcatatgtatgttgtttttaattttagggccgcaaaaggagatttggtaccatttgcactcttacacttattgcattgtttgttatccaagtcagcatctg

SEQ ID NO: 13741 - DNA, 1155 bp, Homo sapiens
accaactattttttataaagtggctaagttgccatatttcagttacttctgaacattgttttaattgttttaaatcttagtataaatttcaggctgggcgcggtggctcacgcctgtaatcccagcactttgggaggccgaggcgggcagatcacgaggtcagaagatcgagatcatcctggctaacacggtgaaaccctgtctctactaaaaatacaaaaaattagccaagcgtggtggttggcgcctgtagtcccagctactcgggaggctgaggcaggagaatggcgtgaacccgggaggcggagcttgcagtgagccgagatggcgccactgcactccagcctgggagacagagtgagactctgtctcacaaaaaaaaaaaatttttttgaatagttgatattacatagtatgttttattctaaatatgtttcatgttttaaccaaatttatattgcatatgaatatctctctactatattcataattatagaattaaacatgtggacatgaaccaaaagagcatattatggagtgcactgaaacagaaagctgaatcccttcagatttcccttgaatacagtggcctaaagaatcctgttattgagatgttagaaggaattgctgttgtcttacaactgactgctctgtgtactgttcattgttctcatcaaaacatgaactggtaaaacaaacttcttgtttcttggggttgggtttcctgtaatgaacttggatttactgtttactcattattcacttgactcatgtaaccttagaacacaaacttttcactgaagtagttaataaatttattttctattgagtcaaatgctaggtacggtgctaagcactgtatatatcttagttaatatttacaatagtcctgtaaggtaaaggctattatgcctattttaaaaattagaaactgacactcagagaaactgaggctcttttttgtctgaagccaaaactgactttcctggggacacatgattagaaagtaccagaacacatttgtgtacaactcaaaacccagtgtttggctgttgaagacagggtctcgctttgtctcccaggctggtgcacagtggcatgatcatggctcactacagccttgatctctatccggggctcaagtgagcctcccat

SEQ ID NO: 13742 - DNA, 1209 bp, Homo sapiens
accttactagttgaatttggctttttgccgatgagagtcttaaaacagattttatcatccaggcacaatggcgtgtgcctgtagtcccagctactttggagtctgaggcaggagaatcgcttaagttcagtagtttaagaccagcctggggaacatggcaagacccccatctctaaaaagcaaaaacaagaaacccagattttatcgtggatggaatacatgtataatcttaccatttgcagaagagaacatttatctagaggtaacttacagtctaagttgtttcacacatgatacatagagaaaaagattaatttctgtattctctttctttaggtctaaattacattattatgggccaagtaggtgaagatgggcgaggcaaaatcatgccaaacagctttatcatgatgttcaagaccaagaatcagaagctcctggatgccttaaaaaataagcaatgttaacagtgaactgtgtccatttaagctgtattctgccattgcctttgaaagatctatgttctctcagtagaaaaaaaaatacttataaaattacatattctgaaagaggattccgaaagatgggactggttgactcttcacatgatggaggtatgaggcctccgagatagctgagggaagttctttgcctgctgtcagaggagcagctatctgattggaaacctgccgacttagtgcggtgataggaagctaaaagtgtcaagcgttgacagcttggaagcgtttatttatacatctctgtaaaaggatattttagaattgagttgtgtgaagatgtcaaaaaaagattttagaagtgcaatatttatagtgttatttgtttcaccttcaagcctttgccctgaggtgttacaatcttgtcttgcgttttctaaatcaatgcttaataaaatatttttaaaggattacagaacaaccactaaacttctttttatagatagtgggacattgtagaaggaatattcccttttagcaataagaatagtgtgatttatgcataagattgcctttgtatcaatttacactttgctaaaagagcattccaagaatttcagggactaaatggatccagtaatgtcaatagactataattcttctctctgcagaaacagagaatgttagtgctagaataacatctctcagggatctagtccacactgtttcattttgtaattgaaacggaagc

SEQ ID NO: 13743 - DNA, 1180 bp, Homo sapiens
atttgttaccacagttcttttcctttatcttcttctttactttttttaatcttctctgcaaaagtttttgtgactaatttcttttttttttttttttgagacggagtcttgctctgtcacctaggctggagtgcagtggtgcgatttcggctcactgcaacttccacctcccgggttcggtccattctcctgcctcagcctcctgagtagttgggactacaggaacccgccaccatgcctggctaattttttgtatttttagtggagatggggtttcaccgtgttggccagaatggtctcgatctcctgacctcatgatctgcctgcctcggcctcccaaagtgctgggattacaggcgtgagccaccacgcccagcctttgtgactaatttctaagtagaaaaagttcgccaatttttttaataacctggaaagcattttattagtaagtggtaagaagtcactggacccaaagaggaaatattttaatacaatttaaagccatcttaagtatgaataagcattattcacctatcactggcactgactttttaaaaggtagttcagtccaaagatgtgtggaaattatggtcaaagccaaaattacctttgtgtccatctgtgatgctgttgctattatcatcttcacctggattactgtgtttgagtcttctctagctaataggaattaatgtcctttatcttccctgaagtagcaaggagggttcttgcccacttgctgctcggcaagattgggtaccagctgtcataggtaataataaatccagtgaggtttcctttgattcacatgttggaaatgttcttttaaacatttgcttgtatggggaatgattgattgcctatttaatcaaaattttctattcacgtgaataatttaggacactattattggtactagtgcaaaaaattgagaaatactaaaaacctaacactgactttgtagatcagtgcttctgtgcaacctcttcaaaaataaccacaccctgattaggccgtgcacggtatcacacatttcaaacatacttcaagaagacactgccatcaattccacttccctgaataactggtcctgaaaatttgacttctttacatctgatagaaatgtcagtctccttccctcaaaaggggaacaactctatccactcagctcaccctccta

SEQ ID NO: 13744 - DNA, 1152 bp, Homo sapiens
atctcagctcaaacataaccttagccttctctgacctctttaagtgaaacttagtatgctaatagtatgatacgcccttttgctgtagcagttaccatagttacagataagtatatattgttgtgatgatctgatttcctggttcccccacccctgcaaaacaacagcaaaaacctttaccaggctctataacagggggaccaaacttgtttttgctcatcattgcctcacaaggtacctggcaccagtgagcacttggtaaatattagataaatgcacaactgactgcttctttagcaaactggatgatagaatatgttcttacattgtacctcagattgtgggtatccagttatgttggcttgtactggattacaaattaatcttacaagcaatgtgacttcagcaagcaaaggaaaatgttataatagtacacatttccataggatgttccagatgaccttgatggtgcccccatcgaggaagagcttgatggtgcacctctggaagatgtagatggaattcctattgatgctactcccatcgatgatcttgatggagtccctataaaaagtcttgatgatgatcttgatggagtgccttgtaagttcagatttcaaactgattaaatctagctaatacatttggtgaccaaaactctaatttccatacatgctgatatggaaaaaggttatagtttctcatgaacgtatcaagttattaacttttctatttctgatttttttcaaaattcatatacccagtaatacatttatttgtatgctatgtatataaaaggccaagaagaagcatttttttctggtcacatttctttgctgggacaatcagcctcctataatattagcaagtttctctttttgtcttgtcaggaaattataggcaaaatcttgtgctcagttatgcatgatcctaggtacctggttttatcagtttttattagtttttctaacttacaacttcagttttcctagctgcctaaaatcattttgaaaataggaactgtagacagctctttggtacatttgaattatatgtttaaatattgaataatgtatgcagttttatatttcagagattaggtaaagatattaaagatttgttttacttctcaacttcttcacttgcttaata

SEQ ID NO: 13745 - DNA, 2233 bp, Homo sapiens
tccatcctccagagattttgattcagtagagcagtgataaggcacagaaatctgtctttataaacaagcgctctactgatgatcattgatgcagtgcatagtaagtacaaaataatctgtgtgtgtgtgtgtacaatagagtttaaattttagaagttcatagtcttattgcagtgatttttcactgtgccctgttaaagatcattttcgatcgtttaaggataaacagttttgatcacatgagtactttatcaattgggatttttttgtttgtttccttagatcaccatctggttcaaggacacctaaaaggtctaggcgatcacggtctagatctcctaaaaaatcaggaaagaagtccagatcccagtccagatctccacacaggtctcataaaaagtcaaagaaaaacaaacactgacgtaaatttttaagatgctgtcacttattggaaatgcgatttgttttgtgcctgaacggtctgttttttaaaaaaacaaaaaatcaaatgaaagagcattcctggggttttttgtttgtttgtgtatgcatgtgtaaactcatgagcaactgcatctgtagatctgtcattgttttatattgtgtaaattactttcattgtggctatttctcaagatgaaatttttattgttctaatggatttcatcagaaatgtgtataatggatctgctgacagtagtagtattttgttttaggatgttgtgacttagcaaaaataatacagatgtcttccccccttttgtagctttgacaatttgaattagatttcaaataaaatctgaacagaaaactataatgttgtttttttgccccaccggtgatattaagtcccttaaagtcctactgagtttcacactactgttgtgcttcttatacctgatgcactttataagccccagtgttcaagtagcttaagttttatatttactaagatgactatccaaattaagggacctgagactcctatttggtggtttgctaaccatttgcttttgataagtttctcttgggtaatactaatacccagatatcaaagactaggtagatatggcatggcgttttgttagtggaatgcctggctaaaacatttttttcacagaagcaatatgatttccatacatccaacccatgttctgagcaactacttacttttagggggaaattaaatatcttttcatttcctcttctattatgaaagaagtttatttgtaaaacaaattttctaacaaggtttggccatagaattctcttgtatgatcgttgaccttttataatcttctgtaggctatctttcaaacactggcatcagaatattttttataagtttgtgtttaaacagcttagttggtccccccccactcccaagagacttgggtttagttatagctttaagtaaaatttaaaaataaaatgtttttcaggaaacttcgtatctaatggtttgtaaattcaaggtgcaaaaagttgatttaaaccatttgcagagttgaactctattatgaaaataaatttgctacggtatgaggaagaaataaaacttgtgtaatgttggtcataatactgctataaatataataaagggttatgtagaattgaactgacactattatttgtgaatcttgatttcagttttttatgtaggcacttcatacactggtttgatgggttttttttttcctccctaaaagagaaagtagaaaactattctaacaatggattattttgatttagcttgctttttaaaaaaatcttttcaacttgttttacttaatcttgcctagtcacaaaataagatgtgcacccatggtttggagagttcctatattagctgagcagtgagatacactatttccaaacggtgcacacctacagtagctttggaaatgagccaatcactgttttacttaatggttcttatcagcatgcaaatattgcttgaaagttatttccttattcactgttttgttagtccattttgttaggaaacattaattcctaaaaatttgttcagaataattaaaagtgaacatttggtgctgatactcaaaaacctacaaatgtagccatttaaaaagtaacatgtttttctcccctgctcattgcctgggagaatggaattttatataactacctttctttgcaaaaataacggtcgtgtcgagttggtggtgattttggcattccatcttgcactggtttctagtataggctt

SEQ ID NO: 13746 - DNA, 2009 bp, Homo sapiens
aggctctttaccctccaacttaatgtttatacacagggattgtttactaggttaatgacatttaactcccctctcttctgtaggtgagagaaaataagtaagtcttgatctgtttcttaccaaagagagacagacctatgatggaaaatgatcacgtctctgaattttttctttaacgttatagttccttattacagatagtaagcatatgggaatttctgagctataacatgttgagaagttagaaattaaaactaacacaacaaaaggcgctgaatcaaaagatctttgcttttatttggctcagaatgtttttggcttttctgctaaagatggcagaaattactctacacagacctgatttttctttattgcagaccattcttgtgggcttaccctgagacttttatcccaattagtgaatcttggagggaatacttgcttatttatgacttaggtatttccccccaaactttaatattcttgagcacttgaaaatacttttgagaaattttaactgtgattaaatttaggtttattagaaatattctgtacacatttgcctccatggtggcgtaagttctgaaaaattatatgaccgtgacaatagtttatcatcatcattattgttattcaaaataagggtaaataaatctctgtattgccaaagtgacttaaactgttctgatgaccacacagtgtgatttctttagcagagaaagttggttttaaaaataaatagtaccacttttctaagactgtacagtttacaaataaggtttttttctttgttgttttcctcttctattaagttttagtgaaaagcctaattacagaaaattgtgcagatactagtgaagatactagtataagtttaaaggaacacgtgactgtaaaatctcacatttacaaagtgcttgatctcttcatatttcacacgcatgttttagaatagattttagggagtgtttaattcattatccttttgacttaaaatttttgttaccaacttcctaggacttagataatatataaataagtacaaatcccaggggaagtgttgtgatgctagactaaaaggtgggaatgtgctgctgttccgtgagccttgttccattgttgaaaatttgatgcctcagtgtttattcagtaccacctcatggagcttcaatgtaaatggattatatgtataattggtaatttgtatagttttgtagattgtagattaaatgcactcatcatgtcacatgtaattgtgcttggagtatttgtgttttattcttttacttcaacgggttcttgtctgttacatctctggtgatttgaaatatcaggaaagacagtttgtcagaaatgagaataatatagttgaaatcagttgggctaaaatattctacagcaagacaatttcttttgggtgaactgattctataatttacttacttttaatgtaaggattagatttattgttgagctgctttccagatcagactgtcactttatagtttttctacataaagattatatagttgcaaacaaaggttgtgaaatttcccttttgttgtttttgacttttaattaataaaagtacattgttttcatagcaaacttagactgtccatgtaattttctccatattgtttttccgatgcaagcccagttaataattagttttttagcagctttctctcaagtgaaataagtgatgtgacatgtttatcagttatggctaaaatgttacactttacatgtttaaactataatcatatgttttcatgctagatggttctcttggttaggaaagttcatttccttattggtttccttttttaaaagttattttattctgtttaattgaggaaaattttaaacattctacaaaagtaaaatagtacagtgaaccttacataccataaacatgcagataacaacttacatgtatctctaaatactttgtttttaaaacatacctgcagtgtcattgtcacattaacaaatcattgggtcct

SEQ ID NO: 13747 - DNA, 1201 bp, Homo sapiens
cctcccagcctcctcctcctaagtaacgcccaccctcggttctgcccggttcctccgctcacctggagccgagggcgcgcccgggagcggccccggatcaccgcccggcggactgtccggctgtcactcgttcctcgatttcgctccctctcgcttccgctgggggtccccgcaccttcgaggggtctggggagtcggccgacttatccctgggcagtttccgggcagcgggcgccctgcggctcgggaagaaaaactttcacgcggcccagagccccgctccgcgctccgccgaacccggcgcctcccggctccagcgacgtctcctccgctttctcgggaccgcagcttcctgtctcgctcaggggaacgaagccggctgggggcgatggctgggggcggcttatatgggactcagctcccggcatagcggcgcagcccctctcgctttcggcctccgtgcggcgaattttcccacctctctggcagcggtggatggggcacagcgcgaccccgcagcggcggcggcggctgcttccatcaccgggaggatgcccgggcggacagcgcaggcaacccccgccgctccgcagcctccgactggaccaaaggaccccgaacacacagctctaggcaaggaaacccaggtgtgcagcactgcccgacccgacccaacccgcccccggtaccagcgcttctggccaacgaggtatttaagcaaagaaagaccccgccgcagccgccgccgccgcgcgaaagcggcgcccaggaggatgctgctacccgactccccttacgccgggcgcccgcaacgcgctcggaccagcctctgcgcggctcctgccagccggcgcccggttggtgcgcgccgccgtctgtcgccgcggctcctcccctccgccgcgcagccctcccccttcgccggccccgcccccgcccccaacgccgagccggctcccaccgtcgctgcgcctcgggggctggagacgcgacccgctttaccgcgacgcgcgggggctgcagtccacgggtccgaaggcttagctctgcgcgcaaagcgccgggatgcgaacgcgggatctggagctcgtcggtgccgagagctgccagagagttggattctgcgtgcagctgccggactcggccccatgtttttgctctcagaaagagttggtgatgaagtttgggcagaaatcccctg

SEQ ID NO: 13748 - DNA, 1319 bp, Homo sapiens
taattagtgaaatattctatttttggaagcaatgaaaactatttaaaaaatttttttctacttctgcttttcctcctttcacagataaacctgaaaattgggatgtatggtatgaaagcaagtttgatgactgtgataaggaggcttgcttatcattttcaaaagaaattctttgtgctcgtgccactgtggaccacaattactatgctgtttgtcagaacctcttatccagacatgccacctggcgtggcacttctggaggactccttcatgatccaccaagtgaaattgccaaagatggccggctcgaggccttgctggatgagtgtgccaacccaaagaagcgctatggcagattccaggctgcaaaagaactgcgtgaatacctagcacaattaagtaacaacgtgaggtagtctatggtgaacttttctttttttctccatttaaacagcactggctaaaactaaaccaccaaaaaacgatctgaaaaaatgaaatttggaagtgttacattcagaggatgataaacttgcactgatagatcttaatgttaacatccatcaaaataagacattacttcaaaaatcacatgatgcttctgcaaataagtatgttcttatactttggaggcttgagctgtcatcagctgctccccactaccccggaatgcttgagtggattaatgaatattgttaagctattggaaatgagtctgatagtacattggcttgtgtatcaaagggtacttggtacttagtttgcatttactatcatgattttgtgaatctcttgcatttactttgaatgtcaagtcagattggtctgttttataggccgctttttccttctgatgtgtagggttttttccccctttttttttttaattaaattttgaaaattcaggttactgtaggtgttcatttaaatttttaatagttgtcattcagtgctatttggtacatatttactgttagggcaggattcccaggtttactgtgttttttttttttttttttaaagaaagctaaatattacattatgtaaatacttcttttcaccaacttctgtagtttcaccattgcatggtgtcatttcaggttatttaacagttatatccctctatgccaataattagaagtgtacactaaacatgaagtttggcatatgttgcaaaatgtcattttatcttttctaaaggctttaagaagaatatactagaatctatatattgatgttaattttgattcagaaaaaaaatacaacccagtatctaaaaagtgttaactagtccaagatagtaatgcatatgccaaaga

SEQ ID NO: 13749 - DNA, 1165 bp, Homo sapiens
attgccaaacactcacctcttactcaaaacttcaaataaaatacacattttcaagagggagcaccttttatatttgataagttttcattataaaccttataataccagtcacaaagaggttgtctgtctatggtttagcaaacatttgcttttctttttggaagtgtgattgcaattgcagaacagaaagtgagaaaacactgccagcggtgattgctacttgaggtagttttttacaactaccatttcccctccatgaaattatgtgaaatttattttatctttgggaaaagttgagaagatagtaaaagaattaggaatttaaaattacagggaaaaatatgtaagtgaaaagcaataaatattttgttcactttgctatcaagatgttcactatcagatatttattatatggcagcaatttatatttttaatcattgcccattaatagacgcagtaaaatatttttgaatcagacatttggggtttgtatgtgcattaaaattgtcttttgtactgtaagttactgttaatttgaatattttattgaactgtctccctgtgcctttataatataaagttgtttctacaacttttaatgatcttaataaagaatactttaagaatcacacttttcagactatttcttaacttcagatatccacatttttcttgagtggaaagtgagtttgagtagataagttactagtttcctcttgcatgcactttaattagaattttgagggaactatctgattgggtgtgcaccaggctttaaggttatgtgtgttttctttttctgtagtagtgagtttttaaaaaacttttaccactaaaatggaattaaaagaaaaacttcattatggaaattttcaaatgtatgcaagagaataacataatgaacagtagtatatcattacactaacttcaaaagttaacaacatgtggcaaaactagtttcatctctaaactacttgcttccagcttattttgaagcaaatctgagatgtatcattacatctcagatttatattacgcattttctcctagtaaaacacaatactttttttttttttttttttgaaactgattctcgctctgtcacccaggcaggagtacagtggcacgatctcggctcagtgcaacctctgcctcccggggtcaa

SEQ ID NO: 13750 - DNA, 1115 bp, Homo sapiens
ttcctgttaaaaatggaacaagatacattgcagtgtcatttatagatccctaagttatttacttttcattgaattgaaatttattttggatgaatgactggcatgaacacgtctttgaagttgtggctgagaagatgagaggaatatttaaataacatcaacagaacaacttcactttgggccaaacatttgaaaaactttttataaaaaattgtttgatatttcttaatgtctgctctgagccttaaaacacagattgaagaagaaaagaaagaaaaaacttaaatatttatttctatgctttgttgcctctgagaataatgacaatttatgaatttgtgtttcaaattgataaaatatttaggtacaaataacaagactaataatattttcttatttaaaaaaagcatgggaagatttttatttatcaaaatatagaggaaatgtagacaaaatggatataaatgaaaattaccatgttgtaaaaccttgaaaatcagattctaactggatttgtatgcaactaagtatttttctgaacacctatgcaggtcttatttacagtagttactaagggaacacacaaagaattacacaacgttttcctcaagaaaatggtacaaaacacaaccgaggagcgtatacagttgaaaacatttttgttttgattggaaggcagattattttatattagtattaaaaatcaaaccctatgtttctttcagatgaatcttccaaagtggattatattaagcaggtattagatttaggaaaacctttccatttcttaaagtattatcaagtgtcaagatcagcaagtgtccttaagtcaaacaggttttttttgttgttgtttttgctttgtttccttttttagaaagttctagaaaataggaaaacgaaaaatttcattgagatgagtagtgcatttaattattttttaaaaaactttttaagtacttgaattttatatcaggaaaacaaagttgttgagccttgcttcttccgttttgccctttgtctcgctccttattctttttttggggggagggttatttgcttttttatcttcctggcataatttccattttattcttctgagtgtctatgttaac

SEQ ID NO: 13751 - DNA, 1158 bp, Homo sapiens
gcattgaaaaatccttattaagctttagacaattacataagtttaagatgtataaggtaaagaaggtgatttttttcttgatgccctctgcaattccctgaaaaacccattttggttcagtaggaaaattgcttaaaggcccctcatcaaggagtcactgagcttcaatgttgatcataaagatttcctgccagattgaaaaaaaagtgatatgggaaatttattcatttttcttctttatggtctaaacaaataggaataaaatgatgtaatgtgagaaatactttctgggtctacttccttggattagactcacaacttttgagatggtaaaaattgagaagggcattttggggatggataacattgaagaattatgatctgatttaggcatctagatttttttttctagaatcatgattccatgaaacattagaagagtggttacggtacagtactgttcaagttgatgatgtctttaagtttttcatagtactttcataatttgagttttgctcaggaatgaaatgttgattttgtttataggtccttggtcaaggagaagaatggagaggtggtgatggaattaatagtattggagggggccagaaagtgagattaatgaaagaagtcatggaacactatgctgatcaagatgatctggttgtcatgtttactgaatggtaggagaaacaccctgtggattttaaaatctatattcaattactttttaaagagctgagatttatatttgtagatgatgtattaaaatatggttgggcacggtggctcacgcctgtaatcctagcactttgggaggcctaggcagctggatcacaaggtcaggagttcaagaccagcctggccaagatggtgaaaccctgtctctactaaaaatacaaaaaattagccgggcgtggtggcaggtgcctgtaatcacagctacttgggaggctgaggcagagaattgcttgaacccaggagcaaggttgcagtgagccgagattgcgccactctactccatcctggcaacagagcaagactccatttcaaaaaaaaattattgacaaggaattattgttttaaaaagtagatattactattctgtaggttgcccgttcgctctgatggtagtttcttttgctgtgcagaagctct

SEQ ID NO: 13752 - DNA, 1279 bp, Homo sapiens
gtcataactgtagcaacaaaagaaagtgatggattccatcgatttatgcagtcagccaaatatttcaattatactgtgaaggtatggtatatcctttaacctatgaagatcctataatgtgtgcctaaagtatgtttttcataacagcagtacaatctgtaatcctcacaaggaagatagcatttggttacataattactgttagttcatgtagtttttggctttattaatatttcctaacacaaagaaatggtggtaaatgcttgaggtgaggggatagccaaagtattctgatttgatcattacacattatatgcctgtatcaaaatatcacatgtaccccataaatatgcaactattatgcacctgtaataattaagataaaataatgctgtgccactcaaacaataatttctgaatttttgccaatgctttgtataaatatactctataaaacagcaaaaaaaagttaatatgtatttgcatatatatatataatttctttctggcaggtcatgtacaaatacaatgtaaataagatttggcagggatttttttcactgactgcataattttttctgtaatgggttttgctatcgtaggatgattctttgtttgcagggaattagaaacaaatgtgaagagggtgccttttctgtctattattgagaattgcttttgtttttgctttttttgtttgtttgtttgttttcatttagaggtatttgggaggattgttaatgtatttttaaccaaagcattttagaaaacttatctccaggtgaacatctcattgacaagtgatcagaggaaacttggggaaattgatagaactattaaactcagctatgagaggcctgccattttatttacttacttgttttttttaatagaaagaaggatctgtcagccaagtcttttctacaaataagaggagaacaaggagatacctaggtaggaacacaaaaagcaaaaaactttttttttaaaaaagaagaaagattactttttggagaaaaactgatccatttgagtatgtagtatattaaaaaggtagtttttattaaataaccactggaatactaagtatagatgtaaatatagaacagctaagtgttaatatagaacagctaataaacagctaaactttgctgaaaaagagatgtagtggtaacaactagatgtttaatataggataaatgaaaaacatgttagaaatatgttactatgatagatggaaaatgtagcagtatgcactgataggagacactgtggaaat

SEQ ID NO: 13753 - DNA, 2489 bp, Homo sapiens
agccatattctttatataagaaaaccatattgggtaaggaaagcaaagttcagttctattaaatagttattatagtttggtgcaaaagtaattgcggtttttgccattaggcaaatctttcatttagtttttttaataaagattttaaatactatgccttaaaaactacttaacttttttttttctttttaaagttcattgtaaaggactctgttgaagaaaatatgctgaaaatacaaaacaaaaagagagaacttgcagcaggagcctttggaactaaaaaaccaaatgctgacgaaatgaaacaagccaaaattaatgaaatcagaacattaattgacttataatttgtgggattttagtaaggtcagtttgattggatacttaagttttagaaatgagaaaaatacagagttttagaaatgagatctagagaacacgtcttctaaaaggggcatattttatattagtgaagaggtattactgacacaatttcttctatatatgaacctatttttaatgaaacttcaaatagcaataagttccgttatatactgtggcctgaaataatttgagaaaaaaggttactttgttattcagcttttcataatatctatgctgagtattttcacgtatcttccaagtactcagctttttcgtatttcaaataaggtcagaccttttatacttttgaccaaatagttattttctatgttggacacttagttatttaccaaagcctccgatttgtgatgcagtgtttgtagtccttgtaaacaatatatacagactatacaagaattaattttattgggctttcaaaaaccatatttgcattccagaaccaaatcttaaatgagaccaaagtccaggttagcacaggtttttatttttcctacagctacattgagatatagttcacataaatgacttggagttttatgttcatgaaaaaattagggattatgttaagagtactattttttccattttagttaagtagtactacactcattgtttaaatgtaacttgctgtgtctgaggtataaatatagtctgtgggagtgagaggcaaaccagtcctacccaatttgatttgaatattttaaattatggaactgctaaatagatatttctataaatagataatttttatttatgtagctttttttggaagtaactttataaatttttataattcagaagactactatatgtgagaggcgtgatatctggatggaagttgggctggatgatctccaaagtcgtttcaactcttaaagacatcttaatcctgaatgtaaacaattgttatgtgtttagaatcagaatttgattttgaacttgagtaattcatccttacagctatctgtagaattagtcatcttttttcttttcttttttttttacttttttgttaataagcaaacttatttgctgcagaatttgggttgactcctgagcatatttaaaacaaagaagctagaaatttagcagtcagattaggtaggtggttttatttcaaagggaaactttaatccaaagaaagattaattactctaacaaacaagagaagcttcatgtttgatgatacagatttaagaatacctgagacttaagagtgttggaagtcatttgatagaaagatgagatcggagacaatgttgtgttatagggcacacattgaaggtatatgccaaatctctcaccagataagtccttttctccctgtgccgttttcttgctcaaagggaacagtgaattagccagctagaatcttcctggtccctttttgaggcagtagcaggtaaggaaagggctgattttcatcaaaaccaagacctttctgcagggatgatagtggaataataatgtgggattagcccgctagcattaggagcagttgggaagttacctggtagatcaagcattacacacaaaaaatcaagttgatcagagtatgggttctccatatagcaatacttcagtgagattaagtataaacagtttttggcaaaaaacaacacagtctactctttctgcttacaaagacaaagccttacaaactcactatgaaggtaaagggaggacagcttgcttctttgcccagacatttacaaagttgtttttaaaacacactcataagtaagtttggcaagttgtttaaaaaatgtctctttgttttgtacagttctgttagatgttgttatattttaaaagtttaatttaaaaaatttaatttgtccttcctaagaaggataaatatataaaaaagccactggaatgaaaacttcctatatgctatgctgttgtcttattattatatagaaaaataactttagaaaaatattgaagacattgtattaccacttgtgattcaaacaattttgtggttaaaactggattttaaatttaaaaatcaataaaaatttcaaatgtttattaccttcctcggtgccataattttgactttatcttcaaataaaatc

SEQ ID NO: 13754 - DNA, 1102 bp, Homo sapiens
aaccttcacctttggcagtctgaaggtctgtggtatatatggtgcccggccatgttatttatagatttagttattcctatttcatgggatttggttttatgatctggctgtccatagcttactctgtagcatgtgaatatatttatcagtagaagtaatggaacaaccactgctagatgaggggcttctagtcctagtcctcatagttactagttgaatgaccttgggttaataataccatctctgagtttcaacatcctcatttgtaaaatggggatgataatacctaccctgttgtactttatcagttgtggagattaaatgagcaagtgctaagtcttttcacaaccacagtgccttgtaaatgtgtgcatattataaataaatgaaattactatatgtctaattggtgagaggatgttgtaaaatctaattttcattcaagcaggactgttacattttatttttttaaggcatcagtaatgaaatttcacagcttgagtcagatgattttgtcatctgccagaagcccctggaacttcttggtgaaaaaagtgaacagtctggattatctgttacactggagtctacgggattagctgatgaaaaaagaaaatattcccactttcagcacctgctctataggtattatagtgctttttttttttttaccagcattttatgtatatatgcctgcttaaagtacatggaagttatatttttccctttctctgtctttttaaacccacagacgttttgctcctgatatttcgtcctatgtcttgtctgatgacatcaagctacattccctccagctgctacccatttaccagaccggtaagcatgacagtgcaggagtgcgacagtgcagcaaggtgaaaatgctctgtctgggctgggagtgaagacccatgtgggtaataggtttggtggtttggttcttccactggagtctccttgtggccctttaacaaagtttttttttttgtttttttttttttttttttttgagactgagtctcgctttattgccagtctggagtgcagtggtgcgatctcggctcactgcaacttctacttcctgggttcaagtgattctcct

SEQ ID NO: 13755 - DNA, 1162 bp, Homo sapiens
acctatgtagattttataaaactgatcatgttcagaatataattttgtattgaaatttttttactcattttatcataaactttttttattaactagcctttgaaaacatagttttgatggctgtgtaatgttccattatctgagtgtgccatatgtatttactcatcctttgttgttaaacatgtagattacttctaaattttcaatattgcgaatactcttgcggtgaacatcattggacgtaaatctttaaccacaatgttgattattctcttaggatagagtcctaaagaatgcccattggttttaatttgcagtccacacaaagcaaataaaatcatgttatttaaaaatgattgctttctattaaagagatctttaaactagaggtagtttcaagattatattatacttagatttattaaataaggaccacgtgcatgtgctctaatatggcattctttctattttatttttggcaagtgaggtttagtcttaagaaattgaattctgcatgttgtgttttagtttttgaggtgcctcatttcataacatttcacttttctgttcatagtctcttatatgtggtccttcatttgacatagcttccattattccgttcttggagccactttcagaagacactattgccggcctcagtgtccatgttctgtgtcgtacacgcttgaaagagtatgaacagtgcatagacatactgttagagagatgcccggaggcagtcattccatatgctaatcatgaactgaaagaagagaaccgggtatgctttttcagattatgtttttaggcttgatcagtgataatcagatctgataacctcatttcctttcctgcaaaatggggacaatttatgctaatccaacatcataaggctgtgtgggtccattgagcatatatgtttaatatgttacgtgttttgagtactattaaatgctgttaaaatatatggagatggtatattatcatcattaaacatcttttgtttggagatgaagtagttgattacctgaagatttgggaacagtgtatgatgggaaaatattttctctgccatacggtttttagtttagaaattagaagaattttggaccttagttcttttttttcttcattccttccttcttgccacataggagatgat

SEQ ID NO: 13756 - DNA, 2314 bp, Homo sapiens
acacctttgtcatgggaaggcacagatcatagatcagatccacagtgcctttcacatgctcctttcttatctccttggccttttccattctggaccacacctatccagaaataattttcgatttcttccacatctctgtacctcttatgagtaagggtcaataatgtggtagttgaagacatgaaggtgagggttatgtaaatacttgaactgttcctccttcaagagcctaaaagaaggaattaaaatggtttcttttcattttgttataggagaaaacgcaggacaaacacccatgaacatcaatccccaacagacccgtttccctgatttccttgactgtcttccaggaacaaacgttgacttaggaactttggaatctgaagacctgatccccctcttcaatgatgtagagtctgctctgaacaaaagtgagccctttctaacctggctgtaatcactaccattgtaacttggatgtagccatgaccttacatttcctgggcctcttggaaaaagtgatggagcagagcaagtctgcaggtgcaccacttcccgcctccatgactcgtgctccctcctttttatgttgccagtttaatcattgcctggttttgattgagagtaacttaagttaaacataaataaatattctattttcattttctgcaagcctgcgttcttgtgacagattatacagaattgtgtctgcaggattgattatgcagaatacttttctctttcttctctgctgccccatggctaagctttatgggtgttaattgaaatttatacaccaattgattttaaaccataaaaagctgaccacaggcagttacttctgagggcatcttggtccaggaaatgtgcacaaaattcgacctgatttacagtttcaaaaactgtattgatgacagtagtaccaaatgctttaaaaactatttaacttgagctttaaaaatcattgtatggatagtaaaattctactgtatggaatacaatgtaattttgaatccatgctggctctgatggctcttattagtctgtatttataaaggcacacagtcctattgtagcttatctttcgttattttactgcagagcatctagacaacttagtccctccagcgggaaagtagcagcagcagcattagtcacaggtcttacactacagatcttgtgaaagagaccagtttggtactaattatgagcattttattcaaacaaaagtttttgaaatattacaactggggatttaaaaaattgcagcttagaatctgatggtttttttttttcttgatgttgtttgtttgtttttgagatcgagttttgctcttgttgtccaggctggaatgcaatggcacaatctcggctcactgcaacctctgccttctgggttcaagcgattctcctgccttagcctcccgagtagctgggattacaggcacctgccaccacgtccggctaattttttgtattttgagtagagacggggtttcaccataatggtcaggctgttctcaaactcctgatctcaggtgatccacccatctcggcctcccaaagtgctgggattactggcgtgagccaccgcacccggccttgatgtttattttataaagcactgtaattttgtagctgatgacaaaaggcagccaaatgtttttgataaatcagtggcaactgtatttttgtcttttgaaataactctgaaaacatcaggacaacatagatttcaacctgatagcacaccacacacagtgagctgttgctttttaaattctgaagccttgtcaggtttgcttcctagatttcaagtgtttaaaataattctatctatgaaactgaaggatgaagcagatctctgactgacatgtaaaaaaaaatgccctttgagggtgtatggtggagataaatgtttctgaattcagtaaaattgattcctaagtatattatcctaatcctgtttgctacagttggtataaaaaggcatgaaatatgtattcaatacctcttatgtaaccaaaaccatttttaattagcttttaaggactgagagagcatcatgttcaactggcatgcagtctgcctgcattgccaatgaagtcctcaactgtttaatattttgaactaatattatttataatctatgaatttaatcttttttgaaagactttaataatttgagtctctgagaggatactttcaatttccatgggggacttatttgttggggatcttaaataagattccttttgatctaccggaatatacatgtacagagtacattggatcatgttggaaagaaggcaag

SEQ ID NO: 13757 - DNA, 1104 bp, Homo sapiens
tatgtcacccaggctggagtgcagtggtgcgatctcagctcactgcaacctccgcctcccgggttcaagctaagtttccagccttagcccctggggaagctgggactacaggtgctggccaccatgcctggttaattttttttttttttttttttgtatttttagtagagatggggttttgccatgttggccaggctagtctcaaactcctgtggcctcaagtgatccacccaccgtggcctcccaaagtgctgggattacaggcaagatgctcaaaatcttttatcaattgttgaccctttaaaatccccacaatatatcttgacggtaaactaaaatggtatttagtttataatggaaagcattaataggatatgtagaatattagatttagaacccgggcgtatgaatcttagcataatgcttcctgggaaattctgaaattgattccatttctgccgttacaaacacacacgaagttcctagttcactgggacttcctgatttgttcttttagcttgctccttctcacctagaagctctgtttatttctgagcaaccctggggcttgtctcataggacaggatttatttatctcatcaaggctgagtgtgccttaggaagtcataaacataaaaagagaagaaaaaaaaaaacagaatatgagagttgtaagccttcctactgctgagatactaagttacaatgggttgaatttaggatatgcaatagtctggcttctaaaccctgatagtgtttatttatagcaggttagtggctgtggggtagggaggttatagaggattagcgtctcatggaaaggctcttatacttaaaagtggtaccactggctcagggcagtttcagagggtatgtgccgggaacagggatattaattgcggagctggctggcctcgtgctggaagagatggtatcaaatagagcagcttaggccctgctgctgctgattttcttttttacactgatgatatattagttactttagtattttgtgcaaagctatacaaatgtgtgtgaaatcctttgtcatcccccattctgctggaaagtgaagtaaaaagctacttgtattctagcaatcgt

SEQ ID NO: 13758 - DNA, 1764 bp, Homo sapiens
ctgatgtgtaagcagcctctccccatctacctagcaactgtcttcatcaacaaccctaattatggtcacaatgctaccaaactgtagatggtagctaatttttctttacctattttctaatgtcatgattcctgtttgcccaatggatcatttgtatgttaaccactgtatgtaaccaacccttatctggcaacataattgcagcacaataatgatttgcatgataccttgaaattggggggagggggcatgccaagttgggcatcactttgtcttagcaattaatgggatattgattactaaaataagttaatattaagcaaggtgccggttgtacaatctctgatcagtgtcttttcagcactttgagcatttacttggctcatttagtcttccttttgtagcgcatggttgggaggaaaaagtgcatgcatcattccttcactcttctctttttcccgccccccctcccttcgcacataggcatttggtttgcttccatctttttttatgcagtgcctgtttttttttaaccaattaaaatcccttttgttgatgagctattgagagctgcagtagtttgcttttagtattgttgttgcacttgagcagagacaaacctttattcatagtgtctacaggacatatgaagagtgcaatggcaaaacaagagcaaaaagcacttcctcccatgaccttacagtaaccatactgattgaatccccagggacattccatcattgcaatagctcagatttttcttcctttttctttgcacaccagctctactctttagtaaaattgtaaaaggctgccattatggacattaggtatcccaacataaccatctggagtgtgtccagtttgttcttcataggaccaatttttatttgcagcttgagtttttatatgaagttgcattattgtggacttggctgtcttgtgatgaatttttttcatatgtattctgtgccatactattgttaaaatgaactgttgctattgtgagatggattttaactgacctattaagggtttctttcgaatggcactactttagggacattctagtatttgcttctattgtttgggccttgtggataatgtacagatttaaaaacaaatcttgttgctgatttgtccatttctttccctgcactttgttacatctgggatacagtctaactcatctgatttaatatgcatttaaaaaaatgccataactattaaacaccttgtttacagacagatgaaataaatttattccaaccaaatactctaggctcctgttgtttatatacattgtttatataaactgttaaaagttgatttttgacaaagtgggaatacacagaataggccaaagtctgctgcaagcataaaacttcagcaatattaggtgatggcctacttcaagtaatattacagataaaattagtgcctgggaatttctttttaatggactctgatctgttacacatagcttttagtcatttcaggctcatcttcaggagtatgtgagaagcaactgacttatctgctagaaaataagtattttcctcttcttgctggtttctagatgtgaaatctaatagtaaagggagtaccaagaagggtttctgcactattgtggatttttctgtattgaaatgtcatatgactttagatttggaagctgtgttggcaggctgaagtcagccagctggggccctcccacataagagcagaagacattccttaggcagcatataagataattgggat

SEQ ID NO: 13759 - DNA, 1100 bp, Homo sapiens
ccttgtcagccgactggagtgcccccggctactgtgggaggcgtggtgcagccgtgcctcggtcctgccggggctgggcagccccagtccgtgcctccgccgcagatgggtggcagtggtccgctgtcagccgtacctggtggccctcacgccgtggtgcccggagttccaaacgtgcctgcagccgtgcccgctccaagcgtgcctagtgtgtctaccacttctgttactatgccaaatgtacccgcgcctctggcccagtcgcaacagctgagcagccatacgccagtcagcaggagcagcagcataatccagcatgttgggctgcccttagcgccaggcacacacagcgcaccaacaagtctaccacagtctgacctaagccagtttcaaactcagacccagcctttagtcgggcaagtcgacgatactagaagaaaatcagaacccctacctcaaccaccactttctctcattgctgaaaataagcctgttgtgaagccgcctgttgcagattccctggcaaacccccttcagttaacacctatgaacagtctggccacctctgtattcagcatagctattcctgttgatggtgatgaagacaggtatggaaatctctattttaaatatttgatagaaatgcttggccaacattgtagcttaggatgcaactttgggagattgttgtcaacggaggcccttagcatttttaaatacaaaatttagtttttggtaaaattgatttagattgctgatgctgatgtcaaagggtgtaatgagcgaattggtcttgtcaccgttgtttaaaagcactaaaatgggtagggatgcaacattgtttactcaaaaaaaggtgaatttaagcttaatgcttaccatttaatggtggtagctagtgtgttatgctcccatagaattgtccttttcttacatatcaatcacacttgaacacgtaaggcagagagatttgtcagtgtgagttttgaggctgagacataataatactacaagttttcctttctggaaaaccagaaggtcctctagtgaaaaaaaaaatctatgtaaggaatcttctccagtgtatctggaaaggctgg

SEQ ID NO: 13760 - DNA, 1695 bp, Homo sapiens
tatatagctaggcactttattactcttttgaactgaaagcacactcccttataggttcatgtaactgtcctgtaataaggtgcttataaatggaacaactacacagcctagttttgccacaacctttagcatctaaaaagttttaaaagcttctaaatgtctaatataaagggagatgcttatagccacaacatctattttaccaatattgtttccattacactaccttggattttgcatgagtgagtatagtaacccaagatgccataaaaaaaaaacttgatcgttttctgacttaatcagttactgtggtttcactaaaagctaccgtggtggagtgaagtcagtcagggaaggtttgtttatgttacatttatttcaccagaactattttaatatatcaaaggggtttactatgccaaacaaaattctagggaaaaatactgctaaaaatggatgcctcatcagaacatgctgttgagtccaatgtgccataagacattttagcatgttaaatagcacttttaatagcaaaaaaaggcacatcaactgcgaagttatccttagtttgcaaatgctttttctagattaatgatttttcaatcattagggtactagacacatcagcctaaagtggcatctggaattgaatggatttactgataatgatcagtctttagtcttccctttgttatatgactttataggttatgattgatcaaatttacgttttactaatggtaagggtgagggtcatagggcaggttttgggttttctagtactgttgaaaactgcaagtattggctatttgtatacttagccataacttggtgaaaaaaaacctgagcagtgtctatgtattaatgcgttggaaagaaagctgcttgtgtttgctttgttaattgcctcaggatatttcttttaaaataagctgttttaagaggaacagaagggaaatctgctacctagtctatacacagcgtgaacctcacagggggcttctgataccctcaaacatggagaacagtaagggagcagagtggttaaggactttcaggaacttaactattctggaataaggaatgaatcaactgaccttgggccagcaggtttttaactaaattgttacttgcctttctcacccagttaatcagtctctgtacttgtttccctttttgaaacaagtgtcttggttaactaattctgttttatggttgtgctaaattcatagcaggtgccttattctttgcttttagtcaaaccattccatatcagaattttccttggtttactatagatatttggctttaagttgttgtttgtgttttttaatgtacaatgttctgataaatttgactgttaaattgctatagctagcaatcattttacatatgtaaaattgcattccctttgtatttcatgtgtaattcaccaattaagtgcagtttatattcaggttggattatgcatgtttaggtaaacgaaagctgtgtcttacttgatttattctttaaaaataaagttccctgaatatttgatgcttttcttctaaacggaaatgattttacagttatctgagtgtaccttttatagttagtagaaaatgattttaaagaatgtttagtattgtacttaaatggtatgcagaggcacagatgtaaggtttataactggaaataggtggtaagaaaaat

SEQ ID NO: 13761 - DNA, 1221 bp, Homo sapiens
tgctcctaccccatgctttttccactgtgttactgtatctcaccaggaggagactacagtgagtagtattggtgtgtagttatagtgatctttgataatgtattcagagtttaacatgttccttttaggttctctcatcaatctgatttaatttactcttttttttagacacaattgcaaataaattgcatttgcaaaaaattaatgattttgtattatcacctggaccccaaccatacaaggtaattgctgtttttgtttatgtgtaatattatgtgtttaaaccttttcctagttttttgtgattgtaaaaacatgtccatctcagtttttattcttcaaaaaattaagtaatgatttatgtctatgtatcttaggtggctgtctatgttccaggaagtaaaggtgcaccttcatttgttagattatatcagtaccccaactttgctggacctcatgcagctttagctaataaaagtttctttaaggcagataaagttacaatgctgtggaataaaaaaggtatgttaagtatattttatccctccctttgtttatcagttgttaatttaggctatattcctatgtgtataacagaagaatcaatgcccatttgtgttttaaatctaattaaagtttttactgttatagctactgctgtgttggtaatagctagcacagatgttgacaagacaggagcttcctactatggagaacaaactctacactacattgcaacaaatggagaaagtgctgtagtgcaattacgtgagtattccagcagtcttcctttgattagaaacaatgatagtaaaaaatactatgccataaagatgatataatctaaattcttgatcaaaagatagaattcatatgccttaataacctttaagataaaatttttcttaattaagaaacttaaaaatcatcctccaacataccttattttggcagaatacaattagttatttgagttacgccatcgttttagaagtgaacttcctgagtaaggtaattccattgtagtagctcttttggaacttacttagctaattatgacggcaaattgcttaatactgtctttagaattgttagtaatatgcaagaggccaggcatggtggctcgtgccagtaattccaacacattttgggagtctgagatgggaggatcatttgaactcaggagttcaagaccagcctgatcaacatagtgagacccta

SEQ ID NO: 13762 - DNA, 2127 bp, Homo sapiens
gcattgatactaggtgaacagaaattacctgactaataatttgtctaacatcatatatcagaattttattgtatatgatgaacaaaacttaaaattttttaaatttaatttttaaatactgtttcagagttctaaaaaggcagttttttaaaaaacttaagttgataaaaactgtaagaataatttagcagaaatagaaccagaatgtagaagagtagtcatgtaacagcagtaataacatacttcagcttccatataggaatagaagtggtagagccaaaagtgatttaggaaaagttataaggtacaggttgagtatcccttttccaaaaatgcttgggacaagaagtatttcagatttcataatttttttcaaagtttggaatatttgcattatacttaccagttgggcatcccaaatctgaaatctgaaatgttccatgagcatttcctttgagtgtcatgttggcactcaaaaaggttcaacattgagtccacttaacacttaggtgttagaagacctaactttctgtaacaattaaccttatactttgtttgtcatcgaatatttgttgaatgcatgtcaggtaatggtcttgattgtgatagcttcaaggtggaacatactgtaatctccagatgctaggaagttagtctaataattcactgcagaaaattgattaagtggctgtccttttaattaagagtgtggagtcataaacttaagttcttcatatagtgacaagagtccttagagattgttattcaagttccttagaaattgttatttaggtataatatcatcttgtctttgactagagcttgaaaccttgttatctgattgtgtaccactccaaattccctgccttctgcaagttgaatgtcttgctgaatgtgtctaggggttcatcttcagtaatcgacattccactagtgccatagttaacttcatgacatgtagacattcaaaacttgagccttggatgttcctgtggacctgacagttaaaaatataaagaacctaggattcaattccaactttctctgtttgccttgggttgaataacttatcttttggagaatagctttaagtggcttagacactgataaaattcagctgtgttgttgacgctcatctcttttgtcttacgcttagccatatttaaatcttgaatttaatagagtctagtgaaaaaaatgagtgggaagaatgaatataaaagtaataatataaggaaaaagggaaagtaaactatttagaatgtagttttgttatattcccagcatttcaatatttattagttacttgtaaattactgtggctgtgtagtttataaatgtctgtgcactatattaattagaagaccatagaacatgccagcaggttggctaatgctatgggggtttttaccacagttgccattgtggaagaaattatttggtacattaataaaaaaagttggtaaaacatggttttatacctcagtgtataagatgtgcaagacaaatatgcttatttccttttctagaatataagtgatattatttgcttatgacactaacactattaatgacaggagtcaatcagcctttacagctatcaaaatataatgagatcccaatgatgattcttttttactttgaatgttaattagtttgggactttgattggctggcaaacattttatcattgtcagaatttaatttagatttcaaaaatagcttacaggattttaaacatggtgtggtattctaaagccttttttttaaaaaaagagatctttttgagagaaacaaatgaggattgtaaagtttggggacttacctctgtagcattgtgaaaataaactttgattaagctgatttgaaaggaactcctactttgtggaattaaatctacattagagcactttatatggtaactatactcacaaaattttgcattataaaagttattatcattactttttaatggcttcttaacccgaccagtgtttatgactcactatcagtctggcactcaagtcttaccatactcttggaccttatgctacttctcaagccttacggtctacttgtgcttcagtgctgctgaactgtcaatagctctgtgatgtattctgtgct

SEQ ID NO: 13763 - DNA, 1197 bp, Homo sapiens
gtagtctctcttttaaattttgtactaatgtcacttttagaagctttctggaaattgttactcttatgaaattttaatcagaaagctttgtacacacacaaaaaaaggtcctggataaaatatagagtagggacaattttcacttggtctgtcccttccaattttgagataaattctttggaggactgtcatgaaattatttttccttgctctgttgataagatgagtagctctcagcatctgagaatttgaaaatcatttatttaaaaaaaatggaaagcacaactagtgaaagttttatattgtgctacacctagttttgattatttttttcttaatgaaaattggcttaaaatgttcctttaaaaaaacaaaaactacatgcactatttgaaaatccatcaaggatatactttcttagggccagcaggtaacttacagactctttcttttgcttcccctttatttaggtttatctagtgatgaacacagtacgtgattattataaatatactatgttgtttctttttaggttcctatccttagtaaaaaagaggatgtttttgcatatttagctaaatattctgtgccaatggttcgagcaacgtggctgatcaagatgacttgtgcctattattctgctatatctgaagctaaaattaagaaacgtcaggctcctgatccgaatttgggtaagtgagagaatacaatacaccttacatttcattattgattttgcaagtaattgttgcctgtaccctctggatacagcccagcatggtgagtgttgagaaggtccgtggtgagactgatttgctcgggtatggatagggcagctgttcctagttcactcagtctcagaatcctgactccattagcaagggctgttgatcttactgccaaaatatatcctgaatctgaacacttttcaccaccacagctgttgaaatgctggttcaagccaccgacatctcttaactggttggagtcacagccttctagcagctttctctgctgttacttttgctccttacattgtattctctgcataactactatactaatctccaaacctaaatggtatattgtgtttctatttataaatttgcagcaattttttattacagtgggaatacagatccagattctttactgtggccagtgaagtcatcgctgatctgcccccacccccggctc

SEQ ID NO: 13764 - DNA, 1169 bp, Homo sapiens
tatgcattcttctactttatttcaatataattataatgtgttctttctcatgaatcacaatatataactttaaaaaaaaattgtttggagtacagaccaaaacctttatgtctattattcattagtcttactagtttattattatgtatatgtttctgtacgaaatgtagccctacgaggaaaacacttacccataattctgcttttatctttagctttccaggtagtgtagacacatttcttatgtgtgtggttgtcattttctcatctacaaaatggagggtgatgctcacagattcgtactgatctgaatatgaattttgtggaaattaacacaatttcttcatatttttttgctaagtggttaagtaggaaaaggtgtataagtgtcttatgtgtgtgttttggtatgtagcactgtggtttggttttgctggctttcatttacaatctccaacatttgttttacatgacttagattttttctcctatgcctggagaatcctgtgagaatgccaacacttcgttgggcagaagaatgtcagttaattgtgagaagttggtgaagagggaaaagccaagggaattaatttttccatctaattatgacctccttcgccacttacagtatgcaacacattttcctatacctctggtaagtcattgcttcagttaatctataccctgattattttattataagatcaataactgttgaacgtcagattattcaactgtattcttgactaataatgatagcaggtgagttttttgcatttgctcctgcttctgttctaattctgatcttaagcttatgtactgaggttgtccgaatttgtagtgatattagtggctaattagatttagaaaatgaaattttctatgttagtatccttttattaaagagcatttgagtcactgcaggtgatgtctaaatgtgttttttttcttttctttttttttttttttttgagacggagtttcattcctgttgcccaggctggagtacagtggcacgatcttgactcaccacaacctctgcctcccaggttcaagtgattcttttgcctcagcctcccgagtagctgggattacaggcacctgccaccacgcctggctaattttttgtctttttagtagagacaggttttcaccattttgggcaggct

SEQ ID NO: 13765 - DNA, 1120 bp, Homo sapiens
tgaccagctgagttttgtcaagctctgcataagagtagcaggaatgttcaggtgaatgtgaatattccctatagtggggttgaagtttgattctgaaaagatctaaaagcaactcatggcctggcatggtggctcatgcttgtaatctcaacactttgggaggctgaggtgggcagatcatgaggtcaggagatcgagaccatcatggctaacatggtgaaaccccatctctactaaaaatacaaaaattagctgggcgtgcctgtaatcccagttacgcgggaggctgaggcaggagaattccttgaacctgggaggcagaggtcgcagtgagctgaggtcgcgccactgcactccagcctggtaacagagctagactccatctcaaataaataaataaataaataaataaataagtaaaagcaactcacttgggcagaggtccttggagctggcttctgcctgtgattgtcagtctctggtacctttgtgtggctgccacatgctggtctctgttaaaatgtcaccttctcagcaaggcctttcctgttcatggcatctaacatagccattccccctatgtcgcattctctagcctcttaccacgtttgttttctcttgtctccctttgttgtttaaaatattaggttggtgcaaaagtaattgtggtttttgtgatgactttcaatggcaaaaactgcaattacttttgcaccaatctaatattttttaacttattctcctctccccctattcttacatacagcccttcttaaaggtaagctttgccagaccagaatttatttctcttgttaacggcaaaattaggaggtcccagaatagagcttgctctacagttagaagctcaatgaatatttatggaatttcagaatgaacttacttatacaactttggtcaaattaaggatttccttaactgtcaaatgatgagtttgttcagcacttctagagttttaaaatgtacttttatattttgaattgccacttcaatgtgcatagtagattaacatatatagatatccttttaaatctctggatcacagaattagaataatcataattcttgattcaggaagcattcttgttatgcagcattcaag

SEQ ID NO: 13766 - DNA, 1156 bp, Homo sapiens
ttttttaattttattttccaaactgtgctggaccaaactactgatttgaaaggcatgtcagatcttgacagaaacatggcctgtttattctgcattcacctgtgatggtgaaacggacatttatttgcatcgctctaatttgaaatgtttgtaatctcataagcactttataaactttgttcttatttatgtaggactcttctttgcttttgttgtggtcaaaaggtgctgaaacagattgttgcttcgtacttaaacttcttaaaccaagaacctaaaccaaggtttctttgagagccgccctaagatgtgcggaaacctgttagaagtagctgtactcaaatttgttttgaggcaagatcattgatgagagtcattgtgaaggtacaacatgtaaatcctaaaggcctgaaagaactgcagtggaatcgtccaactatttattgccagttttggttctcctgaaccttatgccaccttaaggggaaaaaaaaatccagtagctggcttgagattccagtgctcacacttgacatggtttccagagaatctggccccaaagtccagaaggctctggttttcataaaaggtgtatttgctgtttattttgtatggtaagtatttgctcttttgaatttaattattactgtcagtgtcagtcttggttgtgtattgcatatactgtatttataaattggtgcaaaaagcacaagtaaattatacatcaaatttattataaagaaatagtaactattttaactttgttcaagtatgtggtaatttgctcctattagagtaaaaaagaaaccagtaaattatcagtttgtgtaacttaagagtattctatataatatttttttagatttagatgcataaaattttgaatgtgaaaattgcagggcattttaaaacatatgtgggggatattttcccatgttctctgttatttcattttcttttgccatatgattttacatataatatagtcaagcatactgtgaatagacttgtctataatgagcagaccatgtaaatctactttttttaaaatgtagctagtacaactttagtagacattttcttttgcaaatcattatctataaataatttatatcttcctgggtgagttactcattgcaaagtttgactcatgcaa

SEQ ID NO: 13767 - DNA, 1494 bp, Homo sapiens
tcagattttctccctgttaattctgtatcttgagaggtttcttttttttttttttttttttcttttcttgcaaatgcattcttttgcattaagatggtcacaaggtaaagccctgtggcagaacctggtactttaccttaccagaggaaattaccttagaataagatggagcgagaccccagctccccttaaagacaagaccttgaaatcaaatggagtcagctatacctatcaatcaatcacagttcttggatataagaagcccatagactctcttgtttacactgtaggctttttcttaatagggttgcatttgtcagtcattgcatttacccttcttggcctggaagtagaggagatcaatgcgtagctttgaccacttccagccacagggtactaacatcagacataagttgcaaccaggtcacattttaggctgagatggggctaactgaaagtcagtgtgatgaaaacccaagggcgctattccacatgtctcaaatgattggcaggggctaacttattagtaattctcggttttgtgcactgagatatctaagacctatggcatttttttcccatttataaagctcctataattcttaagtaagtactaggtgaatgtttgaatagatgctggagaaattacactggaaaaccccacccctagatttagataagatcaatcatttaatattccccaaattaattcaggttgaattaagcatgtaatataaattcagtgaattacaaaaacacattttgtgtaggattgatcagattttaaatacagtgaaacttcattatatataatagacctagaccctcccaagcattttcccatcccataaagaattaatgaaatgaaatgcttatagagcaacgattcctgctcagaaaaatttccttataaacagctccaaaccaggggtgcctgagctagattttaaagttataaagaagtttcattgtatttttaaaacctttttaatgggtgtatttggacaaaaataacccccttttcacattttatgatgtgcaggtattacattgctttttacatgtggaaaagtgagcctgcatttatttttaaatgcagttattaaaacatttttgtattccccatcaatgaaaattttcagtgtgaacaaatggtgaatcataagacagttcagtgcttattttctgtaggttttagcaaaaaaatttataaaccacaaaatatttatacatcaggatggtaaatttacatcataaagattgcagatttaatattttccattgtctctgttctgagtgccatgcttgtaacattgataggaggtggacactaggcaactggtattagaagttcatttttttactgaaaaattcaggtacattagccatttgttattttatagtgaaccgtttcaatgtttgtttattgttatttgttggcaaaataaaagtgccttaagttaaaagtttgttttgagatccattaaataaatc

SEQ ID NO: 13768 - DNA, 1116 bp, Homo sapiens
tatgtcgagagtaccaacgtggcaattgcaaccgaggagaaaatgattgtcggtttgctcatcctgctgacagcacaatgattgacaccaatgacaacacagtcactgtgtgtatggattacatcaaagggagatgctctcgggaaaagtgcaaatactttcatccccctgcacatttgcaagccaagatcaaggctgcccaataccaggtcaaccaggctgcagctgcacaggctgcagccaccgcagctgccatggtgagtagagatatcagctctctccttgttagcagtcagaaaagcaaagtgagcaactatatctgactacaagctattcatttagtaacctttttaaaaaaattgctgaagatatgtttgttcaggtatcccagacaatatataaagaagttactttcacagaagtgagggtaactcctcaaatggttcagattgctcctactcttggcctaactcttaatctgtcttattgtggatgtagggtttctgaaatctctgctttgtaaagaaccacctgtctccttttcaacttaacgatattgccattttcagtcttcttatttctgtgtgccatctaatcagccattgttttcctttggtgtgttcttttgcacatcaaggctcttctttacatatatcttgcttttaacaataacatgatctggaactatttaggagaattgttcaacaaaattgttcttagaattagctacaggattttgagtagtatactatctagattgtctgaaataatattgtggcataaacataatagtaacactagagaagcttgactatgccattatatagacaggagagagacagcagtactcaaggagttagaaattggatcattaagaatagctactaaactatattctcaaggtaaattttaatgtgatctagtagctgattttaatgagcccattctttgttctttgcttacctgttttaatgttgtcatttttttacataaatatatgacttaaatcaatgaaatactcattttaaaagtcactgtgtagtatttcataacacagtgaaataatcacgagagagatcttttctgtgtttatggatacttgagcaaaaatacaga

SEQ ID NO: 13769 - DNA, 1589 bp, Homo sapiens
tgctgcactccaaagaatgcaaattttaatgtgccttccaataaatgcaaggaaaccgaaagagttaatagtatcatacaatgactgggatgtattgataatgctacagtgatccattaacagcacttgttcaggtactgctcccaatcctgggaatgtgtgttacctgttatgtctcaaatcctttatcttggctgttcttctaaaagtgatctgtctgtcattgaatgctggcattagagtcatgtcacaatattagagcatactggttttgcctctaacgtcgaggtgaccatctggtctttcttgctctgtaagagtttctgtttgtgcttttttttcccttacttttattatccagtttaaatccagtcagttggccaaaatggtcttggaagaaaggatttagagattctgtaaaaaagattattagttggttctgtgtttgcaaaccagtatgtaattcccatatgaatggggaaaatgttcctgaggaattatttaattgatgaggcattcacagagattaaagcagttattgttacctccaatttatgtcttctgcacagctgattaggttggacattttaatccaaggtgctacttacattctgtttcttttgtttacaaaatagggcattactgagtagaaaatacattccaggtctaagaactgtttgttctttagtggattttaaagaataagacattaaattaagaaggaaaatctgtttgattcatcattttgagtaatgcagagaataactcttaaaaaaaaaacctgaaacagaaactttcaggaaaaaaacaaaagaaattaaactactgaataatctttcaaaagcatcgttgaacagtgagcacatgtgatgccttcccaattaattaatttgggcaaaagctctagataaacttacaccaattgttgcaaggcattctctattactgcatttttaaaacaaagtcctcccctaaaagttatgaattatacaaaagctttaggaggaattttagtactcctttacccaaaataaatagtggtaaatttccttctgttcttagctctgagtttgtatttatttataagtcattgtgatcatgtatacttatatatttttaatatgctaattgcttttaaatgggatttttgttctgattttaaaataatacatcctccctggacaatatttggaaatgtagcaaagtaaatcatgttaccattgttccattttgatatatataaactttaggtattattttatatataataaattttaagatattatatacaataaaattaaccaatttaagtatatgattcagtgaattttgtcaaacatatagtagtgtaattaccaccaccacaatcttgatacagaacttttttttccccagagatggagtttcgcactgtcacccaggctggaatgcaatggcgcaatctcggctcactgcaaccttcgtctgcccgggttcaagcaattctctggcctcagcctcctgagtagctgggattacaggcacgcgccgccatgcccggctaacttttgtatttttagtagagatggggtttcaccatgttggccagg

SEQ ID NO: 13770 - DNA, 1198 bp, Homo sapiens
tgttgaacatgtataatttttccaaccttaggaattaagaaaggaactagatattcttctgcaagagaagattgaaagtcctcatcctgtagactggaatgacactaaatccagagactgtgcagtactgtcagctattatagacttgatcaaaacacaggaaaaggcaactcccaggaactttccgccacgattccaggatggatattacagctgacagcttttcaggggtggtctgaaaagccagtttgacagccattcttcatcattgtttaaattttggctggatgccaaaccctgggacatgaacaattttcatgtgtaaggtagaagccttcagtaggtagtaaagacttaatgtgcatgacttgatgttatatgtagagatatatatatatatatatatataccataaaagcaatatgttctctgatcatatactctgctgtggtcatgcccactctttgggagtatattccctttatatatattgagtattgtaccacttgagaaattcctttgttctgttatacaaaattaatctttctgctcataatgattgatgataccaccagtaaaaataggatgtttaccccaaaacaagtgtcaattaagaatttgaacacaaccacattttttaaaatgaaacttctatcggaagtaaattaatttgttgtaataaagtccagtatttaataaaatgtacaatgttaaatctcagccaacctcttggattggtttctacattttcacctatggcttggttcatttgatatttttactatttttaaaacacgtgccctttttatatcaccctgtgcctcataatacagcaattgagagcacggtctggagcctgattacctcagttccagtctcagctctgtcagttagtcagtgtcttggcttctctcctttttccttatcttgtaagatacagttggcccttcatatccatgcattccacatctgtggattcaaacaactgtggatagaagatatttggggaaaaaaaggatggttgtgtctatactgaacatgtgcagacttttttccttgtcattccctaaacaatacagtttaacagctatttatatagtatttacattgtattaggtattataaataatctagagatgacttaaagaatatgggaggttgtgcctaggtaacatgcaaatactacgccattttatta

SEQ ID NO: 13771 - DNA, 1166 bp, Homo sapiens
tagacatctttttaaaattaaagaatgcaaaaatgtattgtgctaaatctcccttacttaggttatcctgttattcttaaatttatacacatacaggttctgtaagtactcagagttcagctaaaaccttgaaaagcagtaatgtgttttctcatataccatatttcccccattacatttattgaatatgacttcacatttatgtttgtgcagtggttacagtgttgtatgtttttctaacgctttctacaatgatattaagttgtaatagcaaaaagttctactggggcatctactgaaaatatgcctagttttcagatcatatataagtaaacaatccatttggattacatttcatcataggctaggaacatgggccttgtgaggagaagtgatgaatatttcaagaacttagatgagacatttgtgaaatgtgtgctcttaacatgctccagacctttccttctggtcaaatgccatttcctttttcttttccgtaggccctttatggtacaacctcagaaacagcaacttggagacgttgtgcaaactatgtcaatgggaatatggaaaatgctgtggggaggctttatgtggaagcagcatttgctggagagagtaaacatgtggtaatgttttcagaataatacactgtcagttatacaggacactatcagtttgttcacactgatgagcaattacagttctccatcatttggctaaaattttattaatttaggcagagaacctctgaatcataatatgccattgtttcccaataaatcttcccttgccttccccaagagtctagttatgtttctgctcctaatactgtctagtctgaaaccaactcaccattttccagaagcagtgtatttggagtacccagtaacatgttctattgatatagtcatttataaactcttctattatcaaaattgcccccaaattagtattttcttaaaaacatagaaagtaaaacaggatttatttggagtataagaaatgtgctttatttttcattgttaggaaaatgaagacagtggaacttaatggtatggtgaaagaatttattgaaatgctactttatgcttagctaaaccactaatggtaatgacagccctaatattttacattagttcttccagtatgatagtgaaaccatt

SEQ ID NO: 13772 - DNA, 2322 bp, Homo sapiens
attttcaaatgtgaattattcatgttttacaaacacatataatgcttataaattattaactctccatgacaaccttaagatgcatgttctattgtgcagaaaccaaggcacaaagaagcttcataagcaggattcaagccatgtagtctgtctcccaaattgcttttaactcctgttctttgttacttctccatttaaaaattctgttaatgagaaggcactgactcattgtaccaggttattttaagtttaactttaaattccaaattcattcacttgacctgcagagggaaatgcttcagggctccagtgtggtatggacgtgagtatcaaatgctgacggtgactttttttgtttgtttcaaaggattattgggactttgcagaactctgcagagttttcagaagcctttcactgccgcaagaattcatacatgaatccagaaaagaagtgccgggtttggtgatcttcaaaagaagcattgcagcccttggctagacttgccaacaccacagaaatggggaattctctaatcgaaagaaaatgggccctaggggtcactgtactgacttgagggtgattaacagagagggcaccatcacaatacagataacattaggttgtcctagaaagggtgtggagggaggaagggggtctaaggtctatcaagtcaatcatttctcactgtgtacataatgcttaatttctaaagataatattactgtttatttctgtttctcatatggtctaccagtttgctgatgtccctagaaaacaatgcaaaacctttgaggtagaccaggatttctaatcaaaagggaaaagaagatgttgaagaatacagttaggcaccagaagaacagtaggtgacactatagtttaaaacacattgcctaactactagtttttacttttatttgcaacatttacagtccttcaaaatccttccaaagaattcttatacacattggggccttggagcttacatagttttaaactcatttttgccatacatcagttattcattctgtgatcatttattttaagcactcttaaagcaaaaaatgaatgtctaaaattgttttttgttgtacctgctttgactgatgctgagattcttcaggcttcctgcaattttctaagcaatttcttgctctatctctcaaaacttggtatttttcagagatttatataaatgtaaaaataataatttttatatttaattattaactacatttatgagtaactattattataggtaatcaatgaatattgaagtttcagcttaaaataaacagttgtgaaccaagatctataaagcgatatacagatgaaaatttgagactatttaaacttataaatcatattgatgaaaagatttaagcacaaactttagggtaaaaattgccattggacagttgtctagagatatatatacttgtggttttcaaattggactttcaaaattaaatctgtccctgagagtgtctctgataaaagggcaaatctgcacctatgtagctctgcatctcctgtcttttcaggtttgtcatcagatggaaatattttgataataaattgaaattgtgaactcattgctccctaagactgtgacaactgtctaactttagaagtgcatttctgaatagaaatgggaggcctctgatggaccttctagaattataagtcacaaagagttctggaaaagaactgtttactgcttgataggaattcatcttttgaggcttctgttcctctcttttcctgttgtattgactattttcgttcattacttgattaagattttacaaaagaggagcacttccaaaattcttatttttcctaacaaaagatgaaagcagggaatttctatctaaatgatgagtattagttccctgtctcttgaaaaatgcccatttgcctttaaaaaaaaaagttacagaaatactataacatatgtacataaattgcataaagcataagtatacagttcaataaacttaactttaactgaacaatggccctgtagccagcacctgtaagaaacagagcagtaccagcgctctaaaagcacctccttgtcactttattactcccagaacaacaactatcctgacttctaatatcattcactagctttgcctggttttgtcttttatgcagatagaatcaatcagtatgtattcttttgtgcctggcttctttctctcagccttacatttgtgagattcctctgtattgtgctgattgtggatcttttcattctcattgcagaataatgttctattgtgggacttattacaatttgttcatcctattgt

SEQ ID NO: 13773 - DNA, 1161 bp, Homo sapiens
gagagagggcacaagtcaacttgcttctcctttaaaactcaagtacaatcagggtgtggtagaacactttcaaagaggtttgagaaacggctactgtaaagagaccctccgcccttctgtccctgaaatattcaacaatattcaagatgtcaaaactcaaagtatttcttatctagcctatcagggtgctggctttgtgcataatcatttctcagattcagatgcaaaaatgttccagacctgtgtgccccagcaatctagtgctcaagatatgcatgtccctgtacccaagcagttggcacatcttcctttgcctgctctgaaactgcctagtccttgcaaatccaaaagtctgggggacttaacatcagaggacattgcctgcaattttgagagcaagtaccagtgtattagtaagagttttgttacaactggcattagagacaagaagggcgtgactgtgaagacaaagtcgttagagcctatagatgccctgaccgagcagcttcggaagcttgtgtcctttgaccaggaagacaactgccaagtgctatattcaaagcaggatgccaatcagctcccccgggcactggtcaggaagttgtcatccagaagtcagagcagagtgcgcaatattgctagtcgtgccaaggagaaacaggaagccaacaagcagaaagttccaaaccccagcaatggggcaggagtggttcttagaaacaaaccctcagcacccacccctgcagtgaatcgccactccaccggctcctacatcgcaggctacctgaagaacacgaaagggggtggccttgaaggccggggcatcccagagggggcatgcacggctcttcactatggccacgttgaccagttttgttcagataattctgttttgcagactgagccaagcagtgatgataaaccagaaatttattttcttttgagactgtgaattatttaaaactgcattcttaaggttttcaaggtattctgtagaatgtcagagttttcagtaaataagttccttggctttggaatgattttcaaatgtatttttaaacttgtatttgggtctccctttgacttcatgtgttctccctgttaatgcgtttgtatatagatttggtgacatttcccatgtacctattatgatctttctcc

SEQ ID NO: 13774 - DNA, 1471 bp, Homo sapiens
atttttagtagagacggggtttctccatgttggtcaggctggtctcaaactcttgacttcagatgatctacccaccttggcatcctaaagtgctgggattacaggcgtgagctaccaagcccggctttttttgttttgacatggagtttcgctcttgtcacccaggcaggagtgcagtggcgttatcttggttcactgcaacctccgcctcctggattcaagtgattctcctgcctgagcctcccaagtacctgggattacaggagctcccaccaagcctggctaagttttgtattgccatattgaatttttgtttagaaaagatatgtgtttatgtttccagttttattacctttcactatttataataaaggaattctttatgctttatgtccaaagtagcttttttctcctaattgctttctaattgcttgtgaatttggggacagggtctcttagaccattccttgtaataaagaatggctaatttctacctgttgttagatgagggggctaatctggaggacaaaaacaatgtactagctgggtatggtggctcaagtctgtaatcccagcactttgggaggctgaggcgggtggatcacttgaagtcaggagttcgagaccaatgaccagcctggccaacatggtgaaaccccgtctctactaaaaatacaaaattaaccagatgtggtgggtcacacctgtaatcccagctacttgggaggctgaggcaggagaatcgcttcaatctgggaggtggagtttgcagtgagccaagatcgtgccactgcactcctgcctgggtgacagtgagcctctgtctcaaaaacaaacaaaacaaacaaacaaacaatgtactgaggatggcagcacagaggatagaaaaaactgagatgcctgtcattgttgagcccttgaagtagccaatgcttgaactgccctgctttccaatttcttgttatttgagatagcaattaaaaaaaacatttaaagccaatttaagttggctctaggatttgacacacacaaacttgctgataaaatcatcttgacagtgtaagcttctttcgccaggccagcagtaatccacttacacccacaaagtctatacaagttatttttaatggtttatgatactaagaaaagtcagacttatcatctagtccagatagttgactcctgttagagtcaatagcacagaatgagaagtataatgctgctgctgcctgactcctttttttttttttttttttttgagatggagtcttgccctgttgccaggctggagtacagggtcacaatcttgtctcactgcaacctctcccttcccagattcaagcaattctcctgcctcagcctcccaagtagctgggactacaggcacaagccaccatgcctagctaatgtttgtatttttagtagagacgaggtttcaccatgttggccaggatggtctccatactcttga

SEQ ID NO: 13775 - DNA, 1148 bp, Homo sapiens
aaaaaaaaaaaaaaacatattcggctgggtatggtggctcacacccgtaattccagcattttgagaggctgaagcaggcagattgcttgagcccaggagttcaagaccaccctgggccacatggtgaagcaccatctctacaaaaaatgtagaaattaatggggcatggtggtgcacgcctgtggtcttatctactcacaaggctgaggtgggaggattgcttgagcccaggagccagagaccgcagtgagccattatcacaccactgcatttcagccggggccacaagtgagaccgtgtctcaaaaaagaaaatgagtattgtttacagcaagaactgaaaattgtttttaatcctgttagtagcattagagagattaagatacattaacatattttgtcattggaattcagtgaaatactgaaatgttttaagaaaaatatatttttattctttataaagtagaagcatgttaattgctaaatactttcattttgaaattgtggagtatttattatagttttatttttacagctttgcaaaaaactgggtggctcatgtgttacagccctggatggttattatgtggagtccattatttgtgttttcattggatttggttggtggttctttcttggtccaaaatttaaaaagttacaggatgaaggatcatcttcgtggaaatgcaaaaggaacaattaatatatatgctactggacattctagcaaggtaattgtagtttagttttaattcggagagcaatgataatcagtgcacaggagtataaaatattattttaaacagcgaaattaataatataaaatgccaaatggttgaaaaaatagaaacctttctgtatatttgatcatattttttttttgccttgtcaatgtatttaaagtttacttaaggtcaggaaattctaaaacaacttttctggccttgttatttgatgtatatcttttaaatttactgaccaaagcatgttttaagctgcaatgcagtagtcacgggtggtaaccatgtagtcaggtattgttattagtacctatcactgctgagctgtatttaaaattttggtacaatatataaaatggagaagagcttgatattcaggtactaaccacaactagtctgacattgttgg

SEQ ID NO: 13776 - DNA, 1195 bp, Homo sapiens
ttgattttgtatctccctactcttaagctgaaaatgttgattactaattatttgttttaacctacagtatgcctgtatctatattgtacttacagttacaggataacagtttcagtactaagtcctattactacttacataagactaccgaatgaagtgttaaggtctttgaaatacctctgttcttaacataaatctcaacagatatataatgttgaaattattgttctgtaatctcttgaaattattcctgtgtgtctggttatactaccaacttcatatatttatttgttctagtttccttccaatttttatggattgccttttttaaggtctaaggttttttattggctttatttgtaatggacataatatttgaattctagcagtattccattgtcactttttttttttctgtttttctaatcatgtatggcaagcttgtgtttctaaaacaaaagaacccatgaatcatgtttttaattaagatatttgtgtgttttattttttgtatgtttaggggccttcagaaggaagaagttgttttgcttacacatggagatagtgtagacaaagtagctgatggattcaaggttgtggcacgttctggaaacatagtagcaggtgaaaattctaaaaattttgcagagttcatttaaaaaactttatctgaagagtaagcatatgcttctgtatgaggtactctttgatttttcctttttcttctgatttttcttctcttttttttaaagataataatgaatgtaggattaactgttatgaagggaatttaataataggaggattatccagaagtctctcacttactggtttactggtttgctttgaaatacgttgaaaaatgttcatcctaatataagcttttcaaacataaaacactatacttttgtaactcaggaaaaatttgagaactcgctgtcttcatactatactatattcagagttacttgtcttttattcctttcttaggtgtacatagcccatagcacccaaataagtactcaagacatttccctgaaccagggttggcaaactgtgacttgtgggtcaaatctagtcttttgcctttttttaatgtccaggagctaagaatgatttttacattattaaagggttataataaaatacagggactgtgtatgttgcacagagcccaaactatttactctctagt

SEQ ID NO: 13777 - DNA, 1101 bp, Homo sapiens
tgcaaactttgcctccagggttcaagcgattctcctgcctcaacttcctgagtagctgggattacaggcgtgtgccaccatgcccggctagtttttgtatttttagtagagacggggtttcaccatgttagtcaggctggtctcaaactcctgaccttgtgatctgcctgccttgcctcccaaagtgctgggattacaggcgtgagccaccacacctggccactaattttgtatatttagtagagatggtgtttcatcatgttggccaggctggtctcgaactcctggcctcaagtgatccaccccactcagcctcccaaagtgctgggattacaggcgtgagccactgtgtttggcctcatgtacctttttgaatcgtgttagaggacatgttcattaaggagtttattttggagattggtggattttattttctgatcagtatttctaaaggactctaagagatttagctgaaagtataaacttttgcttttaaaaaaagttatctcttacaaggctgttttactcctgttgattatagattgccaatgaagtaattggagaaatgaacttgaaaccagaggaggttttccttgcccaaggtactttacggcctgatctaattgaaagtgcatcccttgttgcaagtggcaaagctgaactcatcaaaacccatcacaatgacacagagctcatcagaaagttgagagaggaggtaaaagtttatgaaaactttttcataaagtagatacatggaaagtcttccattcttccctcctcttccctctaatattcacagaattgcataaccatcaccacatctaattttagaacattttccttaccctaaaaaggaaccttatacccattagcagtcactcctcgttctacctgttgttgtcattgtcatcctgcccccaccccccagctcctcctttcctcctttcttgccagccctaggcaattaccaaccactaatttattttctgtctctatagatttgcttattttgggcattttatataaatggaatggtacaatatgtggtcttttatgactggcttcttttacttaccgtaatgttttcaaggttcatccatg

SEQ ID NO: 13778 - DNA, 1144 bp, Homo sapiens
ttagctttgcttattttttaattgacttatttatttttttattattgagttgtaaatgttctttatatattctggttacaagtcttttatcagatatacgacttgcaaatgtcttctctagttctgtgagttgtcttcattttctcaatgataacatttggagaattataattttggaacactagtatattttctaattgctttgtattctaatgagaattagatcagagatgatggattggtttaccctgatttatttatatttaaaaagcttatgtttaaaatgtgcttcaaagagaaataatacccataagatattcgtctaattccttataggcacttaggaacaaatactttaaaagatgcatttttagtaataatctgttagtctaagaaaagtggtaacaggaaaagccaataatttattacgctttgttttccatgtcatcttggttactagtttatattggttggcttctttcctccctgtagggaaaagtaatagaacctctgaaagattttcataaagatgaagtgagaattttgggcagagaacttggacttccagaagagttagtttccaggcatccatttccaggtaaaaattagaactgaattttgtttgattcatctttagaccttcatgttgaagaaaaatcaattcagacaattctgaaataatctgtcatctcagggaatatgtaacatgagagaaaggaaaggatggttagggaataattgaaatcttttgagtatctactgtatttacttcattttattaaatactcattttccattgtatctgcatttaagtgttacattatccttgggagtctggcatctgatgttgccatcagatgagaaaaccaagacataaagatattttaataatattgccacacagtcctagtagtagagctaggatttgttatattatttgtaccataccgcagtgcgttccatggaagatgtgaggatttaaatttagctctttaaaatccttgtcctatgtctgacttgtttgaatggatgaaccacttattctgtgcagagaattcctggcacaatgtaactaattcctgaacaaataatacttcatttgctgtcatatagaaaaaaattagaggtgatacttgtttaaagt

SEQ ID NO: 13779 - DNA, 1153 bp, Homo sapiens
tggctcatgcctgtaatcccagcactttgggaggccgaggtgggtggatcacgagatcaggagatcgagaccatcttggctaacacggtgaaaccccatctctactaaaaatacaacaaattagctgggcgcggtggcgggtgcctgtagtcccagctactcgggaggctgaggcaggagaatggcctgaacccaggaggcggagcttgcagtgagctgagatagtgccactgcactccggcctggtgaaagagcgagactcagtctcaaaaaaaaaaaaaaaaggaagttcttagtgtgtaattgaccatcagggataaatgggcttcaaaagtgttaattgtctccttacttacagtgagtttctagagatagccctgtctttcagaaattctctgacatctgcttgcgcaatgttataaccactttcccacactactcccctccagaaatctcattgatatgtggcgaggacacgccttagctatcaccccaatggatgcttctttcattgacccaaatccagaatgtaatggggaactgaatacaagttggatgtctccacccttggaaagcacatcttttgttcttactgaagtagtttaacaccaccagatgatcaagggatcagggtatctttctggtatctttttaatcactgaaggactttgacagcagtaatggtggcattgttgactcttaaatttctgaacgtttcacttaatggcaagtgaagagatatagaatcccccaaagagtgtcaagatgctaacttccaaccctatttttatgtactgaagaggcctcagtgtctcactgaactctaacctttttgtcagtgttcctcaacactggatgcgtattattacataacctgaggagttaaaaaatacaataaccagatgtccaattaaataaaattagaatctggaggaggtagaactcaagcatttacagttttgttttgttttttttttaagacagagtctcgctctgtccccaagtgcagtggcacaatctcggctcactgcaagctccgcttcgtgggttcacgccattctcctgcctcagtctcccgagtagctgggactacaggcgcccgccactacgcccggctaatttttttgtactttttagtagagacagggtttca

SEQ ID NO: 13780 - DNA, 1224 bp, Homo sapiens
gatgaagtacaaaatgaaacagacagacttaatgaacaagccagtgaggagattttgaaagtagaacagaaatataacaaactccgccaaccattttttcagaagaggtcagaattgatcgccaaaatcccaaatttttgggtaacaacatttgtcagccatccacaagtgtctgcactgcttggggaggaagacgaagaggcactgcattatttgaccagagttgaagtgacagaatttgaagatattaaatcaggttacagaatagatttttattttgatgaaaatccttactttgaaaataaagttctctccaaagaatttcttctgaatgagagtggtgatccatcttcgaagtccaccgaaatcaaatggaaatctggaaaggatttgacgaaacgttcaagtcaaacacagaataaagccagcaggaagaggcagcatgaggaaccagagagcttctttacctggtttactgaccattctgatgcaggtgctgatgagttaggagaggtcatcaaagatgatatctggccaaacccattacagtactacttggttcccgatatggatgatgaagaaggagaaggagaagaagatgatgatgatgatgaagaggaggaaggattagaagatattgatgaataaggggatgaggatgaaggtgaagaagatgaagataatgatgaaggggaggaaggagaggaggatgaaggagaagatgactaaatagaacactgatggattccaaccttcctttttttaaattttctccagttcctgggagcaagttgcagtcttttttttttttttttttttttccctcttgtgctctgtcaccctgttcttgaggtctcttttctctgctccatggttctcaacttatttggggggaaataccttgagcagaatacaatgggaaaagagtctctacccctttctgttcgaagttcatttttatcccttcctgtctgaacaaaaactgtatggaatcaacaccaccgagctctgtgggaaaaaagaaaaacctgctcccttcgctctgctagaagctggagggtgctaggcccctgtgtagtagtgcatagaattctagctttcttcctcctttctctgtatattgggctcagagagtacactgtgtctctatgtgaatatggacagttagcatttaccaatatgtatctgtctactttctcttgtttaaaaaaagaaaaaaaaaac

SEQ ID NO: 13781 - DNA, 3283 bp, Homo sapiens
cagagtactaggacgtttattaaaaggaaaaaaatgtcttgcaatgtgctgtaatcacaagaggagaaaataacttgtttccttgatctgtcagaggtcacagtaacctgggccgagctgttattatttattatataatagtagtaggaagttaataactggttctctgtgttccaagcacaatattacaacttcttttgaaccgtaaatatcagaatgaatcctcttcccaggggattgaacagaagcttaatgtttacaagtgtttgaatttgtgatctgaaataacacaaaattaaaaacatgatttctctaattttccaactagaggaagagaaacttgtggaaaagttctttttttttcttttttttttcttaaagaagggcagccaaggtagtaacctaaaaatagtgcccaggcatatgagagttgtcctacgaggttaaagaacacactgttccactgtatggctttggccctgagtggccagggaggtcaacttgaccctgccatgttggtttgacttactaagacacaggaatcactgttttccttgaccagggtctcacaccctggaggaatgttaagtaagagaaagaacctctttcctgaatattgacatgtaaaagaccaaagtaatttttctgaacttctgcaattctgagaactctccaaggaatttacagtgattttagtgcttgtcagcatttttccatgaggactttcatacatttgactctttagttcacaggttcccattgattgtgagcaagatatttatctctttagcccttggggatccagctgagagcaatctcttgcatttttttacccgtgtatgtacagatatcatttcttgtgtatgccatgacttgaaaaagtttgggaagctctttagcaatatcagctaaaaggatatgaaatcacaggtgatagcagttgtcattcagtaatttcctacaagcagcaccccaaaggaaatatagtcctaatctttactatccacttctaaatttaatgtgaatttcatacatgttattagttgttttctttataattttataaaaattattcatcgggagtttaacttccacttccatgctatcggatgtgttgggctccatgcaagaacttggaagaaaaacaggcaggaatgcatttgcataatgacccagatcatcattttctgcaactgagaattatatttcatcattgcttctagaagtctgcaattctttacttttctttggtgcattattatctaggtgccatcactggataatgtggagtgactagagaagtcacatatcactgtaaggtacagttagggtaacactttagaggtttattatttttaaaaaacttttcttgaactcctggccaacatggtgaaaccccgtctctactaaaaataccaaaattagccaggcgtgatggtgggcgcctgtaatctcagctacttgggaggctgaagcaggagaactgcctgaacccaggaggcagaggttgcggtgagtcgagatcgtgctactactgcctgggtggcaagggtgagactccatctcaaaaaagaaacaaaaaaacccaaaaagttttctttactgttggttaaaaaaaaaagccagaccatagtttgactggtggcatggaatttgtgtatcaaataaatgcatttgcttatttgacaaaccatcagtgtccactatttgttaccagagttgggccactatcttttaaaattgctggtgaaaacttgccactagatggcagtgcctgtatagatggggaaaaaattgccaccattcttggtataatacagtgtagcttagatgaggtggtgaaataggggtatcagccgaatattcctaatatagtttctcttgaattaataaactgaagatttgtaggaaaatgagtgagcaaaatttgtttactgttgtgaatttttcctacagcactgtttttaatcttgatgttttccaactttctgtactaatagatacatttctgtgcataagattataaagcatatactcacagttcagtagttttcgttaaggatttactgtgtgagtactttactgtgaggaattgcagaaccttttcccctctactcttgtctaaaagttctgtgtggcacacagagatgcgacctactcaatctgacttagtaaaaccatgctgtagaatttttgtcttaaaaagaccacatacccagcacccatgaaataaaagattcatctgtaattgggattcaaagtgattaaattcctttgttcatactcataaatagcactaaagtgttataacattttcatttacctatttttagttccttcattttaacttaataaaaatcttggattgatattcttttttttttttttttttttttgagacagcgtctcgctctgtcacccaggctggagtacagtggctctatcttggctcactgcgagctccgcctcccaggttcacgccattctcctgcctcagcctgccgagtagctgggactacaggcgcccgccaccacacccggctaatttttttgtatttttagtagagacggggtttcaccctgttagccaggatggtctcgatctcctgacctcgtgatccacctgcctcggcctcccaaagtgctggaattacaggcgtgagccaccgcgcccggcctagattgatattcttaagcaataaaagtttactggttgtcctatttgccatattattgaaacttggaaaggataatttgaaacaaggtttgaagttaactgaaatatggagattgaatttatactcaattcttgtgaaaagtcttgcttaataagtatgattaaactttgcttcttaaaatttgtattttccctacacttctttataagaatcctatgatgaagtacgtaatctttattatattattttacattaaccatcttttttttcaaattgttttattttttattttactttaagttctgggatacatgtgctgaccatgcaggtttggtacatatgtatacatgtaaccatcattttaatatctcacacatgtaaatgcacatctttgtagttaccaatcaaatgtatgtgaggcaatgaaaggcattgagcagttacagtaaagggcagacatcaggcctctgccagtatgtacctgctgtgccttcctgcctgccctatttctttgttttcagtgtgcatgccagtcactgctgcttctggagacaggatggaaggatacatgtatgtgtacatttatggagaaaaccaatttatag

SEQ ID NO: 13782 - DNA, 1207 bp, Homo sapiens
aacaaagttgcccactcatttaactgcacgccagtagaaggtatgctgtcacaccagttgaagcagcatgtcattgatggagaaaaaaccattatccagaatcccacagaccagcagaagaaggaccatgaaaaagctgaatttgacatacataaagtgtatgctgtggatgttcttgtcagctcaggagagggcaagcccaaggatgcaggacagagaaccactatttacaaacaagacccttctaaacagtatggactgaaaatgaaaacttcacgtgccttcttcagtgaggtggaaacgcgttttgatgccatgccgtttactttaagagcatttgaagatgagaagaaggctcagatgggtgtggtggagtgcgccaaacatgaactgctgcaaccatttaatgttctctatgagaaggagggtgaatttgttgcccagtttaaatttacagttctgctcatgcccagtggccccatgcggataaccagtggtcccttcgagcctgacctctgcaagtctgagatggaggtccaggatgcagagctaaaggccctcctccagagttctacaagtcgaaaaacccagaaaaagaaaacaaagaaggcctccaagactgcagagaatgtcgccagtggggaaacattagaagaaaatgaagctggggacaggtgggtcccatctccccagcttgctgctcctgcctcatccccttcccaccacaccccggactctgtgaagcgcagttcttcttctccacctaggaccgccagcagagcaggggtctccctgcccccaccccagttccccaacccactcccttccaacaacaaccagctccaactgactctggtcttgggaggcgaggcttcccaaccacagaagactactttaaatgaaaaaaagaaattgaataataaagtcaagagtcaaaaaaaaaaaaagtgatctggactagactaggcaaattactagctttgtgctctgatacattaccatttgaatcccttttctaatctctgatatggtaacaattggaaaatggatttgctttttggatcaatgggcaagaaaaggattattttctaaagtaattacctgaatgtttggcaacattgaatataaattttccctaaaaaccctaaacttttgaagtgaaaagaccatagagcagcatacctatggacacgttactcatagagac

SEQ ID NO: 13783 - DNA, 1192 bp, Homo sapiens
ctttttggtactacagaagaggaaatccaggaaatctgcatagaaacacttaggctttataccagaaaaaaggtattctctatttactcgtttgtgccaacatgctaagagtccaagctactctaaggaagaaatactaacttttttttcctccaacagccaaactatgaattactggaaaaagaagtagaaaaaagaaaagtagccttacaagaagccaaattaaaagcaaagggattgaatccggatggaactccagccctttcaaccctgggtggattttctccagcctccaagccatgtaagatgtatttagaattaaaatgacttgggggcactgaaagtgtgtctttattagagagcttttacatttgaaagttgcatagagaaaaatgatgttaggaaactgctgctatgttctctcatggcagtcaaccaacatggaagcggaagcatggtactttgagttacatttagaaacaacttttggccctctgttaaatccagtagttaacatgttgttattatatcttttaaaagcatcaccaagagaagtaaaagctgaagagaaatcaccaatctccattaatgtgaagacagtcaaaaaagaacctgaggatagacaacaggcttccaaaagcccttacaatgggtgagtatacttgggctggaaaactggcttgaggaatcttttatgtgtttactttttaacacactaagtttgtaactaatatgtcatgattttttgaagtgtaagaaaagacagcaagagaagtagaaatagcagaagtgcaagtcgatcgaggtcaagaacacgatcacgttctagatcacatactccaagaagacagtaagtaaatgttttcttagggaagcagtcttatttggagtttttaaaggttattgctttttctttaaaaattgaacatagattattttcaaagttaggttagaattaggcttttagtatgaggcaaattatgagaaatgagtttggagatgttctggacatacagtatcttaatggcattctgttatattttctcccatgttttttggagaagtgtaggagctacccacaaagtgcttgagggccatagtattgttcataatgtgaaaacttctttttttttttttaatttcagttagaaaatgtgtttcattaaccccttattaataaccaataatcaaa

SEQ ID NO: 13784 - DNA, 1174 bp, Homo sapiens
agttgaaaagggagagatgaaatgatgtgttccattatgtccagaaagagggagaaaactaatgaggggaaattgaagggtaatttgaaacatttcacaaaagttgctgaaatgtcagagtaaaaagtaacccctgccctgtaatggacttagaaactgaaatagtctaaagattaaacccacttgcaagtgaatagttaagcgcctgtgtactctcagggatccctgtctaagggtgatagtagaacctgctccattttagcatgtttgtgtatctgcctcttccacaagattaggatctccaaggaaggaagcctttattgtattaggctttacaccctcaccccttagcacacagcctggtgcacccattttctaaatgactgagttagtattttgtcctttgaaggataactttctagagtattatttaacatgaagattttctttccaaacaggattaccaaaccaataacaatgaccaggcagtagttgaaatctgtatcacaagaatcacaacagccatcagagagaccgagtccattgaaaagcatgcaaaggcccttgtggggctctgggactcctgcttggaacataacctgagaccctttgggaaagacgaagacactcctcatgcaaaaatcgcatctgatatcatgagttgcattttacaggtatgtcagtgttcaacatcaggctatttgatactgagttggcagcctaggtgaacctgtgatgtctgtgaaccaagagccaatgcttctgcagcatttagatactgtaaaaagacactacaagccatcaatagctgggagggccggtaattaataaactgagaaagttctgtagagctcctgctacgtgcaagacacactgtagggaattcaagtaataccactgcaagcctctaatctgtttggagagtatacatataaaaagttaacaagaaagcaatatgtgccaagacccacaggaggagtactaaaaaattcagaagaggagatctctttcatccaaggagaacacagtagaagcagaaaatgaactgaggggcagtgcgctcgggacctagcagggaaagtgactaagtcatttcagacatatttctatatgtattgagaatttttcatgatgatatttgcccgttctgaccacagttaattatttcctctgg

SEQ ID NO: 13785 - DNA, 1247 bp, Homo sapiens
catttgtgaaaggatataggaaagttttacagtcatagtctcatacattcaaacaaaatcacagtaaaatggtttcttaacagaattgtaatgaagttactattttttaaaaaaagcgggcaattttctttgttcatttgtttattaattcagctatttgttgttacctactggaattcttaatatagctacaagcttccatggtttgctcatgtctacttctccagtctcatcctggaccactctaacccattggcttgcttttttagttccttggtttgtacctgtttttccatctacctgaaatacttacctcttccctctctcccagatgaatttaggcttattattaaagtttcagcttaaactttatatctcagtgaaacattcctgacacctaacactaggttataacagcttctctcaaagcatcacaaacttctttcatagtaatcaacaaactttttgatttaaaatgattttcatgattgtctgatgtttctctctcacgacttttatggtaaaaaaataaataagacttttatggtcagaccgtatctgttttgtataccatgtcttcaacacctagcatagttcctagcatatagaaggtgctcaaaaagtatctagctatctagctgtctatctctatcatctatctttgtaaaaatctttcaactcttgtaatttcagctattcagcatttataattgcccttaggatttttttctgatgctttgtaatatgaactataactcagagaaaaatagataaatgtatagttcaccaaattattataaagcagtattataatagaatatataatattataaagcaattattgtaaatcagtacttgtgttacaccatccagatcaacaaacactttgccagcacctcagaagcccccatcttctgatagttcctgtcagaactatcaccttctcttttattatgttgagcactttcttgcttttctttgtagtttcactatgtattgctaagtactacagttaagttttgcttcttttgaatgggaatcatacagtatgcattctctgggtgttctgtttctcagtgttgttcttaagattcatctatgtgcatgtagctgcagcatgttcattttgtgctatataatatttcattttatgaacatattacaaactttttttaaccgaaatttctgctgttgatggacttttgagttgttgtcagtttgatgctaatatgaataaggctgctttg

SEQ ID NO: 13786 - DNA, 1224 bp, Homo sapiens
ttgcattgttagaagtatgcatctcatttggttggaggggctggctgaaggggaatggtgaaagccttaggtcttgaaaaaggcatgtcaccatgaatgtaacatctaatttagcaagtcccctatcaagtttattttggatgaaaacaaaagagtaggataaaagcatacaaattgggcacaattcactttcaatcatcaaaagactttatttaacccctggatctgtgatcttaaagtctctacataagaaagtttgaaacagcgtttaattctaaagatgacaatatcacctttgaaaagattttttcataaagctcagtgtaccctccaaataatgttcaatgaatgtgaatttcattttgaggcagattactgcaaagcaattggagacttaatacaattaagtattgtttttacttatacattagtgaaactgcaaaatgattaacaaattatataagactaagaaatggtatttcacttttaaatcaagatacagattgaaaatttatacctaattctgttatctggtacagtttcaaaataagatctactgtgtcacctctaaaagactgttagcagttaaaattctgtcagataaataagggataatctcaaatccagtagattttcgtaaaatgaaaacaaacctcgttagtgattgctgaggccttaaacatttaattcaagcctttagcagagggtgcacatcatttaaggcagtcatgtggtagcggtgtttgggtggctaaaggccagcgtcagcccacagtgcttttattctttgactttgattgtcagtttctcttgctgtttgtttcccccttcattttggtcaaagggtctgataaggatttgtcttaaaatgtaggcaatagagtcttggaagatgggagcttttgttggtccagatcagagtagcagatgagaaacgtggcagccttagtagtcttttgaatggtttctacagtttacacttaaggaaagtgctgccccttacctagagcgtgttcccgttttcttgtaactgtgtgcgtaaaaactttgtctctgccttaaggtgaaaacagtcccgggctgtctccagagactggagtatagacattcccccagaaaccttaatatctcaagaccagataccagcagtgtgtcctaaaacagaaggtgggtagggggtggcacggagtgtctgcacccaaaggctgagaccgcgggtgagtg

SEQ ID NO: 13787 - DNA, 1172 bp, Homo sapiens
aagagtagtgagcagaaatcttaatctaaaggaattaaatggctaaaatgcgtctgtatttttctcaaatattttccaataagcagtgctaaaatatctactatgtttgttttcaggtccctctaaatgatatgtttggttattccactgaacttaggtcatgcacagaggtaggcaaatttaaacttacccttcaaaagaccaccctacagaatgatcatattataaaatcttgaccttgtatgacttttacttgatagtttaaaaaacaaacaaacaaacaaaaaaccctctcttttttttaaatccctagggaaagggagaatacacaatggagtatagcaggtatcagccatgtttaccatccacacaagaagacgtcattaataagtatttggaagctacaggtcaacttcctgttaaaaaaggaaaagccaagaactaactttgcttactgtgagttgactgactctaattgaatctgcgtggttttgatactttgatggattccagtggaataaattcaggctgctgaaacaagaaattctgagcccaggaagcgggctcttctttcttcaaaagaagcccttcttgttcatattcaggagcttctgttatattcaaaggtaattctatgtctatctcaactctattgattggttttatagttcattgaaaatcctcaaataaaatataattattactgaaatatgtttaatatttaaggggaaaagagactaatttcagttatacttttaagcttagaatgtatgttcatttccaaattttgtatcataagagttttcaacatagagaaaagctgaaaaaatgcaaagaataaccacatactttccatctaccttcctttgttaacgggttgtttatcatataataatttgttttgtcatatttgctttcactgtctattatctgtttaagtctcataactctatttttagtttgctgaagacttgaaagtgaatcgcatatatcatgacacttcttggagtgtcattaatgggcaggcttttctgttgaagagtggattccgtatgttcttcatagagagtgtttttcagattcttcattgggatattaaaatattagccaaatttctctctgttttatatatgtctgtttatttcagtttgtggtttctgcaaatttgtaac

SEQ ID NO: 13788 - DNA, 1100 bp, Homo sapiens
acctggagataactggaaaagtcagtaaatctatttaagatactgttgtggccacaaaagagcctccagcaagagggctggagtaagctaacccagaagaggtccttgctgacattataatctccctgcctgtttatgtgaggcttcttagtgagaagctgagtccagttcctggcacagaaaggcagaggggggaaaccgcacctgtggttgatattcacatggcccttctttcattcagcacaaaggtattgaatccacattgcacttaatgagacaagctcccttacctttgagcagtctagtagtggaaatagttatgggataaaaaccaatccaaaatctaatcaagtcatccctggtggaaaacatctctgaacacaaatagtatatggttcacagatactaatatttatagtgaagtgttagcctatgtgtgaagacttttgaaaatgaaatgtgtctttatatttcttccattgtagcatgcagtccattcagaatcttgggttggccatcatttccatcattgctggtatgatactggattctcgggggtatttgtttttggaagtgttcttcattgcctgtgtttcttgtgagtattccgtatgacaacattttgtttcttttactacataacagaatgttcttatttttacttaggcatagctcccagatttgcctaattctcacctgtgaattagaatttcatagctggtgactttctagccctctgaagattcacaggcattttttaggagattcctatccttaaaggcagtgattgagttggtttcatattctgttttaactatttacagtttaaaaaaaaaaagcattttcccacttaaagtggaacaatttgaagagtcctgagtatatccttaatgtgactatgtggaaacgttggtgtgatttaggtgtgagtactcatggttattcattaggcagttttaactgatttttatttttagtccgtaatttagtttttacctgtaatttcattggtttgaaattggaagcattaggaaacttgaaaaatatataaaaataatagcatttgtccataggtaatctttaccctacatataaattgt

SEQ ID NO: 13789 - DNA, 3096 bp, Homo sapiens
acatccatgtgatatgttgttaaaaccatgttttagaaggatttttaatgtcatagatgcttaacatgccgtatgctaagtaaacaaaagataaaaatgcaaatataatatcctaattttattcaagaaaaagtatgctgtcacatgcttgttttaaacccaattacttatgtataatagaaaatatactactagaaataacctcatattaattgaaacctcagaatattaattaaaaactcagaatatttttcaaattttctacattgatcttttgtgacttttaggatcaagaagagttaaaaaattgctcagaaaaaaaatgtgtagcttagtatttgctattacatgtcttgtaatgcttggttttcattttataaggcaggtgagcttcatgtttttttcttcctctttggtaatttattgcgttatgttttgcagatgagaagttaaaatgaatgtgtcatgagaatgggcttaacacatcgttggtttgaaaacttccatttttaaaaatttagagtttagtcattagaaaaaataatggactggaaagttatatttatatccaaatatacctatttcaaagtgtatttgtgaggcctgttttagcctgtgtcttttgtattgtgtgttgctaaagaattctacttttagtaggctaatcaacaatgaaagggttagaaaattgctgtggaacatccaggtgaacttcaggaaagacagtgaaaaatggaaaacgttggagcttctgttgagataatcttcattaggtatatatcttagggatacagccttttctttatcttatagcaggaaaaaaaaacttttgagggaaatagaagggctgcgttacacaaaataaacaatggcattgtcataggccttccttttactagtagggcataatgctagggaatatgtgaagatgtttttatgaagtctctttctgatcacgaacaatagcttgcgctctactctgtagttatgtggattgccgagcaatgacccttttcaatttcttatttctgtgttactgaggaccctaatcacttagggatgtaattttatagtataaactttctgtacagtttttcttatagtctaataagtaaaaagtgtccttcaaattatgataattgcctatgtacatggataaattaaaacactgcacacggagtacttgatgtcttcttttgattttaaaaaatacaaaaacactgattttaacttttattcatgcagaagattatctagaagaaaacccaagtcagaataaagagaacttgcccaattacagtcactgaaagattatgggggtagctttttctccagagtagaactttaagtaacatatgtggttttttttatattaagtaaaatatgagtatgaagcttctctgacaaactttaaatactttttaatatttttcagccttaacatattatttgttaaagtcaaagaatgcagatattttagacaagatattaaaccaatgtatttagctgattatattgtttaaagcacatggcatgatattgtaagtgtaaatgtttgggaacagattgaaagtacgttccttatgcaaggtagcttggcagctttatttacatctgtttttctgacttacagtttattgtgttgatatgacttgtctctgtgtccctacccaaatctcatctcgaattgtaatccctatgtgtttgagggagggacctggtgggaggtgactggatcatgggggcagtttctcctatgctgttcttgtgatagtgagggaattctcatgagatctcatggtttaaaagtgtggcacttccccttcacactctctctctctctcctaccaccatgtaagatgtgccttgcttcgcctttgccttcttccatgattttaagtttcctgaggcctcccagccatatggaagtgtgagtcagttaaacccctgtaatttacaaattacccagtctcaggtagtatctttatggcagtgtgagaactgactaatacatgtgtcattattgagttgttagttctttaggctctgacgccatatgactgtttcagcacatgggtgttgaatacctcacaagtgggggagagtgcaggaagtccacactacttctgctggaaggcccatgtggcctggcctcttgccttgtctctccaccgcctctgtgccccagccacagtgagctgcttacatgttttcaaatgggttgtgttcctttccctcccagcggctttgtccacactgttccctttgcttagaatgttttctccaaggctctctagaacctgtttttacctgatttataccagaaaaccttagcccccagcccagaaccattcttcctcatggaagctcttccagatccttcagggtgtattgggttcttctaagttgctgtgatcttgcagttttcctttttagcttacctcaacttaaaataatgaagaatctctgataatgtgggtgtgggtgtctctctcttccttaaattggaagctccttgagggcagggactgcgtccgttttgttatcgatgattatattgatagtgcctagcaaaagtaggcacaaaataaatatttttttgaatgatatataaaaagagtaaattagaataacccttttggaggatgaattggcaatatgaataaaaagacctaaaagggggatggtggtgggctaaatgccttttggcttagcaattccatttctaataacttgtcctaaagaaaccatcagacaaatatacatgtaaatatattttaagaaagcgtcttcactgccagattttataatagcctaaagtataatagaaagccactctaatttacaataataggggatttgttaagtacatcatattacatacctaaagtgaaatattaagtagtcattaaatggttttgttagagaacatattgacatggaataatgttgatgacattttcacacggaagattcatagtggtgccatttttataaaaacaaatatatctgcatgatatgtacaccagtgtctctgaatgatgaatttctattggcttatttatgttttctgattttttttcacaatagctcttt

SEQ ID NO: 13790 - DNA, 1442 bp, Homo sapiens
aaaagtgtgcgcgctggtggctgggcacccctttgctaatttgagggttagttaccggcaggaagtctggttgtgcgagaggaaaggcgggcaggagggaagcctcaggctggtgctggctcccgcccccaggcctccttgggggacgcacctctgacccagcgggcgcagggtgcggggcactgagccggggcatttggggcgggtggcgggaggctggagcaggcttggcccagcagctcactctctacctcctccccctaggattaccgagaggatgggatggatctaggcagtgacgccggcagcagcagcagcagcagccgcgccagttcacagtccaactccaccaaagtgaccccttgctccgagtgcaaatcttcatcgtcgccggggggcagcctggacttggtgtctgccctggaggactatgaggagcccttcccggtctaccagaagaaggtgattgatgagtgggcgccggaggaggacggggaggaggaggaagaggaggacgagcgcgaccagcgagggtaccgggatgaccgctctccggcccgggaaccgggggacgtaagcgccaggacccgcagcggcggcggcgggggcaggagcgccaccaccgccatgccgcccccggtgcccaacggcaacctccaccagcacgacccccaggacctcaggcacaatggcaacgtggtggtggctggccggccgagctgttcccggggcccccgccgggcgatccaaaagccccagccggctgggggccggcgcagtggccgcggcccggcggctggggggctctgccttcagcccccagacggcgggacgtgcgtccccgaagagcccccggtgccacctatggattgggaggcgctggagaagcatctggccgggctgcagttccgggagcaggaggtacggaaccagggccaggcgaggaccaactccacctccgtaagttggccggggtgcgtgcccacgcgcgcacacacgcgtacacaccccgcgcacagcccgcacgccccctccctgcgctcccgcccgcccgcggccccattcattcttcctcgagggtgggggccaggccagagagcctgccgtctgctcccctggggataaggttgctcggtctgtgagctgtctgggtttgcaggatgggcggagaggaaggaggagcagccagagggcagcggaaagtcgggttagtggaaccggcgactcattttaatggaattacttatggagaccaggttgtgagtcacttgcctgaaaataaatccggggagattctggcaccaaaagtcagtgcctgcgggggatatttcaaatcgtaatagttgtggctttgtcaatcgtggtggctctcctctcgttgccactaatgtctcatccatatataggcttgttcctatgcacacgcacacattcgcctgccc

SEQ ID NO: 13791 - DNA, 1442 bp, Homo sapiens; identical to SEQ ID NO: 13790

SEQ ID NO: 13792 - DNA, 1154 bp, Homo sapiens
gattgaggtttatgtaggggaatgatgaaggttaaccaaggaatgtttactttttctgatttcatatagcagatggaattgctatcctagaggtttcaaaataatcttatcgagatgacttttgacccgtcttcaatagcattacaacaatccccgcagcctggagactaagctctgctgctgttttgagtgagctggccccacagagggtgtgacgtgggagtagagatgagtgtcggcctcaaagtctgctcccatctctcaggaaagcaccttctttagattaaggtattggggctgacactaaaatagatgatatttgaggctaagttttcaatttcactctttccagaaaaacaaagtactgatagggatctactctaaaagctggttttaaatacaaggcgttacagaagtgccaaatgcagtcactgcacttaaaatcatggcctgtggatagaaacaaagctgaagagtggcctgccgagtgtagagcgttctttcacttgtaagaaattaaatacagagacactcaacacaattcctggatgtgatttcctgttggttcatctacacactctagaagattcctgaggagaggtttattgcccaaaggaattcagtggaggtattttcaggtttggctgatttccaagagccccctctcagggccaaattatccaattccctttcttggtgagttcaccacacttcattcattcaccaaaaatatgcatggagagcctaactactacatactaggcactgagcatacagtgctaaaaataaaaaaagataaaatcctagtcctaatgtaggatacatgcattaaacatatgaacatatgaaccctgtatttgtcagggttcttcagagaaacataaccaatagggtataatatatatataattcaccttacatatatataaaattgagcatctgtaattaaaaaatctgaaatctaaaatgctccaaaattctaaactttttgagggctgacatgatgcttataggaaatgctgtggaatatttcagattttcagattagggatgcctcaccagtaagcataatgcaaatattccaaaatccaacaaaatccaacatttgagacacttctagtcccaagcatttcagataagagatactcaacctg

SEQ ID NO: 13793 - DNA, 1154 bp, Homo sapiens; identical to SEQ ID NO: 13792

SEQ ID NO: 13794 - DNA, 1148 bp, Homo sapiens
tatagccttttttaccaaagaccaacaaagaggaaactgttgtcgttgagtgcagtgcgacatcagaacatcactggatacatgagatcctgtccacgcaaagaacctacgtagggccttggcttcgagtcaatattttgttatgtctgttcacttcaggaaagttttgaggccaagaatcaaagacatatttcaaggttgttgtaaatatatttcccattattaactatactgctctctctgtttatgctaaaatctattttaaactagaccctttttctgttacttgagatttatcaactcaagtagcaagtcacattgagggagggaactctgagctgctctgagagaaggctcagaggatgttgtagcccatctctaagtggatgctagctggcatgcatggaaggctcaggctgctctttttccctttgcagagcaaacagagttcttcctattctgatagagacactactgaagaggagtctgaatccttggatgacatggacttccttacaaggcaaaagaaattgcaagctgaagccaaaatggcccttgccatggccaaaccaatggccaaaatgcaagtagaagtggagaaacagaacaggaaaaagtctcccgtcgctgatcttgtaagcagcaaaggctgaaatgcaaggaagtgtttgggagccagaaatggttgacactgtcccagtcctttcccagaattatgcaaacttgtgtttctctaaggcggtttgtaaaaagtcctgtcattgagaaatgattaagtttgtttctttttccttcctactgtaggactgaaaaatacagaagcaatagatttcacaaaagtaaagtttgctgttgattgatgtctactgtttcttagcaacaatattagctgccacgggaatatttaaattcctttgaagcgatctcaatctaagaacctattggtcttggcaaacttactattgctataattgtcattctcatatttcaataaagacaatatcacatagtgaataggagtcctggactttggagtttaagtctagctctgccattgacctgctatgaagttctaagcaagttacttaagtctcagttttctcatctataaaatggggatgataatgcctgtgtcagagtatgattgt

SEQ ID NO: 13795 - DNA, 1148 bp, Homo sapiens; identical to SEQ ID NO: 13794

SEQ ID NO: 13796 - DNA, 1148 bp, Homo sapiens
ggaacaaattgatgtaaaaattacccaacatgattgcttctgcatcttgtatcgggacttccaccttattttcttaaagataaacagtttgatcctattcatttgctctcaaagaaagcccaaaccagtgaatactgctagatagttgtgtaatagataaacagataaatgtgtttcatcaggatttacataattttagatgcttttcaataattcaaagttttctgagttttgcttatagttcatttaggttttaagcttcatgttgttttcataaaatgaaaacagttctttcattttgtgctcattagaaattcaagctgcatattcataaacttatacatattttgtattttgttgtgtacccttttgttctctttaaaaccatgtctacataaagtttttcaattaaaagaagtttttaaaacttgatgaatgaaatggtcctgtgcttttctgcctaactcttttttcaccccactcttcattattagggggacttaggagccattgatgaaaaatacgacgtggctatatcatcctgttgtcatgcactggactacattgttgttgattctattgatatagcccaagaatgtgtaaacttccttaaaagacaaaatattggagttgcaacctttataggtttagataaggtgggtattcgtaataacctacctataattggaattttttttttttgagacgtagtctcgctctgtcacccaggctggagtgcagtggcatgatcttggctcactgcaagctccgcctcccgggttcacaccattctcctgcctcagcctcccgagtatctggtactacaggtgcccgccaccacacccagctaatttttttgtattttcagtagagaggggtttcactgtgttagccaggatggtctggatctcctgaccttgtgatccgcccacctcggcctcccagagtgctgggattacaggcgtgagccaccacacccagccctataattgaatttttaagtgctaagtgtgtttttctttttggattcaggctttttcttaatggttactcagtgaacacctgatgggttttgacgattattttatgttctggggttatatgattataaaaaattgtttgacatttgcagtgcctccactaaagga

SEQ ID NO: 13797 - DNA, 2319 bp, Homo sapiens
accctagccttgttccagaggcaattcaaggcggaacatttggtttcaattcatctgccaatgtaccaacagaagggttccagttttagaaagatgttgtggaagttaggtacaatgcagcactgagatatatatatatatatgtgtgtgtgtatatatatatatatatacatatatataaaaaggtttgatccatcaagcttggctcatgggatctgctgctgcattaaatcgggaaagaaaatgtgaagatttcatttggaatcacagaaaatgcccaaatgaggtcaagatggcgagtgggtgcgagtgagaatgagtggcaaaatgtaatgaaaactttacatgaatgcttatttaggttgttcaaagtaaaaagggctacaggtcacagatcgtcagtgcctgagaaagaacattgacttactctatatcaattgaggggaaagtgcagtaccgtcatcttcaagccttgtaagcataaaagagaataggctgcccatataagtcaaaggaaaatgagcccaggccttgctatgaagcagtgtgtgaatggacaatgttgaatgaatgtctggctcagtgatggagagccaggttcatctttgaaatctagggctcttcactcatgaagcagactcctagtcctggagtgactgtgtacgagagcgtggttgtggtgctgtatgtgaacgcatgcaagcttgattcaccttcagggggctgataacctagtaaatcatcaaaatgagatcataagtgttaatgtacactggacatgaaaacaaagactggtttagcagcagacattggtttactctgcagcctgtgttttctgtttccccctttcccacctccttccccccacccaatccttttttttttcttttttgcttttcttttctttttttttagtttttatttactttacctagtatgcctttttttagttgcttctcaagtcagaaaacttttcaggaaggtttccctgtgcatttgcaccagatgaatgtttgatgctatgaaaagctttccatatcatcaaaactaatttgtgtagatttttgcatgaaaaaaatcataaatttccctcaaaatagactgtgttgcagtacacaagttgccataatagtataaaacagtaaaatgtgcttaaaaggccatccttttcattttcagagataacataaagatctttgcatgaggtaaatctacagcatagttcatttttagattttgttgagtcctgtaaagaagaagaagaaaaaagtttcagttgtggtagaataccgtgctgtgtttaaatgttacttgttttcaaactttgttttctatgaaaatgatatggaaacttctaaaatggaatttggtgcatatgtactgctgaataaagaccgatgaagaggtttgagtagatgtacaaatcaagtaatggtttgaacacctttaataatatgcctaatctgttcaattgttttagaatctttttatcttagatgtaggcagccatgaacaatctattttgagccactttagggagaaaactttgtatttttaaaacttgcataaaagttatgcaagtggtttttataaattggaataatacctcagttttgaggttatgcacactaaattaaatgtgacataaattaatttgtacaaaaagaactctttataaggtggctcattgtaggaaatcctgtgccttcccctttgagcacaagtgttgcatgaacaacagtttgctataagaaacataccagattagccaccattagcatctatatctactttgtgtttaaaaatcaactggtaattctgaaacactgtagaatggataaaaattattttgtgatcataactctttgttgaactagagtatttttgcagcattccttgtcatcagaaacatggttaaagtttaaaactagaagcagcagaaaactagcttgtaaaatttatccaagtagagtgcaggctaggctgtcttggggaaataaacattaaaacttaaagcaatgttttacatggggtgtgtgtgtgtggtgtgtggatttttttttttttataaagttagagtataattcaatggcttacattagcttcctgtctttttacctagaaccagcataataagaaatttctttggttctgtcatttcagtatggacatattaatattttagcccactgagtttgtccagttgacaccatcagtgcttcagttttctctctatccaaagcaaggttttaactttccttcattctccagtaaaacagaccgagacaacttgaactatattttgagtattgctatatc

SEQ ID NO: 13798 - DNA, 1175 bp, Homo sapiens
ccagacatcctgacctttgacctggacaagcttcagcctgagttcatgatcttggcatcagatggtctctgggatgctttcagcaatgaagaagcagttcgattcatcaaggagcgcttggatgaacctcactttggggccaagagcatagttttacagtcattttacagaggctgccctgacaatataacagtcatggtggtgaagttcagaaatagcagcaaaacagaagagcagtgaacccttcaggggtctcagctgccttagactaaaggactttcaacacactggtctcttttaatttagtgaaaagtgtgggagttgtaattaggatcatccaccccagacatggaatcccccctccctggtggtcttaggtctataatcagtgacgaacagagggtgcccttggccaatgtagttaagaaactggaaaatggtttcttcatgttttcccaactctttcatccagtgtccaaaatatataagtaaatagctgtagagtcacatatatgaagtgaatagcatatgtgtcatttagtctccctgaagattcttttcaagatcctgttcagggtcctccaggcatcagctgttgtgtcctctctttgtaacagtggacaggacagaccacccagtgctgcaggagacaggccactgcgtcacctgtgagtggtcaggggctgatgtggcaacaccctctgccaagagacagagctgtcctgagaatgctttgtccttctgagcccatgttttctgctcagtagcagcttggaagcagatttggaatggtttactattttggctgctcttggggactgcgagaagcagagagaatgagagaccagtggcaactgcctgcacagcagagataaccctcttcccttgcttcctttaatagttaaatagactttgtataccacctgaccagcctttgtgcatttatcctaatcatgcatgaccgttaaccttttgcttagtccttaccatatgtaataggcagctgttaaattcaccaacagataccctgatttttcatcttacgtgaccaagaaaccacgttaggggaaatgaaaaaagcaagccacaataccatgattccttccattttcaacagtagatgaaggaaatgatactgaatgagtcacagtgttccctggcaagtaagctgtttg

SEQ ID NO: 13799 - DNA, 1342 bp, Homo sapiens
ggagtgagctggtgaggttaccaccctgaattgagctccagctgccagtttttgtgtttttccttgcccctttccaagtggttttcaagtgtcaggcagtgttctgagaagcagcagcctataactgtatgtgtgttccttgaagccaggtgcagagttcccagctactgcagcttgggatttggtgggaaactactgggataagcttctccttgacaatggaaaggcagcagtcttcaacatttggttgcaaatctccatccacatcagggagctttccccaggcaaatacaaaccgccccgtggcctgcaggcctgcaggggaggcagcaaagggacctggcagttgcaacacagtaagtcaggaattcaagcgtgaacccatattgataagtgggccagaattatttaggggcctggcttgctgctctccatttcctgtatcgctaatttatcatttttccaaccttggtattttatattatttagagaaaatgctgggtcactctctttgcctaaggtgactcaaacagccaaacgaaacttccgttgcctcccagccctctgtatccacctggttttgttctttccctgtgagcatttgtggttatagcttcccatatgccacattcaccggccacctcctcgccgtggaaccctgccctctcccctcctgctgctgtagagttttcccaaagcagtgtccaggagagaatttgagagagtgaagaaattgccttgtagatgtggagggctgcaatctgtcttgatttctccaagcacttaactttctttgactgcactgagaattgctaatgatttcccatgagatttgcttacttttgtatactgtattttccagcattacagaaccttggttattgttttttagccatagaatcttctagtaaaaaatatctgccaccattttagatttaagcatttgcctatggggagacactgaatatgtggatgtgtgtattaatatttggggtggggacagggaagggaatgtggaaaacaaatgctggctgtgagcagtgctgagatggccaggccaggcggctgagtttgcttggaaattcaggacattctgactcctaagagttgcccccacccaccatcaaactgaaatcagcaccaatggtgtcagcactttacagcccatagccaactttctttatttttaacgtagcacaaaaatgtataatagcaaggaaaagacatttttaaattccggttatttttattgtctaaaatgaaagcaacagtgttttgataaagatgaaaaagaaaagctactaaattagtaaatcagtggttacgtgccctgcagaatttc

SEQ ID NO: 13800 - DNA, 1218 bp, Homo sapiens
ctgaaactcatgaaaaacccagactggagactggagggttacacttgtgatttattagtcaggcccttcaaagatgatatgtggaggaattaaatataaaggaattggaggtttttgctaaagaaattaataggaccaaacaatttggacatgtcattctgtagactagaatttcttaaaagggtgttactgagttataagctcactaggctgtaaaaacaaaacaatgtagagttttatttattgaacaatgtagtcacttgaaggttttgtgtatatcttatgtggattaccaatttaaaaatatatgtagttctgtgtcaaaaaacttcttcactgaagttatactgaacaaaattttacctgtttttggtcatttataaagtacttcaagatgttgcagtatttcacagttattattatttaaaattacttcaactttgtgtttttaaatgttttgacgatttcaatacaagataaaaaggatagtgaatcattctttacatgcaaacattttccagttacttaactgatcagtttattattgatacatcactccattaatgtaaagtcataggtcattattgcatatcagtaatctcttggactttgttaaatattttactgtggtaatatagagaagaattaaagcaagaaaatctgaagtattgtcttgtttttaaaaaatacagttcctagtgtttttagaagtcacttaatttgtctcatttttccacctggaaattaggaataatgtagaatgcaaggcagtaatttccttttggaaaggactctgaaggcagaaaagaagggagagaacctcatgggcagaatattataaaaagagtgtcatattccagcatttgaattggaaagagaagagtgaagatccaagttgcattattaatctgccctgtgttttttccttttaacaatcagtttgagctgctgctgttatgagtttctcatcaagatgaaagccctaatatgtaaagtcaaatccgatttaaattttgtgcttttatagaaagaaatttcttcatagacgtggtgatatatcatttgttggacctgctaatagtaggtcaaaggggagcactccttgccccctgttcctgggtttatgcagttttctttttagagtttatatagggcaagtggttctttttctctgaattacaggatggaaaaaggtcatatcctttgtcaggaaatata

SEQ ID NO: 13801 - DNA, 1122 bp, Homo sapiens
aaaaatacaaaagttagctggacgtggtggtgtgtgctacttgggaggctgaggtggagaatcacttgagcccaggaggcagaagttgcagtgaaccaagatcgtgccactgtactccaggctgggcaacaggcagagtgagaccctgtctcaaaaaaaattatatatatatatatatatgtaaaatatacacagaatattctcacaaccacttcagctaaaggaaaatttgaaatgctaatctaataaatcttaggaattaaatctgtataccgttcttgaaatagtataacttgtttttatgactttaaatttgaggacatttgattgatgtcctcaaagcattaatggaaaaagttttaaattaaatattaaaggttcttctttaaagaaaatatttgttattaaacaaaaccaaaagaatgaaggagtgtaattgttttatcaggtgatgaatggtgctatccttcaacaagtgtttgtggtggattatgttgttcagtcccaaatgtgtggagattgccatagagtagaagctaaggatttctggaaggctgtgattcaagtgaggcaaaaggtaatgagagaagatgatgagtgagtcctacatcttatatttcgtctttgttaattataacttttccttctttctaaatccagggatagtctgggtccctgaagcattcacctttggaaatagatcattattacattttagataatctttaaagattgttattgtttgaaaaatcagtatgctctatctgtagatagtatgtgtgtcctatacctataaatggcttttttgtggggcatttattgatcaaataatttatattttagactttgcataaaaaaactttctactatctggaacagttaattctgaaatatggaatgcatcagaatacacttcgtatcaaagagattcatggtgagttaaaactcaaaagcatttgaaattatgtcagatttttatttcaacatacctaagtaatcttatatttactgataatatctggattagtactgtccaaaagaactttctgttaggaaaaaaaaaaaaaacaacttaattctttatctgcactgtccagtatggtatagtcactagccacattt

SEQ ID NO: 13802 - DNA, 1125 bp, Homo sapiens
attgggatgttgtttctgctatatatatattatatatagcagatgtactatattatatatagcagatgtagagaatgattgtagtctacactagtagatactttaaaaattaatttgataaagatttggcctctctagtggtttactaccaggatttctaggctgttttgtctggaccctgattttctgaacccttgtgtcaagcaagagtttgcttggaatacgttcttgctttaagattcccctaccttttcagttattttgttcactctgcctatgttggcccatcttcctgtgaaaacatttcttttgaaaattctacatatatatatttttagggacattattaatgttttataaaagtcttgaataaaatcttagaaaaagtcaatgatttatttttatgaattgtttgtgagtctttctatactcatgattcagtaatttgttaattttgacagtgtttcatacatcagaaaaatacaaaaaattttctgtctttaaaaattagaaaaccaaaaatcaatattgtatttaacttttctctgagatgcttttagagttatgtttagattattgaagagtacattttctttcctcttaagcataccctcggggaagtctgggtacagaagacatctgaaatgaatacagataaacagtatttttgtcgtactcatttgggacatcttctaaatcccggagacctggtgttagggtttgtattatttcatattttaaactgccaattaggattgcaaattttctttgggaaccagcaaaactacctaaaaatactaacattgtttattctaaaaagatcgaagggttcttaggagccttataactcattttattgttgataactaaattaaactgggttggacagaagcccatagttactccattttggttataatcttaaagagtaatttgttgtaagattttgttaattgagccttgaagttatatggttgtatccatatttagaactgcttttgcagattgggtcttttttattgtgcagttgctactgctcagataactcacttttaagatatgacaactatatatatacaaagggcttgtaaaggcatagatcagttctttctgaatcagagtttt

SEQ ID NO: 13803 - DNA, 1141 bp, Homo sapiens
ttgctttcgcataaaacttgcaaagaatatttaaataattgtactgatagatacttctgaaagtaactgttttaactcattgaattttttttctattgtcaagtcttaatttatctttctccctctcaacctctctctccacctctccctcacacacactcttacttacacacatagcatatttatattatgcattctttgttataattctttgacattttaacatctctgaaattagggagtgtcttacaactggtgacacagaattacataactataatatatttatagctttcttatgtagttcattttctagaaatatatggaaggaaagtgtctgtgactatattatgaataatttccatctcctgggcccagagggagatcgaatatgaagggaaaatctgatgaaatatgtgtatttaatcaattttcaaacagtttgaagtggctcaattttaaatggctgattgataatggtagttatttccaagttggaataaataactgcctgttggcttcagagacaatagtgatgctcagtctgagatactgtatttgctttttttctattacaaaaatgacaggccagagaaacttggggggaaaaattcttctgctattttaagatgctgtccctctcactgtttttgtgccatcattaatcaactgtctgcatatgaagaagaaaggaaaaaaagcctgtagaccacttaatgtgccttactttagcacagtgcaaagaactcagacttcctgtatgtctacctttgtgagcatatccacataataaatgtgtcttggaacctcagcctgatatttttcaaatcttgaaaaatcattgaaattgcctatgtattcccacaaggataatgtgtgttagctattaccaggaaaatatgttttattacacaatagaatctgaaaatatccactgtatatttcaagtgtatgttactaaattttaatttaaatttagcagaatgaaaaatgatggtggtagaatgttcatatatagtgtacatagaagtttgcatttcaaagaccatgtctataatttaggctatatgatcagtagtctgatttatatctttaataatcatattatttaaaaattatttaatactttattctttacaaa

SEQ ID NO: 13804 - DNA, 1177 bp, Homo sapiens
ttatcttggggccattctcatagaagattttgctggccagttcatagcctccttctttgttctgtttgtgcatctggcattagttgagctccacccttttccccaagcccagcacgtgtttattcactgtgttactggtgcagaagagctggctcccgaagtcctctgctttctcacaaacaagcctctgtaactgctctggaattgtcctaacaagggaagaagagcatgtccagttttaattttgtaaggaaattgatgtcttccccctcccttccctgccgcactgttagcaggcatcagctcatggacttgtgctcatgtgctcacgtcctaccaggaggtccctagtggggctttgaggtttggccgagctgttctcctcctagagcagggcacacatcctccgctctcagccacgtgtaatccttcctgtctgcttgcaagttgggcacaaagtactggcgcttgggcccaccctcttctttagtagcaattaacctttactacagagcttcctttgaagtttgctcatgtttttattacaaaactgcaatgaggaacataatggggggaaatgtctaaatttctgagttacctaatctgttcaattccctagttgagctcctcttggcagttgtttcatgtagttatgatctcaaccagtctgcctgggatctcaaatcatgtttctgtctcagcctatttttaagattagggagctattacacacacacacccctacacacagattgcaaatacacatggatgtgtgtattatatgcatatatgtgtacagttgagtataaataattaacttcttaataactacagaaatcagtcttactttatagtcaaagtatgtatatatgctcttaatattaaactttttagttgctgaatattttctatcaatgaactaatgtgaagagtagagagaaaaattattcatgttactatcactaatgataatgctgagtgataagtattatgatgggcattaatggtgaaactcaggattttgaatggcatctgaccagatttgcagttaaactaggcggaaaggccaaaagaaacaaatggtgagttatataaaacccacaaaaagagaaggcatttaggccagccttgcaaataagaaccgaagaattacgagtgaaatggcatttttttctag

SEQ ID NO: 13805 - DNA, 1203 bp, Homo sapiens
agtccaaaaatctcaccttagtatatttaatcattgcttaattgaagataatcattacagtggcacactgaattgcgaagtacttggagaaaaaataacaccaagaaagctgaaaagacattatttggacccatcaaatcatcacttttaatctgttaacatttcttaaactgtttattttctcctttctttattacgtcagctcttgcatttgagacttaacataaagtgaagctgagtcttgattatatgaacccagaaagagtctttatatggataatctcaaacctataatctcttttatacttaaggtacatcattaaaagtgaaaattatattgaatatcactgagttttgacaacttttatataattgactgtaaagtgttttgatttagtggtagagttgactactttttcacgggcatactagttgtaatttctcttgtgttgctaatttatgccttcctttgcttattttattcaggtcttgatatttttgcttttcagtctctatctatatggggagtgtaatgccatacctgtttttcccaaaggcttttaaagaagcagttttttcaccgagccctaaaagtaatgaaaatgaaatatgataaagacataaagaaagaaaaagataaaggaaaagctgaaagtggaaaagaagaagataaaaagagcaagaaagaaaatataaaggatgagaagacaaaaaaagaaaaagagaaaaaaaaagatggtgaaaaggaagaatccaaaaaggtgagttaatctaaaattaagtaaaaatttaaaaatcattatgtgcacatgaacactactggcctatgagcacatttaagtattatgcaacacctacctgagataactatattagagttgttataaataccgtggttgagaatttttatttctgtgttacaaatagtcagtgaaagttttttgactgtatgaacatcatatttcttgcttacttgtgttatttcttctgtccaacttgtgttttcataggaggaaactccaggaactcctaaaaagaaggaaactaagaaaaaattcaaacttgagccacatgatgatcaggtttttctggatggaaatgaggtgagagtaagcctataactagaagttcagttttctataggagtttttagaaagatgtttgatgccttcactaataaaaggaaaaattttgagaaatcta

SEQ ID NO: 13806 - DNA, 1102 bp, Homo sapiens
agcttggattagaggtttagccaccacgcccagcactaatcaggatttaaatattaatatttaaggtgtatgaaatgtgcagataataaaactgttttcccagctttttattaacaaatactcccttctgaggcagtgtttgaattactcaattagagaaatttttctccccacagctcgatgcattctatttctcatcatttggctcataactggaggaaggcaccacttttggttcttgccaaatctgactgctgatgtgggcttcattgactccttcaggcctctgtacacacatgaatacaaaggaccaaaagcagacttaaagaaagatgagaagtctgaaaccaaaaagcaacagaagtccgacagtgaggaaaagtcagacagtgagaaaaaggaagatgaggaggggaaagtaggaccaggaaatcatggaacagaaggctcggggggagaacggcattcagacacggacagtgacaggagggaagatgatcgatcccagcacagtagtggaaatggaaatgattttgaaatgataacaaaagaggaactggaacagcaaacagatggggattgtgaagaggatgaggaagaggaaaatgatggagaaacacctaaatcttcacatgaaaaatcataatctgactaattttgggactgaatgaataagtacaagaggttggattttctatgttggctgattaccatattgaacacatggcatttgtagcattctttaaatctatctactgaaatgtatttgacattcaagcagttatattcggtccttcattttatagaatattggcactattattggtacagtttaaagccattaatatgttttatccatttgataattttacagtaagtaggtctcattcattttgacagttatcaaagatgtactttccacagttaaatttacattaatggcaatttttgatagttttatggctttttactgttagactaatcaaaaataactttaaaaggaacaaagaaactccaacatttcacattatgcatagttatgtagccatttcacagtttctttaagatgtgtaaactcattgtccttgatagtttttatttt

SEQ ID NO: 13807 - DNA, 3610 bp, Homo sapiens
aagttaagattaactggaatggtgacaactggtgtcttttttattcgcagtcctcagttttgaactcctttttggctctaaacttgcttgtgggattatcggggttttttaaattttcagtactccattcttgattcgtctagaaaatctgggggattaatctaaaaatttatagatttcctttcagtacaattagcctaattacttgatttttaatcttattttaccatttaaaggttgaagaaatcttgattatgatgaaaataaatttatttttctttcaacagtgacattgtgaggaagattgatcagtctgaatttgaaggttttgagtatatcaatcctcttttgatgtctgcagaagaatgtgtctgatcctcatttttcaaccatgtattctactcatgttgccatttaatgcatggataaacttgctgcaagcctggatacaattaaccattttatatttgccacctacaaaaaaacacccaatatcttctcttgtagactatatgaatcaattattacatctgttttactatgaaaaaaaaattaatactactagcttccagacaatcatgtcaaaatttagttgaactggtttttcagtttttaaaaggcctacagatgagtaatgaagttatcttttttgtttaaaaaaaaaaaaaacactgcattaaaaaagtatctgttgcattaaggcacatagtgggattacatcataaacctcccataatttttgtcattctgtgttaaatcatttcagggtttaattttgaaataaaagattaatataaaatgcaacaactttttatattacctattagttttggagttctttatgtttaaaaattcaggtgtaaattttattgccttggataaataaattattgatcttttttaaggcagcagttattaaattggtaatagaagatgctgcttgcttagaattgggaaattcggctgggtgcagtgactcaatgcctgtgatcccagtactttgggaggttgaggcgggcagatcacttgaggtcaggagtttgagattggcctggtcaacatggtgaaatcctgtctctactaaaaatacaaaaattagctgggcatggtggcacatacctgtaatcccagctactcgggaggctgaaacaggagaatcgcttgaacccaggagatggagttggcagtgagccaagattagcctgggcaacagtgagtgagactcggtctcaaacaaaaaccaaattgggaaattcttcttgagttaaaaaagacactttttattatgaatcagattccaaatcattaactatttttgcaaaactggcacaagtggtttttctttttaagtatattaacagggtagctcctgagcctttccctttattggaaactttaactgcagtgttaatatatacactgcaaaagaccaaggatgcagttgaatggaaaattactcagtgtatagaaaggaaaaaaaccagaaatttaaaatagatacagaaaagtacactggtaatatttttatttcctattggagagtgaatccccacagttgctttttgtgacttgattcaaatgaggcactcattattgttaccaaacttgtaaaagcattccatgtattcagtggaggcagaatgtataatattttttccttataatttagcatacaggaaaagtatttattttttaagtagggtatcttaattatgctcatttcttcccctaaaccacattatctatatgattggaccctttagtgaaatcagaaaaataaagtaggcatgaataaatgttcaggacacacacatacactcacacacatcacagtatcagctctttcagtgagtttttattaactagataacacatgtaatacatagtagaatacatttcagaggcagagttcctcggattattttttatggatattagtgttcagcagcttattatttaaaggggtgccaaatatagcatccttctgttgtttattttaaatatatttttaatgaaaagggacttaaaaagtaaacatgattatctaaattacttaaaattttttaatcttagtaaaaattttaggaaagttatctagtttaaatttcaaatgttttaaaatttgtaggcatttaataaattatctttttttggaggggtggatgctgcatttcattggaaatgtcatttttccaaagtttctagctatatactctctttccttcaaataacataagtctgaaagcaatgaaaacgtcaaaggaaaatgtttatatacatccacatgtttatttaatatgtttctcttaacacctgaaacttgttttaaaacaaaaagcagtattcacttcaaatcataaacttagaattctgtatctcatgtcagaaatatgtttatggccttgcttttaagtggtgctgtttcccatagggcattagttctcagattttggaatgtgaaataatcacctaggaagttggtttaaaatgcacactagtgagcccaccttagacttcttttggggccttcgacctcactttgagaaataccttcttcaggttattctttatgtttgtcctgtggttaaatattagagtattcatgataaaacattttgagaaggggtaagcagtgagttattacccacaatttaaagcaaattttgaatgaatctttaagttaggtatctaccttcccaccagccccccaaaaaacctctcagtagtttctttcagtgtacaaaatgatgagcatttttctatgatgaggttttaaccattattcagggtggtcttttgtttttaaatctttttttaactaataagatttacggtgtgtattttatacagaaatgcattataaatgtttttaattgtgttctgttttttgcagtctttaagtgccatgccaattgttcttatattctatagaagttcgctcaaaatactcaacaggggaataggcagcggacagtcagaatggttggaattttggctttctaagaaaaactttattttgcataagcatgtggtcagatcattttgtgcatatgcagcctggattggatgttaagtaaatgcttgttcagtgccggtacatttacttaaatctgtttttatttttgtcatgtagaatactactgtggtcatcataatgtaatctatttctgtaccttttttttttttttttactttgaagtctttaaataaaatgtataatacccattgagagtggatcatttttcatatgtagtatgtcagaaatttgtataagaacaaagatgcatcaaaatttgttcaagaaaaagtgaaaatttcagagtttggaattttgctgtacttaaagcaccattctggtagaactgatgctgtcgtatttacatttaataatgttacatttagctggacatagtggctcacacagcactttgggagactgaggtgggaggatcacttgaccctaggagtttgagttcagcctgggcaatatagtgagaccccatctctacatacagaaaaataagaaattagccaggcatgccggcaaagtgcctatagtcccaggaggctgaggtgggaagactgcttgagcccaggaggttgtggctgc

SEQ ID NO: 13808 - DNA, 1192 bp, Homo sapiens
agggcgctgtagttgacgggagccgcggggaccccggagacccggacgcccgtcaccgcccccctcccccagtccagcagcgctccgcggggatgccctggtctcgacccggtccgtcagcccccggcggcgcagggatccgcgcccggcgcctaaactgccctggtgtcctcttcgttctggcccggggctggcgcggggaggtgcagcattaggggcgctgaggtgacacccgagaacttcccagggagagggtgcgcgggggggtggatttccacagtccttcccgcggcccccgcgggggggcggtgttgggagggcacttggggttatcccaggctcgccggtgggggtggggggactcctccctttacttccctccacccccttgcacacccacccccaggcttcccgtgtcccttgttctccctctctccgggttagagataggtgggtggctttgagtgggcggaggacttcagggttttaggggctcccccattctaggtcatgcctcttgctctcttccttggcctgtgttgagtaaggtgtgttcctgtggtggacgaaagtctgtacgatggttggtggcattggtccttaatcctttgggtctgttttaaggtaaagtgctgagagtttgggaagcaaaaatttctatttattggatttcttttggcttttctctcaagaaggaagtggaaaaagagtcttttctttttccctcttcctccatttgcattctttgtgaggtttgtctgccttgtgctttttgtcccggattagtcttgttgaaggatggagattcccaggcgtggagtctatagcttttggcttccattaagtaaaatcgctaacctttttttaagagaaagttaatttttgcctgcagtcattccagaaaaatagtgtacacggactagctgaattaatccacttaaaattgtaacttagttacatatggtagatatgttaactcctatctgatttttttggatgaaactgttgttttgtttttaaataggagatgaagtaatggatttttttccctcccttaaaatggcatagctgagaaagccccggtactactaattgagatgatctgcttaagagtcttcatattctgaactcgaaaggccttttatgttatattattgctcgctttacgcaactccaaattgctttcctattt

SEQ ID NO: 13809 - DNA, 1156 bp, Homo sapiens
agtgaaattataccagattataaggagaaccaaaactaagtcgcaaaatttattaatttaaggggctctcgctttgaaagtttgagagtaagttacgataggcatttgtatccattcattactttcctcttttcaaataagcaactaaatagaaatgctaatctcagacttaattatttaacagaagagtgtaccatggaaaacctccagacaaatttctccttggttcagggctcaactaaaaaactgaatgggatgggagatgatggcagccccccagcgaaaaaaatgataacggacattcatgcaaatggaaaaacgataaacaaggtgccaacagttaagaaggaacacttggatgactatggagaagcaccagtggaaactgatggagagcatgttaagcgaacctgtacttctgttcctgaaactttgcatttaaatcccagtttgaaacacacattggcacaattccatttaagtagtcagagctcgctgggtggaccagcagcattttctgctcggcattcccaagaaagcatgtcgcctactgtatttctgcctcttccatcacctcaggttcttcctggcccattgctcatcccttcagatagctccacagaactcactcagactgtgttggaaggggaatctatttcttgttttcaagttggaggagaaaagagactctgtttgccccaagtcttaaattctgttctccgagaatttacactccagcaaataaatacagtgtgtgatgaactgtacatatattgttcaaggtgtacttcagaccagcttcatatcttaaaggtactgggcatacttccattcaatgccccatcctgtgggctgattacattaactgatgcacaaagattatgtaatgctttattgcggccacgaacttttcctcaaaatggtagcgtacttcctgctaaaagctcattggcccagttaaaggaaactggcagtgcctttgaagtggagcatgaatgcctaggcaaatgtcagggtttatttgcaccccagttttatgttcagcctgatgctccgtgtattcaatgtctggagtgttgtggaatgtttgcaccccagacgtttgtgatgcattctcacagatcacctgacaaaagaacttgccactggggctttg

SEQ ID NO: 13810 - DNA, 1604 bp, Homo sapiens
tgcttaatggatttagtatacatgaaatagttcgttttgtaaaaagtaatttgaaaatagatattttctatgatatgaggattaaatggaaaaacaaaacaattaaaattgatagcgccttttaaatcacatagttggcagaactgaggcagagattggaccatgctgaggccgataggcaagaactccaagatgaactcagacaggaacgggaagcaagacagaagttagagatgatgataaaagagctaaagctgcaaattctgaaatcatcaaagactgctaaagaatagaaactgttaaagagattcatctgtgtattactgacaaggttttttttgtttgttgcttgctttggtaattgaattctgaagaatttatctgcatgacgataactaggcattctatccatttgtagatcagagaaagtgaagagattatatattagtacttaaatttttacattttccaaatgaatgaaaatgtatgtttctttgtacttttttaaaaaaatcagcttagtaacaatactatatggtttcaactagtaggtaatctgcttatatttctaatgcaaacttaacaattgtgtactttttaaaagctgcaatatgtgttggaaaatagctgtggtcaattttgttatccatatttcagactcaattttagatacaatggtggctttatattttaagtatatagagctactcaaggagttgaatctccccttttctcattaacacaatttttctaagttgatatggtgtactcattaacatacaccaaatttacttttactttgttcagattgtggaatgaatttccaccagttctcttctttttaatgtgtaccctaggaggaattttactgaggttatagcataccccatgagcacagtggggaagaagaatgtgttgttatgtgctgctgctaaacagaagcagcagttgtaatttgtttttcagtttaaatgtggttatagttagatttttttttaagcagcaacttttcaaaaataaaatgtgataatttctgaacttttgtttgtgttgttaatagtggtgtgaaaatattaacgttcttgagaaaaactgataccactgttgtgtatcagtttctatacaatccataatcctcctgtacagtttttacatgtagttatgagtcttactaaaatttatataatggacttgttttcctttaagttgtaaaatgttaaacaccttgaaggttattttggacttctgtatgtttaaatgttgtcttaccaaaatttgcacgaatggaccattttcatttactacttaatatcaaaatcaggaatttacagtcaactgatagtacatgataggtgcatataggacagtttagttacctgctactaaaagatttttagataagttttagaagataaaggaattccatagtttcaggagggacaacatcttctgcactttttttttgcacagaaaagtctgtcattctctaatggcaaatttcatatttgttaattcttggctcaaaatatattaggtaaaattcttagatctgtttttaaagggagtttcctgaaactatcattaattgacattattaccccatg

SEQ ID NO: 13811 - DNA, 3017 bp, Homo sapiens
ttagatctggagaaggaaaaatcagatatttatgatatagttttattttaattttgaattatttgtgtcacagctcagctttttggaagacaaactcaaacacctataatttcatttatatttctaattcacttggaacctttctgctttatgttacctagaaaatgataatttgtttaacccaaaacttctaaaataaattgcttaatccttgaaatatgttattggaaaattttaagcagtgcttaaacaccattaaattattatgaacttgtaattcagaattgagtaaagaaatattttttctagtccttcatatattgaaaacttgccacatgacattgtatcgtcttcattttccagaagatgcgttggtgtgccataggtttctaacttccttgaaaatagttttttaagtcaattgtaaatatacgtattattgttaaaagtaactttaaactgcaacacatagcttcaaaacaatatagagattttgtaataccttataagtggagttggctaaaataccttatccatataaaacttattctattctttgcatgcttattttgtgtgttggttgctagcttaaagtttgatttgttgttactctttgtgtgccaaattcactaggcaagcggatttttcctcagacttcaaaaaataattcttttaagaaaaaatgtaaaaatgtttattctaaaaagctgcattaaagggacaacctataaaaagttttgctagctcatctttagaaggaagaaagaatattagcttgggtgatgtttaatttgggtggcgatagtttctgtaggctaaactttatgagaaaagtgtacctactctataaaggtaataaatgtaaaacctcttgctgttattgaggaagctcttcaactaccctaaatttcacaaatgtaacttataacactatgaaaagatttgaccaacaatttacgtttgctgtgtgctttagtttttgtttaagcatattcttttgcttgaatttctgtgttcatgagagttagggtgttttatgcttcttgaactaattttataacatatttaatatattaccagttaagatataaaatcatttgtacatagcgaattgtaaagcagctattaaagtaggtgaaataaagtatatatttgccggttatccatatcttttagaagtcctgacagaacaaccagtttatttgcacataggtagcttctgtttgaaggaaggtaaagttataaggaaactcaaatactataagatgtgtcaaggtatttctccagaattaattgcaaagctagtgctgaaggattttaatcagcttctaaaattttcttctcaataaggcatatgttttgattacttagggaagattcctcatttttatttgccctttatgcatttaatccacatgataggacattaaaaattaatataaagaaaaatcgtgctcatactgtacatctgtttctgtgcttggaactacttgttaatagtttttatcgaagctgtcagcaataagggacataaaactgctgtattatacattgtggaattgaataaacagcctaattttttttttctagtatagggtacttaagcatttccacttttggaagaaaagtgtattagtattttatattgcatttcatttaaaaggacagttttttttttttttttgtaaatccattcattgaaatggtttctaaactgtataatgtaatttggagcctatttagtaatagaattaaatgtcctatgtagtgctacaatttttgaattagaaagtgatcaaatgtaagaaaaaaatttaaaaattcagcccagaaaacaaaatagtgtattaaattagtttaatgtaaaaggaatttataagatttttttcctcaatatagatacctcacttgaaaagaaagcacagcatacttaaagtagttctagtaaacatgtcctagaaaacagttgctaaatgtaggacatcttttgaggaattagtttatgagaaataaaattttacttgtttttactatcctgttagaagtatttgtttatcctgataattttaagccaacatagtagtcttaaattacttttgaatttctaatctgtgaaggcagtaaatgaaatatctgttctgcaactgttgaaacaaataattggctacattgaccataattaaagttaaaattttgccaatgatgtacagttttatggttaaagttgctgtggttggttgcattacatgacacagaaaactgtcctctacctcacgtgaaataaatattttatatggttttactaaaaataagactcatgtatctggtcacctagtttacaaattttgaattatatttattgaaacatgacatactgtgctctgagcttatacctcaattgtattttgtgctgttttccattttcatgccttgtaaataacttgtatagattgtggatcaaatactaaataaaaacttttaatgccaattaaatttgattcaagttatttcagtatcgtgtgtgagcttaactttctcattccctaagattgacattttcttctttgttcctttaaagtctattattcgtaggctgggcgcagtggctcatgcctgtaatcccagcactttgggaggccaaggcaggcagatcacctgaggtgaaggagtttgagatcagcctggccagcatggtgaaacgctgtctctactaaaaatacaaaattagccgggtgtggtgactcatgcttgtaatcccagctacttgggaggctgaggcaggagaatcgcttgaatccaggaagcagaggttgcagtgagccgggatcgtgccattgcacttcagcctgggtgacgagcgaaaactgtctcaaaaaaaaaaaaaaaaaaaaaagtacattattcgttacacactaacttgaaaaatgtgttttattgtagaacaggaaattttatgcaatatttcaggtgatgaaaataccagcattatgtgattatttaatgatttttagacttca

SEQ ID NO: 13812 - DNA, 1288 bp, Homo sapiens
tgtagtagctgtagtagctgtaaatcaagtatcttacagataatcagataattattgtaaaatacaactctagttacattagatgtagagagagcccaagaattttcagagaagttgagacttaatgagcatagtatgggtttaaccctattattaataggttgcctgttgagccggggtgggattgggagctagggggcttgatagtggtgaaggaggtgttaacgttttcacatatatatacacagataatatatttgaagagtgaaatcatattgcttaaataatttggctgtagcagtttgacaagagaatgctaccctaacaatcttgaacaatatatagtgtggcagtatgacaagaggatgctaccctaacagtcttacacaatacatcctgtgaatggaaggatgaaatattttggaggaagctaggtacagaaaagatgaatatgatgatgtatatttttcgtatagtaaacctttacatagtaggaattgtatttcttaatgaaatttatgtttttattttaaaaggtatttgaaataccttaccaagaaataccttaagaagaacaatcttcgtgattggcttcgagtggttgcatctgacaaggagacctacgaacttcgttacttccagattagtcaagatgaagatgaatcagagtcggaggactaggcaaaggctccccttacagggctttgcttattaataaaataaatgaagtatacatgagaaataccaagaaattggcttttagtttatcagtgaataaaaaatattatactcttgaacttttgtctcatttttttgagtatgctgtttatatgattttgatttccctctgataactatcaacagtatttaaatagcttatagctggtataattttttcccacgatttccaaaatcttttatgtactcaggtaaaagtagcgttatataggaaatcttttttttagacactctcgttctgtcacccaggctggagtgcagtgactcagcttcctaaatagctggaattacaggtgtgagccaccatgcccggctaattttttgtacttttagtagagtagggtttggccatgttggccaggctggtttcaaactcctgacctcaagtgatctacccacctcggcttcccaaagtgctgattatagctgtgaaccaccatgcccggccaggaaatcttactgtagaacaattttttatatagctgtataaaatgtatatgattgtcttgacagtctcaaatactgtttttaatagcttgtaaatgtaatc

SEQ ID NO: 13813 - DNA, 1148 bp, Homo sapiens
tagaaaacaatgaaagtccgtaactttttgacaacttgaacatattaggacttggttagaggttcaaatcaaccccggcgtgggtagtggtggtgtttttttatttattgttacatttctgtatatgtaacctaacagtacattgtacagattgcattggtacaaactttaaaattgtttatataaattgaataagttgttttatatagctacataattatttctcatttatgtagcagaaagacaggaagcccaagaggtcaacctggaggtttaatttggaccttactcatccagtagaagatggaatttttgattctggaaattttgtaagtatcattctactcggcttatttttgtaatcagagttattgataatggtttaaatatatagtatttgataataacctaagctctattcctagggtaccttccctagtgaatatctagggttctcttccctagttttgcattttttctgttttaaaataggagcaatttctacgggagaaggttaaagtcaatggcaaaactggaaatctcgggaatgttgttcacattgaacgcttcaagaataaaatcacagttgtttctgagaaacagttctctaaaaggttggtacttttgcaaattttaataaaactatagtagttttggaatatttcatagaatatgtagttattacatgtattctgtttatatgcaagaataaatatgaactttagactaaaggcctacataaatgggaaattcagtaaatgagtgccaattgctgagtctagttgtaagtgtcatttattgctagaatatgagccagttgtgtccacagtcccagtccagtaaattataggccctgtaaatccaaattgtatataacctttaatgctgagtactttagtatttgagtatgttgcaagaaacatgtctgatgtgtacataggagaattgtctcaagttatttattcagtagaggtagccagttaaagtcaaagtcttaacatcttgctgccagtttttatttgttgaatttattcaccaaatattaaatactacatgggcagcacaggactgggtaacccaacagtgaaccaagcaggcagtttacccaccaccaagaaacttctagtggagaagagagagtgaaatgg

SEQ ID NO: 13814 - DNA, 1420 bp, Homo sapiens
taaatagtaatatttatcagtaaatactcctttccaacttccttttttttttttttttttttgagactgagtctcactccatcagccaggctggagtgcagtggtgcaatctcggctcactgcaacctctgcctcccgagttcaagcaattctcctgcctcagcctcccaagtagctgggactacaggtgcatgccaccacgcccagctacttttttgtgtattttagtagagatggggtttcaccatgttgtctaggctggtcttgaactcctgacctcaggtgatccacctgcctcagcctcccaaagtgctgggattacaggcatgagccaccacacccagcccctttccaaccatttctaagtagattttttgacattaatgtatttattaaacaaaaactgagaattccttaaattgatttggaatttttgttaattttatgtcctttttttcctaaagtgaattaaagtgaatcatggaagcagcattactttatatgaatattattatttaagttaagttattttaagtatatgcattttttctgattgttgtgtgacttaattcagttgctggtgtgaactataactagcaaataattctataaactgaattattttaaaaggtattttaggtgacaccactgcatttctatttcatcttttgagtcatatgtatattatttccagaattttagacattattacagggtttgtgaggacctttgactcagtgacaatcatcatattggagcaaaacatagaacaaaatcactatctcagaaataccttaattctctaagactggctcttagacctctcccatcatgccttgacctctaaaaagccctttgttcctatcttctaaaggaaagtatatcatatatgatgatgtaactgatctaatcagtgactggaaatagcattagtaacagaagatcccaagttttagttgcttaatttgtacacacttttaaatattgtcttagcctcggcaaaccaatttggggaagaagcaagatactttaagagaaatacaaaggaaatttctaaagcacaagaaatagtgaggtagtagttagtcgtctttcctacaacattttagcttttgcccatctaaagcacaattaaaattaggctacattctttccagtattctatttaagtacctactacatactgctctagtttcttagtactctgtaatgtgtatcttaattgctactggttggcattgtaactcataggaattccagaaaattattaatccgtgctgcttgcagttcattcatatggcccctcttaaccatgctggtgttatgattcagtattaactctcaattagcatgcccctgttcttcctaacttgtaaaatttcacataaatatattttcaattgtgtacaaattaagggtg

SEQ ID NO: 13815 - DNA, 1209 bp, Homo sapiens
attaagagagattaggacagcagaaagctaacatgctttcttttcttaaagtgaggaagacctttggtcggttgaccacagggggcaggaagcagtggtgggggagagataaagctatgaccctgcagtcttgcttatctcaatacagagctgctccatttttctggtttctgggggcctagtccttgggagtaactttgactcctctctttctctgcactgatcattagatccatcagaaaacctttttggtattttatcttcttgaaaaatatagccataatccaactacttctcacatctatgcaactatcaactttctcctgaattattgaaagtctccgaactcatctcccttctccttccttgaccttgagtctgttctcatccagtgtctaaagtgatcctaataaagcttaagttggataatgccactgcacaaaatccaccagggtccccctctcttttattattcactagagtaagtattgaattccttgcagtaacctacaaggccctgccaaacctgacctgctcccccagcccccagcaccaaacacacaccctcctcattcctcaagctcaagccctccaggagactgcagcgtcctctcacgtaggagtgctcttctccaaatacctgcttggtctttctcctcttttgggtctttgttcacatgtcatcttttaagtgagacctcccaggacactcttttataagttgtaactccatggcgcttatcacctgacttaagtattttattcctgtccctgcccactaggctgtaaacttcacaagggtgagccatctttcccttgattttgttcgttgttatagtaccagtggctaaaacgccttttagaaaggtagcactaagtgaatttttaactaatgcgagagaaagcaggcatagccattgagggagacaaggcttagagggtaataataatagcacttttgttatgcaccctgctctgtggcaggtgctttaatatgttgttgtatttaaatcttataactgccttgcacggtgggcattatactccattttacagctgaggaaactgagcattgggcacatggttaataagcgtataagctagtagattacagaggcaatctaatatgcctaagaaaaggggatcaaaggcagaggatttaatcttagaagttaggaaggatttttctcaaataggaagaaaggaaga

SEQ ID NO: 13816 - DNA, 1192 bp, Homo sapiens
ggttgcaccagcccgcgttactccggccccacaaataattaatgggggagggagggtgtcgcttttttttcctccggctttttctcagcgcgagagcatttgaaccgaggagaaaccccaagacgcgactgaagggccattttgctgcagtgcacgaattggccacacaaaaatagagcttgggtccctatgataacaagtcaaggttcaggaacagccccttcgggttcggcccgaggagcccgcaaaagcctgggcggaaagggtgcgcgcccctcccccctccacgctggtgcagagggaccgggtcaggaagcgcggcctctccccagtccaagaccacgcctcctccgcctccccactcccccttcactcctcccaggaagcggtgatagacagttctgcgtggttctccacccccaccctccccctgctgagtggaggagttgatgtgtctcattataacagccaatgcagccgccatccacgcacaagcaaagaagcatgtcccatttaaatacacccacgcagccccagcgcccttagccgatcggggcgctcagcccacacgcaccgctgctcggggcttggagatccgcgcaggctgggctcccggacccggcggaccgacgcgcggaggatcgggatccggcgctgtggggctggggtgggcgggggaggctgggcccggggcctctggcgcgacacccgcatgaggacgcgagtgaaatagaccaaggtggaatttccaagggaaaagcttcggggtggttttggtccatttctccagcgaagaagtagacatggcgagcgactccccggctcgaagcctggatgaaatagatctctcggctctgagggtgagcaggacgttttctggtttctttccagtggtttgggttagggtgaatgggctcggtgcgtggactgggggctggggctggggcagggggacagcagcgggagaatgcgtcggggagggaacctggattcccgttttgattcggggttgctgaggtgctcctggctgagcccctacggcaggggctgtgcggtacgtgtcttcctctggccgtggcttaggctctcccgagggctcgtagagcttatgccagtttcatcttataccggtgtaagagcattaaaatgaaaggcgtgtgtgcgtgtgtgtgtgtgtgtgtgtgtgtgtgta

SEQ ID NO: 13817 - DNA, 1142 bp, Homo sapiens
gaaataatctttcataacatttttcatgagaaagcatagaatgattttctagaaagtttaatggcaagttgtgttagatgaaaaggaaacatttttaaggacactatgcttcttgggtattcttgagcccttgtctatagataatagccggttacaatgtacagttttcatatttggaggggacatgggaaactactcacttaacttggagttaatattttggtgctctggaaacatctgagtttggaactgtgctgtgcacatctctaactggtttaattgcccagtctctcagtgtcttagcactctcagtgttttatgctcaatctctgtgtcttgttatgactatttggctcaacgtagtgttttgaactagtgattaggaagtggtagctgctgctgttttattattttattgctttactctgtgactacagacagatttaattgttggatgtatttcttaatgggataattatttaaaaacattcccagttactttaaaagcgtatgtgaatattagccatcagttttgtcttgaccttgcctttggctccttgagtgtctctgttcatgtgacagctttccagctcatccttaatgtcatactcgagctgtttatcttagtgaggtagtgtgggcctaaaatgaaataatatatatcaaaagcacctgtgggggaaagcacatctgaatgccaagcagtacttagttactgcaagtgctacttctaccaatatttttcttcctttctgcccctttaaagagaggttgtccctttttaatagatatatgacagctctgcttcctttcttaagtctaagatcaaagaaatgttgtaataaaggggagtcactccctcccattccttctctctttttgtggatgttgttctgttttttaagagcgatcaggtcttgacattagtggatgcagctgttgggctcccaagctctgcctttcatctctgggtcaccactgcagacagcatccttcatctctgtcatggtgtaaagacaccactgtgggggaacagtgcgttgcaggttaagtacatgaagtatttctagagatcctagccacctttgccgttcattgttgtttggatgcacttttctttgaaatgacatggaatgtttggc

SEQ ID NO: 13818 - DNA, 1180 bp, Homo sapiens
ctactatgagatggctgtagctttgaagctattcgaatgtgaaactttttccgctcttgcttgttctccataagacttcttcagctctgtgtctaattctccccctgcctcagtgagtgtgggaactgtatcgttgatgaacatcatgctctgcccagtggctctgtgaatgacaccattgagagctgttcaccatttctgaatttcctcatttgtctcccatcccccgcccctccatgtatgagtcagcatccagaatgtcacagggaccttaatgttacttgtttttccttatgtgatacttttgggaccttaacgttgcttttttttccttatatgatactttaagtgcatttattagacttgtttggcacactaaaacactgacctgtcattctttctaagaattttatgacaggtcctagggaatttgggttgtctcttgctttgtttagtgtgaaatgacaagaatggtgtcatagcttggttttgcaaactgaggtagactaaaacttcaaaagcaaagcatgcatatggtctctccctttaatacatactttgcatataaatgagaaattcctgttttactagcttaaaacccaggaagaggacctgttgcaaatgaagcttgctttcaaagattgtagtgaatctctgtcttggctgaaatttgcaaccagttttttgattaaaaatatttgggtgatttgaaagtaaaattattgtaacatgaatgcattaaattctgaatctttgccaacttttattatattggatgaattgttatttgactatttgtaaaatgtctgtattataaatggaaatgtttcttcctattacaagattaggattttaggagcttgttttctacataagaaactgccttgaaaaccatttctttttttttttgttttttgagacagggtatcctgtctcaaaaacaaagacctggctctgagacagacttgctctgtcacccaggctgaagtgtagtggcacgatcagatcatagctcgttgcagccttgacctcctgagctcaagtgatcttcccaccttggcctcccaaattgctgggattacaggcatgagccagtgtgcctgtccgaaacccatttctttagtatttggtggatttgtgagggattgctaacaagctgaaatgttattgtgaacactta

SEQ ID NO: 13819 - DNA, 1137 bp, Homo sapiens
tgtatccccctgcttctgtttttgtatatttttgctacttggtttttcttgatcatagctattttgtgcttgatctttattgtctaagatgcagtatcctgtactagcttataatattcccataccaaagtcatggggaaacaaacattattttgtttttggtttatttatactatattctgcatacagtactttaaatgccaattacagtgcaatctttatttattgtaaaattttttaagtgtacttatgtactaattttcccttgtagcatgttatatttttgtgttttatacttttgtaattttaggtcagtcttgttccttggcaacatctgtagtattattaatcttctgacattttcttatgtttttaaaaagataagagcatctagtgcattaaatgccaaaaaaaaaatacattatcagtgattgaaacgtttacatgtacccaaaaaccataatcatctcttggaagaaaatgctgagatcaatgaattattctgtgtgcctatattgacgtagtgagtactagagagttctgtattttattattgactataataattagtttaattagctttgcaaactgatggcatcaaggtaaatatatttttgccaaagttctggccttccaaaactcacccccttatttaaatgtgtgctatgacccactatgaccacagcatctgcattttctaaaaaattccatgcaggtgttttggggagaggtattttttaagcaatgaaaattcaactgagtacaaagccccctcttggggggttggggaagtctcttttttgaaacacttcagaactgctgctataaagaaattctctaattggttgaattttttttttaagtaaatagtactttaggccaaaatttatatgaatatttgatcttcttgagattttcatactatcatttaaccaccaggaagctgaagtgtgtgaagtacaaagctgacagcactttattttattgctctccattatttggtattcattatattccttcagtcagaaaattattactctctatggcactgttttttatcacaaatatgtatatgtgatattgatatataactatatatattgccatcacacacgaacaataaaataaagtgttcta

SEQ ID NO: 13820 - DNA, 1960 bp, Homo sapiens
gtcaaatgtaatgagcgctgtggaatggaacaaaagagaggagattgtagcagagcaagccatcaaacacttgaagcaacacagccctctacttgctgcctttactactcaaagtcagtctgagctgaccctgttactgaagattcaggagtattgctatgacaacattcatttcatgaaagccttccggaaaatagtggtgctttttataaagctgtagtcctgagcaaagagcccattttgaagtggtataaaggtacacatgttgcaaaggggaagagtgttttccttgagcaaatgaaaaagtttggagagtggctcaaaaatgctgaagaagaatctgaatctgaagctgaagaaggtgactgaattttgaaactacaccctcagtaaagcaaacaggagttgtagataaaatgtcctgtctcatgtgtcctggttcttacatcttcctacctccctgtatcaagcatgatataagggctttcatggcaaattttattttaactgtttctatggttgctggaaatgttgggtttagtttctaaaaccatgttttaagtagctacaggagatatagatttgaatctaatgttgcattagtcttttcagttatcttctaccgcctgtattttctactgtaataatttaagaccttccacaatgaacagttcactttattccctgggttttctataaacagttttcaagatatgatttagttaaaaaataatttattataaaaattctgtttgcaaattaaactgtaaaagtgtccaaagtctcaaaggcaatgatttgcgtgataatatggcatgcccagggccctactcatcaatgaaaaacccatatgtaataattgaattcgtttaacatgaatcttgagtatgtggaccattgcttgccattaactttttttgtttgtttgtttgttttaactccagttgtcctaaagctcaattgtttgctctctgggttttatccttagagaagccatggagaacagacttgaaaagtttaggaaatcaaaatgtggcagaggtggcgggaagaagaaagatgagattttccccttgagaaacttctgcatttagtttgtatctttccaggcaaaacaaatgggtattttttttatacaaccattttcaaatgaaccttagaaaagtcttatcatttaaggtattttatgcacagaatacccttagattgataggaaaagactcataaaggagtttgagtaaagaaaatgactgatgtactaaacccagtaaaaattgttgacaatgttaaaggtcagcttgttctaattgagaatctagatatagcttagatttcctattggcttagagcatttgctataacaaatgaagtgcaatgacaattatatattcctacttggtcatactggactggcttcattctcttaacatattctgtaatgactgaagcctttggctattaacataccctagttgccatttttaattgccatgagccaaatatttcttgtatacaattgatccatttattttcatggttgcctttttattttcagcttttcttgctgctacccatctgtgtatgtagtcattggtggtggggggaggggggaaatgtagccacactttttatagaaagactttgtgttaaaagtgaacattttgaaggtttttaactggtgaaagaaactagcctgggataatgccaccagagactgagtggaaatcgccccttttgaaggtgccattcttatgagccaaaagtttgtcatttaaaagttcattttgaaggaataacatgtcatataatttgaaataaaggtatagtaaccttaaaaagaatactataacttaatattgtgaatgggttgaatttgttaaaggaataactttgataaagttttcattcacaggcaaatgtattcactagatttctacatagtgatctgattttacttcat

SEQ ID NO: 13821 - DNA, 1109 bp, Homo sapiens
atgatacagggcaccacggagagaaagtagaaccatttcactcctgggaagatggggtatttcccacttccagcaacgaaataacaaatgaaaagttgcatacttattgatgtattgtatgagccagtagcattttatgtacaaaacagaagtcaatgcaacagtatgtatgtgtgcctgtgtgtgtataaaaataaccattgaagctaacttgctaatgtacttaggcaagccacttcccatctctgggcctcgtctttcctccctctaaaatcaaagagctgaattatgtgatccttgaggtctcttccacttataataccaactgtcttgtcagactggcaaattatattggcctctccttatgtggtggtttttttggtaggtcatagttccttatacacagacacctgcatcatcgaaggtctttttttcctaaaaaaaaaaaatgggattttagttcttattctgtgataactatcctcctcatataatactattctttttgacaccatttgaaggaaccaatatttggaccttattttgaggttgtctgtctcgaagaaaaagaaaataaaatgtataggcagggttccttcaattggcattttccccagaattgtgagccaaagcctatagtaattgcagacagcaaatgattccggatctctaaaaggctctctcagatgaaaagggagtaaaggaaaaaagaggtcaaccactgtttctgataatgtacttgagtttcattgttcttttagtttgtattcttataaaaaatgtttacactctgcagattgattttttttttttagtactgtggctttcttttcctattttatgaaaaaaatgataatctttttgtaaaattgtctgtgaaatataaacattaatatataaagaaaaaccttgaagtgctgtatagtgaagtataaattaatgttttattgatttgtgaagaatttaagactattatataattatcttggtggatctattttatgcatgaccttttaacctttgactttgcttatttcccactacgaaggggaaggtagattttatgaatgattttaatagcaaatatattttataaagtgaaaatccag

SEQ ID NO: 13822 - DNA, 1187 bp, Homo sapiens
aatctatatagtaccatattgtgttctcttcagagtctttgaaatgtgaagttcttaaagtttaaaaagtgtgctttagatttagggagagaactcttaaaaatcaagtgttactcagcacatattggaaagcattgtgtccaggcactgtgctagggatacagcgaacagactgtgaatggcccctgccttcttggagttgatgagctaatgaaggagcaggtagtaaacaagtttacagatgaaaatataatagtgatagtggctatgaagaaaaatgaggtgcttgaggttagacaattacagtcgtctcttgactattatgttttatgaaacttttgaattgcctggtagagtgtagggttataaaattattgtgcaaaatccagattctgtcagacttgtaaatatatttttctcttgttcctgtctcagtaaagaaccatggaagtaaattgagcttgtgtgcttttgattacaggcaaatactcctgagctcaagaaatcagtgtcaatgctttctctaaatacccctaacagcaatcgcaaacgacgtcgtttaaaagaaacacttgctcagctttcaagagagacagacgtgtcaccatttccaccccgtaagcgcccatcagctgagcattccctttccatagggtcactcctagatatctccaacacaccagagtctagcattaactatggaggtaattcacattcttaaaaacttgtctttaaagtttagtggaatggaataattgttagaatttagataaatccctgatatagtgaatatggaagtctttgcctttaattacctttgttctagctgtagagaaaagacacatgaatagttaagcttaataatgttgcaatttaatgactgcttactacatgctaaatgctttatacgttttgtgtgtttataatagattttattattcctgttttacagatgactaaactgagatacagagaagttaagtaatttctccagggtcatataactagagagtgatagtgctgttcaaaaagcaaacaaagtcacaggggaggtcacataaattatggagaaaataggtagaatgaagtcagaggagggtgagttcactttgtgctgaactgatacagaaaggctcctataattcttccttggttatcagtatttccctttctttttgatttttagt

SEQ ID NO: 13823 - DNA, 1147 bp, Homo sapiens
ttcaccatgttggtcaggctggtctcgaactcctgacttcagtgatccacccaccttggcctcccaaagtgctgggattacaggcgcaagtcaccgcacctggccggaagttgcttgtttgttttcctcatcctgggctccataggcatggaaacctttttaatgtaatgggatacttttaaggaatattttaactgattcacttatcaaaataagacattcacatcaaacacaacttgtgacatgagttgtgtttgttgtagttttcatgttctattttaaaagttttaaaaataactatttttcaggcatattaatgaggataagagaaaaacagaagctcaaaagcaaatttttgatgttgtttatgaagtagatggatgcccagtaagtattcttctttaacaattattaatttattttcttcttgttaatgaggtttctgtggttttaatataaataatatcttggcactactttcttttaaattacaacttcttaaaaattacttgataccaagtgatctcttttgttatattttcaacctatacaggctaatcttttatcttctcaccgaagcttagtacagcgggttgaaacaatttctctaggtgagcacccctgtgacagaggagaacaagtaactctcttcctcttcaatgattgcctagaggtaaagatgtacttcacatagtataataacactactgatttttgtaagttccctgaatatttaaaaccaagctttaattgaagagtaatgtagaattttaaataaactcaagtaatctttttttaaaaaaatcgaggacaatttatgatttaatactgttaatagaatgcttttagaggaaggtctaataagaagtgtaagttttcatgacttcaaatctaagttaaaatgaaaatttatttccatgcaaataaatgcttaggtcaagaaatctgataacttcttgtttctatgtatatttattcaagatttgtaaaataattctgagttttttgaaatttcagtagattttttccaataatgatgtggttgtattttgttgaagagggagataacttgataatttactattataaattctttatgattccttgattcttcttaaatcagcaggttttagagtgaatgaggggt

SEQ ID NO: 13824 - DNA, 1237 bp, Homo sapiens
ggaatgtgatacaagctgtgaacccactcttcaggaatatgccctttgcacgtgtatacacaaaattttgcacccaatttctgttcattgtcaccctaccggctcttgatcacaggtttagaacctctgatttagaatccttacaaatgctgattgaggacaaaagggtaaagtaggagaaagtctaaatcttaatttgagtttatgtcaagaacagtgtttgtggtattggttttgtagccaactttatacttcagcattaagtttaagtctgctaaatttctaacttgtttcagagttgttagattttattttgaggtctatttccaattgctttggtatccatgacccttacaacaaattacacatttactgaatgcttatttttcactatccttaagtcagtacatttcagggtagaagttatatcaagcacatgaaaagtcttgagtagcttcatttataaatactcccatatataaatatgcttaaaagtttgatttttagaaacagttgtgtgtttttaagataacaaaaagtattatttttcaataggagaatcttatttatactgctgatccagaatcctttgaagtaaatacaaaagatatggacagtacattgagtagagcatcaagagcaataaaaaagacttcaaaaaaggtgagttttagtgaaagtattatttagcacatctctaacatattttccagactatattcaaataatattgctgcaaacaccagtataaagatagtttataaaacaaagctgttcttcggttctaggaaatgacccacagaaacaatagttttacttcagtgacttccttgccacagtaactataacttgttatccctcccgttactgtaataatgatgcttctgtgaactatcctgcagtagaaatgtactgttggtgttttagatttaaatatgtgtgcactcatcttaaatatatcgccacagttattttcagcaaagggcacacggtagtcaggggacctgactatctattcctgactctagaagtctattttagtcttctcgtgatgaagataacttacttaccttatcagagttgttgaggattacataagtatgttgataataggcttttttaaagtagcactagaattttagtgttctaagagagatttacagccatattctctactgctagatttacaagttttgttttctttcccttggtgggggggctttgtattttaataatt

SEQ ID NO: 13825 - DNA, 2560 bp, Homo sapiens
tatatacactctgacactcacatatgtacatctgagttgtacatatattacaaacactctttgagagtgtatgacttaattttagaaaattatttcccatgaagtgatttcattccttttaattctgctttatgaactaagaagaaaccttgtttgccaatttataattttttcttttataacctgaaacactgaatcattaatatttcataaaacaaagttaggtatcactactagcaataggccaatatctgttcagttgagttaatatctagttaactagtctagctatttggctttgttctcagaatgctataatagttttcttttttctcccttttccattcccctaactttaaagagtttagaattgtcagatgtcttgtacttaattgttacagtaatttgtaaaatgtaaaaataataggcatgatactgaactgtattttacaatttttttaaaggaaaatttaaaatatgaaatgtttgttttgtcttaacagggtatcccttctccctcccttgtcagccttccttccttctttgaaaggagaagtcatacgttaagtagatctacaactcatttgatatgaagcgttaccaaaatcttaaattatagaaatgtatagacacctcatactcaaataagaaactgacttaaatggtacttgtaattagcacttggtgaaagctggaaggaagataaataacactaaactatgctatttgatttttcttcttgaaagagtaaggtttacctgttacattttcaagttaattcatgtaaaaaatgatagtgattttgatgtaatttatctcttgtttgaatctgtcattcaaaggccaataatttaagttgctatcagctgatattagtagctttgcaaccctgatagagtaaataaattttatgggcgggtgccaaatactgctgtgaatctatttgtatagtatccatgaatgaatttatggaaatagatatttgtgcagctcaatttatgcagagattaaatgacatcataatactggatgaaaacttgcatagaattctgattaaatagtgggtctgtttcacatgtgcagtttgaagtatttaaataaccactcctttcacagtttattttcttctcaagcgttttcaagatctagcatgtggattttaaaagatttgccctcattaacaagaataacatttaaaggagattgtttcaaaatatttttgcaaattgagataaggacagaaagattgagaaacattgtatattttgcaaaaacaagatgtttgtagctgtttcagagagagtacggtatatttatggtaattttatccactagcaaatcttgatttagtttgatagtgtgtggaattttattttgaaggataagaccatgggaaaattgtggtaaagactgtttgtacccttcatgaaataattctgaagttgccatcagttttactaatcttctgtgaaatgcatagatatgcgcatgttcaactttttattgtggtcttataattaaatgtaaaattgaaaattcatttgctgtttcaaagtgtgatatctttcacaatagcctttttatagtcagtaattcagaataatcaagttcatatggataaatgcatttttatttcctatttctttagggagtgctacaaatgtttgtcacttaaatttcaagtttctgttttaatagttaactgactatagattgttttctatgccatgtatgtgccacttctgagagtagtaaatgactctttgctacattttaaaagcaattgtattagtaagaactttgtaaataaatacctaaaacccaagtgtattttatgtctcatgtattaatttcttcaaggaaattttcataggcaaatatgaatgcttgcatcaacatatgctcttttgtgtacttgcttgcttacttgtttattccttcctccagtaatatttttgatcattttattttacgaggctatctgtaagttaggaatttttaatctggaatctactttgagaaatgtagatagtgaatcctataatgttttatgcaaaattttgtgtttatgtgcatatatgcatttttctggcagaaaatacacaattgttatttttttggaggtggaactgttattttcccccaaaagagtggggtttccagagacaagaaatgacatgagataaggaataaagctagaaatgtattgactatacactggcaaaatatagcaggtagttaattttaatttgaaagggaatgtttctggttttttactgttatctatctgccttaggtttttagactatccttgttatcagatgaagacagtttgcatgtatcatgtgtaaaattaggattctgtatcatgcatggatattaaatataattaacttctctattgagaaaatcataatttaggtttttattaagagcacttttagtttctttaaggcatttaggtcatgcaatagtgttttttccaagaatccaaggttagttcaatatcggaaaatttatttaccaatatgacttacactgacaagttaaagaagaaaga

SEQ ID NO: 13826 - DNA, 2906 bp, Homo sapiens
aaatgtttgctaccttagtttaaaaaacaatctcaaacaaaagacttgcttcaaggtgtttttaaatagcagtgattcagaattttttttaatgaaagtataattgcactaaccttcttcctgctgctctgattctgcatttgtggtacttgtgactacgttttttcaaatatagatagatttaagctgctaatttttttttttttagtaatcactactatatcatgtcttttactctgtttataatatcaagtattttcttaaagatatagatattaaaccttgtgctcatgcaacttagagtaacatatacagacaaatgattgcatgaggccatgtttatatgtgtgactaataaggcttgtcatgattaacataatccaggtatgtcatttctgaagagaatagtcatcaaatttatatctcgaagattttaattaaggaattgcttattgttgagcttagcaaattaataacactatttctgtcactaattattttgaggccttttagtactaaaattttaacctgtgttctaagtagaaactgatttaacccaagtaatgcagctttgattgatttcagcattcgttgctttgctatttttacaaaacagcattgattgaagcaagtcttggttttactaaggtagggtagcatttgctattggtaaagagaataaatacacttaatttcacaatacattgttatatgtaccccagttgttgttagtggggactatgatactgtaataatatttttaaaaatttacatcaagagaggcagtcattcacgatggttttgtgccagctctttttagggttttggatcacattagagatatttagaacatattaccctgtgacttacgtaggaaacctaatatgctgagtatctggcacttgaattcctgcttttattgctggaggtccacatctgtggttgacctctgttattgtttaaaaaaaataaataaaaattaaaaaaatctgtgcaataattttaaaatgtgctcccaggaatagacacaaatgttttgagtatcttttaagctgcattttcctttagtgatgcatttgtcaattgcactgaatttaaatctgaaagtcagaggtgattattgatagtacttttgtattttgatatggacagtttattcatttgcatacagttattgactttttcccagctgattaaaagatagtcaagaaattctgcaatatagctgccaaaatagacagctacatttttatgatattgtcatcttttctgttttttttttcttttttttctttagctattttacttaagcataatagccacaataggacatataaaagattataaatacagagctttattatcctgacgtcttgggtcttttaagtatatacttttctgaaaggtatccattttgtaggcttgggttcttcatgagcatacgattgtttatttttgctgctgttctcaacatcatcattgcctgctgatgtgccacgatgctgctccaatagacagcaataagattgtctctaatttgagcagtaacatgattgcaagagaccaagtttcacagcttgtaaagttctgtatttgggattcttgcttatttttccgcctgtgtttttctgagaacttattcctgatgatcaattgaatccagtagtttttctatgctatttgttgttgtataagctactgtaagaaacttatcataaggaaaaatagaaaggaaaacttgaatcaatactcattgattaaaatggaataaagaaagagcagctgccacttttaaacaacataaaggaatatctttttttgtctccgtgtaggaaatcccataagttcttatatttgttccagttcccatttcctgccattgaccagataacatcattgactttcaaatgacttttagaagtgataactcttaatttcctaatagatactagattgtattgaattctgttttaattattctctaggtaagtatgttttaggattaaataccttttacagatactgaaagtgcctccttttgtggtgtaaaaaacaaattatggtgcaaaaagtaatcactagattgaaatacatgaaggttttttgctttttgacatacgaaaatgtcaagagaaaggccaaagatttgtactttttcacttacaaagcactcctttttcccttaaacttctttctgtcaaattagatttaatgagagagtactatttttaaggagctatctgtttatgtagaatgattttgttaagagtaatgtaaactattattgagtagaggcctaaagaggactgtgcatttttgctatttaaaggaatcacaaatgatcatacttaagtgagcaaaaatgacaagttttactagctaagtagagaaataaatctcaaatgcagcgctacaattttcattatcttaagtacattgtacatttctacagaacctgtgattattctcgcatgataaggatggtacttgcatatggtgaattactactgttgacagtttccgcagaaatcctatttcagtggaccaacattgtggcatggcagcaaatgccaacattttgtggaatagcagcaaatctacaagagaccctggttggtttttcgttttgttttctttgttttttcccccttctcctgaatcagcagggatggaaggagggtagggaagttatgaattactccttccagtagtagctctgaagtgtcacatttaatatcagttttttttaaacatgattctagttaaatgtagaagagagaagaaagaggaagtgttcacttttttaatacactgatttagaaatttgatgtcttatatcagtagttctgaggtattgatagcttgctttatttctgcctttacgttgacagtgttgaagcagggtg

SEQ ID NO: 13827 - DNA, 1160 bp, Homo sapiens
tttatttttcctgaccactttttatctgtgtattcttttccgtattatcagatgctgtctagatagttgtccttagaagttcagttcctctatgagccttatcttatgttcacttcccatttttaaccatacttaatttagcactagtgttcactttgctaatagtcaaaagttctatgtatcaggactatacaggtgctttgacaagtactgtgacagtctgagtgctgatgcctgaatttaacagtgagaaaattgaggctcaggtagtaggggacagagcaggaatttaggcccagtttgtgtgaattctaggccagtgttgttacctagcagtctgtcttctcaatgaatgaatggttgtaggtctggattattaagtttttatttggttgccctgagcaacctttcttattcattttatcttctgtaactactgacagtgtaatttatttaaagtactggtttcatcttgtcagttcccctgctggagaacccataatggattctctttgccaactggattgaatttgtatgcttcagtctggcttttaagaaggttccattctacctattcagctttatttctcactcttagttgggattcttgccggcctctcaaatacggtagtttttgccatactcactactttgcttttgtgcatgctgttgttccctttgtccttcttatagcctagtttcagtcccccttcttccatgaatccttttctggccatcctgactcaggatatttcttctctgagattccattgcacttaatgaagatcacaaatcccataactgtttattgttttgttgccccaactacgatgtttcttgaacggatggacctttttccttccagcatttggcagagttcttaataccattttcatgttaaaatggattgtgagggcctgtgttaaaatgggagcagtgacagccctgttccactgtaatgtggcagcatcttctttttgagttagaccttaaagatttaggtgtgctatagtcacatttaactgttcatttaaattttagtgctgccagagttgcaaaggaagaaaaatttgttagtttcttagatgaaaatggatggttttgactgggtacggtggcccacgcctgtaatctctgcactttgggaggcccaggcaggg

SEQ ID NO: 13828 - DNA, 1216 bp, Homo sapiens
ctgccctcttttggtacctgagtacctttctggggttttgtaaatcgtgtgtcatttgtaagaatttcacgttaactctgcgttacttggtgttcacctgtggtatccttgactgaccataatgatttagtttgggtatgatgtgtctgctttgaaatgccttactggagtatgtcagatcctgctttaaagcattccatatatctgctgggacaataagttgcttctccttggaaatatgctctagattcagaagcaaaaccgattttgctttcaccattaaggttgcattttaatgcagttattgttttaaattagagaataaaatgtaaaaccaagggaggctttagaaccctttattgaatggcatggcaaacttttaaaactgcttttgctatttcactagaactatctttgataaaggatatagctaaaaaatgtcagcccaaactgtgtgtaattagggttgtttattaaaattttctctaaatgtcatacagaggcttaagatctgtgtatgctgttgggtcggagtgccagtcactgctttggaagtctgtgttctggggctgcagaatgacaaacgtgtcatgggattaaaaccaatcaactgtgaattgtgaaattgaaactactctttcggttttattttctttagcatattgagtatagaaatctgaaacttatttaaaatttatactgcttttgttgatggctcattttggctgtgtatcctcacttatgtactgatttctgataaaggcttgacattattataacacgcattttgtgttccagtttaataaaacggtttctgagtcttgtctgaaaattgtttggttatgagttgaagatcaagggaagaaggtaaattgtcatcactgagacgttattttgatgccgattctcgatgactgtgggttctccattcatcagtctgcacacagtctgccatggtcttctggaaatcatgcaagtactgtaagcttttaggttggcagtagaatcaacctagctgcccacactgcccgttctccccatcactggagttagcctgggactggagtgagttctcaattttgttggtagattttaatatttattttcccttcaaattttaagaaagttggccttagtaccataaacactgctggaaataaacacattattaaaaagcatatacccattaatcttttgggggtgttttacatgtaaa

SEQ ID NO: 13829 - DNA, 2103 bp, Homo sapiens
tagcttctcataaaacgcttctactgatagctgtttgactttttcttcccgttatgaatgggaggaacatttgtaaacttcctttctgggtagctaccaaaaaacgtactggcttatggtcccatgtgaccttgtctccgttaagcccagaatctgagtgcctttagcaagtgttagcatttcacagagagaagagagacagaattattgctattaatcaccattcataaataggagcttggaataacaaaggtctgtgtgaattctgttctacgtcttttttttcccttttttaaataaatgtcaatttgatatcaagtaaaactattgtcattattgatcagaaaccatacattctgaaaatgaatccagttttcccaagctggcagaagtcagagatcatttttcaccttgatctgtgttgcgtttgtacttagtgaatggcagtgtggttgattggaagagcttgacactgatgtttggaaaaattctttattctagtggtcattttcaaacttgtcttctgtagagaggggaaaaattatgtatttgcagctaaagcgaagagactggcacaataattattaattgtgttagttcatttctatattaaatgaagcatcttcacaaatcaggtttgaagccattaaaagcaaaattttccctagtttaattaatttaaaattctaaattgcctgactacttagaatcttagaaacgccctgctagactgattttattatagaaatgttaacatgttcctcaacattttctcaagaaaattttcagacatatatcaaagttgaaaaaactttgcagtataaccactgctagattctgccatcaacatttgactatacttgtattgccatgtatctgttcatattctctatccctcttttcatccatcgatccatcagattttttttttaaagaacattccaaagtaaattttaggcaatacactgccctaaattcttagcatgggtgtcattaattaaggtttagtattcgtttaaatatctattttgaaagtggtgtatgaagttgataatctgagccaattaacatacttttttttttttcctcctgtggacttttgtcttccagtttctctttttgtgtgtacttagggtgagggaggacaattcctttcaaacacaagtttattttagaattggtcatttttaagtgcttgtcataaattttaaagtttcaatataatttttcttttccccacttctgataatgtatttttgccaaactatgcagcttcttcaaaaaactgtaaattactgattggggtttatgaaatcagcgaatacctcatttcaatctgttgctgcttttctccctcttgtcacttctcctttcactactttcagctgctctaccagaaggtagaggggagtaaagggtcaaacccctatataattagctgttttaaacaactctaggagagcagattaagtagcttagtaagttgaaactattaatttttctaaagaatttgatttgaattccttgagaattgtaattatccacacttcctccagctataattagcagaattaaaaatgattgtactgtacaatgagttgttgaaattgtaagccttagtaaccatctttagctttattgtagtcatgtttagaaaaaattatttttacatatgcctttatttttatgcccactttttgtggataagattctttagataaaatctaaagaattttaagtgactttctccaggtcatgaagattcaatgggtagaattgaatcagaattgaaatgttccagattcatattcttgtgtgtgtttgataaaattcatggcttccaaagtaactgaacacttcctttgggcccttggagggaaaatccatatttttactaattacacttttttttttagacatctggcagttctttgaacttaaacatattctcatggccatagttccaaattaagcccgacgcagttgctaaaaatcttgctgcactgttgaatactaataatgcaacatttattggatgtttttgcattttgatgaccttcatgattcatttataagtctttgtaagtgcttaagtgaccccct

SEQ ID NO: 13830 - DNA, 1145 bp, Homo sapiens
gtggatgcaatgctgttaatgttcacgggccaaagggatagcagttggaactgtgccaagcaaaataaagccaaatctataaagccattctcagtggaagagcaccgtgttaacatgaattaacaggcaggggaagtctgctaaatgaggccaaaggaaagaagtcccaaagatgggtttggagaagtagaagaaagggtcagattatgttgtcatttacatgttatcttgctgaagtctgattttcaagtgagtttttttttctgtttttttgctgttgattcagatttgaagaccttgcttctcatcacccactggattatgccccaggcttccctacccaatgatcctcttgcaacacgccgtgcttcctccacctaagcagccctcaccctcgcctcctatgtcagtggccaccaggtctacaggaaccttgcagcttccaccacagaagccttttgggcaggaggcttccttgcctcttgcaggggaagaagagttatcgaagggaggggagcaagactgtgccctggaggagctatgtaagcccctgtactgcaaactctgcaatgtcaccttgaactctgcacagcaagcccaggctcattatcaggtaaagggagaaaagaaaaccaggcattgagtagggtgaacatttcagggctctggctatttagcagttgtctctccagatatgactgtgcctggaataccaagatggcttagagaacaactaactatgaatttgtttgattaaaagccttatgtttttactttaaaaataagtatcactttttgtagactggatctcaacctgttacactaagctgtgtggcatgcgatagcttaccagtctttgtaggcaaatgtaaatgatctatgctggcatctgaacctgtagtcttaagaagaacaagtatttaaaccactatttaccagcctgggtgacagagcgagactttgtctcagacaaacaaaaaaacccatgatgtaccgaactcaattcagtgtaaaattgtttagaagctaatataatttgcatcatttcgaggtgacctctgtgcatgactcttatgctttccatttttgacttctaactcttatatatcctatcactggtaaggaaaacacaggtatctttttgt

SEQ ID NO: 13831 - DNA, 1132 bp, Homo sapiens
ttctaaaatatttctgtctaaaccaataccttcgtaatcttaaatagctttctaaataaaaatcataaatctaaagtatgttttactatcgaactatggaactatttttaacaccttgatattattccataaggttttatttaagaaatgtcatttgtgggatgacttagatttgttatatctcagtgttgttattcttttaaaaatgattgataggaatgtttgctgcctttgctctaaattgctgaatatattattttttatatattaaaaatattcaggactgtcaacttttaatatatatgcattcatcaaaaatttgttttaacctagcggtactttttttactttattgtgatcttccaaatctacagagttccctgtttgcaaaaaaaacatgttcatgctgtgtatgtaatagaatgttatattctttatgtaattttattaaaggttttgctatcggcatgccagtgtgtgaatttgatatggttaaagatccagaagtacaggacttccgaagaaatattctgaacgtttgtaaagaagctgtggatcttagggacctcaattcacctcatagtagagcaatgtatgtctatcctccaaatgtagaatcttcaccagaattgccaaagcacatatataataaattagataaaggtaagaaaatgactaatctactctaatcattactatagtgcagtcttctacctgtgtctatatctttgtatagtctttttttttttttccagctagatagtaagcttcttgaaggcagggactgcttatactgacaagatatagttgagtgctaaatagaaattatgtacaatcaatatttattggttgaatttttgtgtgaatatgatactgatttcttggtaaattgtctataaaacggaagaagtatgagtttgaaatttactattttttaggattcagaattagagctgattatcttttcataaataaaaactataaatagaaacattttatgaaattttgggaaaactttatacattcttgttattatatatcataaatacaccagaaaaaaataagtaattttcttaagtattaaatgcagtaattctgatcatgggtgataatatatagggagatttttgat

SEQ ID NO: 13832 - DNA, 1168 bp, Homo sapiens
cattctaattgaacatctttaaacctccattggttctttctttacttcccatagttaccaaaaacttccaccttaggcactgtcaaacctttgagaccatcatgaatcactattcataggggcagtacccatgaagtatgtcatacagtttagaatggaaattagcttggtctcaggtacttgtgacccacatatcacagttttgtgtgcttgtcataaaacatgagatttgggaatgatctggcagcccgctcagatataaacattttctgtttctacctgatatttacctagttttaattgggctgattaaaaagcatttctgatatggataaagtaatgatagtgaatacttgttgaaatttctcccttgaaaaatgaaagagagatggtgattgcatctaatgttttcctgttatagggcaaataatagtggtgatctgggtaatagtttctccaaataatgacaagcagaagtatactctgaaaatcaaccatgactgtgtaccagaacaagtaattgctgaagcaatcaggaaaaaaactcgaagtatgttgctatcctctgaacaactaaaactctgtgttttagaatatcagggcaagtatattttaaaagtgtgtggatgtgatgaatacttcctagaaaaatatcctctgagtcagtataaggtgagtaacaagtttcaaaatattaatttttaatttaaaaagtaatcacattgaggatgagtatctgtattttttttttttttttgagacggaatctcactctcgcccaggctggagtgcagtggcgcgatctcggctcactgcaggctctgcctcctgggttcatgccattctcctgcctcagcctcccgagcagctgggactacaggcgcccgccaccacacctggctaattttttgtatttttagtagagacaggttttgcaccatgttatctaggatagtcttgatctcctgacctcgtgatccactctccgtggcttcccaaagtgctgggattacagacgtgagccaccacgcccagccaagtatctatttttaggatatacttcttgataagtaatattagtaaatagcgtttgtaagcttattcttttaattctgtgattaattcgagaggctgaaaatgttggcagttactccagctcccaaatata

SEQ ID NO: 13833 - DNA, 1119 bp, Homo sapiens
aattgtatagttcagtcacaaagtaaatacccatgtcttctgcttttaacaaatgcacacatttctgtggttttattcctacaattggagctgggtcacagggaatacatatgctcacttttattagattatgctttccaaattggttgtaacaaattataccccaatactcttagtgtatgagatttcctattactgcataaccttaccaccccttggcatcatcagtctttatagtttagccattcttatgtatagtgatatctccatgagattttaattttcattttctgtatgactaataatgactcccttttcatgtttattaactatttgaatatgaccttataaagtgccttttccaatcaatctctttcctgtttttcgtttggttgatctttgtcttcgtgatttgtaggagtcatttatatactttgatgaagacttttcttgatgtattatttttgctttaaaattttacataggtggaatgaatggctgaattatgatatatacattcctgatcttcctcgtgctgctcgactttgcctttccatttgctctgttaaaggccgaaagggtgctaaagaggtaaagtatttcagaaggaacaattatgtttacctttaaaaactcctgattataccgctgattgaattttttcacaaattggatgttattttatatttaagaaaataataataaacctatttttaaaattttaataaatgtatcatggaagaataccttgggagagcttcaggaatttatgatgaatatgttttgagttcttattgataccatttttaaaaatgcaaagtgactatataacagggattgcatgcaaatatctcatgcttgctttggttcatattttctatttataattaaaatacatgtaatttcaaatggggaaaaaggaaagaatgggcttaaaccttgaaaaatcaattttttttttttagatattcccattattatagagatgattgttgaattttccttttggggaagaaaagtgttttgaaatgtgttttataatttagactagtgaatatttttctttgttttttaaggaacactgtccattggcatggggaaatataaacttgtttgatt

SEQ ID NO: 13834 - DNA, 1170 bp, Homo sapiens
cacacaattaaacagcatgcattgaactgaaaagataactgagaaaatgaaagctcactctggattccacactgcactgttaataactctcagcaggcaaagaccgattgcataggaattgcacaatccatgaacagcattagaatttacagcaagaacagaaataaaatactatataatttaaataatgtaaacgcaaacagggtttgatagcacttaaactagttcatttcaaaattaagctttagaataatgcgcaatttcatgttatgccttaagtccaaaaaggtaaactttgaagattgtttgtatctttttttaaaaaacaaaacaaaacaaaaatccccaaaatatatagaaatgatggagaaggaaaaagtgatggttttttttgtcttgcaaatgttctatgttttgaaatgtggacacaacaaaggctgttattgcattaggtgtaagtaaactggagtttatgttaaattacattgattggaaaagaatgaaaatttcttatttttccattgctgttcaatttatagtttgaagtgggtttttgactgcttgtttaatgaagaaaaatgcttggggtggaagggactcttgagatttcaccagagactttttctttttaataaatcaaaccttttgatgatttgaggttttatctgcagttttggaagcagtcacaaatgagacctgttataaggtggtatttttttttttcttctggacagtatttaaaggatcttattcttatttcccagggaaattctgggctcccacaaagtaaaaaaaaaaaaaaatcatagaaaaagaatgagcaggaatagttcttattccagaattgtacagtattcaccttaagttgattttttttctccttctgcaattgaactgaatacatttttcatgcatgttttccagaaaatagaagtattaatgttattaaaaagattattttttttattaaaggctatttatattatagaaactatcattaatatatattctttatttacatgatctgtcccatagtcatgcattgttttgcaccccaaattttttattgttcatagcagcatggtcagctttcttcttgatctatagatgaggctcaggcactatcccatttataccaataaccagtgtataactacttaaggaaaacat

SEQ ID NO: 13835 - DNA, 1185 bp, Homo sapiens
aatagtgtgtttggatggttctggaggagggcagaaataatcgagtactattttgggggacgggactcttaaatgaattattcaaagtttaggagttacgaaaataagatattaaaaaaaacgctggtgcagtggctcacacctataattccagcactttgggaggctgaggcaggaggatcacaggtgcccaggagtatgagaccagcctgggcaacatagtgtgagaccccatctctacaacaattaaaattaggcaaggtggcatgcccctggagtcccaggctgaggtgggagcatcccttgaaccaagaagttcgaggttgtaagctacaatcacgccattgcactccagcctggctgacagagcaagaccttctctcaaaaaaaaaaaattttttaagccatttctagtaagaagtaaggcataattatataaatttctttccattttacagggtacctttcaacagatgtggatttccaagcaagaatatgaagaaggagggaagcagtgtgtagaaagaaaatgcccttgagaaagagttcccaagcttctaccttccttttgtcaccttacgtttcatagctttagtatactcaggaaaagaatgaccatcttttgtagaatgtttatacatttttgcatatttcaatttccacttaaattttttaaagctttaactggctctataaattaagtttgtgctttccttgaaatgcacttattcttattacaagcattttataattttgtataaatgtctattttctctaaatattttgctttcagtaaaatgctttccaactctgtttagtgtattaattaccagtggattggtagaactgctttttattgactagtaaaagttactgcctatgctttttaccttaggcttacagaattaaataaaaattagccattccagaaatatattttggactgttgtgcactgtgattactactttaaggactaaatgtatttctcattattttgaatcaaagtcctccgtttattaacagcaatacccacatcctcttcatagcctattaacaacagaggtaaaactattattcaaattcaaaaactacggtattgcctttgctgtggcagttaccatcaccttcacactctaaggtagcaggtgacatttaaagcctgcttaaatgtcagaatttataaa

SEQ ID NO: 13836 - DNA, 1140 bp, Homo sapiens
tactgccactgctaccaaaatccaaaattaattttgttacttgttttaacaagtgttattgtgagccttgaatggagtatatcccatcatgttttattatctgaatgaattatattttaaatacaaatcttaaaccattaaatcttaaggcagaccttacacttagtttgtttatgctaactggtgcaaagagctccatttttgaattaccaaaacctgggtttgtcttctgaatctgccacctaagatactcagcatagtgtaatggaaaagagtacacagctttggagtcagacagacctggtttgagtccaggtgctgccatttattagctacgtaactttgtgcaattcacttatctttaaaatgcggacaaaaatagtatccacctcatctgttaaaattattttatatataggtatattagttacatagtagatgttactggtttatctaactgaaatgatcattttaaagaatagtcaactagaaaagcaaagtattattcagaaatggactaatattaaacgaattttctcttgtagcatcccatatcaagatggattgcccgtaatttctatgatagtcctgaaaagatatatgaaagaacaatggccgtccttcagattgaagctgaaaaggctgaattacggtaggaaaaacgagggggtaggtgggaaagaaaatcttcctaaggtagcaaaccaccagaaaaaattaataaaactatgaatatttcagcactataggatactttatgtaaaaggataaagatacgtccagatgcagtggctcacacctgtaatcccagcactttgggaggctacagaaattagccgggcgtggtggtacgtgcctgtaatcccagctactcaagaggctgaggcagaagaatcacttcaacctaggaggcagaggttgcagtgagccaagaccatgccactgcactgcagcctgggtggcagtgtgagactccgtctccaaaggaaaaaaaaaatggataaagatagaattagcttgtttggagtgaaaactataaactggtgacaaggagactattaggagatatgtgtcagattaaagagttcttttttaaatttttgaatttttttttagagtggaagtcttgctctgttgccc

SEQ ID NO: 13837 - DNA, 1249 bp, Homo sapiens
aaaccctgtctccactaaaaatacaaaaattagctgggcatggtggtgggcccctgtagtcccagctacttgggaggctgaggcaggaggatcacttgagcctgggaggtagaagttgcagtgagctgagactgcgccatagcactctgacctgggcaaccgtgcaagactccgtctcaaaaaaacaaaaacaacaaaaaaactgtttgatagctatctatataagcaacataataaaagtcaaaaataagtcccaaattttggttatagatatataccagatgtatgcctacataagggtctgtggaggagcattatactttacataaaagcagactccagtgattgtcctttatggaaatggctcattaaatttataattggaagtgctggaatctcaatattgctgttccatttgttacagggtaaaggagctggaagtgcgaaaattgatgcatgtgagaggagatggaccctggtattactatgagacaattgacaaggaacttattgatcattctccgaaagcaactcctgacaattaagcatttttttctccaaatacaaagtatattctctttattggaaaataaattaataaatatattctgtatttttgctctccgtgaaaaacaaaagagcctctgacattactgtctctcagtgttggttcagattgaggcttttgtttgaggagtttggcttccagtccccaaagaaggtttaaaatgtactaataaaaactggagaaataggaatttgtgaactcctaaaattgtagcaactttgaaaggttagtgttttatttacctgacaaatggaagttatagaagtctaataatgttaagcaccagtaattatagtattttgtacaaatgcctgtactgtagatgtctgtattattgaggggcaactcaggattttaagttccataaagtattgaaccaactctaaaatgttaactccttaataaacagattctcagtaaacaaattttaaagtttataatgctttcatggtttttttttttgccatgtattgttcttttttaaactacacacagacacacagacacgtacacacacacacacacacacacacacacacacgctcttttcctagatgcaatctctgggatcccttagagtccttttttggggaagtagttgcactaggtaatgtgattcctgcagagattataaaatgtgagtaaaagctaaaaatgactcatttattaagcatttattgt

SEQ ID NO: 13838 - DNA, 1189 bp, Homo sapiens
gaatttcctttttaaggcagaatgtatataccacattatgttcattcattaattggtctgtggatttgggttgctttcacctctttactgtcgtaaataatgctatgaacatggatttgcaataaaacattttgtggccgcgtgtggtagctcatgcctataatcccagcactttgggaggctgaagtgggaggattgctttagcccaaaagttcgagaccagcctgggtaacatagtgagagctcgtctctacaaaaaataaattaaaaaaaaaaaattagctgggctcagtggtgcgtgcctgtatttccaactattcaggaggctgaagtgggacgattgcttgagcccaggagattgagttggcagtgagccatgatcacgccactgcaccctagccttggtgacagagtgagaccctgtctggaaaaaaaccaaaccatacaaaaaagccattttgtattttgatcttttatattactaattttccttttttattagtgcacaaaacaacttgcagcagcttttcatgaggaatttgttgtgagagaagatttaatgggcctggcaataggaacacatggtagtaacatccagcaagctaggaaggttcctggagttaccgccattgagctagatgaagatactggaacattcagaatctacggagaggtaagttctctttctcctgccttggcctttagtgtattaaccatctattgtttgattatatttttatctgaaattccagtttcccatgaaacatttttgaggtagaatttattcaattagcatcagtcagcctagtagtcttacttatgaagctgaattgaagttaactttgtattgaggggagtgaaagatttactaagtaattaaatatgtagtttttttattgaggtttcttaaccgcttctgagtttacttcagttttatacccgttaacaaataatctatcgaagtatttttttgaatgtttactgtgtgccaggcactggcaggagtaaatggcatatattagaatagcttttctagaacttgagtttgtataatacttcgtcactggttaatcatgacgtttgcaggggtagaaaattagtaagttatttttaaaatgttattcagccaggtgcagtggcacacacctgcagtcccagctacttgggaatctgaggcaggaggattgct

SEQ ID NO: 13839 - DNA, 1147 bp, Homo sapiens
gtatcaaatgaaatcacctttgataagctgcttttgaaaatgctgcctttttaaagaaatcgttaattattgacatctgtcagtactaacattgtggtagctgctctacagatgtaattttgacttaactaaggtttcctcacttgtaaaaatgatttggcagtgggtttgtgaaagggaaccaggtttcttttcaatccaagtctgtcaattataaaagatagccttggtcttagagagttgtggtaggtgttgtgagtaaaagtttctgatatttcaaaaataagaaaattgggtatatttgtagttctttgttctctttattcactgaagtgagtacctgttgtctcttttcctgtatcctgtctacgttggctttggtgatgtgggttgtgtgctctataggaaatacacattagcagtgactattacacactggtgaaatactcaggagtagtacaagaatttctattggttgtcatgtgtaaaaatacagtgtttccctccataatgttttatggatgaagcaggcttttgaataatagtacattcttagtccaaatgaaagaaaaagagaactgaggattaaaagggaatgagaacacttgggtaagttccagagaggatttccttacacattcgggttctgagagttctaagatgaccattcccacccctcccaaatcaaagggaaaaatatctgaacgttgatttgaaaatggttcaaaacctttcacctccagaagccttccttaatcacttctctctgtcccttcagcatttatattcagtgctcaatttatactacaggtctacttcagtttgtcaatatggtctggaatttaaactatggaaatgatcatttaaaatattgacggtctgtggtgggactaaataaaacttgcaggtaggttcctgccaaggaccccagaagggtgatggatgatcactcaaaactggtatagttcacaagaaggaagtggcaaaggttctgggggaggaatatggtatgtcaacctaatctttgtttttcgaaagacatttgcttacttttagcagggtcaaggatggagttgctgcttgagcttcactgtgttaacaatgaaggttgcttttatgtgctgctgctagggctgctcagagaaga

SEQ ID NO: 13840 - DNA, 1167 bp, Homo sapiens
gaaacagtccatcaacatcaacacaacaaagctgcagtcattttgaactcagttaaggggatgaaagctcgctcttataattatttcttaacagctgaatatttgtttcttttcatttttgtttttctagtctctgggcaggattaccttgaaatgtgaatgcaagaattagcatttaatacactattttctaatgtatattttaaaaacaaggcacaggaaatgttaggaagccaagatgtctgcttactttctgctttaatttttcatcaccacttaaagttttatcatatttaattatctttgttattttccaggtaaataatattgaaaacattttatttgaagacagtgcatttttattgggggagactgaagtttatttgtcattgatatagttcaatatagatcaaacattcataattgcagtactcttaaacgaatatttcttgcctctgacatgaatatagtgctcaaagatccagacagcaatccatacagcttacttgataatacagaatcagatcagactgcagacactgatgccagcgaatctcatcacagtactaaccgtcgtaggcggtctcgtagacgaaggactgatgaagatgctgttctgatggatggaatgactgaatctgatacagcttcagttaatgaaaatgggctaggtatgtaagcacttagggaagagaaatatatatatatatatatatatatatatatatatatataattgtaaactattgttagtatatgaagcttttttcaaagaaatatgcaattcacaaattgactttttcttagtgtttactttgaacaaggtagatagctttttgtctatcttaaatgtttagttctcagatttgttatagccaaattatttgaaacttggagggttaaagtgccctttgatgccattaaatcagtacaaatattcagctggcaaggtacttagtgcttttattgtccccaagctaaaatcaggctttcatcttgcctcttttaaaataattataaatgacactggtaaaggtacatatatcaagagtaggcattaattttcaagggctaaaatgtcattaacttcggtataaaccaaactgtactagagaggaagactgtgtccctgaatgatggcagtttaagtctgagttttactgtgag

SEQ ID NO: 13841 - DNA, 1210 bp, Homo sapiens
gttcctagtttacagttcttttacattacatttacaatagtgcttgtacaagcttgccaaagatagaatatggatcgccagtctttacatcgcactttcagttcctccatttggaattcaaaaaggggagggatcctgaagaaatcatatgttaaacatactttgacacctactgtgttataaaatatatcatcagatgtgccttgagaatagtatatgtaacattaaaaaaaagttgctggctataggaaatgttattttgttttcaaaatatggcagagatggggggtggtgggtggggtgggatccctaacgtaatattctttatgaaagcattagctgcttttgttacatttttaatatgcaaccacttcttcacctgaggaaaactagaatgaaatgcagtctaaaatattttgcactgaattgtaatttcttcattagtttagtctggaaactggtctgttttaatgtgttttttaaatgctgtatgtagaggaaaatctgcagaccactggaatacatttgttaaactctcatctgcagggacactgggcgatacttggcagtgactgttctaccttgaggctttgtttggtttatttattaaagtgtacagtatttaaaaatcaaacatagctttagttaaaacactaagctgaattagtcatgtccattcagacataacctgaactactgaaaagatcaatttccagaaggtttattctgtataaactacatgttagtcttcagtagagtatcttttttttttccttttttttttttttatttcggttgtttgatgtgcaatatgtttttgtatgcaggtagtaaataaactttgatcttccatttgctgaatttttttaactttctactttttacaccaattgttgcaaaatagttggagctattaataggcttaggatagtatactttgctttttaaaaagcatttatacttgctcataaatagcattaaaatgtcagttggccatttaatcattttgtaatgaatcatctgaaatctttacacaagtttaggctgttagatgcataggtaattaataatacatgtgataattagcaaaaaaacctaacaaaattctaatcaaaggcaactttggaagacaatgggggatagaagggatgacaagcaatttttaaataataggccaatgatttgctttattcattctcaacttattttg

SEQ ID NO: 13842 - DNA, 2485 bp, Homo sapiens
cacagcgcccgcatgtacaacatgatggagacggagctgaagccgccgggcccgcagcaaacttcggggggcggcggcggcaactccaccgcggcggcggccggcggcaaccagaaaaacagcccggaccgcgtcaagcggcccatgaatgccttcatggtgtggtcccgcgggcagcggcgcaagatggcccaggagaaccccaagatgcacaactcggagatcagcaagcgcctgggcgccgagtggaaacttttgtcggagacggagaagcggccgttcatcgacgaggctaagcggctgcgagcgctgcacatgaaggagcacccggattataaataccggccccggcggaaaaccaagacgctcatgaagaaggataagtacacgctgcccggcgggctgctggcccccggcggcaatagcatggcgagcggggtcggggtgggcgccggcctgggcgcgggcgtgaaccagcgcatggacagttacgcgcacatgaacggctggagcaacggcagctacagcatgatgcaggaccagctgggctacccgcagcacccgggcctcaatgcgcacggcgcagcgcagatgcagcccatgcaccgctacgacgtgagcgccctgcagtacaactccatgaccagctcgcagacctacatgaacggctcgcccacctacagcatgtcctactcgcagcagggcacccctggcatggctcttggctccatgggttcggtggtcaagtccgaggccagctccagcccccctgtggttacctcttcctcccactccagggcgccctgccaggccggggacctccgggacatgatcagcatgtatctccccggcgccgaggtgccggaacccgccgcccccagcagacttcacatgtcccagcactaccagagcggcccggtgcccggcacggccattaacggcacactgcccctctcacacatgtgagggccggacagcgaactggaggggggagaaattttcaaagaaaaacgagggaaatgggaggggtgcaaaagaggagagtaagaaacagcatggagaaaacccggtacgctcaaaaagaaaaaggaaaaaaaaaaatcccatcacccacagcaaatgacagctgcaaaagagaacaccaatcccatccacactcacgcaaaaaccgcgatgccgacaagaaaacttttatgagagagatcctggacttctttttgggggactatttttgtacagagaaaacctggggagggtggggagggcgggggaatggaccttgtatagatctggaggaaagaaagctacgaaaaactttttaaaagttctagtggtacggtaggagctttgcaggaagtttgcaaaagtctttaccaataatatttagagctagtctccaagcgacgaaaaaaatgttttaatatttgcaagcaacttttgtacagtatttatcgagataaacatggcaatcaaaatgtccattgtttataagctgagaatttgccaatatttttcaaggagaggcttcttgctgaattttgattctgcagctgaaatttaggacagttgcaaacgtgaaaagaagaaaattattcaaatttggacattttaattgtttaaaaattgtacaaaaggaaaaaattagaataagtactggcgaaccatctctgtggtcttgtttaaaaagggcaaaagttttagactgtactaaattttataacttactgttaaaagcaaaaatggccatgcaggttgacaccgttggtaatttataatagcttttgttcgatcccaactttccattttgttcagataaaaaaaaccatgaaattactgtgtttgaaatattttcttatggtttgtaatatttctgtaaatttattgtgatattttaaggttttcccccctttattttccgtagttgtattttaaaagattcggctctgtattatttgaatcagtctgccgagaatccatgtatatatttgaactaatatcatccttataacaggtacattttcaacttaagtttttactccattatgcacagtttgagataaataaatttttgaaatatggacactgaaattattcttgagtctttcatttatttggataacactgtgattatacataacttttcggggaattataatactgtgctcagccaagaaagcaaaataccaaaaaccttggtattactagtccagcatcatgtgctaatgttaactgcaaaaaagaaacggctggatgattaataagtactggaaaaattgaaatttctgtcatttctaaaatagaaactagagacatatattgtaaatccgccccctccttttctaagcagcatgaataagcatgatggggacctatacttaaaactgatttatgccacttgttgccagaaaggattcaattctgaaatttttcatgtagtttagcagatgggatattgagccaaatcagaaccaggttggctggtttt

SEQ ID NO: 13843 - DNA, 1803 bp, Homo sapiens
taagttttagagtaaatttttttctcaattaaaacataggtcctggtgagccaaacttttctcttattgttactttagatcatggagtgcatcggatcctttctataccaacgacaggagcatcttgactctctccacaatggactcatctacttgttaaaggggcagtagtactttgtgggagccagttcacctcctttcctaaaattcagtgtgatcaccctgttaatggccacactagctctgaaattaatttccaaaatctttgtagtagttcatacccactcagagttataatggcaaacaaacagaaagcattagtacaagcccctcccaacacccttaatttgaatctgaacatgttaaaatttgagaataaagagacatttttcatctctttgtctggtttgtcccttgtgcttatgggactcctaatggcatttcagtctgttgctgaggccattatattttaatataaatgtagaaaaaagagagaaatcttagtaaagagtattttttagtattagcttgattattgactcttctatttaaatctgcttctgtaaattatgctgaaagtttgccttgagaactctatttttttattagagttatatttaaagcttttcatgggaaaagttaatgtgaatactgaggaattttggtccctcagtgacctgtgttgttaattcattaatgcattctgagttcacagagcaaattaggagaatcatttccaaccattatttactgcagtatggggagtaaatttataccaattcctctaactgtactgtaacacagcctgtaaagttagccatataaatgcaagggtatatcatatatacaaatcaggaatcaggtccgttcaccgaacttcaaattgatgtttactaatatttttgtgacagagtataaagaccctatagtgggtaaattagatactattagcatattattaatttaatgtctttatcattggatcttttgcatgctttaatctggttaacatatttaaatttgctttttttctctttacctgaaggctctgtgtatagtatttcatgacatcgttgtacagtttaactatatcaataaaaagtttggacagtatttaaatattgcaaatatgtttaattatacaaatcagaatagtatgggtaattaaatgaatacaaaaagaagagcctctttctgcagccgacttagacatgctcttccctttctataagctagattttagaataaagggtttcagttaataatcttattttcaggttatgtcatctaacttatagcaaactaccacaatacagtgagttctgccagtgtcccagtacaaggcatatttcaggtgtggctgtggaatgtaaaaatgctcaacttgtatcaggtaatgttagcaataaattaaatgctaagaatgattaatcgggtacatgttactgtaattaactcattgcacttcaaaacctaacttccatcctgaatttatcaagtagttcagtattgtcatttgtttttgttttattgaaaagtaatgttgtcttaagatttagaagtgattattagcttgagaactattacccagctctaagcaaataatgattgtatacatattaagataatggttaaatgcggttttaccaagttttcccttgaaaatgtaattcctttatggagatttattgtgcagccctaagcttccttcccatttcatgaatataaggcttctagaattggactggcaggggaaagaatggtagagacagaaattaagactttatccttgtttgcttgtaa

SEQ ID NO: 13844 - DNA, 1261 bp, Homo sapiens
agttttaccaaaagaaaaatttgaaaatttctattcaggctactggaattggttattaaaagaaaaaggaaaaagaagaatcttgctgctttcagtatttcctgatttttttgtaaatataaagaggaacttcaattatgaaaaatttttaaaagatatatatatctatatatctatatatatgtactgttttgtttcctgtcttgaagattttgagttatggttattggtttcagattgattaattcacatatgctgtgttttgaaatgagatcccattagcttttttttttttttttttttttcaatataaagtgttttctttaaaagtcatattggttcgtggcctagtgccttggattttacatatttttctttttaaatgcaaaaccttttcaacaaaatagtgtttgtcatcaggttggtactaaacatttataattactgtgtaattataaacaaaaatacataaagctttgaatataattatgtagcataaaagttaaggttgttcactatgatggcatcttagaattaaacaaaacttttactagggctgaaaagagaagactgatttaatgtggtgtgattattctgaagataaatgtctggctacagggaatattttgtactaaaaaatgattacacatatggctgtgtgtgtttgagtctgtgtctgtgagagagccagagagagtgagagagattgacagagaaagggagagacacacacacgccccttgaattgctttaactcctaagtgtttcagtcctcattccggtaaactccccatgctgattctttgttttaaactgaaccataggtacagtttcctttttgccaaatgtcaaaacaggtacaaattttaaaatgtaatgctttttaaatagaaaaatgtataaaattagaagtgcccacatataaaaaatacttgagatgaagattatctttagtgaatatcatctgcatatctctgtaagttcaattgtgtttcttacagtccctgtcatattaccaacagaggcaataaaagctgcagtgaaattgccatgactaaatcttttcacatatttcagtgtattttttttatagatttaaaatatacctgaaaacttttctaggaagaataattattcatggaaagagcattgtaatggcatgttttggggagaaaagacatgccaagtcttgtttactacatttaagatgtttacaactatactgggctgctttattaacaatactgtacttgcataatat

SEQ ID NO: 13845 - DNA, 1160 bp, Homo sapiens
gtgttttggtttggggggaattttttttttttcctggcaaatcacatgtgttgttgatgtgagtatctgatgaaaaaacaatgtcagaataaccgacatgaaaattttttaggataacttggtgcctacctgaaaaatgtattgtgttttagactcttgatttcaaaaggttccacagaactagtctgcgcttaccttacccatgtttatatatagctgtcctacagggagcttttatttagaaaatgtctgcataatgttagattcttctcctgtctacattatgcactacataattggacttcattatgcttttgaaatgcttatctgcctgtcacataagttaaactatttaatttgttttgaatgttttggattgctacacaatacaatattctaaatttaggcatgagggtttttttgttttgtttttactttttttttgtcatcgcactatggaacacaaatggaattctcttaatttataagaagatagttgcagttaaattttgaaaatggttgtaatgagccatgaagttcaatctttataatataggtactgctctttcagacaaatagtccattttcgatgacttattattttgttgaaattgctttaactgctaatcactgtggttgccaaatatttacttcaggagcaaagattttcaaacaagcatacacgatgcaaaataccaatctggcttctagtctctttactgttttcgtttcactcagattagctcagttttctcatcaaagcagaatgctatcttgtatgtatttttttcattacaagccccatgagctgcttttatgctgaaaatggtcatttccctgttcacttactgacatgtgaagaagggtttcttgctttcttaaacatttccgtaaggcaggctagaaatgtaatacttcaaatgtttgatgattatggtcttttgataggaatagattctgcttgggatatatatccaggcactctctaaggtctagggttgatattaacaaaggaatgtacttagaatagcagtacattttatgcaaatatggaaattattttaagaaacaatgacatatcaaaactgctttttacatgattttgaaatagactagaaagctttccctatagacatattaatattccaatcataacttta

SEQ ID NO: 13846 - DNA, 1320 bp, Homo sapiens
ggtggtgtctactgctagggagattatatgaaggccaaaataatgacttcagcaagagtgactgaactcactctaaggcctttgactgcagaggcacctgttagggaaaatcagatgtctcatataataaggtgatgtcggaaacacgcaaaacaaaacgaaaaaagatttctcagtatacacaactgaatgatgatacttacaatttttagcaggtagctttttaatgtttacagaaattttaatttttttctattttgaaatttgaggcttgtttacattgcttagataatttagaatttttaactaatgtcaaaactacagtgtcaaacattctaggttgtagttactttcagagtagatacagggttttagatcattacagtttaagttttctgaccaattaaaaaaacatagagaacaaaagcatatttgaccaagcaacaagcttataattaatttttattagttgattgattaatgatgtattgccttttgcccatatataccctgtgtatctatacttggaagtgtttaaggttgccattggttgaaaacataagtgtctctggccatcaaagtgatcttgtttacagcagtgcttttgtgaaacaattatttatttgctgaaagagctcttctgaactgtgtccttttaatttttgcttagaatagaatggaacaagtttaaatttcaaggaaatatgaaggcacttcctttttttctaagaaggaagttgctagatgattccttcatcacacttacttaaagtactgagaagagtatctgtaaataaaagggttccaaccttttaaaaaagaaggaaaaaactttttggtgctccagtgtagggctatctttttaaaaaatgtcaacaaagggaaaataaactatcagcttggatggtcacttgaatagaagatggttatacacagtgttattgttaaaatttttttaccttttggttggtttgcatcttttttccatattgttaattttataccaaaatgttaaatatttgtattacttgaattttgctcttgtatggcaaaataattagtgagtttaaaaaaaatctatagtttccaataaacaactgaaaaattatcatgagatgtgtatttaaactttttcatgaacattgcttatataatcattccttctgtcttaatgtactacatggtcttagccctgttcctataggattatcatgttctctgcattatagagccacctaagatgtactttttgttaaatgactcatgctggaatatctggatggggagatgttctttcctaatgtagtcatgtgccacaaa

SEQ ID NO: 13847 - DNA, 1110 bp, Homo sapiens
gggtccatttttcttttaaaattagttatctgaaaaaacttagcagtagttcccatctttaaggtaagtctttcatttggtccccattgtgtaaaatactaatcaacattttcaagcttctgtacaacagactgcttttgtctagatttctcaactccactttataaagcttatcagttttcagagaggaatgtgaattttttttctaatgcaaataaatggatatggcaggaactacagcataagtgattattgtgattctgggtggacggatataatttacaacatttagggatgttctaggtagcctgctgtagtttgacttccagtcactgttgtctttcacattataatttgtatatttcttgtgatagaagggatgatgcaaatatgtaattaaagtgtcaccagatttctgttaaaaccaaggttgaaataaaaagcctaacattggtaagctacattgttttctcattttagaatgattcagagatttcagatagacattttttaaactttaatgcttagctagaatctacattctgaggaaaactctaaaaaacttaaaaatttttagggaatttttatttttcaaatcataattttaaaatgatagataccattttgtgataacaacaattcagaaaacaattttctatcctcttagttgaaagaatgtaggtacagtttggatacttgtactttaattttagagtaaacatctgcattatactcttatagataatagaattatttagttaagaaattctttacagtaaatgagataatgtgtgaaaaagtattttgtaaatgctgaggattctacaaatgatagttgttattttcatgtgtatttgtaagatcatgtccatttcatgaatataggacttcacataaaaaaagactttctcaagacaactttatattctagtatttttctgttgtaaaaagtattaactatttacttttattttgttatacatttattttaatatccatgtgtttattatagtaaatttgaaatgaaatcctgaaaaacagaatttttttaaacacagacctcacaccaatattaattttttctctacataatttaaaactacataaatt

SEQ ID NO: 13848 - DNA, 1180 bp, Homo sapiens
ataacttattttatatattgttccaaagaaaagaatttgttttaatggtttcaaaataactgcacctgaatttgtttatgtgccttaagttctctagtgctatttcaacttttttttcaatctaaatgaagcttaccttagataaggttcatatttgtttcctatagagtaaataaacttccccttcttaaattgtgtaataagcaccaacgtgtggttgcttggcagaatgagaatgttaagggagattgttggatgtttggagtttcattatattttttgtttttattttttgatacctaggtgctttttaaaatattcagacaaatatctatcttacattgattaaacccgtgtaaattcatttgcagtatctacatcgaatgtcaaaaaagtatacttatttttgttccatacttatgtacaattttttccctcttcaggctttttcatttacctttttgaaaaagcacttactctccccttccctatcacccctcccccaaggtttctttatttaaatttttattgagagttgttggagctctaagacaatacaaatttagagttgaacaaaagtataatctgctttacaactagtatagacctaaggtcatttgctttcaattagaggctccagagtcttcatagtggaaagaatgctttgtatttaattgttcttagttaagttgtagcacgtgaatacttacttacatgttttgtttaaatatacttcttgcatagtttaattttttaaaagttgtatctaataaaatgtcttttaaccattattacttgactatatggttgtattaaattttgtttacgaaaaatttgttgttctgttttattttaagtatatttaaggggttgtgcaaaaaagagatggggaaaatactggatatattaatatatgtgtgtatttactggtatgtccataaaataactggaaggataaataagaaactgaaaatattagtgtgtaagaggaaaggaaatggtggctgaaggacaagtaaaaatgaaactttactgcatacgtatatgtgtgtaattataaatacatataaaatcaattttttagtctgaaacacacgaaagtattccctattcaaaaaaaaaaattttttttttctttttttgagacggagtctcactctgtcacccaggctggagagca

SEQ ID NO: 13849 - DNA, 1217 bp, Homo sapiens
accaccttttgaagaggcagttcattttctttgcaaagctctctcctaacttcctccgtaaattccagccagcatggccacatgggtcacgcctggtgccttcacacgtttgaggggtcttcgtctctttttaaagcttagaggtacaagctcaggacagtcttcagtaaggaaatttgtggatttccctttggatctttcttcctctccagcccacaagtggctctagtgagacgagcatttaagctgcaggtggtggcactcgggtctcagagccaccagacgtgcaggtgggacagtggttccagctccgactgcctgtcagcgtccctcccaggtgctagccctggcaggcacagccctcccctcatgccagcaaaggaaatgctcttgatgagaggctcgctttaaagaagcccaaagcgtgtgcttatccaaggggttcagctattcctgacttcacggcttgcatgtttgatttttctaagagaaaagaggctgcctgctgggtgtctgtggaaatgagattaaaaactgtacaatctcagattttactaaaatgcaaaaatgtagtttcagtttcttaaattataagcacgagtcttctcacgcttgttttctccagtctcttggtgctaaggacttcagtgtggtgcagctgccgccacacctcagaggcctgttgatgctgagcacttcttgctgtggggtgcagagcacatgtggtaggtgcagcccacagaacccacccgtcccctaccctcacccaggcgcctctctctgaagctcctcaggctctaatcccagcttcacttgctacctgtgagcaactggggttccgtttcttcactgagaagtgacgacgctaccagctacaccttgtggcttgccaagagcatccgtgtttatgggtggggtgctcagtacaggaaataactgaggcacaggtgttaggattattctttcctgccttagtcccccctcctcactttccctgggagccagctgtgttcccacctgcagctcccagcatcctctagcttgatgccgtgtgctcccagcccctcaccccccctggccaacgtcaccctgcacagcgcccagatgcttgtttgttcttttcctataatgggctggtcagctctgctgcagctcagccaggaccaaccgggcctgccccttcctggcagtgctggtggggcagccgcagtggaggc

SEQ ID NO: 13850 - DNA, 1946 bp, Homo sapiens
tgtgtcctgacggcgtctccttcttttgcaggtggtggagtttgacaccccatcggtccttctgtccaacgacagttcccgattctatgccatgtttgctgctgcagagaacaaggtcgctgtcaagggctgactcctccctgttgacgaagtctcttttctttagagcattgccattccctgcctggggcgggcccctcatcgcgtcctcctaccgaaaccttgcctttctcgattttatctttcgcacagcagttccggattggcttgtgtgtttcacttttagggagagtcatattttgattattgtatttattccatattcatgtaaacaaaatttagtttttgttcttaattgcactctaaaaggttcagggaaccgttattataattgtatcagaggcctataatgaagctttatacgtgtagctatatctatatataattctgtacatagcctatatttacagtgaaaatgtaagctgtttattttatattaaaataagcactgtgctaataacagtgcatattcctttctatcatttttgtacagtttgctgtactagagatctggttttgctattagactgtaggaagagtagcatttcattcttctctagctggtggtttcacggtgccaggttttctgggtgtccaaaggaagacgtgtggcaatagtgggccctccgacagccccctctgccgcctccccacggccgctccaggggtggctggagacgggtgggcggctggagaccatgcagagcgccgtgagttctcagggctcctgccttctgtcctggtgtcacttactgtttctgtcaggagagcagcggggcgaagcccaggccccttttcactccctccatcaagaatggggatcacagagacattcctccgagccggggagtttctttcctgccttcttctttttgctgttgtttctaaacaagaatcagtctatccacagagagtcccactgcctcaggttcctatggctggccactgcacagagctctccagctccaagacctgttggttccaagccctggagccaactgctgctttttgaggtggcactttttcatttgcctattcccacacctccacagttcagtggcagggctcaggatttcgtgggtctgttttcctttctcaccgcagtcgtcgcacagtctctctctctctctcccctcaaagtctgcaactttaagcagctcttgctaatcagtgtctcacactggcgtagaagtttttgtactgtaaagagacctacctcaggttgctggttgctgtgtggtttggtgtgttcccgcaaaccccctttgtgctgtggggctggtagctcaggtgggcgtggtcactgctgtcatcaattgaatggtcagcgttgcatgtcgtgaccaactagacattctgtcgccttagcatgtttgctgaacaccttgtggaagcaaaaatctgaaaatgtgaataaaattattttggattttgtaaaactcttcgtgtatcaaacaattctctgggaagggagtgagatatccctgaatggctttgggacctgcatatccagcaatggagttgcatctgggaaggactggtagcaaagctggttggttgcaagggccatggggccctgaacacctggaatcatctctgtgggccttagtcccgctgcctgtgttcctggacatggtccccaaataaagctccttggctgcccataagagggtggggagtggaaaggtgagtggttgtggtgaggtgggtggtcgtggtgagatgtatttaaaatgaatagtttatcgaggattcttagcaattcaaacaatataattaccctttcagccaattcattcagattcacccattgaaaattagtaaccccgtctctactaaaaatacaaaaattagcctggtgtggtggcaggcacctgtagtcccag

SEQ ID NO: 13851 - DNA, 1124 bp, Homo sapiens
gctgttttggaaatcaaggcaaacatggttttgaaattgtatcacttctaagcaaaaggatgtttttacatatatgcgtgctttcttagaaaaaaaaaaaaaaaacaataggctgggcacggtggctcaagcctgtaatcccagcactttgggaggccgaggcaggtggatcgcaaggtcaggaggtcgagaccatcctggctaacatggtgaaaccccgtctctactaaaaatacaaaaaattagctgggcgtggtggcgggcgcctgtagtcccagctactcaggcggctgaggcaggagaatggcgtgaacccgggaggcggagcttgcagtgagccgagattgcgccactgcactccagcctgggcgacagagcaagactccgtctcaaaaaaaaaaaaaaaagaaagaaaagaaaacaatagatagtgtaaaacttaaatgaaatacattttagtaaaatctagattaaccagaatgctaaaggaatttaatcgagtttctttctcctctgcttctctggcagattctgattttagatgaagccacagctgccatggacacagagacagacttattgattcaagagaccatccgagaagcatttgcagactgtaccatgctgaccattgcccatcgcctgcacacggttctaggctccgataggattatggtgctggcccagggacaggtaccgagtccttcaggaactttggcttggcatgtctgggaggaaactggcccctggcagggatggactgattgccatctttgtagggttctgggcattcagataagcacttgcagcagcgctatttacttgctattgggagggatacagcctccgaatcacaagattactcaggcacctctgatggggttctcattttactttactaatttgtccttttgttgcttgtgagtagcgacactgacttaagtcagagagtacatgtacttagtgattcattcacatacacaatgatcacccctggcatacttaggccagagagtatagatacttgtgattcattcacatacacaattatcatccctggtacatgtacttagtgattcattcacatacacaatgattaccgctcccggaggcctactgagacc

SEQ ID NO: 13852 - DNA, 1131 bp, Homo sapiens
gctgtcagcctgatatactactttggactctggaaacagatatgggttctattctctatttctactgtgtgtcgttaaacaaccgtcggagaccagatgacctgttagatggctagtcctgtataactcgactctgtatgtttcaatgtatgttactgcaatgcttcacctgctgtacagtgtttgtgagatgctctttgaagatggtacttttatattttttcattttcaataaaagtacattccttcccacttcctggtatttaatactgttgctgaatgtgccttgtgtgagtgtgtgctccggcgttgcaggacctcagctggaggtggcactcggtggttcttgggggctggccgccttccctctgcaggtggtgttagacatatgctacctgaggtaacatgttttcatttttgggagggagtcgggagtggggcgggcccatgggagggtctctggatttttgatagcctgctttgtttgctctcttctgtactattaaactgctgatgtttattttcaggaatgttttgcaaatgcacttctcactcttccccagtacaactgtaggtacactgttcctttttatcaaataagcacgtttgaaacgatccaaaaaaaaggtcttaatttcatgtaaacaaatgtatccatgtgtggagatactggaataaggtcaaagctatacttttgaatgaccatgtgtttagagttaatttcagctcattgataggtttatgttacattagaaagagtaatggttttgatgatgtcctgtaaggaagaaagtttgcaattagacctagctcctgcagaatgccctgagtaagttactgcaggcagcttgtaataattgggtcttccaaagttttgctttgcttgcgcactggtccctgagtggagctgcctactctttctaacttaacataaaactatggcattgtgtgtgagtgccgtggagatgttgacagtggtgtgtgtctctccctgtaggccttcatggtgaaacacctcttggagtatacccaggcaacagagtctaacctgcagtacagcttgttgttagtgctgggcctcctcctgacggaaatcgtgcggtcttggtcgcttgcactgacttgggcatt

SEQ ID NO: 13853 - DNA, 1084 bp, Homo sapiens
cctctctaattccctcgaaaaagcctaatggctgttcatttttgacaagtgacgggagatggctaacctctgacacttagaaagggatcaaggaaggaaatcttatggggaagaaggccttagcaatgcttaaatttatggaaatatgattgatttccagtattatcctttgccagcagtgaactgccattctgtcacagctctgtgtctgatacaaggcacatagattctgtacttaccatccccaaattgcaatgtctcagactcaggcttagagcatggcatgaacatcaaaggcaggaacctgtttatctttgaattggaaagatacagcaaaattacactgtttggaaatacgaatagaggagtgaaaattgttgcagtggggtacccaaagggattcgagacctcaagttttttttcatcttgtatccttcaggtcctcttgcccctggccaatgtggcattaattgactacactctggaattcctgactgccacaggtgtacaggaaacatttgtcttttgttgctggaaagctgctcaaatcaaagaacatttactgtaaggccctgcaacttttctttccatgtttcgccatctttttccagttttttcaggatgaatgtaactaaggggaaatgtgagaggggaaaaatgtgtctacttagatgtcattgtaagttctaagggtattttctacacttatcaggaggtgagcagctgaaactttgtatctgtctgtcttgggttttctgtgacaaagattaaagaataaacttgggttttttctgaatctcattataaagtttggtgccagtggactttgcttttatttaatggcttcagtatggaagttacaatgataacatctttgttttcccactgagtttctaaatcttgtttgttctcaccttcaaggatataaatgagctccttgtcatctttgtattcccactgcctagctcagtcccaagcatatagtgagcacttacatgtttgttgaaatcttgaaaactagggaatcgcattgcttatggaagtccaggatgtaaagactaggacattagcatggtctccatca

SEQ ID NO: 13854 - DNA, 1091 bp, Homo sapiens
tcagagctctatcgatcactgggagatgtcctccgtgatgttgatgccaaggctttggtgcgctctgactttcttctggtgtatggggatgtcatctcaaacatcaatatcaccagagcccttgaggaacacaggtcaggatgggaaaatgacaggaacaagggttaaagaccagcagagccctgagactgcttttttgcagttctgtccctcctgtcctttataggttgagacggaagctagaaaaaaatgtttctgtgatgacgatgatcttcaaggagtcatcccccagccacccaactcgttgccacgaagacaatgtggtagtggctgtggatagtaccacaaacagggttctccattttcagaagacccagggtctccggcgttttgcatttcctctggtgtgtggatatctggggtcctttgagatggggaagtgacaggcttcagtgggagaaacaaattaaagtccttgtaacttctccccacagagcctgtttcagggcagtagtgatggagtggaggttcgatatgatttactggattgtcatatcagcatctgttctcctcaggtgagctctttagggctggggctgcacacccaaagagtagaactctgtgggtctgttattgtccccttagaaggccagggtatatttcttctccctgtttattttcattatttttacttttattttttgagacagagtctcgctctgttgcccaggctggagtgcagtggtgtgatcccagctcactgcagactctgcctcctaggttcaagtgattctcctgcctcagcctcctgagtagcagggattacaggcacaccaccatgcctggctaatttttgtatttttagtagagatggggtttcaccatgttggccaggctggtctcgaactcctggtctcaagtgatctacctgtctcagcctcccaaagtgctgggattacaggcatgagccaccacacctggccttattttcatttttatttatatatattttttgagacagggtctcgctctgtggcccaggctggagcacagtggcaccatgactgctcactgcagcctcagcctcccag

SEQ ID NO: 13855 - DNA, 1179 bp, Homo sapiens
ctacttgggaggctgaggcacaagaatcactttaacccaggaggtggaggttgcagtgagccgagatcatgcaactgcactccagcctgggcaacagagctagacttgtctcaaaaaaaaaaaaaaaagaatagtacttaattctagcccactccacttcccttccacaggtggcacaactctttacagacaactttgactaccaaactcgagatgactttgtgcgaggtctcttagtgaatgaggaggtgagaaaagtcttccaatgcctctttaggagagaggagaaggctatgattgtatctcatgctggtaacttttgatcttttttgtattttattgaggcttaggagggaggaaaagcaggggacaggaggaacagtacacaaagaagaatctttgtggcagtgagaggcagaggggaacttaaaaggattagaaaagttgtacttgggggcattcttcctgtctttcttgcttaggtgacctccctttccttctcattcagatcctagggaaccagatccacatgcacgtaacagctaaggaatatggtgcccgtgtctccaacctacacatgtactcagctgtctgtgctgacgtcatccgccgatgggtctaccctctcaccccagaggcgaacttcactgacagcaccacccagagctgcactcattcccggcacaacatctaccgagggcctgaggtcagcctgggccatggcagcatcctagaggaaaatgtgctcctgggctctggcactgtcattggcagcaattgctttatcaccaacagtgtcattggccccggctgccacattggtgagcacaggtggggaatcaagccaactatcctaggaacaggaacctgggggggccacgtctccagaaacacaagggatggctacacaagggacagtccctgggaataaggaactatagagcggctacctcaggaaaggaggaaacagggatttgaaaacagcgataccttaatttgtagcctgtgggcctctcattggatgactcttcacattccagggtaccctgtagtcacattcaggagcaagtagataattaacatgcagtaacaacatctatttagcacattacagtttacaaagggcttttatatacattgttacatttaatcttcataatttacaaataaacaggctca

SEQ ID NO: 13856 - DNA, 1237 bp, Homo sapiens
gcatagagggatctgagggcctggtagagtatcctgctggactttccaaggcccctgaggtcccctttattggccttttgcaggtactgatggctttctaccagctggagatcctggctgaggaaacaattctgagctggttcagccaaagagatacaactgacaagggccagcagttgcgcaagaatcaacaggtgcgtcaggctgtcctcctctcgccaagatggttatctcattcccaggtcctggcccctagactctagggtggttggtttctggggctctggttgttagagctgtttatctgccgaggggagcaggagagttatgtgcacctcccccagccgatctctcctctgcttctttacagctgcagaggttcatccagtggctaaaagaggcagaagaggagtcatctgaagatgactgaagtcacactgcctgctcctttgggtgtgattgagtgccctcctggctcctgggctgggacaagtgaggaactagctgcagagggatgagtgaccaccatccaggctgagactgaaaggagcagaggctggaactacagtattctttcccctgctagcaaccatgtgcctcccatcctgactgtggagttgggatgtggaagtggggctggaacaaagcttctgcctagggaggagctaagcaggcccggcagttggaggaaggccagaggaacagctttgtgctccggctttccctcagggaacagcagagagcagttggctctttctgctgcttgtatatgttaatattaaaagagagagtggtgtatttggtttgtctccatccctgactaatcagccagtgaagtatgtgaccagaatcacatgatagcctttccttaacacctgggggagagggaggacgggtgtgccagccactaggtggtactgtggtaccttgctaattaacctttcccatggctcatgggtagtggagggcggaggttcttttccagcctctgtggaccaacttgtgatcctggggtggtgtgcctaagcccgtttccatagagtcccattttgaacacttttctgccagaggattatgttgccaaccatatgtaaagcccattagacatgccagttcctttcacatgccttttccagttgatctggtactcgttctgtcaggaagctgggccacgcttcatcagaaataaggaaatcagctcaaggtcacatgactcttgaggggtaaagctaaggac

SEQ ID NO: 13857 - DNA, 1547 bp, Homo sapiens
cctgtagtcccagctactcgggagactgaggtgggaggatcacttgtgcccagttcgaggctgcagtgagctatgatcacaccactgcactccagccaggaagacagagcaagaccttgcctccaaaaaaaaaaaaaaaaggctgggtgtgatgtgactcacacctgtaatcccagcactttgggaggccaaggttggcagaggataacttaagcccaggagtttgataccagactggccaatgtggtgaaaccctgtgtctattaaaaatacaaaattaggcctttcctttcagtggagcgtggcggcaagatggctgtgcaaatttccaagaagaggatgtttgtcactgatgacatcttcaaagctgaactgaatgagtttcttactcaggagctggctgaagatggctactctggagttgagatgcaagttacaccaaccaggacagaaatcattatcttagccaccagaacacagaatattcctggtgagaagggctgacggattcgggaactgactgctatagttcagaagaggtttggctttccagagggcagtgtagagctttatgctgaaaaggttgccactagaggtctgtgtgccattgcccaggcagagtctctgcgttacaaactcctaggagggcttgctgtgtggagggcctgctatggtgtgctgcggttcatcatggagagtggggccaaaggctgcaaggtcatggcgtctgggaaactccgaggacagagggctaaatccatgaagtttgtggatggcctgacgatccacagtggagaccctattaactactacgttggcactgctgtgtgccacgtgttgctcagacagggtgtgctgggcatcaaggtgaagatcatgctgccctgggacccaactggtaagactggccctaagaagcccctgcctgaccacgtgagcatcgtggaacccaaagatgagatactgcccaccacccccatctcagaacagaagggtgggaagccagagccatctgccatgccccagccagtccctacagcataacagggtctccttagcagctgtattctggagtctggatgttgctctgtaaagacctttaataaaatctcatacaaagacaaaaaaatatatacaaaattagggctgggcatggtggctcacacctgtaatcccagcactttgggaggctgaggcgggcagatcacctgaggtcaggagtttgagacaatcctggccaacatggtggaaccctgtctctactaaaaatacaaaatattagctgggcatggtggtgcatgcctgtaatcccagctactcaggaggctgaggcaggagaatcgcctgagcccaggaggcagaggttgcagtgagccgagatagctccactgcactccagcctggatgatagggtgagactccttctcaaaaaaaaaaaaaaagaaaaaaaaagttagccgcatgtggtggtgtgcacctgtaatcccagctactcaggaggctgaggcacgagaatcacttgaacccaggaggtggagattgcagtg

SEQ ID NO: 13858 - DNA, 1557 bp, Homo sapiens
ttaagcctcagggctggtccctgcccaaagggctggaccctcctaatcctctcctaggttgtggggctggtcccctgacacccttctccccttcctggtagaccttaaacctcgcacacatgtccccagcattttctcacctggataaagcccataagctgggtctcaggctgggctcagcaaaggactcgccttgcaaccgacaggccattcccacccccacacacaacctcccctgttttcacattcaccatggcatcccagagcaaggacacaggagcccacaggccagttgaggttgggcaaggagacttccaggacttccagacagagtaccaggttttatttttcaccttattctctactttaaacaaatcataactttctctttaagcctctgctataaattctcctggctctcctgggcttccatattttgggggctggggtgtcaaaagtgagatgaagttcttagctccaggttttggggtaaaccaaggtaggaacattttggcatttatttcaattaacaatacttccttggacgggtgcggtggctcacgtctgtaatcccagcactttgggaggctgagacaggtggatcacttgaggtcgggagttcgagaccagcctggccaacatagcaaaaccctgtctctactaaaaatacaaaaattagatgggtgttttggcacctgcctgtaatctcagctactcaggaggctgaggcacaagaatcgcttgaatccaggaagcaagcggaggttgcagtgagttgagatcgcactccagcctgggtgacagagtgagattctgtctcaaaagcaaactaacaaagaaaaacaatacttcctggggttttggtgtgcagagggctttgttggaagtgtgactcaatcttgcctgccttctgggagctctagaattgttcccaacccagtccatggcttctagccaccactacagggctgtttcatgtacttctctctctgactctgtcttgtccgactctcttgagaatttctcaacgattgctcatgcctgtcagtatcagtgcttccatcgttccatctttgattcacttctctttcctttctatttactcccaaaatggagtcattcatcctgatgtcctcaattgctgctgatatgctggtgattcccaaatacatagctccaacccccaacttcccccagactttagatctgtattggtattacctactggacatctctatggacagttccgtatagactcaactcatctgcccaaccaagtatgttcctcctgaattcctctcctggttacttcatcacaatctacataggctcaccagctagaaacatttatgagcttacattccttcttcccatatcttatcagcatatcatatccatttcactccaacactctgtcttgaatttggccctccctctcccctctctactttaattcattggagcatgggatttggagttaggtggttttgggtttgaattccagctctactatttttggttgtgtgatagagttatttaacctctctgagcctcagt

SEQ ID NO: 13859 - DNA, 1151 bp, Homo sapiens
tagcaataggtaagcggcctctcaagctgctgcccaggtacaggtgggtgggggcctgcccccatcgttttcctgcatcctttttcattccctcaacttgctctggagttggatcctgggcaagaatgggtagcacaattccatggccccttggtacttctccctcctttgtgacttctgaagccatgctggctttgtctaacatctggaggagtcggccctccccactggtgggatcactagcgggaggactgaagaagcagtgtctctttctgtcctggacctgggagcttacagggaagctagataaagctgggaaattagggccagccctgggagtaaggaatatctgtctctaaacctgatgaacctcactttattaaggttacatcagccttaatagttgacttccctatttcttgtggcctttagacactagcccagctcaggcactcttcccatgcctccacagggagtcataagaagggaaccactccagtggtttaggcattggctttctttggagtgtgtgtgtcagacttctgcagaaaggagggtggggctgttagcagctgtggttgatccttatggggtaaggttcacctgggtgctgagcaggccctatgcactcttttccctcaggaggaacgcagtggatgcctttcgggtcaatgttatccatgcccggcagcaggtgcgcagccccgtcaccaacattgctcgcaccagcttcttccacgttaagcggtccaacatttggctggcagcagtcaccaagcagaatgtcaacgctgccatggtcttcgaattcctctataagatgtgtgacgtgatggctgcctactttggcaagatcagcgaggaaaacatcaagaacaattttgtgctcatatatgagctgctggatggtgaggctggcgggctggcacggcagcgggcgtagggtgggaaaaaaccaggctgggcctggcctgaaggtgggtgtaggtccgaggctctggtacactctgaactttctttcctgagtatttggtctcttgggctaggatctctatgcccctcagaaggccagttcacatccagacctgaaggctggtctgaagtagaacacagaaataggccagcaggtgatcttccaaggggctaggaac

SEQ ID NO: 13860 - DNA, 1258 bp, Homo sapiens
ggcaggagagctggtgggagagggtgtcccttggagggctcagtggggtctagtgaaccacaagtttcttctggatttcattcccactgtaattgcaaactctgttcctgacggtaagcctggctgttcgctcttgacattagtgctacgagagatgaggggatcgtcctcagagagcaagcccctttgtttggtccctaggaccaaggccttttctgtacatactgacagcctctgcccagtgtgcctgaaacacccaggtccctagcagaaggagccccaagagatgagcttgcaaggcttccctctcatcccaagctctggggcagacctccgagtcacaaagctgcattctagcagcttttcatagtctctggtgccagcctggggtggagtggtctcccagcatgacagctgtcattctcctgtaccaatgagacctcttctgcccctgcttgcagcgggaagcaatcaattgccattgatgactgcaccttccaccagtgtgtgcgactcagcaagtttgactctgaacgcagcatcagctttatcccgccagatggagagtttgagcttatgaggtgccattggggtgtgaggaggcagctagtgctgctggcagactggggagaggaagtgggtcagctctttggtaaccttgcttcccatcccttaaggtatcgcacaaccaaggacatcatccttcccttccgggtgatcccgctagtgcgagaagtgggacgcaccaaactggaggtcaaggtggtcatcaagtccaactttaaaccctcactgctggctcagaagatcgaggtgaggacagggggctcaaggaggaggaagaacttgtccctaggaataaaggtagctgatgtcacagcttgacagagctccctgacaggtgtgtcacttctaggtgaggatcccaaccccactgaacacaagcggggtgcaggtgatctgcatgaaggggaaggccaagtacaaggccagcgagaatgccatcgtgtggaagtgagtctttccttcattaggccacagcagggctcaagatcccagtataccctcttgttttcagctttgatccttctgaatgaggggcaggggagtgtgcctgtttgcttttctaggagcctctgcttgtactgtcagtctttatacctccatgtgagtatgtacacgcctgcatttgggttcatgcacgtgcttattttttaagatgctttggcatttccctttgtaatgtatacattacaaa

SEQ ID NO: 13861 - DNA, 2626 bp, Homo sapiens
ataacatggcccacaatgcagagcatgaggcttgcgacctgcttatggaaattgagcaggtggacatgctggagaaggacattgatgaaaatgcatatgcaaaggtctgcctttatctcaccaggtgagtgaacatggtagggaagggtggcaggcatgccctcctcagcacctctctctcaattgcgcctcctctattttcccagagcatttgctcaagcatagcatcacgctgtagttaatcttttgatgtgtgtgagtttcttgaggacagagactttgtgtcttcttagtagttctaacatctagcacagtgcctggtgtatatagtagatatttattatttattttgggtaagtgaattcatggggaaaatgagtgcctgggactttctgaattctttgttacttttacttttgtagttgtgtgaattacgtgcctgagcctgagaactcagccctactgcgttgtgccctgggtgtgttccgaaagtttagccgcttccctgaagctctgagattggcattgatgctcaatgacatggagttggtagaagacatcttcacctcctgcaaggatgtgtatgtagggaagaagctggcaaagagataagcttacgaataggacacttgcataaagagctgggacttgtagtttctggttagggcttgaggggttttcctgtgcccttagtggacagtgatgagcagatgtacgggctctctccacagggtagtacagaaacagatggcattcatgctaggccggcatggggtgttcctggagctgagtgaagatgtcgaggagtatgaggacctgacagagatcatgtccaatgtacagctcaacagcaacttcttggccttagctcgggaggtgagactgcccttttttcatcaaggccttttcgtcataattctacctgccatttcacctccctgactctacctctgactagactctccttgattagaattgccattcagtgggatagcagaagggacagctgggggagttctagggaagcaattgtgaccctctgacttctcttcagctggacatcatggagcccaaggtgcctgatgacatctacaaaacccacctagagaacaacagtgagtagccctctctgtgtatgggatttgggggattgtaggtatgccccttgtattgggagtgatggcttggccaacatgcttatcctatcgagctcagaatcctcatgaatctttttcaggtcactgcttgggggggtataggtagaggatactaagggactagctcagaaccagagaccagttgccatgctgtgtttctttcctgtcctacctgaaaccttctttccttacttttcctctccctcctgttgcagggtttgggggcagtggctctcaggtggactctgcccgcatgaacctggcctcctcttttgtgaatggctttgtgaatgcagcttttggccaagacaagctgctaacagatgatggcaacaaatggctttacaagaacaaggaccacggtataattctgttcctgctttgtcttttgttttgctttgatcacttcttttgtcctcttggagtcataagttatctgacaagggatccaccatgcagttctttggagagctctttataataacaggatcctcaggatagggccattttaagactaatagattcttccctggtataggaatgttgagtgcagctgcatctcttgggatgattctgctgtgggatgtggatggtggcctcacccagattgacaagtacctgtactcctctgaggactacattaaggttggtctgcatacagcctgctcatggggacttccccgttccatattctagtgcctagcagtgcctctctttcactgatgaggtctgcccagtttttaactctagttaataagggtgctgcagtgaggcccatgttgcatcctttgcggtgaggaagatagagtatcctgagtgaagaatctgtttgctctttgtagtcaggagctcttcttgcctgtggcatagtgaactctggggtccggaatgagtgtgaccctgctctggcactgctctcagactatgttctccacaacagcaacaccatgagacttggttccatctttgggtaaggttcctcgcttgtctttctggtagtgctcagcctgtacactctggagaacaggaactgggcccttttcacccatattgccaagggctaccactgtgcctattgggtatctggctcttggtgaatgtttgttgaaatggtgaatgaatgaccgattctccttttgttcttttcttgctgcatcgttgggtatgtgttggggaccgcctttccatggcttttgcaggctaggcttggcttatgctggctcaaatcgtgaagatgtcctaacactgctgctgcctgtgatgggagattcaaagtccagcatggaggtgagtagaggctattgagcatttagagtaagtagggaaggtgctttgagtcttactttctgtgataaataatgaaaaagaagtaagtgtgtgcatgtgtgcatacatgtacatgcctgttggtgtgtattgaggggcgtcacctcagtgaaaccccttgatctgggattctaagcctctgg

SEQ ID NO: 13862 - DNA, 2629 bp, Homo sapiens
attaaaaatacaaaaattagctgggcgtggtggcgcgcacctatagtcccagctacttgggaggctgaggcaggagaatcgctcgaacccaggaggtggaggttgcggtgagccaaaatcgcgacactgcactccagcctagcgatagagcgagactctgtctcaaaaaaaaaaaaaaaaaagcagtgcaggggataacctcaggatctgtgaccttggggctgtcacaagggttaaatgtcaatagtatgtaaaacagttggcctagtggctggcatatagtatatactcaatgaataatgactactattgttattttgatattatgaactaatgttattagggagaatatcttgcagtggactgtaggaataggctatcttgaatcaagacataaatattttaataacttactctgtgtaatactgattttcctacctctaggtggcaggtgtcacagctttagcctgtggaatgatagcagtagggtcctgcaatggagatgtaacttccactatccttcagaccatcatggagaagtcagagactgagctcaaggatacttatgctcgttggcttcctcttggactgggtctcaaccacctgggtgaggggatgtttctatttgggcaaagagctgacagtaactggatacaacagggagggtttatgtgtcaggctgtgctggatggaggcaagtatcctctgaccccttgaatctgtcctgtagggaagggtgaggccatcgaggcaatcctggctgcactggaggttgtgtcagagccattccgcagttttgccaacacactggtggatgtgtgtgcatatgcaggtctgtgtctttatgagtctgtcttgtgcttccccagtgactcctcacttctttcttggtccttattttcaggttgtttctcctttctccttcattctgatctgctctagattctttagacttctcctgttttccaaagcttttccttggtaacttctcatttctgtccattctccctcaccaccctgacgcaggctctgggaatgtgctgaaggtgcagcagctgctccacatttgtagcgaacactttgactccaaagagaaggaggaagacaaagacaagaaggaaaagaaagacaaggacaagaaggaagcccctgctgacatgggagcacatcaggttatatgggcagctgggcacttgcagagaggctgtgagaagagataagcatataggggaggctgggtttggtttttgctttagggcctctctgggtattgccatgtattgaaatagcgtgtgactgggttctgtatgtaaggggtaaaggtgttccccacaggatggctttttattttcagatgggacttgagtcaagggtgactgttttttattccttgagcttaatgggttctgctctctcttcaattgcagggagtggctgttctggggattgcccttattgctatgggggaggagattggtgcagagatggcattacgaacctttggccacttggtgagtatagcatgaagaaaattggaatatactggttttgatggcctggggttccccagggaagatttttctgatgggttttcttggtggagagctggtctttttgctgtgccttttctttcttttttcttttcttttttgaagcggagttttgctctagagtgcaatggcacggtcttggcccactgcaacctctgcctcccgggttcaggtgattctcctgcctcagcctcacaagtagctgggactacaggcacatgccaccatgcccagctaatttttgtatttttagtagagacagggttttaccatgttggctaggatggtctctatctcttgacctcatgatccacctgcctcggcctcccaaagtgctgggattacaggcatgagccaccatgcccagcctgctgtgccttttctacagaagttaaggcccccttttacccatcagtccactcctgtaatggaatttgtttttactgcattccgccttactgttgtattttcttggatcatcagctgagatatggggagcctacactccggagggctgtacctttagcactggccctcatctctgtttcaaatccacgactcaacatcctggataccctaagcaaattctctcatgatgctgatccagaagtttcctataactccatttttgccatgggcatggtgggcagtggtgagtatccggcagaagaaggtcataaacagattgggggaagatttgaagccccttttttcacttctgtaatgcttaacatttccaggtaccaataatgcccgtctggctgcaatgctgcgccagttagctcaatatcatgccaaggacccaaacaacctcttcatggtgcgcttggcacaggtaaagaatagaactcctccacagagcgtgccggggaagtatctgtggtgatggaaggaggaacatggagtgttggcccaggaggaaagatgtgaccaagtgggagatttctgtttggctgggttaggcgatgtctcctcagtggtaactcctcacctctacttccctctgtttttttcagggcctgacacatttagggaagggcacccttaccctctgcccctaccacagcgaccggcagctt

SEQ ID NO: 13863 - DNA, 1593 bp, Homo sapiens
ctgcagacgggaggcggtctggagcctcaagctaatggggagacgccccaggttgctgtcattgtccggccaggtaagtaagccggtgggacggagcttttatggggaaagggaatgttaacagttaaatgctgaggtggtggagtgacttgaactgggtaccagagaatgatgacttagatttcaggttgtgggattttgagggtgaattgggttttggatgaaagtggaagtatagcttaggtggggagaagatgatgcggggttattaagttgggaatgcctgggctggaggatggggaggaacaacagcagttaagcacttgcctttagttgctcattcttccttcctatggtgcagatgaccggtcacagggagcaatcattgctgaccggccagggctgcctggcccagagcatagcccttcagaatcccagccttcgtcgccttctccgaccccatcaccatccccagtcttggaaccggggtctgagcctaatctcgcagtcctctctattcctggggacactatgacaactatacaaatgtctgtagaagaatcaacccccatctcccgtgaaactggggagccatatcgcctctctccagaacccactcctctcgccgaacccatactggaagtagaagtgacacttagcaaaccggttccagaatctgagttttcttccagtcctctccaggctcccacccctttggcatctcacacagtggaaattcatgagcctaatggcatggtcccatctgaagatctggaaccagaggtggagtcaagcccagagcttgctcctcccccagcttgcccctccgaatcccctgtgcccattgctccaactgcccaacctgaggaactgctcaacggagccccctcgccaccagctgtggacttaagcccagtcagtgagccagaggagcaggccaaggaggtgacagcatcaatggcgccccccaccatcccctctgctactccagctacggctccttcagctacttccccagctcaggaggaggaaatggaagaagaagaagaagaggaagaaggagaagcaggagaagcaggagaagctgagagtgagaaaggaggagaggaactgctccccccagagagtacccctattccagccaacttgtctcagaatttggaggcagcagcagccactcaaggtaaggtgtggttggacggtagaggtagggcgggctaggggatatcgttccttgccctccttgatgaccgcccatttttgacatgtttctgggtccctgcaatggaatctaagaactagattaaggacttttaagcctaaaaagggtgatgcaaaggggaaatactgttctttggctgctttctatttcccagggattaagggtactccttaaattattggcaaagatccatgcttttatttatttatttttaattagtggcagtatctgtgccaaagaggagacggaaaattaaggagctaaataagaaggaggctgttggagaccttctggatgccttcaaggaggtaagggagcagaaaatgggaggggagagggccaagttgaggtatggagcagtggtcattctg

SEQ ID NO: 13864 - DNA, 1860 bp, Homo sapiens
ctcttagactaactggttggattgctggagacaggactgccagctgtagagggagggtggtactcccattagtctggaccagtgtttggcaaacacacacacacacacacacacacacacacacgtgccagatccagcccattcatacatcccaggacccagtagtggtttttacattttaaagttgcgaaaaatcaaaaagtgaatggtaatttatgctgtggaaattaaataaaatgtaaatgtcagtgtccatgaagttttattggaacacagtcacagcatgcctttatcatctacagctggtttcatgctactgtggcagaattgagtagttgcaatagagactggccctttattaaaaaagattttctgacccctggactgggccattcactacctgtttggttgcatatggtggtgctggccaagggactcagccgggttggacctatgattctactccccttttcttcttcagcctggctccatcgattctaacaaccagctctttgcacctggagggcgactgagctggggcaagggcagcagcggaggctcaggagccaagccctcagacgcaggtatggaggcagtgtcaggagctgggtggttacccgtcagagctcccttgaggacagagccttttctgttagggaggccttcagtacaaggtggttaggcaatgcgggcaatagaggaggtttgtgttgtggttccagggattgaactgctttacttttgggactgggaccaagtgtcctaaactggcaagtaggggataaaatgcaggaaaggagaaaaagattttaatacggattttctgcatccccagcatcagaagctgctcgcccagctactagtactttgaatcgcttctcagcccttcaacaagcggtacccacagaaagcacagataatagacgtgtggtgcagaggtgaggtttcctggacatctttgttattcacactgggggtaccgtgattgggttctggttgttgccataggttggaaatttcttcatacctgtcctggttggagcccttgggttagattggggcatactcattatgctaagaacaaggcccaacagttgctcagcatgttgtgtaattacatgagtgcctgggcagtgcaagtgagtgaaaatttgtctgtctgtcttccaggagtagcttgagccgagaacgaggcgagaaagctggagaccgaggagaccgcctagagcggagtgaacggggaggggaccgtggggaccggcttgatcgtgcgcggacacctgctaccaagcggagcttcagcaaggaagtggaggagcggagtagagaacggccctcccagcctgaggggctgcgcaaggcagctagcctcacggaggatcgggaccgtgggcgggatgccggtgagagtctgggagaggaatggagggaaaggcattggctgccttgggactagctggtccccagctttttgagagctccaaatcttgtttgctgggaagactgaaaagtccctctaatctgtgttctcttcccacagtgaagcgagaagctgccctacccccagtgagccccctgaaggcggctctctctgaggaggagttagagaagaaatccaaggctatcattgaggaatatctccatctcaatgacatgaaagtaggcagtgggagcggcgtgtgattgaggagtgggcagggagggatcatgctggcaggcataggggtccggggtctgggtcagacagtgactggtctcttcctgctgtgccctgcacccctcaggaggcagtccagtgcgtgcaggagctggcctcaccctccttgctcttcatctttgtacggcatggtgtcgagtcta

SEQ ID NO: 13865 - DNA, 1382 bp, Homo sapiens
aaaagtgtcaaggccagagaaggtgtgtatgtacaggaaatgtgtggggaaggaagggaaattgagatcaggagttgtcaggatctgtttggggggcagtgaatgttcaggttacatgtaggatatatataggactttatgtatgatatatataggacttttagcgatttcctgaattcaggagtaccaattctgaatatagttttctccattaaatacatcatgggcagagaggtttcaggctgccaaggtgaggccaagcaagtttgtaaggtttttctgatggccaagtgactcattgctgtgcagcagtctcagatcatgagattagcatcctgtcagaggcctagtcactctggaatggccacaaatgtcaggctggtgcatcagggccttgtttgaacagtggaacttgggagggttccctggggtgggctggggtggcggtggccagtcacctctaactgctgtcccgcctgcttgcagacctgctgcggatgttctttgacgcactgtatgacgaggacgtggtgaaggaggatgccttctacagttgggagagtagcaaggaccccgctgagcagcagggcaagggtgtggcccttaaatctgtcacagccttcttcaagtggctccgtgaagcagaggaggagtctgaccacaactgagggctggtggggccggggacctggagccccatggacacacagatggcccggctagccgcctggactgcaggggggcggcagcagcggcggtggcagtgggtgcctgtagtgtgatgtgtctgaactaataaagtggctgaagaggcaggatggcttggggctgcctgggcccccctccaggatgccgccaggtgtccctctcctccccctggggcacagagatatattatatataaagtcttgaaatttggtgtgtcttggggtggggaggggcaccaacgcctgcccctggggtccttttttttattttctgaaaatcactctcgggactgccgtcctcgctgctgggggcatatgccccagcccctgtaccacccctgctgttgcctgggcagggggaagggggggcacggtgcctgtaattattaaacatgaattcaattaagctcactgcctttctgctttatgccctgctccctctagagaaggtgtttataggtggggatccttcccagagctggtactgtagcgctgttccctgtaacctggcacccctcctgcctcttcccctgtccatgattgcagggatctgaggtttcctggaaggttgggccctcagatgggcttgataggtgccttcctggtccggagaaaagggagattagtgataggacatccttgctaggctctgctctcctaccagaatgattcaag

SEQ ID NO: 13866 - DNA, 1179 bp, Homo sapiens
ttctcagccggattcacacagatcctggcccctcaggctgtcggtatgttagaagagaaggggagggcagaggcgggacccctgaaatgggtgcatcgaatgcctctcctgagactgttccctctccaggctctggcatccctgagatgaagaccatcttgcggggagtggtgctgaaagaatacctcacactcaagacctttatagctaaggtcattgggctgacctgcgccctaggcagcgggatgccgcttggcaaagaggtaactgcaggctggggaatgaaggagtccctcctggtggaagaggaggccaggccaaggtcagggcgggccccctcccgactcaccgcctgccccaccccgcagggcccttttgtgcatatcgcaagcatgtgtgctgcccttctcagcaagttcctctccctctttgggggtatctatgaggtaaggggaaccctggggcaagtagggggcagaggctgctgagcccacagctgaccccctcttgccaccactctcgccagaatgaatcccggaacacagagatgctggctgccgcctgtgccgtgggggtgggctgctgcttcgcggcacctattggaggtaggcagggctcctaggtcagtccagccccacaaccctgcccttggcctctcctccttggcccctcttatctgggtctgaggccttaggccaggcccaggcctcaagtgctggtctccctccccctcacaggcgtcctcttcagcatcgaggtcacctccaccttctttgcagtgcggaactactggcggggcttcttcgctgccaccttcagtgccttcatcttccgggtcttggcagtctggaaccgggatgaaggtgggggcacccaggggatgagggcagcccgagatggtgccaggtagggggcccacgaggctaggcctgcctccctctgctgttcttccctttagagactattacagccctcttcaaaacccgattccggctcgacttcccctttgacctgcaggagctgccagcctttgctgtcattgggtgaggagctgagggggctgggggtatcagagaggaggggggtttctagaaggctccttttcactcaggtgcctcttccctttccagtattgctagtggcttcggtggagccctctttgtctacctgaaccggaag

SEQ ID NO: 13867 - DNA, 1198 bp, Homo sapiens
ttttttttgtatttttagtagagacagggtttcaccatgttagccaggatggtcttgatctcctgacctcgtgatccgcccgcctcagcctcccaaagtgctgggattacaggtgtgagccaccgtgcccggccggtgtaaagcttttcttaaacgtttcaatagttgcataacatttcagtaagtggatatgtcttgattcatttgaacattcccctgatttggggcatctaggtgttttccaccctcgataatataaagaacagtgccttgcacatatctgtgcattgatgtttgtcagaattttggttcctagtgacaaaacagtaggaagatgcctcttctgtttcttaggctgagatggaacagtgccttgcacatacctgtgcattgatctttgtcagaattttggttcctagtgacacaacagtaggaagatgcctcttctctttcttaggctgagattgagagctgctgagtggcagtgctccagaatcacgggatggggccttctgtttcagctctgcgtacgtgtcctatgggggcctgctcatgaggctgcagggggatgccaacaacctgcatggattcgaggtggactccagagtttatctcctgatgaagaagctagccttctgaacctcgcctgaagccagcctctctgccaagtcactcaggtcatgggcattgttcaagcctgagtggcagccgctcttgctcacctgttgaggaagggctggctcactgtccaccgtggcggcatctttaactggcctccactcaatgggaaactgactcgcctgtgaaagacacagtgggagagctgaaaatgaatcagaagctttatgtatatgatttttaaattaaactttactttttcagactgcccctcccctttttgtaaaaagtccatttactgtaaaatcgttttttccagtttgtctgtggtgtattgtttctggcccacagccagctgatcacttgtcaatgtaggatctattccagccttttggtatctgggttcagggttatctcagtctcctggctgactgttctcaacatttatcctccagtgtggttttcagtctgggagagagttgtgcttttggctcctgagggtaccccaggcccagaagataccacccatttggcgcagaattttgaattggcaaggagccctgctcatgtccttccaaca

SEQ ID NO: 13868 - DNA, 1174 bp, Homo sapiens
tgcggggtttgcatcttttgacctggtggcccagatgacggcagagtaagtgtgcctcagatttggaggagcagggcagggggccctaggctgggcccagagttgagggcacgaggaaagggactgatcctaatttggctccacctgcagagacctgctccgtattggggtcaccctggccggccaccagaagaagatcctgagcagtatccaggacatgcggctgcagatgaaccagacgctgcctgtgcaggtctgacaccggctcccacggggaccctgaggaccgtgcagggatgccaagcagccggctggactttcggactcttggacttttggatgcctggccttaggctgtggcccagaagctggaagtttgggaaaggcccaagctgggacttctccaggcctgtgttccctccccaggaagtgcgccccaaacctcttcatattgaagatggattaggagagggggtgatgacccctccccaagcccctcagggcccagaccttcctgctctccagcaggggatccccacaacctcacacttgtctgttcttcagtgctggaggtcctggcagggtcaggctggggtaagccggggttccacagggcccagccctggcaggggtctggccccccaggtaggcggagagcagtccctccctcaggaactggaggaggggactccaggaatggggaaatgtgacaccaccatcctgaagccagcttgcacctccagtttgcacagggatttgttctgggggctgagggccctgtccccacccccgcccttggtgctgtcataaaagggcaggcaggggcaggctgaggagttgccctttgccccccagagactgactctcagagccagagatgggatgtgtgagtgtgtgtgtgtgtgtgtgtgtgtgcgcgcgcgcgcgcgtgtgtgtgtgcacgcactggcctgcacagagagcatgggtgagcgtgtaaaagcttggccctgtgccctacaatggggccagctgggccgacagcagaataaaggcaataagatgattctcttgccccttcttattcctcctcccaaagcaagattccctgattcagagttcacagtccctggctgccaacccttcgcaactccctggaggcattgggaaaccagatctgggcccatccaggctc

SEQ ID NO: 13869 - DNA, 1181 bp, Homo sapiens
ggagatacagagaaatagaacaaaggactctcataattttaagagagattttgaaggaagtagattgttaaaatagcttctattttaaaatatgtattgtttcagtgctaacaattgtcctctgaccagctaggtttatcggctttactttgttcttttgtttcagcaatatcagaaaaactagaaatgcagagtttgtcatgataatgaagtcatttgtgccaattgctttaaaaaatcttttataaaaaacgatatgctctaatccacctacagcttttagtcttcttttacactatgaaagtgtcattttaacattttcaaaagtcagtagtatattgtacctactgttctctggcctgtcactgagtagttcttgctttgattgtgttgccatgtaaattgttaaatggatcaagtcctcaatgtaatttaatcgagcagccaagctttcttcttgacccaaatgatgaagcgggtgtggtctcacttttgttttgttgtgtgcttgaattacagtggataaattcacgcacagttgtgctcttagacagcgtagagaagttgcatgtgattgatcggcaaacacaagaggaattggagacagtggagatctcagaagttcagctggtctacaatagcagccatttcaaatcactagccactggaggaaatgttagccaggcactggtaaggataatcacttatcttgctatcctagaaaatactttgataaacttggtattttgttatagttgttttagaaataggaactctggggagttacctttttctgtcttgaggtgtttctttacaagccactaggttgaagtgggtgtggatgtgcttataagtgtttgggaatacaagctaaaacaatcatttttcttcccttctattcagaaatgtgacttattttacttaataacaaagagttttaatttttatactaaaataatgacgtataatggaaaatttgtgagaaaaattgtaaaaatcaaaatatttttagaaagcttaatttggcagtaataagcctgatagatttaagggataaataactacagacaggtactctatgaggctttggaaatatttgggtgataatggtaaaggcttgaacaggtatggtagctgtgggtattaaaaaacaaagatggctttgagagaaagaagatatt

SEQ ID NO: 13870 - DNA, 1135 bp, Homo sapiens
aaagattaaaaagattggagtcgttgtaggcaactgttttggatttgtggggaatcgaatgttgaatccttactacaatcaggcatatttcttgttagaagaaggcagcaaaccagaggaggtagatcaggtgctggaagagtttggttttaaaatgggaccttttagagtgtctgatcttgctgggttggatgtgggctggaaatctagaaaggggcaaggtcttactggacctacattgcttccaggaactcctgcccgaaaaaggggtaataggaggtactgcccaattcctgatgtgctctgtgaattaggacgatttggccagaagacaggtaagggttggtatcaatatgacaagccattgggtaggattcacaaacctgatccctggctttccaaattcctatcacggtatagaaaaacccatcacattgaaccacgtaccattagccaggatgagatccttgaacgctgcttatattcacttatcaatgaagcattccgtatcttgggagaagggatagctgctagcccagagcacattgatgttgtctatttacatggatatggatggccaaggcacaagggcgggcccatgttctatgcttccacagttgggttgcccacagttctagagaaattgcagaaatattacaggcagaaccctgatattccccaactggagccaagtgactatctaaaaaaactggcttctcagggaaaccctcccctgaaagaatggcaaagcttggcaggctcccctagcagtaaattgtgattcagtcttccagattatgcctcacatgctagcatcaggtaatgctgactgaatttcagtgaaattaaatcaaaaatccaaagtaagattgttctgaaatacaaagcaaaataaataatcattagaatcttctgtgtaacgactctaatggtcaaatctttaggaatgtgcttcctatgcctctgaatctgtccttatcagataaattcaatgcatgaacttgtgtgaatataataccataatagctaatgaaagaggctcaggcataagttgagattctcaaatgcttttatcattggataaatgtgtcatcaattaataaatgataaatgcagctaagtcatacattcattt

SEQ ID NO: 13871 - DNA, 1210 bp, Homo sapiens
atggttgtgctttccaattcattgatgaagaactaattttttagtgctttagtgtactgaaatgctgtctttagtgccctggaattacttatttaaactgtgatagaaggttgtacaaggtattacttttctctgcttataaattatatgaatgtacatagtcctagcaatatgaatatttatcagaagatgtataatgtagaatccaactgcctcattcttcctgaacagccatggccaaacttcttgcattaatggagacagaatgaattgcaaaggttgtataaatcgaggctgttatgtttatgacaattggcagctgtggcataaaaggctcattactatatgtaattgacattttgttgttccttcttcctccactcctttgccaaaaaatggcattggtattactacctctccatgtaggaagtaggatctacctatgagaaagttcaagagagtagttaagcaacttcagctatccctgaccttcttccacaaccctcatgaaactaatccattgcaaaattctgtcttttctacttcctaaatatctttcaaattattcacctgtttccatgtccatccttatttattttatcatcttcgcctacatttttgcaataactcttcaatggttttttgtatttactcctcccccctctaatctcattgcttttagactgatttttaaaaatacaattctaatctttttggtcctccaatctaaactcttattatcttattgcccttagaattcagccccaaatcttcaatcattctttgtctactaagctcaagccataatggtcttccaattctctgacaatgccatttttttttcttcagggtatttgttgttgtttttgttgttgttgttgttgttgtttttgagacggagttttgctctgtcgcccaggctggagtgcagtggtgcaatcttggctcactgcaacctccgcctcccaggttcaagcagttctctgcctctgcctcccaagtagctgggattataggcgcccgccactatgcctggctaatttttgtatttttagtagagatggggtttcaccatgtgggccaggctggtcttgaactcctgacctcgtgatccacccacctgggcctcccaaagtgctgggattacaggcgtaagccacagcgcccagccttctttagggcttttgcagagcagatactttctgcttgg

SEQ ID NO: 13872 - DNA, 1746 bp, Homo sapiens
taatgagattcacatttgattctagaaaaggcagaatgatcatgattaagagaactgaaacccaaaacagatgaaaagacaagaacatgcttttcctgtggcagcagccgggctgagaggagcgtggctgtctcctctctccgccatggcgtgtgctcgcccaatgatatcggtgtactccgaaaagggggagtcatctggcaaaaatgtcacttagcctgctgtattcaaggctcctattcgaccagatattgtgaactttgttcacaccaacttgcgcaaaaacaacagacagccctacgctgccagtgaattagcaggtcatcagaccagtgctgagtcttggggtactggcagagctatggctcgaattcccagagttcgaggtggtgggactcaccgctctggccagggtgcttttggaaacatgtgtcgtggaggccgaaggtttgcaccaaccaaaacctggcgccgttggcatcgtagagtgaacacaacccaaaaacgatatgccatctgttctgccctggctgcctcagccctaccagcactggtcatgtctaaaggtcatcgtattgaggaagttcctgaacttcctttggtatttgaagataaagttgaaggctacaagaagaccaaggaagctgttttgctccttaagaaacttaaagcctggaatgatatcgaaaaggtctatgcctctcagcgaatgagagctggcaaaggcaaaatgagaaaccgtcgccgtatccagcgcaggggcctgtgcatcatctataatgaggataatggtatcatcaaggccttcagaaacatccctggaattactctgcttaatgtaagcaagctgaacattttgaagcttgctcctggtgggcatgtgggacgtttctgcatttggactgaaagtgctttccggaagttagatgaattgtatggcacttggcgtaaagccgcttccctcaagagtaactacaatcttcccatgcacaagttgattaatacagatcttagcagaatcttgaaaagcccagagatccaaagagccctttgagcaccacgcaagaagattcatcgcagagtcctaaagaagaacccactgaaaaacttgagaatcatgttgaagctaaacccatatgcaaagaccatgcgccggaacaccattcttcgccaggccaggaatcacaagctccgggtggataaggcagctgctgcagcagcagcactaccagccaaatcagatgaaaaggcggcggttgcaggcaagaagcctgtggtaggtaagaaaggaaagaaggctgctgttggtgttaagaagcagaagaagcctctggtgggaaaaaaggcagcagctaccaagaaaccagcccctgaaaagaagcctgcagaaaagaaacctactacagaggaaaagaagcctgctgcataaactcttaaatttgattattccataaaggtcaaatcattttggacagcttcttttgaataaagacctgattatacaggcagtgaggaaaaaaagaaaagaaaagaaaagaaaagaacatatatcagtgttttgattatttccaagttctaaggtccagatgaattacatgtgaaggcatcaaaactcttgcatttaggattacaaaaacaacctttggtaaataattatcttcaggaactatgagcaagacagttgttcatggaaaagtagaagataaagaaataccctatttttttaaaaaggaagattacagaata

SEQ ID NO: 13873 - DNA, 1283 bp, Homo sapiens
aggtgatgtggacactgtgcatcaatgtgcagtgtcttttcagaaaggacactctgctcttgaaggtgtattacatcaggttttcaaaccagccctggtgtagcagacactgcaacagatgcctcctagaaaatgctgtttgtggccgggcgcggtggctcacgcctgtaatcccagcactttgggaggccgaggccggtgattcacaaggtcaggagttcaagaccagcctggccaagatggtgaaatcctgtctctaataaaaatacaaaaattagccaggcgtggtggcaggcacctgtaatcccagctactcgggaggctgaggcaggagaattgcttgaaccaaggtggcagaggttgcagtaagccaagatcacaccactgcactccagcctgggtgatagagtgagacactgtcttgacaaaaaaaaaaaaaaaaagagaaaaaaagaaaatgctgtttgtattttgtggtctaataaggagttcgggatagcctgttgtatttgcctcatgccagcccctgagctgccttgggagaagatgctgattgtccttgtccagagtactgcttttgcagagtgacaggctgctgggacagatgtcctcctgttgcatctttgtggatgtttagtaccaatgatgacacgggaactcacatcactgacaccgctcttcatcttctgttagtctcttgaagagcatttttttgtacttctttgctgatgacctacctcttcataagccaagtgaaacaagttgacgaactgcctaggacttccacgtgttgctcacatacatgatgatttctgtcacgctcttgtgttcagacacactgacattaccatgtatgtcagacctccttatgatcgcatgtcctgacagttaagctgattgcaaacagactattaaatatgaatggagcaaacgctgtatgtcatggatatgttctggagaaattcttacccatctggatggggcagggcccttgactcacctgaatcatgaccaggcaaacattttatctgtcctttctgcaggaatccgttctgtgtcatgctaggagaatgggttcagtatatggggccatcaggcagtataccctctgaatgtttttcattgttgtatttgcttagagtaactaaacaattgtatcttttaatttatcttttaattcaaagaggaaaccttggcttctgataactttgttgtgttgtatcttaatggcctatagctgtcattacttcctgtagctgcagtacagaattgttacagacctg

SEQ ID NO: 13874 - DNA, 1281 bp, Homo sapiens
atattatttactagaccattgcatttttataaattcatttacaaggatattttgtcttattttcccaggcctcagctgtgtcggtatgatcttgtcctgatggaaaacgttgaaacagtcttccaacctattctttgcccagagttgcagttgtaactgttgccaggacacatggccataaataatagaaagaaagctacaaccacaggctgtttgaaagcttcacctcacctttctgcaaggcagaaaaagtatgaaaaaaaccaaggcttttttcagtagcgtcctatggatgtcacattgtacatcaaacaaccttgtgattataaaacgatcctgggaaggagcccctaactagggcaagtcagaaatagccaggctcgcagcagcgcagcgctgtgtctgctgtgtcctggggcctcccttgttccgacctgtcaattctgctgcctgtcacgcgggtggttctgcccatcgcggctgcgggtcaagcatcttcaagggaaggacggactggaggcctcaccgtggactcaactctgcattctccgtgccacattcctccagttcccacacgtagaagggaacgaaactgacgtctacctcatggggctgctgtgtgggtttgggaggcaaaaatctatgaagggttttttgaaatcccataggtgccacatctatgagatgtttgataaatgtgaatatgcttttacatttgggcttatctaatttgcaataagagagcctctctctatcaacaccagcttctctctcgggctgtttgctcagggaaggcaagaaagccacgtgctggccctctgccttctctaaagtgctgttggagcatggaggagctggaggagatggggatggactgacagctaagagggcggctgctgggactagatagtggatgaagaaagaaggacgaggaagccgtggggcagcctcttcacatggggacaggggatggagcatgaggcaagggaaggaaaagcagagcttatttttcacctaaggtggagaaggatcactttacaggcaacgctcattttaagcaacccttaagaaatgtttatgtttctttattaccaatgtaatctatgattattgaaggaaatttagaaaatgcgtagatacaaaattaaaaaaaaatactgtccacgatcctattagaggtaattaatgttagccttttggaacaaggctgtcacctattttgccaacacgtgaattcaaaacatgaaccggtttgcttttggagaatctgaagactccagt

SEQ ID NO: 13875 - DNA, 2497 bp, Homo sapiens
aagaccagcctggccaacatggtgaaaccctgtctctactaaaaatataaaaaataagccgggtgtgctggcacatacctgtagtcccagctacgctggagactgagggacaagaatcgctcgaacccaggaggcagaggttgcagtgagcagatcgcgccactgcactccagcctgggtgacacagcaagactccatctcaaaaaaaaaaaaaaagtgcttatggtacatatcatgtaattatgaactgttaaaaatggttttataagtatgttccatgatgtaaaaatgtcaacacttagaaaaagcacatggacatcctgctttattacatgattacacctgaaggttgtgctgccatgcacattaatatgtaatgcgggcgttgtttatggggttctttgcagcaccagatgcctctcttccggaagaagatggtgtgggaaatccttcatcagcagttgctgtgagaaaactttgcctggtccctctagctgctggtggttctttcacagacatttccatatacctcatgcattgtgggttaaaaagtccctgcatcacttctgttctcacaggtactgagctgtcaaaagtgcatgaaggcctctcactgtactctagtcctgacttggggtgcagagggctgcttgcaatcctgtttgtaaggctgtgcctgctcagagctttggactgttcaacccacacaagaacaaacgctaactaatattttttttaagagattcttttccctatgaatgtgggaaatgcaggatttattctgtgaattgtttgtttctgtgtgtttgttcagcgtattcattcactcactcgtttgcaaacataatgggcagtggtcatttactgctgctcttttacagttagctctaaattacttgtttgaactatttatttctgaaaggaatgttactcaagctgccactccctgctgaagagcaggagggaactctcactgggggcggaaggaagtggagctggagcagtaactgccaacatgaagctggagggtttgggattttttttgtttttgtttttttgaggctcaaaaaatgctgggagaaatgaaaatgctgtgggatagggctcctgttgcctttcagaggaagtctgacactacagcgttggcacagtgccgtgaacagtggaactgtgcccaagggactctgattatccaagcatcttccgaagagtgttgtggtcaccttaaagagacttccccttctggaaatgtggtgacttggcttagtcttcaaactggattcatggatttgaagtaactgtaaaccctaaatcttcattttcatcccagatctggttgagtataaacctcagaattgtaggggctggcctgagctgtttatttcaaaagatactattcaatttaaagctatttttcctcagagtttttgttttctatatattaagtctaaattaagttttctactcattaagactaacatctccccactccatccccactgaaatttgtggaagaaaatttagtacttggctctgaggttgccagttatacaataatctattttgcatatgaaagtttgtatttaacttttttgttcattaaaaaccttactgatatggttataacttcagacagtttagagttggtcagaacatattttgcaagatctagtgcctagtgttgcttttctgatgtaataaaaggtggtctggcagaacctaaaaaagtatatgctgaaatgatttctaaccctctccctacttaaacctcccagacttgttctggttcataaaagcaagaggtaaaactggaaaaattgtgcacgtgttacctatgaatctacacgcctgccatttgcagtgctccggctgctggtcccagaggtatactggttacagctattgcagccagttccctgagacttgtaaaactcctggtttaggacatggggcctgtggtgtggatggaaaatgctgggcctactggatggtcagccagaggccatgtggtgggtgatgactgaagcgggagcaggttgtaccacacctctcccccccccctcccactccccctccctccctctcccctccccctccctccctcccccctccctccctcccccccctccccctccctccccctccctctctccctaacacccaccctccccctttcccccaccctccccccttctcccctttccccaccctccctccccccttccccctcccccccccccccccgcagcccctgctcctttctctgggctcctggcattgtgccagtgagtgctgggaccaggtaatgagcacagccaaaaaggccagaggttcactaggtcagcatcataccaaacgcctggctttcaccaggcatcagtgtgcttcacttgagagtttggtaccatggttaagatcgagtccatgctaggtaagtcctgttaggaatgtcagtttgtattccgcccacgtgaatgatgctgagcttaatgtatta

SEQ ID NO: 13876 - DNA, 2502 bp, Homo sapiens
ggagtcccatccccttaccctggaccttggggtgggagtggaggggggacctctgccacttacttccaggcagaaaagggcctggagtaacgtgcgggggtgggtagatgatgcttgtctgagcattccacccttcatccccaagccccagagcctcccctgccgtttgtcctcagaactgggttccttttttcccctgtcccttcctctcccttctctcccttgctgcagactgcacagcgcaagatcagggaaattgtacaacaggtgaagcagcaggagcagaaataccctcagggagtcgcctcacagcgcagcaagtgaggctcccacaggcaccagcaaaacaacggatgaatgtagcccttccaacacctgacagaatgagaccaaacgcagccagccagatcgggagcaaaccaaagaccatctgaggaatgagaagtctgcggaggcggccagggactctgccgaggccctgagaaccccaggggccgaggaggggcggggaaggtcagccaggtttgccagaaccaccgagccccgcctcccgccccccagggcttctgcaggcttcagccatccacttcaccatccactcggatctctcctgaactcccacgacgctatcccttttagttgaactaacataggtgaacgtgttcaaagccaagcaaaatgcacaccctttttctgtggcaaatcgtctctgtacatgtgtgtacatattagaaagggaagatgttaagatatgtggcctgtgggttacacagggtgcctgcagcggtaatatattttagaaataatatatcaaataactcaactaactccaatttttaatcaattattaatttttttttctttttaaagagaaagcaggcttttctagactttaaagaataaagtctttgggaggtctcacggtgtagagaggagctttgaggccacccgcacaaaattcacccagagggaaatctcgtcggaaggacactcacggcagttctggatcacctgtgtatgtcaacagaagggataccgtctccttgaagaggaaactctgtcactcctcatgcctgtctagctcatacacccatttctctttgcttcacaggttttaaactggttttttgcatactgctatataattctctgtctctctctgtttatctctcccctccctcccctccccttcttctccatctccattcttttgaatttcctcatccctccatctcaatcccgtatctacgcacccccccccccccaggcaaagcagtgctctgagtatcacatcacacaaaaggaacaaaagcgaaacacacaaaccagcctcaacttacacttggttactcaaaagaacaagagtcaatggtacttgtcctagcgttttggaagaggaaaacaggaacccaccaaaccaaccaatcaaccaaacaaagaaaaaattccacaatgaaagaatgtattttgtctttttgcattttggtgtataagccatcaatattcagcaaaatgattcctttctttaaaaaaaaaaaatgtggaggaaagtagaaatttaccaaggttgttggcccagggcgttaaattcacagatttttttaacgagaaaaacacacagaagaagctacctcaggtgtttttacctcagcaccttgctcttgtgtttcccttagagattttgtaaagctgatagttggagcatttttttatttttttaataaaaatgagttggaaaaaaaataagatatcaactgccagcctggagaaggtgacagtccaagtgtgcaacagctgttctgaattgtcttccgctagccaagaacctatatggccttcttttggacaaaccttgaaaatgtttatttaaaaaaaaaaaagatgacaaagaaaaacagagagagagaatattggagatgtcctgaattttaatagggtacgcgccattagggctttttgcgctaaaggatgaacatgtactggtttatgtggacaagccattataccaccagactgcaatgccagtttcctctactgcaaacagtgttctgtgacaaaaaaaaaaaaaaaaaaaagaaaaaaaaagaaaaaacagaaatatatccagctaacaagatcctggtgtcttggtgttttattttactaggcattgcctcatcccaggtgtcagctgagtcctagctctgagggacctgggcagacaggcggtaggtgtgacctggatccacacagctactctgagaaagctggttttgcccaggaaagtctttgggagaagctaaactagatcggtggtcaaagtgtagtccccagaccagcagcatcagctatcatctgggaacttgttagaaatgtagattcttggggtccaccttgaatcagaaatcctgggggtgaggcccagcaaccttttcagcaaggcctctgggtgattgctgtgcgcactgaagtttccgaacctcggagctagagggatggatcgactgcatgtcaagctagaga

SEQ ID NO: 13877 - DNA, 1233 bp, Homo sapiens
gccgctcgcccggcctcggcgccgcgcccgcccggggttccggcgcccggagccccagcccggggccgcgacccgcttccgcccgcctggcgcggggccggagcccgagcagccactgccgagcgcggtgggcgcgaggcgaggggcgcagcggcgcggggcggggagggggcgctcgctcgctccctctcggctgcgcacacgcccgtacaaactctcacacagacacacgcggggtgcgctgccgccgcccgccgctgctcctcctcccgccaccgccttgagagggagagagagggaggcagagagagcgctttgtccgcgcgccgccgcccggcccgggactctgccccgaggaggcagccgcgccgagtccccgcctccgcctctgcccccgggcgggccgggccggccgcggtggggggagccaggctgagggtgggggtgggtggcgggcgggcggagggcggggagggggggcggaggaggaggagagacgagggcagcggaggaggcgaggagcgccgggtaccgggccgggggagccgcgggctctcggggaagagacggatgatgaacaagctttacatcgggaacctgagccccgccgtcaccgccgacgacctccggcagctctttggggacaggaagctgcccctggcgggacaggtcctgctgaagtccggctacgccttcgtggactaccccgaccagaactgggccatccgcgccatcgagaccctctcgggtgagcactcagcgcggccccctccccccgcctcgccccgctcaggccgggacggcgccgggagggaggccgagtccggcgggcggcgcccggcggcggctcccgcgcccgcacgctcacttccacgcaccagaccctcaactctcgccgccggcccgctcctgggacggcccgctcccctccccccacagctctggactctgccctcgccctcggggccgcagccttggggcgccccccgtgccgctccgaaggctcccgaggctcgccggctccttaggggcacccctcgttcgcctggcgccccgggctgctctgagcttccccgccccccaccctttgagcgtcccctgtctcacttctcccctgaccttcctgtcaccccctttgtcagggtccccccttccccaaatccagcgtctcttcctcctcccccggccggaccttctctcttccagtgcctcgtgcccagaacctctcgccct

SEQ ID NO: 13878 - DNA, 1426 bp, Homo sapiens
taatggcagaatattctgaaattctcggcattaaagtatacttgataattagttcacttaatattaaagcatgttcattcttttcttcccaggtcgctattaaagcatgaagactttctgaaacctgccctagagctgggatattgtttgtgggcaatattttttattgtctcttgtttaaaaagtgaacagtgcctagtgaagttaggtgacttttacaccttttacgatgactacttttggtggagttgaaatgctgttttcattctgcatttgtgtagtttggtgctttgttccaagttaagtgttttcagaaaagtatgttttgcatgtatttttttacagtctaaattttgactgctgagaagtttctattgtacaaaacttcatttaaaaggtttttctactgaatccagggtattctgaagatcgaagcctgtgtaaaatgctaccaaatggcaaaaagcaacaataaacagtttgatttttacttttctttctaacatatcaatgcttagcagaactattcagattgtcagtagtaaatttaaagacaaatgcccgttttcctccagtccatgaaacataccatacttatatacctgcaactaagtgtttaaaattatgctctgtaactctgtactgctagtattagaactaaaaatcttaaaatacagccagtgcttaatgcttatatcaatgtggatttgtcggcttttatgtaatctgtaatatgtatagcaggaaatacgaagagttacacagtgtatgccttaaaaggctgtttcttaaaggtgttacaaggggataatggtatttcaactagttatcagcaagtgacaatacattccaccacaaatacactcttgttcttctagcttttagactatatgaaaaaaccgggtgcttcaaagtacatgataagggaacactatacctgtcatggatgaactgaagactttgcctgttcattttttaaatattattttcaggtcctttgcttaccaaaggaggcccaatttcactcaaatgttttgagaactgtgtttaaataaacgcaaatgaaaagaaaaatgttggtgcagctgttcacaaagaagtgttcttgttctattataattagagttcttctgtagtttaatcgttagggcagtgtgttccttgggctgaggtgtatctttgctattttgggctgggttgagggggggatgaatttctgtattcctggaaaattcagagtgcataactaggtattagagtgatctccatttggggatggagttacagtaaataactagactgcgggtactttaatacatgttcttattattttgcatttaagtaattttcatgaccaattgtagggatgttgctacaggtgggttattttgttgccttgctaacctttatcgcatctaggtattag

SEQ ID NO: 13879 - DNA, 2822 bp, Homo sapiens
atgccgaaggctttgcttactaagtttctgagtggcggagtggccaaaccctagagctagcagttcccattcaggcaaacaagggcagtggttttgtttgtgtttttggttgttcctaaagcttgccctttgagtattatctggagaacccaagctgtctctggattggcacccttaaagacagatacattggctggggagtgggaacagggaggggcagaaaaccaccaaaaggccagtgcctcaactcttgattctgatgaggtttctgggaagagatcaaaatggagtctccttaccatggacaatacatgcaaagcaatatcttgttcaggttagtacccgcaaaacgggacatagtatgtgacaatctgcatcgatcatggactactaaatgcctttacatagaagggctctgatttgcacaatttgttgaaaaatcacaaacccatagaaaagtaagtaggctaagttggggaggctcaaaccattaagggttaaaaatacatcttaaacattggaaagctcttctagctgaatctgaaatattaccccttgtctagaaaaaggggggcagtcagaacagctgttccccactccgtggttctcaaaatcataaaccatggctactcttgggaaccacccggccatgtggtcgccaagtagagcaagccccctttctcttcccaatcacgtggctgagtgtggatgacttttattttaggagaagggcgattaacacttttgacagtattttgttttgccctgatttgggggattgttttgttttggtggttgttttggaaaaacagtttataaactgatttttgtagttttggtatttaaagcaaaaaaacgaaaaacaaaaaacaaaaacaaaccttttggtaactgtgcactgtgtcctttagccagggccgtgccaacttatgaagacactgcagcttgagaggggctttgctgaggcttccccttggccatgtgaaagcccgccttgttgcctgctttgtgctttctgcaccagacaacctgatggaacatttgcacctgagttgtacatttttgaagtgtgcagggcagcctggacacaagcttagattctctatgtatagttccccgtgttcactaacatgccctctctggaaagcatatgtatataacatgtgtcatgtcctttggaaacctggtcacctggtgaaaacccttgggattcttccctgggcatgactgatgacaatttccatttcatcagtttgttttgttttcctttttctttaaatcttggactttaaaccctacctgtgtgattcagtagggtttgagacttacgtgtgatactgacaggtaagcaacagtgctagcattctagattcctgcctttttttaaaaagaaattattctcattgctgtattatattggaaaagttttaaacaaccaagctaaagctatgtgaaagttgagctcaaagtagaggaaaagttactggtggtaccttgctgcctgctctgctggtagaattctgtgctccccgtgacacttagtacattaagaatgactacactgttcctcgtatgtgaaggaggcagtgctgactccgtgagtgtgagacacgtgctttgaactgcttttctattcatggagcactccatagtctcaaactgtcccccttatgaccaacagcacatttgtgaagaggttcgcagggataaggggtgcactttatagctatggaaacatgagattctcctctattggaagctaattagcccacaaaggtggtaaacctgtagattgggccttaattagcattgtactctaatcaaaggactctttctaaaccatatttatagctttcttaacctacacatagtctatacatagatgcatattttacccccagctggctagagatttatttgttgtaaatgctgtatagatttggttttcctttctttacttaccctggtttggattttttttttttttcttttgaatggatttatgctgtcttagcaatatgacaataatcctctgtagcttgagctacccctcccctgctgtaacttacgtgacctgtgctgtcactgggcataggacagcggcatcacggttgcattcccattggactcatgcacctcccggatggtttttgtttttttcgggggttctttggggtttgtttgtttgcttcttttccagagtgtggaaagtctacagtgcagaaaggcttgaacctgccagctgatttgaaatactttcccctgcgcagggccgtatgcatcctgccaagctgcgttatattctgtactgtgtacaataaagaagtttgcttttcgtttaccaagcacccgaacctgcctctttcttgccctcattggtctaattttaaagcaggcaaaagccccctggctttctctccgcccccgccctagccctctcaacaatttagccttaccaatggacagtggcatcgagggtagttagggaactctgttacctggaaatagatgtgcacagctcctcttaaactccagctaaaaatttaatccaaagaggtggaaagtcgagagatcctcttcccagccaatggtgagctgagatcacctcatccccttgagcccaccaagccaccaattcttagtaactctttttttaagtgtagcccatgtttcgctttgggttgtgtgaaaagattacaaagcagtctaggactttcgagtcccagaattatcctcagccccttatgtggatactttgaaaaccagtaagaacttaagaccattcattttctaatttttccccaataagttttgctcttgac

SEQ ID NO: 13880 - DNA, 1099 bp, Homo sapiens
gggaccagagaacacctggcaaacatacattctcccctcacccacccaccctacacaggcatacacggagaattcttttagaaggagggaaaaaggaaaccggaagcagaggctaaaattatccttgagaaaaatcactagaagtgttaaacaagtccctgtgacgcagtgtgtttgtcacttttcagaggtacaaatatcccctcggggctacgagcgatttaactatgttaatgctgttatttcctggcaacaatgggctgcaaactagctttctgctggacctggtaaccatgctaatggcttcatttcagcttaatggttccttctctttttctgtttacagtgcctatgataggaagcctccctctgggttcaagccattaacccctcctacaacccccctctcacccacccatcagaatcccctatttcccccacctcaggcaactctgcccacctcagggcatgcccctgcagctggcccagttcaaggtgtgggccccgcccccgccccccattcgcttccagagcctggaccacagcagcaaacatttgcggtcccccgaccaccacatcagcccctgcagatgccaaagatgatgcctgaaaaccagtatccatcagaacagaggtgggtgttgatctgggcttcttccttaattgtctccctcactcctatcctttctcactgggagaggggaagcagtttgtcttatttaccaggttcctaaaaagttatcattacattgaggcagcttgtgaggcaagactaatgataatacgaatatgactgtttatataccaccctgttcccaaggtactccagatggttgatggactacgacatccttataaagtaggtaagggagaggtaactggtattctcccgtctcacagaactagaggaagaatgacttgccaggatagtcttgtccctcactgagggcaggttcctgactcctcattggatgctgcctactattaatagaattgaacttcagttattaccatttcacttacatataagggacaattgctgatttatacaaggtaatattacttatctgattttaacatgttttaacagtaggagatt

SEQ ID NO: 13881 - DNA, 1653 bp, Homo sapiens
aactggaccacactgtaaaagggaagatgaggtagactgtagaaagattagaagcttatgggtgcatgtctaggatgactggttgagaagagggccccactgggggtcctaaatagtaagagaaaggagagcaatgaaggaggtaaaaactgaaaagaggatacagaagaaggaatggaagactgagctgaagagttttctttcccttttgattgcctcttctcattcctcatttcatagagctttgtgggacatgtatgtggtatgtgggcctaaaagacaagggatcatcctggacacacatgtgcatgtgtggggttacctacatgcaattacgttggagattggtagttatttaattcacatccatgtttgtcataaggccttttatgagctttttcttgaaatatgctctttaaacgctaggaaagtaacatttttttgttaatggagtcatttgttcattctttcttcaggtatcaaacagctactgaaacaagggtcagtgcagaaggtatacaatggactgcaaggatattgagagtgaataaaattggactttgtttaaaataagtgaataagcgatatttattatctgcaaggtttttttgtgtgtgtttttgtttttattttcaatatgcaagttaggcttaatttttttatctaatgatcatcatgaaatgaataagagggcttaagaatttgtccatttgcattcggaaaagaatgaccagcaaaaggtttactaatacctctccctttggggatttaatgtctggtgctgccgcctgagtttcaagaattaaagctgcaagaggactccaggagcaaaagaaacacaatatagagggttggagttgttagcaatttcattcaaaatgccaactggagaagtctgtttttaaatacattttgttgttatttttttcatgactcctgtttcttctgtgagctatttgggttgtcctcccatcaagcaagatggatgcacacgcatgcaaaagagtgatatagatccagtccccatgcccaattacacatacggcatctgctagaaaggagcttggaagaaactgaatggttgattggggtccatgaatgaaggttacacaaagatctaattgtccttgaagtatattttctctcatttaatttgggaataataatctgatatggacactttactgtttagaaagcacctttcatgtatataatttcagttgacctcatggttagaaagcctttggtttgtttaggaacaaggactaccactggttctagaaaaggaatttagagttgcaaattatgtttgctcatctcatggcacccaattcagatgctatgtgacgagtacatttgacttttgaatctccctcattttcacatatatagtcacatcacactctacttttcatgtactttggactttttgtctctgctagtgagtatttcaattctgtttaacaactgatgttgcgtattgtgtgtggagctgccttctagccatcagcatagttctagcagcatccctgcctttgggctatacataccttagaaatcaccaggcgtggtggctcacacctataatcccagcactttgggaggccgaggcgggtagatcacgaggtcaggaattcaggatcagcctggcca

SEQ ID NO: 13882 - DNA, 1185 bp, Homo sapiens
agccgtggcgcagtccgagttcggtacactgtaaccaggacccgaagctttattttcggtcatccacacgagttgggggagggtcctaggctttacttggggaagggttggaggcagcggtctccactcggccacggcgcggaggcgacgggacaggaccggtgccggtgaaccgttggcatcgccctcgccaggccgctccgcccgcgtcaatcacccggcttgcgcattgttgggggcggagttcggcgctccgagctctcgcgagacgctccgcagttgaaacgggatcgccatgcgctcgggcctggggggctgcctttccgggcatccgcaggccccaacctttagggaaggcgcacagtgtggatattcgccctgaggctgctgctttagcttgtgcaggggaggctaacgtgctgagacgggttgcaaagggctatgcgcttaaggtgcagttgaggtggcctggaaggggtgtctgactgcagtattcttgtcagcagagaacatggcggcccagagggaatggaccccgatggtgtcatcgaggtaagaaacggttgtggatcttgaagctttggaaaggtgagtgtgttcatctcatttatgcgtgcattattttttctaacttacagagcaactggaatgagattgttgataactttgatgatatgaatttaaaggagtctctccttcgtggcatctatgcttacggttttgagaagccttccgctattcagcagagagctattattccctgtattaaaggtaaaagaaactggcatttttaggaaattgttctacatagacatgaaccataaaagggaaagtaacctctgggggactagcacctgtttgtattccttaaagtgaaatgatggcaatcatctttcgggactgacctgaaatgaagagaatactcattgctgatcacttgattatttgggcataatgttccaaatggaatacatggtgtgaagtagaagtgacaatttgatgtgggatcggtaaatgtgtatcctactttttttagggtatgatgtgattgctcaagctcagtcaggtactggcaagacagccacatttgctatttccatcctgcaacagttggagattgagttcaaggagacccaagcactagtattggcccccaccagagaactggctcaacaggtattgata

SEQ ID NO: 13883 - DNA, 1185 bp, Homo sapiens; identical to SEQ ID NO: 13882

SEQ ID NO: 13884 - DNA, 1153 bp, Homo sapiens
ccagagccacaaaacgtgattcctccaggctctgcctggcctgaccctgtcctgtcagctgggtttacataccagtcccattcttccttttcaatacctacccccaaatcttctcctaaccaccatctgttttttttttttaaagcattttttgctttaaaagcatcctgaccccaatttctttgagctcacgggccttttgctgaaggtctctcagggtgtagtggtgtggctctctggacttaacgtcactctcagaggtcagaaccttggagatcagaactgattctcaccaggtgtgagaggtgtggtagcagattgcaatgctctgcacctcttccttgcaagtgagcaacttcaggctctctgggcagaggctggcccactgtagtttgcagacatgctctccagatggttttactaagtcccctctccctgatagggaatcctgctggaccagcgcagccctggtgtggagaggttaaaagacttgcacaggatcaccaagtcatgctgtagagccaggattcctagacccagggctctgcactctcaaggctggccccatgtgctcaaggggatctaatgtttgggctccaaactaaccatctcggagctgggctcctcatttactgccaaaccctcagcttatgtagctagaaagggccctggagtgagaaagcctggattttcaaattgatgctcccctactgactagctgtgccactctgggcaaatgctcttccttgagcctgtttccacacctgtaaagtggggatgatgatcctatctcactgcttttgtgaggattacaggaaagcacctgtcctggctctgtacctggcacgtagtaggtgctcagttcatgctggtttccttcctgcctttagtagggacctgctctgtgctcacacctcggctgcatgcaccctgctgtgacggaggctagtgtggaagaggtcctgtcctcagggaattaactgtcttattgggagacaacaactgtcctccttggaacacccaagaaaccatgcaaagcagtggacaacacagaacacgccctcctcctcgctgcctgcagctccaatctgattctgcttgggaatgggcggagcacgtgggctgcttaactgctgtataggacaagcccctt

SEQ ID NO: 13885 - DNA, 1199 bp, Homo sapiens
tattacctgttcgtaacttttttaaagttgaaaataattcctcttgatggacatttaacaagagaagcagaagtatgttgctgagaaatgagtagcatcaagtcaggaacagtaggaacaaagggactcctgcctttgctgctgatccaccagaacagccatcagactcctcagaccgctgctggctcctgagctgctcctgagctgcctgtgggatcctgagtggcaatgagccctcgctgtggcactaaagatcctctttcttgtcttgttatttcttcatgttaccttatcctatcctatggtaatattgtctctgtctctctctccctttctccgccatagtggtgtgtggttgactctgtttctcgccatgtcttctcacaagactttcaccattaagcgattcctggccaagaaacaaaagcaaaatcgtcccatcccccagtggattcagatgaaacctggtagtaaaatcaggtacaactccaaaaggaggcattggagaagaaccaagctgggtctataaggaattgcacatgagatggcacacatatttatgctgtatcaagttcacgatcatcttacgatatcaagctgaaaatgtcaccactacctggacagttgcacatgttttactgggaatatttttttctgtttttctgtatgctctgtgctagtagggtggattcagtaataaatatgtgaaagcttttgtttcaaaaatgtctctgtcatctttaaaaactgtcccttcatttattcggtaaacatcaggatctgtgctgtatgccaaacccctgggtaatgctgaggataaatgctgagccaaatagaccttcagcctgtggtgagagggatagatgctgctcagatcatgcagatgtataaatgggacaaaatgagatcaggactacagaggaaaataagatacagagaaggtagagttcctgggcaagtggggagacccactttatgccttcagtatgtgttcagaactcaatataagttaagacctataggaggcacgagtcaagtaagtgaagattgtcatagggagaacaagtattttaggcagaggaaacagcatgtttgaaggccttgagcagcaatgagcacattatgtccttagggaagtgaaaggagcatagaaaggagctggctagagcgtagaaagcagagggaatgactctaggtga

SEQ ID NO: 13886 - DNA, 1162 bp, Homo sapiens
aaatctttgtgtagctctgaaataaatatatatatatgtatgcagtgtatatattatatgaaataaaattgcttgtgcttaatttattttaaaatcatgtttgaaaatagagctaattctcagttactacattttcccctctcctctttctgatggtttttttcttaactttttattgtaaatgattttaaacttatttaaaaagttgcaaaataagcatagtccaatatagccatatacttttactcagattcgtctattgttaacattttatcccattggatttatcatcctcccccttcctccctcccttcctctctttctctgtctacacacacacacacacacacacacacacacacacacacacagtctcccccaccccatatatatatatatatattttttttttttccagaagtatttcagagtaggtcacttatatcattgcctctacccctaagtacagtgtgtatttcttaataataaaaaaaataaagatagtctcatcatattcacagtatggtaatcagcttctgtacatttgacactgattcaatacttcagtctactgtctgtacttctcctttgtcaggtggctcagttctgtccttgaagaaaactgctttttcccattcagtgtacagtccagcctaaggtcaggtagtgcatttagttgtcaagtctctttagtctcctttgatttggaacatttccacagcctttctttatcttttatggcattgacacttttgttctccccctttacaattatagtattcctcattttgtattagtcactggtttcttcatgttttgattcaattatgcattccctgaaggaatattacaaagataatgtgtccctctcagggatcacatctggagtcttatgtgtccatctctccgtcattggggatgttaattttgagcaactgatcaaggcattgtccagtttctccacagtataggtattctttcctttgcaattattaagctatccatggggagacactttattcttgctccttatcaaaatattaccctacattttttcctaaaccagcatttactatgattggtgcaaaattaggattccatgttactactctcttcacattcatcattcagcatcctgcgttctactgtatgcgggagcccc

SEQ ID NO: 13887 - DNA, 1156 bp, Homo sapiens
taatccctatgtttgtctcacttttcatctggttgaatggcttttcttagtgtggtatttgctgtcacatagtttttcctgggtgagtctgccaactcacaggtgcttttaggcttgaaatctccatcctatcatttccgttttgcctgtgactgtaaagagtagccattcttttcccatgtattgaagaggatattcttctcttgctttatactactcacgtccttggggagggaaatgcacaatttttttttgttaggctgtaaagaatttaagctgtaaattacataagttagaacaagcccaaatttaatttgcaaccatcagaattcagaatctatagtgaccagtgatcaaggctaattggaaaagagttatcggcccatagctaataagtagtgacagacaaccaagcttcaatatttttctaaagaaattacaggtgggatatgctagaaaaggcattttggggttatgtttaaaaaaacattattgtcccacaatattaccttaagatttttcttttccgcactacctgaacattgtaatacagacaaacttgatttcttctagaagataacattttcaatactgtcccacttctcatcttaaaaatattgtcatgtttattctaatatccaacacaactatcaaaattgcctttttctctagaggatgaaggctgtgaaaaaaccgttcaaattctcttctttttcttttttattaccaggtccattttgcctgacaattgcaaatcagagcatacaaaataaaactgtgcagttttgtttggtttactttcaaaagagtagaaagcttgaaaagattctgaaaccacagtttcattattctcataatccttctgcaactgaaattacatattgcaggagacattttcatatcatcaatgtgacatttacaccacactttcaaagacaatcactgaaacaaaaattgtctttatgagctaaaaatatgcagaatctctgcctagaatctttattcaaacttttattagccagtgaaacacttgcttgccaactgccaagccatacttattaagttcgaacatgtttcacttaaggagagacacctagcttagtcatggcaagttgccattttgtaaactaaggattttggactgagatttcttaaa

SEQ ID NO: 13888 - DNA, 1316 bp, Homo sapiens
agcataatggagaagtctgaactgaggagtatctttgatgaaagacatttaggaccctagaaactaaatcttgtcaccaagactttatagtaaagtagtagcaaaattatttttaaaagactttcttccttttactacccatttcctctcttgggaaagctgatgagcaaattatccaagactcatttctttattaggcaaagtcagaatatttcccctctgaaaatctgaattatgccctcattctttttcaagaaatatctcaaagagcaaatagaattaaacatgacacttgattgtctgattatttggcatgtataaaattatcatgtggcttaatgtgccttaagtgaaaatttaaacttagacctgaaacctttacagttggatgtagcgttgagcttttgcatgttttctgtataataaaccacttttgttttgtttgttttgtcttttaacctacacctttatcattactctaacagatttagggcttctctttctctacagctaagtaagggaatatgtgcaattatgagacatacaaaaaaggaaagggaaaggactttctaagtagcaaatctgtgccatgaagtagatgtggcgtgaagatacagagcctgaggatagtaattttccctgagccacgcacacaggcttttatttcatgccttttctctttctgtgccgtcacctttgagaaaaacgattgcaccttctccaagtctgcctttttaacagctacagttaagttggcaagacttccccagctctgaatatagccatttgccgactccggcctctttgcgagactgactcaaatctgtgatcttctgttcagcatacacatcagcaaagtgagaagatgagcactaaatataggctctattaactttacttttagatttactgccttcaaaaagtgcctattctgagcaacataaacgttattccttacatatgtatgtacacacggtacccagagtcgtactgtgcagccttcaaaaacataccatcagaaagagtaggtgctgagataaggaaactttgccaaatgaaagaaagtcactcacttccaatatcccctctcaagcggctaccgtgaaacgggctgcaaacacattccctgagcatcccttgctgatacagcttctttatatttatatcctactggatggtagcatattgctaaggtttcctgtactctgcttcaagggaatgtaagctttatggcattgaaacatttagggaaaaaaaagatgtttaagagaattaatagagccgtagtctgtattaggatgtgtgtcatatgtgtg

SEQ ID NO: 13889 - DNA, 1186 bp, Homo sapiens
atatgcctctgtttgggcaaagcaagatacctccacttaacctttatccaaggaagctcttggtgtcctcttggtcataaagttgtctcctacctaacccagttttaccaaatggaagtaaaaggggacaaactatggaagatggactccatgccattgcagtcagccaccattctcttttccatataaggagccccattacataagctacgggtgaggttggaacagctatgtttcataatttcaagagtgtgaccaccctgctctagtcatcatcattggatgaatccagttgactctttggcaaaagggtgatacttttcactaaaaatgcctactcttcctgttgatgttccttttctgtttttaccttgtccaatttccacactagtcattttttttattttttagaggatcagattttagcgctggaaaatgagttcaaaaatttcagtgtaatgtcataaggatgttgggatacagagattttttttttccttggaaacaaatggactgggaagaaacacagcatggctttgctctgagtttcaatctgatgattatgaccatggaagatagtcttatgtaaaggttaaatggtgtttacaagtggatagataaggcggagatggtgagaagccgggttttctctatgctaaatgtgtctactaagagcagcacttcctactagctaagcacaatcatagccccaccgtgatgagctgctagtctgaataacattccctgacttagggaaaggcacacaaaaacatataaagaatatgtctattttcatatgtgtgatactgacagagccatggtattcctaaaatataggtttctcttttttcttgtattcttagcaaattgcatttattcactacattacaaaccatcactgatgtatccaaaatagcacacatagttcagtatgaaaataagagaataaaatctgttataagcaagtgatttaggtattttcttttgtgtttatgcattatctgactatattaaaacctgtttttctatttaccttctatcagttttctctaccaattatgttttttcaatgctctataagaatgaatatggaaattatatttcttttttctgtaaaagagttgcaactactttattatatttagaaatccaataaacttcttattacatttacttgcctatgtgt

SEQ ID NO: 13890 - DNA, 1251 bp, Homo sapiens
tcaaaccagccacatttcgagtgagcaatagactcgtgactcgtggctgctgtattggacagtgctgatccacactccttgtactcagatagagatctgtgaaccagcagcaacatatcacgtgtagcttattagaagaagaatcttagacctagcccctactgactcagaatctacatttaaaccatattcccaagtgattcatgtgtacgttaacatctgaaaagcacagctctagtgcaaatttgcttagtgaaaagaatagagcatttaaacatacaaattcataggtccaccccataaagattttaattcagtaggcttatggaagaaacacggaatcgatagtttttaatgagatgtgatttttctaattaagcaacttcgtgaaagattggtccattaaatctaattatatttttaattttagttcttttcagatataaataattcaggcagtttcacaaggttttactcaatttgtaattttaagatattaatgagtgataggcttggacaggaagttgaaattttctctacagtgttaattgccagtacctatgatttaccttctggctttgttaatttacagttgaatgggacaaacctcactctttttccactgtaaagcaacctgtaagatgagagttgaggatatatcagataacattcaaaattacatcttcaaatagtcgttttgcgtggagacttgttgcaagtagaaaatcgcactggaatctgtcacataatgaaaatgtctaatatgcagaagttagatttaagaaaaatgtaatggtattgagaaactttcctaatttacattgtatctgtgttccttttgctagatggaaaagagtatgatatttatgtatcctatgcaaggaatgcggaagaagaagaatttgtattactgaccctccgtggagttttggagaatgaatttggatacaagctgtgcatctttgaccgagacagtctgcctgggggaagtaggtatttcagaggagtacaaatgatgctaccttgaaaggcagacagaatcattagttttgcattatgggagagagtcatggcacagcatctttggatatttaatgtccgatgctctttgatgtaacagactcctctagaaataaaactacgttggaaatgtatactattcaactcagtttatggtattaaaatattttcccttgcaatctttcagagatgcatgtcagaaaagcatggaggcacagtggattagagctc

SEQ ID NO: 13891 - DNA, 1351 bp, Homo sapiens
acaatcaagaataaagtactattagaaatgtatagaaataaagttattttacttgggcagggagaaaaagctgtttgagtttcaaaggtttttccttaattgtgtttccttttttcttcccctccccaggttttcattacaaacattaaaaacctaggaatctgccttgaaaatggactcactatagcaaatattactgggtgatacagaatgaattctacacttactttttttctcctgtgtttgcattcctgggatttatcctcaagtgcatttctgaccataagtaattttaattcatttcaaatgttttggttattcatgatcacttgggcagtataagaaaatgtagcttctgaatattggccacctctatgctgcatatacttcttgggatatagtatctaagacctttgtaaactgccattttgttaggtatggagtttggtatctagggagtaggccttatttagcaattcaaattttatggagatgaatgatcaaagtgaaacaatgtttggatgcaacgcagaataaaagaatataagaaatagctttttgttgcattaatgtatgatattttgaaggacagagcctttgctttttgtattctttaagaaaagcacaaccataaagtattttaaaaaaagaaacacttggagcaattgaaatatgttattctgactagatggactgtagaggttttgcatttctcagccctcctggggagattggcctagatagcattctttaacacttcctctgcttttgcctcagtagcaaggctttcctaagctcctgggcaatggaacatttattagtatttattgacaaaaatttagttctctgaaattttaactcatatatatgaaaaactttgtattccatctcttctttttcatttacttgtagagccaaggaaatggaattgaaagatgattgcataagtaatgatgccatccttctctctggctgtagactgaggcttttctcttgcttcaagtcagagcagtatttgttgataacctctcaataatgtttggtttacatgccagtaattaaattaattcaacatgaagttgaatttgatgaagtggtcatctatccaagtatttggtttttgttttgttttgttttgttttttgagttggagtctcgccctgtcacacaggctggagtgcagtggtgcaatcttggctcactgcaacctccgccacctgggctggagcaattcccctgcctcagcctcccaagtagctggaattacaggcatgtgtcaccacacccggctaatttttgtatttttagtaaagagcgggtttcaccatgttggccaggctggtctcgaacc

SEQ ID NO: 13892 - DNA, 1150 bp, Homo sapiens
tttaatgaactgccagacacttttcactgtgttctctgctttttactttgtcatttttatataaatgtgaaagcattttgttgttgttgttgttgttcctgctgctagaacacatgcagtttaatttttaggcccacagtgtattatgctttaatgttgtgatgtaaactaatacttctggcctgggaaaacctttctgtttctgtatctttgtcctttggaggccaggcctcattaacaccagtattgttgaataagcacaatatatgacggagccttatcataaggctgcttgacatagacacccactctcctccacattttataaatcattgtttggaagtaaagttagataagagtcaaattaaatgttttgacttgaaaaatatttgacttttgcgttcaaaccactgttagacgtaagtattttattagacataagtattttattttgggactagacagttgctttacatgtatttaagggaacattgtgattttcagaaagtggctttacatactattgaattgctatttcccaagttactttacaaccagcagcagcataccaataaattacaaaagcagaaaatgaaaattaaccctaggtgttctgatgatagagaaatagctaaattagaaaagaaagatatggatagatgcttttaggaggaaaacctttttagaatggcaatgaccacttggatctaggtcaacatattccaaaatgtgtgaccttgggctttgtgtttactgaactcactctagaaaattctggacctgattcattaaccccgcttttcttctctaatgtgtcctgaagctgagctagatgatgagtaaattctttgctgactgttgctcatcactttctctcaaagttagaacttttcagtataaaaataattagcttttaactgattattaattttctttaatagtttctgtcaaaacttgtctaaaatttgtgttgtgccaaattggaaatacccactataatatggtgcattcagtttactccacaagtggttaacattttaagtcctagattttttatgtcttgcctttgtataagcatcgctttggggaataccaagatgattcattattcagtgattattttcttgaaagataactatgatgattggct

SEQ ID NO: 13893 - DNA, 1885 bp, Homo sapiens
ggttctgttatgcagtgaagacattcagattatttgtaagaatttcaccaacacccttgtgtattgaaatgcttaaccattaacagggaaaaaaaaggagaaaaccgaacaaaacagagacatttacttgaaatgggaggtttgctaatgtgaagagtgtttctgttttattacttataagagaaaagcaggaaaacttttgctttgataagaaagacaccagagtggtgattctgtttgatgccacaggctaacacaatcgtgtaatcatgttgagttgtagaaatatatggccctaaaaaccattctctttcccttatatatataaatatgtgaacactgcctagtaacattttaatagatttaagatgcatttgtacattctcagcaaactagaagaaaatgttttttctctttttgagttaacttcatagcatagagaaccagcactgtgcaggtttcagcatttcagataagggcataattaattgtgtaacttaatgccctgttattcattgctgaggttcatataaagaatagaaaaattgaaagatgggtttgggcgacattttcttcccaaaagatcaagtaaggagtaagaacaagtaagggaagacagctaagagaacatactatgacatatcatagaattgggatacatttttgttgcactggatttcaggctatactgctaaaataatttctacctgttaaattttgtgagagggtttttgacatcagaatttttgtatttctggtcaaattggtcttggaaatccctatggtctctaatttcagctcttgctgtaaactgcaagccaaatgctctttctcagaaagagctatatttttctcttcttacaggcaacccaatatttatttcataaagtgttataaatattgagaagatacactggggagatagcatataaaaatgatgctccaaaatgagaattctatatggggctttccctaagaagaatccatcccagcacatattttgaaaaggtgctgaattaaaaagtacaagagtttgctcatataaatcaagttgcccaggaaacctgaggtgatgctatcatttgtctcataatttagaaacgtgatctcttgagagagagactacgcattgcctgggcactttcagattccttaggaagtgcccctttgatatttggaatgtggatatatttataaaacaaatggattgttattccaaatccacatggatttataaccaagccccagaagaataggcagctttgaaatagctagttcgtggaattgaacagaaccttgatggaatgcagttgcctgtgtgaggacagaaaacaaagaggctgcctcagaccacatgcctatctagagattaagtgaatttgtgagggacattttgtggatgccttaaagatgaccagtggtgggttctgatgggaatatatacactcatctggactaggccaatggaagcagtctctttcagttcacctccgtacagcacaagttgttcctgctcatgacctcattgaggaaaatgagaattgtggtgctggtgactttcatgtgtcttgggaggttgaggtgttcaacatcgttaaggcactcccaaaacgcaaacctccttttttaaatgccaattgtacatctacattaattcatctatgcaaacttgtgttttcatggtttgttttttacactatatttctcattaggttctttaaacatcaggtttaatattgatattatgaataatttttaaaccaaagtattctataagtctgtgtgctttgttttcctggatggtttgaccaaggtaaacatcagtcttgtccttctctcttaataaagtcatccatttgttaagtcagtggtctctgtctcatgt

SEQ ID NO: 13894 - DNA, 1128 bp, Homo sapiens
aggtgatttcaaatggtgtcttcttcacaaagcctcctctgatttctgcttttattcatttgtttattcattcttttcaaaagacattttattgagtacctaatatgtctgaggctctgggcttggtactgtggataaagtgctgaagaaaacacacagatcattgctcagagcccttagtttactcaggggagagagaaaaagtgtgcatgtaggatgttagatggtagggcagggatggggttataactttaaataggatgttccaagagggaggtcttactggaaaggtgaaatctgagttaggatctgacagcaaaagtgctgtcttcttcccccgctcctcatctggcactgtctgagatctattttgggcagcaaccatgtcgggggtgggggtggtttgacaggagggagagattgagagacagtggaagatgagagagtatgcatgtatctgtgtgtgtactctcttctagtgccgtctagcatttttcctcatggtacttaatacattattttggagtgaatatttttatcaggcttgttttgctgctcttctcattgaggtgaaacacgatttgctctgtgttgtgcagtactgctcagggatggatcaggatccctctgggtccgtgggctttgtgtgacgctgttggagccggccagcatggctttgctgtggaagttgctctgtgagcccagcacacatgaaccccttccaaaggcttagttttctcaaccttaaaatcaggaagttgactaactgattcctaagagctttcctggagccaaggtttttccattttgtatgataaaattctcaccgtgtgcaggaatcctttgtggatggttccagctcacagattgtttcatggtttatgctgatggtttgtacgctgtaaatagagcctatattgcaatacctgtatacctgtaaatagaagtatattgtctttgacactgtcttcttcctgggaggatatcctctccaagtagattgtgagcagttaactgacaggcctggggacataccttgtgtcctttataacctgcaatagactgcacattcagggctggttgattcatagctccatctgtctatctgtccattttttaattgagttc

SEQ ID NO: 13895 - DNA, 1585 bp, Homo sapiens
atgctatacagtcatacacagattcttcttcaattaattttagtatatgcttttaacttatgtttgataaaaaaattatgccaatattgttaggtcggtgatagactatataagtttagtaaaactagcaaaggtaagcggttaggcttcaacattgttgtgatcatgcagtcatcaactttgtttagaaattttgcatttatctcccctgacctcagtttgttaaatgggtttatttttacagaatcgtactcataatcagctctgcatacatctgaagaacaaaaacatcaacgtcttttgtccagcctctttttcttctgctgttccacctttctaaacatacaataaagtcatgggataaaaataatcgatgtatgttacgggcgctttaaccatcagctgcctctcgaatggaagaacagtggtaatggattaacatcctattttgttgtactaaagtgacaaatcggaataatataattggtatggccattaggttcagtccttgaagataagaaacttgttctctgtttgttgtcttatttgtggtggcactcgtttaatggattaactgaggttgctcaatgttcagtttcttttccagaaatacaatgctaggtgttttgaaataaaacttatatagcaattgtttaaagttatcaattgtatataaaatcacagtagcctgctaaatcattgtatgtgtctgtagtattctattcccagaaactatttgaccatgataattcagtttatattcaccacatgaaagaaaaatgggtaacagaagaacccttaaaacaggttaatttggattgtaacgttcagtgaaagaaatttcaacccttcatagccagcgaagaaatttgccttggaagccaagtcagtaccagcttacctatttgattcagttgctgttttctcactctctatatccatttgaaattgatttattttagatgttgtatacttacgttaggctttctgttaatagtggtttttctcctgttgacagagccaccggattatgacacaggatgaggaagattaaggataatcaattgactaatttcatttagaatattatcaaacatttcaactaggtatcagaaaaaggctttctttcataagactattttaaatagaaattatttcaacaattaaagtaatgttgaccatccccctctcagctgaataaagaaaaatttagttcaatttattgcaatttaattacaatactaccttcacaacattttcatgtgttttaaataaatattttttaattggctaaaggacattcaagcaaagaaatgctttctttacttaaaatgtctatctcatttgctgccttttcactaagcctttactttgttaataaaagtgtccattgtgtgatgtttttgattttacagtttgctaaatcttattttcttggagttgctttttggtaacagccccattgctactccccattttattgttttacatcaatgcatgcttcgttgtgatccctcaagatgtaacacttggtatgctcggttgaggatatgaaaaaatacttccgaaaccaggaattcaatgt

SEQ ID NO: 13896 - DNA, 1304 bp, Homo sapiens
gaaatgattctaatttaaacaaaaagatactaaatatacagaagttaaattcgaactagccacagaatcatttgtttttatgtcagaatttgcaaagagtggagtggacaaagctctgtatggaagactgaacaactgtaaatagatgatatccaaacttaatttggctaggacttcaattttaaaaatcagtgtacctaggcagtgcacagcacgaaataagtggcccttgcagcttccccgtttaacccactgtgctatagttgcgggtggaacagtcaacctttctagtagtttatgatattgccctctttgtattcccattttctacagttttttccgcagacttctttctgcaaattattcagcctccaaatgcaaatgaatgatataaaaataagtagggaacatggcagagagtggtgcttcccagcctcacaatgtgggaatttgacataggatgagagtcagagtataggtttaaaagataaaatctttagttaataattttgtatttatttattctagatgtatgtatctgaggaaagaaatctggtatttttgctttccaataaaggggatcaaagtaatggtttttctctcagttctctaagctggtctatgttatagctctagcagtatggaaatgtgctttaaaatatgcttaccttttgaatgatcatggctatatgttgttgagatatttgaaacttaccttgttttcacttgtgcactgtgaatgaactttgtattatttttttaaaaccttcacattacgtgtagatattattgcaacttatattttgcctgagcttgatcaaaggtcatttgtgtagatgagtaattaaaaaatatttaaatcacattataattctattattggagagcatcttttaaatttttttctgttttaacgagggaaagagaaacctgtatacctagggtcattatttgaccccatagtataaccagattcatggtctaacaagctctcagtgtggcttttctctgaatgcttgaatttcacatgccttgcatttcacagttgtactccatggtcaaccggtgctttttttcacatcgtggtacttgtcaaaacattttgttattttccttggtaaaatatataaaaaaggttttctaatttcactttgctgccaaggctgtcattttcattaatgctgccaacatgttcatatgaggcttactaagaagttataactaagctttagaactggaagagactttaatttcatctaccatctgattataaactcctgttactcactttgttattcctccag

SEQ ID NO: 13897 - DNA, 1364 bp, Homo sapiens
ctgttttagacgataccattgtatcataagcctctacgtaagtgttaattacggttatttcaaaggacccagagaaagaaatcttttaactctagaaattcagaccaaccactcagaggagggatataggctgtggggaaggttttttgattcagctggctttgtgacagtagctgtatgcaggatttttttaacttttatccaggattaaataagatgagagaaagagaacccctggattaaacaacaacaacaacaaaacccctccaaaccttaaaaaaccaaaaaccgaattctctgataaatccctttatgtattaggatctcgttaattcagaatttagaaaaatatattaatacctgggaaggaggcaggcactcaccataacattatctgtaaagaaagacatagtgggttgattaacacagtaaatcaggtcaggcgggcagaagccttcatacagctaagaaactaaactcttcgtcatctttctagcaagtgaaatatttgaatgttaatgtgaaatccacaagttttttattcataaaaatagatcatggttgggtacatggtgtgtgcctgtagtcccagctatttgggagcctgaggccagaggatcacttgagcctaggagttggaggctgcagtgtgctaggatcatgcctgtggatagccactgcacttcaccctgggcgacaccatgagactctgtctcttttttaaaacaatggatcatgtagaaccttttttgtcaatacttgatgagttcctccaggatgttggtatagatactaaagctagttacccaaatatatttgggtcaagtctcttctcctagcttcagcttttccatctttaaatgagtattttagatttcttagccagtgctgtggtttgaatgtgctccctaaatttcatgtgttggaaacataatccccaaattcttatgttgactagaagtagggcctttgggccgggcttggtggctcaagcctctaattccagcactttgggaggccgaggcaggtggatcacgaggttgggagatcgagaccaacctggctaacatggtgaaaccctgtctctgctaaaaatacaaaaaattagccaggcgtggtagcagatgcctgtagtcccagctactcgggaggctgaggcaggagaagggtgtgaacccgggaggtggagcttgcagtgagccgagattgcaccactgcactccagtctgggcgacagagccagactccatctcaaaaaaaaaaaaaaagaaaaaaagaaaagaaatagggcctttgggaggttgttagggttagataaagttgtcagagtggggcccccatgatgtggctggtggctttataag

SEQ ID NO: 13898 - DNA, 1199 bp, Homo sapiens
aattagaaccactatttttaaaaagtgcttactgtgcacagatactcttcaagcactggacgtggattctctctctagccctcagcacccctgcggtaggagtgccgcctctacccacttgtgatggggtacagaggcacttgctcttctgcatggtgttcaataggctgggagttttatttatctcttcaaactttgtacaagagctcatggcttgtcttgggctttcgtcattaaaccaaaggaaatggaagccattcccctgttgctctccttagtcttggtcatcagaacctcacttggtaccatatagatcaaaagctttgtaaccacaggaaaaaataaactcttccatcccttaaagaatagaatagtttgtccctctcatgggaattgggctgtatgtatattgttcttcctccttagaatttagagatacaagagttctacttagaacttttcatggacacaatttccacaacctttcagatgctgatgtagagctattgggaaagaacttccaaactcaggaagtttgcagagagcagacagctagagataactcgggacccagagttggtcgacagatgttagatgtatcctagcttttagctataaaccactcaaagattcagcccccagatcccacagtcagaactgaatctgcgttgttgggaagccagcagtggccttgggaaggaagccatggctgtggttcagagagggtgggctggcaagccacttccggggaaaactccttccgccccaggtttcttcttctcttaaggagagattgttctcaccaacccgctgccttcatgctgccttcaaagctagatcatgtttgccttgcttagagaattactgcaaatcagccccagtgcttggcgatgcatttacagatttctaggccctcagggttttgtagagtgtgagccctggtgggcagggttggggggtctgtcttctgctggatgctgcttgtaatccatttggtgtacagaatcaacaataaataatatacatgtatacatgggctgtgtgtgctctctatggaagtcttgggtaggtggtctcacacctgtggattctgctcttctatgtttgtgcaaggttgaactggacagatccttacagaaagcagattctgggctgagaataggcctttggaaagtgagtgggaggccgggtgcggtggc

SEQ ID NO: 13899 - DNA, 1220 bp, Homo sapiens
atcatgtagaattttggacttctaaaaacattaaaatcagcttattaatacgggatagagaaagaaatctggtgcctgggggtccctgtgttcacccctagagtttgttttaaaatttttaattgaagcatgtgaagtgtacgtgcagaaaagtgggaacatgatagtgtatggcttggtggattttcacaaactgaacatacctgtgtaatcagcatctagacccagacccagagcatcacaaatatcccccatcctgggcttttcccagaggagatgggggcttctgaagatggacttacctgggacctgccccccatgagccaggacggtccccccacagtcagcctgtgcaaaggccccgtggccaggggtggaggagaatatgtgggtgtggacaggatgggagactgtggcctgaacaggagattttattatatctggagaccctgagagaccctgagacctggggcaccatggctggccaggtcagaagcatcctgactgcagaggtccgtgcagccacaccctcttccctgccagcaagctgtctgcggctcatcggaggcccctccgcctggagccttctatggacgtgatatgcctgtatctgtttttaattttcattcttcacttaggggaagtgaaatcgctcagagatgagatcctttaattgaaaacgaagtgtaacggaatctagtgtctttctaatgtggtaaaattctccatcaacatcacagtcagctggcagctgaacttcagaatctcacttacagcaggcgacacgggggtacaccgatgggtcacactgggtctgggggctccctggagctcctcctgcgtgtggtctggttaggagttgagttgtttgctccagggttattctcctcctcgagtcacagtcacacgaatacctgccttctctggctttcctgctatacacatattcacatggcgctcaagaagttaggctcatggcaacgtgtgtctttctctggacaactggcccagtttacagtgaaatggagaatttcaggtctccacgtctgcccaggaaagaacttcagctgactccacggggatctggaaatccacgaccaatcccgatcggctcttattagctccccgctccacaagacacctgtgctttggaaatccaccaccaatcccgatcggctcttattagctccccgctccacaagacacctgtgatctggaaa

SEQ ID NO: 13900 - DNA, 2818 bp, Homo sapiens
cagacaaccacagaagctaaagctttagttaaggagaatggatcatgtcaaatcatcaccataacatagcagtgaatcagtctcagtggtattgctgatagcagtattcaggaatatgtgattttaggagtttctgatcctgtgtgtcagaatggcactagttcagtttatgtcccttctgatatagtagcttatttgacagctttgctcttccttaaaataaaaacagaaaaatatatcgtcctaacagttaaattaacaatcaatccataaagtcctatatcttcattcagcaacccaaatattacatacatttccagaattttcttgattgttactttcagtgatattctttatattgggtacaggagaagtttggtgtttggtaggtttttcaacattagtttttgagactagtttacctcttcacatttatgctcacaaccctcttgttagaaaagtctgtgtttatatacaggctgtaagtttgtgattgataaaaagaagatgagtgttaattagcctccagtgaaaatatactgaaagcctgttttcatttgattccaatgtttcttccaaagaattctgtataaacatatgccaattccctatgatggtctagagttaggaatgagtgtttatggtgttgcttatagaacaactcaggtaatctccatttctggttttatattttctgtacaaactgcctgggttttatttttctaatcagcaaggtgcttcactgccttcttgagacgcctctcaaagctcttaaatggctcctgtgctatgtgtggtgttggcagtctaatttgcttctgttaaatgttgtagaacctttttcactaggaaataagattcatttctttcggcagtagatgtagattcatcttttaacgtttcttcaaatttgtttctgtcaggctttgtgttattttaaatggttttttaaaattttcttctatgttttcaattacctaaagacataggataatagttttttttaagttagaattttacctcataaaattttttgaggtttgatgtatgtctctgtcttatcaataatgaggcttaaaaaatactggatttgaatggctgccgttttttcaaagcaatatgaatttgatgagtttgttttatgccattaggtggcgccagaggtcagaacatgtctattttgaattggatcgttacaaatgagcatatttgatgcggaaatttctgggagaaaaaaaattgaggaaataaagttaaaaaattgacattcattgagccaaaagagatgtggagaaacatttttcacctttctgtttggcctgattaacatttaaattcttgccaaaattaaggtaacttttaaaaaacaccttttataggtggatccagcagtctggcaacgcccacagttaccacaacacagaaaactgatcgtgctataaaatggacgctaaactatgaaaacagtgtgacattgttctctgttcttccagagccagtaacatgcttgctcgtgctttctacttctagctgatcattcttttcccaacatatatttacaaatttaccaaattttacctagaattttaggaccaaatggttctcactctttatgctgcaaagacctggatgatgtttggtaactatagaaaaatagaaattacactcaggatcactgttactgctattgccactgatgattcctgcaaaaatataatcgaagttttccatcaaatgtataatatgctattaatacacattagatgataacagttgttccatgaatgattctatgaagctatgcatcttagacctcttgagctgtgaattagcactattttctatagttacttattctctggatcattttataatttccatattaatttcaaatatgctcgtgttattcttcagtgatttccacaattgtgcattttattctttggtttaagtactgaagcatataatgaaagtaattgctaagtagcagcttaaaaattcaattatccgattgtatttaacatctttaagagcatgatcataaagagctatttttgacaccccccccccacttttttaacatttagagttagtaagggttttatatctcttctgtccatattgttttcaaaggaatgaggtgtttaggtggctggaaaagcatttgtaggaagttagatttgaatatagacaaggtgggttattcacgttgagaatgttatttgaagaatgcctgtgaagccaggtgtgggttctactcagtgccatagatagactgagtcttctctcgtaggttaccattacatagtaattttgattctgaatttcacattaaattatttgagtttatacagacctaaattttaaaatctgtacatatattattttgatgtattaagatgaatattgctgatttaaattttatttatgcacatacttaaaggacagaaatgtctgggaaagtaattgttaaataatgatatgtaactttttaactttttaaataaataacaagatttttaatgtgtgtctccctcagggttgtttaaagttttttttctccctcaagtataaatagtggtaactatatgttttgtatcttctagcaccaactgctgtaaagcaatgctgcaaataatgcttgaatacaagtggctaagccaacaacagaataaatacttttatagtagttttataatcctgaaattcgaaagctttcccaattgcacttgcatctaaacaaaactgttgcagtttttactctatttattttgttccccatgtttatgaaagtcctgcacagtttcaaaggcatggt

SEQ ID NO: 13901 - DNA, 1160 bp, Homo sapiens
aactaacatgtgagagtcccatgaaataatgtaatacagctttgggttagttaacaaaacattgtataatatgtgaggtattcatatttctttttgagaactgtaatacatattatttatttatttattactatcttatagatctaattttttgtagagacaggatcttgtcatgttgcccaggctggtctcgaactcctgggctcaagcaatcctccctcctccgcctcccaaagtgctggaattacaggcgtgagcccccatgcctggcccagattatttttaaacccactggtgcataacaaaaatattaatggtggaacttcttttcaaagcttactgaaaggattagtataatgtgtcatgattaaaaatgtttaaattaggaaatgatttaaaactaggggcagtaaaaacttgtattgggatctttaatataattagcctcatttttttacttgtttgaagaggtctttctaaatctctttgtcttgcttaggaatgttatgtgaaagaaatggatgccaataaggagaacgtcattctgatcaacaaggcagacttgctgactgctgagcagcggagtgcctgggccatgtacttcgaaaaagaagatgtgaaggttattttctggtcagctttggccggagccattcccctgaatggtgactctgaggtaacctgagggacattttaggttggctttcaaagagggaattttgatttcttgttaatgtgcttcgtttgtgttttgtttattcttatggaaaatctgtgggaattagagtttttcctctgtgtgctggattaggatgacctatagaaagtgaatcacaaagttactttctctgtggttgttggacagtctgacctctccagtgttgttacacactgatattagctgtatttttaaatttttttaaaaggttgtagacaggaaattgtataggaagttccacaatgaccctgtaactgcttttaagagaagtcagaacacaagagtacaactgaaggatgtagtcagttctcaggacttgattagaatctcttttgactttgttttgaaaacagagaaactaagtaaccctaaattaggatataccacatattttatcttttagcccaaattttgcaaaagtagtttgggctttatttttact

SEQ ID NO: 13902 - DNA, 1565 bp, Homo sapiens
tagaagccactgaagtgcttggaacttccagagcaggaaaaagacaaaacgtatttttgtattgatttgttcaaagaatggatcctccagaagcggttggttactgccagaaatataaaataattcagatccttgcctcatccttgcgaagcaccccctagtggtttagctcaaagataaatcattgatttttcaggtgtgacaagacctaatattttactaggttatagaaggatctttaaaaaaatgaatgaagtgatttggcttgtgttcatcattctagtcgttattttcaccattcattcccccgggaatgaatgagaacatgttgagtgctaagatcgtgtgctaaatttagttaaatatgtccctggagctaagtaagcgtgtgccactgtcacaccagctgactttcatccatatagtctgcagagtaaacagcatggagtgcttatcagtattcatcaggtcagagttactctggacattagattactggtaatttttattagctttgaagcaacttgttactaatgaagccttttaggaaactgtgggaagattgaacatgaatggtaaagaattggatcctaattccttatttttgctgattctatgcccacttaaacttttggcccttaatatttatttaggaaattcattcatcattcagttattcatttttagagacagggtcacactctgtcacccaggctagagtgccagtggtgtgatcataactcaccaattcactacagtctcaaacttctgggcacaaataatccccctgcctcagtctcttgagtagctggcattacaggtgcacaccatcaggcctggttgtttggttttgtttgtttgttttggagagacagggtcttgctgtgttgcccaagctgatcacaaactcctggcctcaagcaatcctcctgccttagcctcttgaggagctggggttacaggcacaaaccaccacgcctggcaatttttttttatttgtatctatactaagtatatagcttagggtgatggttatcaaactctgggttgtgtctggaagtcaatttagtggtctgcagctagctgttttgttttgtttttattttttccccagcaagatagagaaatatcagaatgttgcatgtaatagggtgtggtttcagtattcttctattgccattttactgtactgaacggtacttgaatgcttgtatcattatatgtacatacacctttgggtcactatgtaaaatgtatttcttattgtgggattatatcaaataaagttttgactaattttgactagcacagtcagacaatctgggttcaagttctacctgtgccatttagattttgactataggcaagttattttatctgctgaagccttagtttcatcatcagtaaaatggaaatacagtaaaattcacctcaaaagattttgaaaattaatgaaatggtgaaagggaactgcctattgtgaggtaagaacgtgttcctttaaacattaactataagtagtattgattctaaagggactacaaccaccctcaagaccatagact

SEQ ID NO: 13903 - DNA, 1800 bp, Homo sapiens
ccagggagcaggcgacacaaaggacacgcatgtccagtgggctgggaagcaagcacttgaagagaaggaaggggagaaagggtcccccttgctgtctgcctctgaggaatggaaatcctttagacccggccttttttggaccaatataaatttaatttaaattgacagccttccatttttcgagaaagtacaaacagaactgctttagcacccatcgagccccaaacgggtaaggtaagccaaggttttaatgaccagcccagtatctaagcttccaaacgaatgccagcccatcacatactcaccctgggaggctgctgcacgcgcattctcctgatgctcacgtcacttggtgtaggtttcaggatcgcctctttgaggaaggacttcaggaccaactggggcctgcataagaaaacttatctcattattagagtactcacagcttgtatctcccagctacatcctagaaccccattgtcctttattccaccaaaccagctccaggtgaccagactctactcagaaagcaaattcgtcatcaaagaacagagactggccaccacaaggacatgcaggagaactgtcgggaccaggaagactcattccaaaaagcccaggccgggcacagtcgtcaagcctgtaatcccaacactttgggagaccgaggtgggggtatcgattgagcctcggaggtcgagatcagcctgggaaacacagggaggcccccatcgctacaaaatattttaaaaattagccaggtgtggtggcttgtgcttgttgtcccggctacttgggaggctgaagtgggagggtggcttgagtccaggagttcactgcactgagctgtgatcacaccactgcactccagcctggacgacagagtgagacgtccatctcaaaaaaaaaaaaaaaaccaaaaaggaacccagcaattcccaagtgtgaccatgtgggcttggaagacatgtcactcatgggctagtaagcattctagtttctttgtttaaaaaatccccttatcataccacgttagaccgtagaccttagcagaaattaaagcgtcatttcttttgatggggcctcctgtacgtaggctgcagacgtgaaagccccaggggtccatttgtatcaattttcatcttgttttgttttgatttcatttacgtttttctttttcccatgagtgaggatagccaataaatcatctttgagaacatggtgattcatgttgtttgttctctgatcacagtttcagctgcatgaaggctctgaatcaagtgtgtactcaatgccattggaatccccacctcccctgatgaagatgagtgcttacaggagatcctaaggaccaaggagagggcacatctgagagggtgtcagagagggtagtattggcatgtttggttcaaagcaaggaatcatttcattctaggtattggcaggtccacctgcactggggagcaaaagcatccccatttcttctcatccctcttaccctagactgcccagttacatcctgccctgaagaggtggagcagatatctttcccagccctctgctgtgacagaattggtctgttctctcacctacttgatttcctatttataggtaacaattcttgaatgcctgctgtgcaccagccattgtattgggggatttattacgctattgataatgtttatgaaaacttcatgaaggtcattatgtctaaagtcgactgtaagaaaatgtgagagatgtggacagagtcatatactatatgtttatcacattttttatagtagaagaaaattggaa

SEQ ID NO: 13904 - DNA, 1178 bp, Homo sapiens
caccagtcagaggcactttatttgtatcatgaaatgatttgaaatcattgtaaagcagcgaagtctgataatgaatgccagctttccttgtgctttgataacaaagactccaaatattctggagaacctggataaaagtttgaagggctagattgggatttgaagacaaaattgtaggaaatcttacatttttgcaataacaaacattaatgaaagcaaaacattataaaagtaattttaattcaccacatacttatcaatttcttgatgcttccaaatgacatctacagatatggttttgtggacatctttttctgtttacataaatttatccacttaaaatgtgataatgtggagacaaagcaagatttgattacataaacttttctctgcattggtcttttcactatcttatttgctaacttttcttatttttcttcaacctccccaccctccattttttggatattaaacagggaaagcttgctacattataaagattgttggcaccatttattttacacaaaggctaaaggttaacttttggaaatgatgagctacttttatatatgtgtttactcatgctttgtgatatttctggatcattccagtcataaagacttattacatgtactatttcttgctacctgtgaaaaggtatattttaaagaatgtataaccaacagtccatttactttttattagtatgtagaggatttgtatctaattcatgaatgtagttttacagtagtttgtcattgtaaatggagcaaagtacattatcttctaaaatgtacattatgtaagaattgtaaatatacttaagtaatttgtatgccaaaaaattacaataagtcaataaagatctcacctctggcttagttctttcatggtgatttacattttcttgtgaaatacactgtgaacatatctgtcaacagcagttatttttaaggtactattatttttaaggtatttcttcccagccctttcaaatccacattcatcctatttgctgattacttcaatcaagaaatccatttggatcttttaagtatataattctctttgttcacagagctgttatagcccctaattcattggcaaaaagataaaaggttttttttggggggtggggggaggggcttgctctaagttttttccattatgattgacat

SEQ ID NO: 13905 - DNA, 1261 bp, Homo sapiens
ttataacaataacaggaacattaaatctttatctttgctgtttcacctcaaagtcatagatcatctggctttttaggcaccttcactaaaggcaaaaatctgatttgtagtttttattagcatgtaccttgaaattatttgaccaagaagctcaaagaaaagaagtacgttaaagaaaaagaaaaaacctcacttttcctttatagtgtcccttcctgttttaattcctaaagatcctgacttttatctgaggaagtctaggtagttttccttttggatctggccattggtgcgtgtttcattcagatcacctctggaatctctgtggttgtgaaggcaattccttatgagactcttgcctcctgtggcttacgtgatgaattgttaatatggcagtaattaattagtatctacttaaatttagtggtcagaaatgtatttgaagtgccttaaagatgatcatggttcagaatatcttcagagaaagcaaaatctttaatattgcagggagcctagcaatacaagtacacatttctgtggcttgatttcttgaatatgctgagacccaatttggactacatttggcagaaatgatggagtaaacagcaaggctttaaattaaattaatagttacaaggtaggttggctcttaggtgaatttagccatgtcaactaatagcttttatatggtatgtaacaaatctgaattatgttatgctgtgaattattcagtgcattataagaaatcttagttaatcatgcttttgggcttcattagtcaatgtgattggccttttattttctttccataacttatctgctattattagtttcttattccttattattaatctgttagctcattatcattagcttactaacttgaaagttagattaatatcaaaataagaatagcagcactatgaagagttaataaaatgcaatttcatgttagagctagaataaaagtaattgagcagtcatttgcaaatgcttcattataacatttatgtgcttaagatttctaaggttttaaaaagttacctttaatacaatccttagaaactcagaaatttcctgatattcattagattatggtgtttgcctaatttataccggttttcactgtatattttaatgaactttgattggttacttttccagacatacagatttaatttggaatatgaactttggttcttcatgagtgcattttgaaaaagaaaaaaagtacacattcagaatctggccaatttaagtt

SEQ ID NO: 13906 - DNA, 1140 bp, Homo sapiens
gcaggcactcgctgtcacctgtctgtcactgtctcaggtggttcttactgatttgcatctgggatgcaggcactccgtgtcacctgtctgtcactgtctcgggtggttcttactgatttgcatctaggatgcaggcactccgtgtcacctgtctgtcgctgtctggggtggttcttactgatttgcagctgggatgcaggcactccgtgtcacctgtctgtcgctgtctcgggtggttcttactgatttgcatccacataggctttgggctctatcccacctgtcgtcttcggattctctaatacgcaggagtgctcttctgttagtttactcatagtttattaaagtacagagaaaagacatccaggatgataaattttacagtccttgccggggactgccagcttccagtggtgttgcctggcaccagtgtgacccccggtgcctgccccgctgaaccttctgtaaactgtttaactgtgctggtggtttcccattctctaggcgctgagatgcgtctggagagccagagggcctgcctgaaggaatcacctgagcctgtccgtccaccaggagtggggagatgcccccatccagtcctggaggacccgctgctcctgctgctcccggggatggagcaaggccaaggctgcgggaggctgggagccctgccctgcccatccctcctgcaccagcgctgtccctgcacactttggttcagtcccggtgcccctgccaagatgtggaaggggccgggtgaagacaggcttgagggctgccccagcaggctctgggtatgacctgcctctggccctggtcctgggcggggcctgtgggtggagtagtacccccaggccctgccctgggtgacagactgggaggaaaccaggctggacctgggcaggcgggatgtgttggccacagggagaggcggaccggcacccggtgggacctcctaggactgggccttcttccagggggcccctggcagcagctggggtgtcgggcagaatgtgacttgtggccttaccatggacttgaatgggacttggctggcctcaggatcttgtgcctggaaatagcctgaggtggctcaggaagcggagaaagggtgccagaccattctctggcggggaccag

SEQ ID NO: 13907 - DNA, 1201 bp, Homo sapiens
gagtctcactttgtcgcccaggctggagtgcaatggcatgatctaggctcactgcaacctcggcctcctgggttcacgcgatattcctgcctcaggcttccaagtagctgggattacagccgtgcgctaccatgcctggctaatttttgtatttttagtagagacggggtttcaccatgttggccaggctggtctcaaactcctgacctcaaatgatccacccacctcggcctcccaaagtgctgggattacaggcgtgagccaccacgtccagctgagttttggaatttctagccactgcctctttgggctccttctctctaggcatcagtttcccaaattgcctcgagggagaggcctgagaaactgcaggactcctagaggtccccagacagcaggccaggaaggtgcgtgcagcctggctctggaaagccttcaggaaggggactgggggcccagcgtgggctgctgagaaggggcagggtcctccagctcattcctcctgcctcctccgtggcctcaggtgacagagctggcacctctgggatcgttgttggaccggctacgtaagcaccagggccacttcctcctggggactctgagccgctacgctgtgcaggtggctgagggcatgggctacctggagtccaagcgctttattcaccgtgacctggctgcccgcaatctgctgttggctacccgcgacctggtcaagatcggggactttgggctgatgcgagcactacctcagaatgacgaccattacgtcatgcaggaacatcgcaaggtgcccttcgcctggtgaggggcaggtgctgccagctcacagagtccctgcagacccaggcctcaaagcttctggggctttctggacccaccacagcccctggttttgcttgggcctgcccttgtctgttctaagcctggggtgccctcctttgcacccattcgctcaccatccatctaggaattcttgagggcccacgtgccagggtctgggtgctggaaatcacagggatacatgctgtgggactctccaaggggctttgctgggtggggtgatacggggatagatgctgtgtcctctccaaggggcattgttgggggtcgtgtttcagggatagatcctgtgtcctctccaaggggcattgctggcgggggggtgttatagggataaatgctgtgtcctctccaaagggcg

SEQ ID NO: 13908 - DNA, 1335 bp, Homo sapiens
aggaagagggactgaagttgggggtgtccttctccccacctcctggagttagaccaggaaatggctgtcccttttggcatcatcagggaggtcaagtgctgggagaggccctgggaagggagcctgggatgctgagtccccaaagccctgctccccagctgcccacccctccagccagctgaggctccctgagctggtggccagctggacagggacaagagagcagtgtgcaagaaacaggggctccctaggcatggctcagcagggaggggggtgcctggggagctggagagggcttcctgcagctgtcaggtgtgtctgggggccgtagcgaggggggtgtaagagcagctggcaccctttgaggagggccagagagatcatttgtcagttctagaaacatgagggccccacgggggcttgatggagtgtctctaggccccttaatctgaggccgtggtctgtgtcaggggttatacaggagacatcctacagctttggggtgggggcgtcccagcaggagtctcagggcatatttgtttgttttgagcgggtttgggaacttggccacctggtctgagtaggaggcaccctgggtgtttgggcagcagacagggccaccccaggggagggggtgaggatcctcaccccaccctacccttgctcttggctggactgccccactctggcaggctgccggccgcctatttccgtcgggcaccagggtaacagggccacatcagggtctgagccaggagacacccagccaaggctgggactcgggggtgggggagggtctctgaggagtcatcgcagggcccagcggagcctctggggtccaagcctcccactcaggctgtgtgttagtccccacgtccccacacaggtccatgagggagtccacagccctgcttcatacgtgctgtttgagtcacatagccgccaccctaaagtcccaggagttgtctgcaactgtgagggctggggtagaagccagagacaggagctttgtgtatggggaggcaggggggccagcgcgggtggctgggaggaagagtcccccccattcctgccgccctcttggcagtgattcagaaaggtcctttttcagccagtgtcagagctgctcagctggggagggagggagagagggagagagagaggcaggcaagagggagggcggccgggcgggcagttgggtggggaagccggggagtagggctggactgtgaccactgccctggagagaagacagaaacaggacagaggatcccggctgcagccagcgtgaggaaagctctgctccctgccagaccggccagctgtggaaaccca

SEQ ID NO: 13909 - DNA, 1168 bp, Homo sapiens
cagcaccaggagaagggcggaggcagccccgcagtgcaggagcgcggcgaggcccgggccggggtgcaggagcgcggggaggggagcccgcggaggctgctgcagcagcccgaaccggcgtccgagtccggggaaggcccccgcgagcgcagggaggggccggaaagttccggcgaactgggggagcggcagtgggagagcgtcgggcgggaggcggtggtcctgggagcggccccggcgccccgaagccgccccgagctggtggggagggcccggccggtggggccccgggggcctgcgggggaggggcgcctgggggtgcaagaggcgaattggctgcccggggtgcaggagggacaggtggtgcgggctgtccaggaaacctacctgaacgggaaggagccccaggagggagagggacccggcgaggggctcaggacccggaggcgccggcggaggaggaggtggtgactggcaggcccgggccccacggtacctccggggctgaaggggacgcaggatgtaggggcatggggagtcgggcgcagaagagtgcggggaaccgctgagctctgggagccactgcctgagggcaggccgcggccggcgggaacctcttctgccgtctcagcctgggcgtcgctgaagctgtgtctgcggggaggcagcggaaggcggcaggtaaggaagcccagtcctgttagctggagttggtgtgcttggaagtgagaggctgcaggtccctggcgagagcgtagactccacactgccctcgttcttttggcctttcatccctggagggaggaagcagtgcagttttcagcggcaaggcaggacctctcccccgccagtactgtgtatggtaattggagtgatagggcatcttcttagagtctaggcagcaggcgggacgtctgggtggctgccaggtctgtgcagagggaagagaggggtagccccagggaggagctgcaggacggtcccccctccacctgccccccgatggcagtaggggtgcctccatgctatatgctctgcatggtgcagtcaacacacaagtcctcaaaacacgtcccacagaagggaagagggcagcgtgggattaacagaaccttatcttgtaaccctgttggtcacgtgagctgagatgagtgtgacagctagtggc

SEQ ID NO: 13910 - DNA, 1220 bp, Homo sapiens
gtctcctttccgacatgtcttctggggctccggctctcacacgctgccagctttactggagaacttgaaactgcgtaaacaaaataacggtgcttttaatgaaacgctgttcagaaaccagttggctctagctacttggactattcagggagctgcaaatgccctctctggtgacgtttgggacattgacaatgagttttaaatgtgatacccatagcttccatgagaacagcagggtagtctggtttctagacttgtgctgatcgtgctaaattttcagtagggctacaaaacctgatgttaaaattccatcccatcatcttggtactactagatgtctttaggcagcagcttttaatacagggtagataacctgtacttcaagttaaagtgaataaccacttaaaaaatgtccatgatggaatattcccctatctctagaattttaagtgctttgtaatgggaactgcctctttcctgttgttgttaatgaaaatgtcagaaaccagttatgtgaatgatctctctgaatcctaagggctggtctctgctgaaggttgtaagtggtcgcttactttgagtgatcctccaacttcatttgatgctaaataggagataccaggttgaaagaccttctccaaatgagatctaagcctttccataaggaatgtagctggtttcctcattcctgaaagaaacagttaactttcagaagagatgggcttgttttcttgccaatgaggtctgaaatggaggtccttctgctggataaaatgaggttcaactgttgattgcaggaataaggccttaatatgttaacctcagtgtcatttatgaaaagaggggaccagaagccaaagacttagtatattttcttttcctctgtcccttcccccataagcctccatttagttctttgttatttttgtttcttccaaagcacattgaaagagaaccagtttcaggtgtttagttgcagactcagtttgtcagactttaaagaataatatgctgccaaattttggccaaagtgttaatcttaggggagagctttctgtccttttggcactgagatatttattgtttatttatcagtgacagagttcactataaatggtgtttttttaatagaatataattatcggaagcagtgccttccataattatgacagttatactgtcggttttttttaaataaaagcagcatctgctaataaaac

SEQ ID NO: 13911 - DNA, 1270 bp, Homo sapiens
tcaaggctgcggggagtcatgattgcattgctgcactctagcctgggtgacagagagaccttgtctcaaggctgtggggagtcgtgattgcatcactgcactctagcctgggtgacagagagacctcgtctcaaggtatgtttcatgtatcttctcttttttcattgataaaggcccaaacttcccagagagaaaaacatacagccttaaggaatttggctagaagtctattcagggcatatgatacgatagaacagggattctgtagaacctggaagaaagtagtcactctaggagtaggttagcttgagagaagtagcaagaatgtacttaaagcagcagataatgagatagaattggggtaaattgcggtaggaatatgttagaagcaagggtggaactgtcgtcactgttacctcgatggcgaagccagaatgtgaggctcttgctcttagaactcacgtgagtaccatagcctcgcgttgtcttgcaggacacagattatccttatttgggtaccaccatggacacctataaggaactgattgagaggattcctgagttgaacaaagtggcacgagcagctgcagaggtcgctggtcagttcgtgattaaactaacccatgatgttgaattgaacctggactatgagaggtacaacagccaactgctttcatttgtgagggatctgaaccaatacagagcagacataaaggtgagcactgattccaattacgtttttattttgctgaatgtcaagtattttgaaatgtgatgtgttcctgtgtgttcctgttggaagggtgattgtagccatagtacattttaaagtgaactgaggtataattgtatgtagaattggtaacttgtttgagagaagtcgggaggctgtggattagagacctaggacagagctcagcaggtgtttcagaatccagagcagtgtcaggttttctgtcactcatgtctcccaggcagcccgtcagtaggacacggaatatgaagatctcagcaaggagttgggctgtgtgcctctcgggcgtgacccggatggaaagacagcacagctagcaggattccatctcgtagtgatctgcgcatctaaaagtcaaatattctattaaacgaaactgataagcagggtgaggtggtgcatacccgtagccccagctacttctgctgaggcaggaggattgctggagtccagcccaggcaacatagcaaaatcccatctctaaataaattaataaaactaatattaaagtagctt

SEQ ID NO: 13912 - DNA, 1101 bp, Homo sapiens
cgcctcagcctcccagagtgctgggattacaggcatgagccactttcccgtccactttatgcctttttaagtgccactaggaagacaatcatgagtagattctatacctgtcattgaatttaatctggttggaaagagagacccatgaattatttcaatacgacgtgcaagtgttttctttttatttatgtatttttttgtttgctcccactccaccaggaagcaaatgctacgctagaaaatatccgcaggacactggcggtgcagcagctcagtctcatgtttcaagggggtcttttggaaaaaactacctatgttttgaataggtagctatttgaaataaagctagtatataatttattaagtggtttaaagtatacaaaactgagatgcattatatactttaaaactacttagaatttgatgaaaaccagtattttcaaggcttacctgaaaatattaacagattaacagggatagattacaaatgaaattctgagttcagctctggaactttgtctctttaggatttatgattggctacttgggctattgtaaaggggtagaaccaaaaactgagtgtgagagactggcaggaaccgagtctccagtgagggaggagccaggagaggacttccctgcagcacgtcgcttatattgggatgacctgaagagaaagttgtcggagaaactggacagcacagacttcaccggcaccatcaagtgagtgccagctgctgtgcaagtatctagacaagtaattcaagaattatgataggccacggggaaacaataatggtgacactgtggggaatggcttgttagagaagacaagacttgtcatgtttagctaaagaggggaaggggcctgtaaaaaactgaaactatactggtaggggaaaaggtagaacttctctggggagtctcctttttcttaaaaaattaataggcccttgatgttttccccatctttgtagcttattgcttgctgtcattctctggctctgatttttcttcttaacctcttgtaacgttgtactaagctctgctttgctgacaaggacatcagtagcttttctctgttttaggaagcaacacatg

SEQ ID NO: 13913 - DNA, 1738 bp, Homo sapiens
ttaaaacttggatcacccaggcaaggcgtggtggctcacgcctgtcatctcagcactttgggagactgaggctggtggatcacttgaggccacgagtttgagaccagcctgaccaacgtggtgaaaccccatctctactaaaaatacaaaaattagccaggcgtggtggtgggcacctgtaatcccagctacttgggaggctgaggcaggagaatcccttgaacccaggaggcggaggttgcagtgagcagagatggtgccgctgcagtccagcctgggtgacagagcgagactctgtctccaaaacaaaacaaaaaccacacacacatacagaaataaagagaaataatcaactagaaaaaaaacaaaacttggatcacccagaaagagcgtcacagaggcgagggagaatgaagcctcttgttatcctgatcgcctatgacaacgacatttctaactcttctttgaagcgcagttcttactcttaaatctggtcatacaagctttggcttggaatcctgtctgtctttgaaacagctgaagttagtgttttcctgtgttacccagtgttacatagtctcatctttgaacttttctgcgtcagccttctctctttgggaatgctgcctgtttctgtctaacttattctccctggtgtggtgtggcagtgaagtctgtgctgaagcccatctgcttggttcctccaagtgcacattatgcaagtgtatttggatagacagggagatgcccggaacgtggttttcctcctccctccctattggagccatacctcctaaatatattgtctgggtcccaaatgtttgagccctcttcctctgctctcagtgggctgctcttggcatgccctgtgcttggaacgggacctgcaggctgacaggcctctgagactgctagggccagcaaacgtacatgttattgggaaactccctttccccttttggtgagcttctaccacctcagtctaatcgttttgactgaaagctatttgtctgactgaaagctaaaatcttttatagtgtggcctgttagatactttggggtaaatgtggtctgaggtgctggactagcacgggtagatggagaaagctgttgggaagttgcataatgtggtcatctgtgcctaattaaatgaggttagaggtgtgcacaccaccacaatgcctgggatctaaatcttcagatattaacgtttgaggctatggagctgtttccctgaatcacacacgagaaagcagtcaacatgggtgggccaaatgtggccaagatgagagagccagaagtgttggccttagagcagagcctctgtgtgtgagacattagaaggccagagccggggaggtgccggcgcagccactgccttccggtgggccggacggaaagcttggtcttatgctagattcagaagcactgaagaatggaggttgacactttagaggactaggaagggatcatttgtgctcttgcagctattgctgatagctagagccaaagaccattatattgctgaggcttgggtaagaaagttagggatgtgaggaggttgaaaatcctgaagaagagaaaaaatatgagggaggctaaggaaacttagccactttctgatcactgatgactccttaggctgcacctgagtgatggtggtgtttttggaggctgtacctgagtgatggtggtttttggggggctgcacctgagcgatagtgatttttttttggag

SEQ ID NO: 13914 - DNA, 2616 bp, Homo sapiens
tcctctctagagatcacaatactctgggtattttatatcccttctaaaggtcatttgggttttcaaatgggaagaatagtcaagctaagctggactaaacctaagtaatattttttctcatcaaaagaagttattaatctaactgggttagcatgagtcattcattttttagacatgataaatgggaaacatatcaaatcattagataaattctgacctggaattgaattccccctttcttaaaatctttttaatttgcttttttcatagactcagtatggaactcttaactgataagggagagattcttgatctggaaccgttccctgccattctccttttttctctctatctaggtagctggttccatagtgcccgtcacgagggtccatttcagtttgatgacattagactgcttacactcagctggatgccttgctgtttgcagcaacatgattttacagtatgcttttctcaaagctttgcattcttaatggagatatcaaatggtgtaattccaaatataaatatgtttatgacactaatcatatgcttttaacaataactttttgataacttattgccctgtaagttaaaccttacacggagtgactgttgccatcagaaaatcccctttcacctgctagagagagtgaaagtagtgcgtggcctccacttttcagttaacgagtagcaagcttctagtaggggctgcttatctgacccatgtggggtcttgggccttgttactttcctgggttcgtcccttcagctggaaaggctgttgaaaacacttgccaggaaacagtaaagctgtgagagaatcttctagtcttagatatagagaaatgagtaccagttgatgctaacacgatacttagactttgaggggcttccatccaagctttggcatgaatctgttagacacggttttcttcactcctctgataatctttttttccagaatggttttttgttgttgttgttgttaacaaattctaaacatccagtgttactttttgttttgtttgttttgttttgttttgttttgttttgtttgcccttcaggaaagtcctttttcgagtaggtattgattgttccctggaaactctcagcagtgtctgtgcaggctctgtgcatgctttgtatgagttcggcttgaacaatgcatttgaagtcacctgggatgtccagttctggcatgtcttcattgattgtgtttttaaacatgtttcatgtttcatgtcattttccaaacctcactttacatcttactcagagaagttaatcaaggaatgaaatttctagggggatagggatgatgagggtgggttgggggcttgagtgaagtcaacttggggtatttgctttaaagtgttttctaaagcagttcctaacagtatttagagattccctgggatgtttgtggctcaacttattctggacaaagtgtgtgtgggggtggtcttactgagatttgcattcttaatgcaggacaggctctaaatttcatctgtactctaaatttgtgattgaatccaagaagataacagagacagtgctcctgttgtaatgtttctggcaagtgctccctaaaatgcacatcgaattctgttttctgggccttttctccaatggtgctaggagataccgttgatttctgcagctcttctcagtggtgggaagaagtctttgggattgttgagcaaggggcagctggaccatccactaaatttttttgttcaagacacattagagaccctcctgtatatctagtaagtcataataaaggtgcttgggaaagccttaaatttgaagacacatggaggcggtagaaaattaaacttgtaagaggagaaaaacatgccattaggtaacgcagagttgtaactactggctaagactcaatggaacttccacttgctctaaaaccagggaaatcttagataactgggtgtgatctacctatagatctacctagtctataggtaataatttccagaaggaggatcttgctgtcagttggggatcctctggtttggtctgtaccaaattgtgaatactcttgctgtgttgtacccagttgctttatattaatactgcaacttgaaacggggagggtggggggacaatggggtgggggagggaagggagtgggacgataagtcttttgaagacatcagctcactgtgctgagagagggaccaaactcaaggaaacctctgatctatacattcaactgctgcatttttttataaatacatgtaaatgtcctgttgtaatatttgatcttggaaataaaaacaaaaacttttcagtattagttttttttgtgttgttgtttttacaagataagactctggatattactttcagtaatacaattgagattccaaaagcttgccccctcacgttctcatttaggtcagttactattgattgacaaaggttactttgtagtcccgttgttatgtgtaacgtttgctagccttttttctgctctttgtggtatgtcaaacattcatggtaaacactctgtaaatattagtccagttgttacagaaacattgggtaagctaggcttgttaggtaagtatgattctgtgtttgacata

SEQ ID NO: 13915 - DNA, 1084 bp, Homo sapiens
aataataatcttgtaaacaattcattattttttaaaacttaatgctgtgtgcctaatcagtgttgagtatgactaaaatgtaaatgagaaccaaatatgacactaacgctggcactaaattttatttttacttgtgtacttaaagtactttactggcctgttgggaaattgatttgtataagattcacacctggttttggcagaaacagctttttaaagatacaattaggctgacttaaaaatgttttttattccacagaatgtatctttattatgtcattcttaccgtctctctgccttttttgaccatcatgtaactacgcagtagtaaatcatggggtgcaggctgatgaattagtagtctttgtaaaactaaaatgtaatgagcataggaagagacagctcttctggtgaacatggcagttttccggtaataccagccttgatgaataggctaaagacagctgtgtactatggacattcaacttcactggattgcctggcttagcttttcagttattgtcttgccgtgaaacatggtgttgcactgtacacattttagaatagtggcaagaatgttctttagaactgcagataacccaacagagaataccataccaatatatcggtttctcctgttacatagagatttggtatttcagtgatggttatggtttttgactcacctgtgtgtcagtcctgctagagagacagtatagaatcaagaatttcttgatgtctttttaaaaatagagattataatggccttgctagttgtcctgtgaagtgacagacccttaattagaaatcttttaatcctgctttccattttacttctccaccatttatttttaacattcattctctgaaaatagttatgatttttagtgtaattggctatgtttaagaaattccatttcaaagtcttaatatgtaacaatcttcattttttataaaattgaaggacatttttgaggcaaacttacttttatagctcattttctccctagttaaggagaattctctggtttcatatagagaatggctagctctgtgataccccaccctctttgtggcctaccag

SEQ ID NO: 13916 - DNA, 2604 bp, Homo sapiens
agacaacatttagtaaggaggatggcggaggttactagtaattttcagatgtcttgggctttttctgccaacaaaacccaaaatcaaattagagttggtgaaagctttcttcagtgtttttagaagaggccatcttgaatctgtagaataccatttacacatcaacttcaccctatgctcatttcgtattttgagcttaaatggagtcctctgaagggggggtagtcgtgattctggtggcaaaactagaacttttaacttgtaaaatgaaaaatattaaatggacctttttgtcagttgaggatttagattgattcttttatctgaggagcgtatgttcctcagatgttgcgtagagacctttaggttttcatctactttaagattgctctcttggcaattaggggatttgggaaaagaagaaaaaaagatgccatgtgttgctagtacacagttataggatatggtttctaatggttgaattttgaggaactctccctaaagaatgagttttatatctcctcaaggaaatcatggaaaaatctgtttattcttcagtgagtccttttgaattaatgttcttaaatttttttctaagtctgtgtaagtgcttatgtataagtatataattgtataaatatttataaatatatttatataattacggtttcatttctaccttgagtcaaagttctgtctttagattggtgactgagtaatacttacactttggtgttttttcttaggttcttgaggcttacttaactagcagcttctgatttattgagtgaaagatggttttcatgttaattcctcagttgcatctctgaacttggataacatacttgccgtttgaaaaatagagctgtatactgtcaaaggtgcactggagggtaaaacatttgttggtagtagacaagctcagaaatccaaaaattcagggagggcacagggtaagaagagaggtttgctcagctttgtgctctgatggcacccatctgtactccagcaaagtcatagctgaagcccaaatcgctcaaacgtgtgaagtcaatcatttttcctatagggctctgtttccttttctttaccttctagcttctcttgataaaacagttgggagaactgccaacgtgttcatcagtgagagggtgtggttctttccgatatgttcagcacgtgcatattcatttatgagaaaccaaagtaacttcttcaactcgggttactgtgggatgattaagtagatataaagtgatttaaaagacagcatggtactttcactcagcttaacatgcagctgggatgtctacaatacaagatgtggtgggttttattttattttattttgaggcaggagtgtaattatcttagggttgatataaaggcccatgggaagagttacggattgtacatgggaagaatccataaggagtattgccttgctcaagaatttaatccgctgacagtatgcttcttccagtttgccttacttcctctgcaagtttctttgctccttagggcagaggttttattgaatagattaaatgaggtcagtaagattagttaaaaatagtcattccttgtgggtgttggacacagcttgaaaggagtgtttaaaaaaaaaaagctagggaggaaaagaacaagaaagatagacttcgagagtgataagagaaaaatacagggagatggaatggaaactaccaggaaggccgggcgcggtggctcatgcctgtaatcccaacactttgggaggcggaggtgggcagatcacctaaggtcaggagatcgaggccagcctgagcaacatggtgaaaccccgtctctactaaaaatacaaaaattacctgggtgtggtggcgtgcacctgtaatcccagctactcagaggctgaggcaggggaatggcttgaacctgggaggcagaggttgcagtgagccaagatcgcaccattacactccagcctgggcgacaaagcgacactccatctcaaatttaaaaaaaaaaaagaagaagaagaagaaaactagtgggaaaaaagtgagaggaatacttttttgaaattggtatcggaaggaactggagaagagaaaacaacagtgccaaatgagaaaagaacaggaaacttaatactaattggcatgcaccagatacttttgtgtacatttgcctcttcaatctcccgaagaatcgtacaaaatgtatactttcttcccatgttaagaaaacaggtatagagaacttattcaggactcatagctagtgagtggcaaatcagaattggaatccagagtccatgctgtggtctccttcagcaagagaatcaagctacccagatgattctcttctcattgtttggctttgtaaagtgtcacttagttttgttcccataaatatagaggaagtagttgggttaaagttgtgggatttgcactatgcctatacatttttatttatgccattattttgagaggctgattattgcttttttaaaatgatgcactggtgaagatgtgaaagtaaaattgccacgtggcattatttgccaagaataaatgaaaagggtaaaaaaacaattttttctttttttaaacatttttc

SEQ ID NO: 13917 - DNA, 1207 bp, Homo sapiens
cagaagtggtctgtaagcttcacctaaatgccaaaaggagggtccacggtagagaaaagagttaaaaacccctatgctggcagacctttgtaaggtgaaagaaggtcaggtcctgataccagctattggccatatttggaatctagtctgtgggttttaatctgtaggttttcatgggagtgaaaatgaagtaatagcttaatctaaatttgcccatgaaataaaaatactattaagaataaatatacacctatttgggaggctgaggcaggagaatcacttgaacctgggaggtgaaggttgcagtgagctgagaccgcgccactgcactccagcctgggcgacagagcaagactctgaaaaaaaaagaaaagaaagaaagaaatatataccttattagtaataataatgtatagtgacagtccagctgtagtatcagtgtaattagacttacatcttatgatttgatattttcccctggttcactcagtctttttctgttttctacaggacattgacagtagtgataggaaaagcccaacagggcaagacacagaaatagaagatatgccgacactttctccacagatatcccttggagttggagaacaaggtgcagattcttcaatagagtcccctatgccatggttatgtgcctgtggtgccgaatggtaccatgaaggaaacgtcaaaacaagaccaagcaatcatgggaaagagttatgtgtcttaagtcacgagcgacctaaaaccagagttccctactcgaaagaaactgcagttatgccttgtggcagaacagaaagtgggtgcgcccccacatcaggggtgacacagacaaatggaaacaacacaggtgagacagaaaatgaagagtcgtgcctactgatcagtaaggagatttccaaaagaaaaaaccaagaatcttcctttgaagcagtcaaggatccatgcttttctgcaaaaagaagaaaagtgtcccccgaatcttccccagatcaagaggaaacagaaataaactttacccaaaaactgatagatttggagcatctactgtttgagagacataaacaagaagaacaggacaggttattggcattacaacttcagaaggaggtggataaagagcaaatggtgccaaaccggcaaaaaggatccccagatgagtatcacttacgcgctacatcctcccctccagacaaagtgc

SEQ ID NO: 13918 - DNA, 1512 bp, Homo sapiens
ttgatttttcttggtgtagaacaactcagttcggcaaagtttaaaatttgattaaacaagagaagtggttcaggttgaagatggacttgttaggaagtgatcaagtcctttaagtacttgtttctttttcaggttgtgatgtggccattccgaattttgttgagagtttggtttataattgtctcttttgtcttgttagtaaacattcatttgcaacagttttgaaggtgctgagtggaaaaccgaaacacatggttattgcgtattggacctagaatgaaataattgcctcaatatttaacaacaagccattcttatctcaaagatttaaattcccgaatgtcccattcgcaaatcatatgcaattgaagtgagcagcatgagcatctgggtcatgagggccttcatttacgtaaatttgtcactaaaacccagtagtagctctacaaaatcttaaactgctgcagtgctcaaggagatggaatatctttgtcattggtgctgaggagagcatttcggtagaagacagttgcgcctgaagattgagtgtaaatcattcaaaccagtggttctcagtgttggctgtatacactttgtagtcactttggaatgttggaagacacatcgatgcttgggttccgtatgccaagattctgatgttggtctggaatatgagctggtcataaggatttttaaaaactttctggtcatttcaatatgctgccaaggttgagaaccactgttgtaaaattcaccttgagttttctcatctgcaaaatagaaaaaaaaaaatccttgctccctcccttcactacctcacaaggatattgagggtaaaggagaaaataatgggaaagtgcttgtgccgtggatgaaaagtgctattaaaagtcaaaggagtgttctgtttcaattcatagtatgatcagggaaagtgtaactgagtatactttgttgacttgggaaacctggagcactttctttggttggttaacgaagcatgcagatgtggaagcagacgttactattatccctactatggtcttctgtcatactgagacaggctgttttaattacctggttttacataggaaagaagaaatattaaggcttaaagtttgtaatgatcaatggctcataattcattaaatcttttcatacaaggaatttgtggttaatgtcatttcatagttgccattattttctcattatttgacttaaatgttaagccatttatttcatctccctcattcacataaagtgtagatatggattcaataagacaccaaaagaaagtaagatttacccagttaatatttaaaatcattgttcagtgattaggcattttctgccttttagaattatttgactggagaaagagtttcaaaaatagcagagccctaaaccataaagaaactactactgtataatgaacttttgtttgtttttggagacagggtttcactctactgcctaggcaggtcttgaactcctgggctcaagcagtcttcc

SEQ ID NO: 13919 - DNA, 2962 bp, Homo sapiens
cctcagacctgtttacagtttgtgcatcgtatcaatcctcagacctgtttacagtttgtgcatcgtatcaatcctcagacctgtttacagtttgtgcatcgtatcaatcctcagacctgtttacagtttgtgcatcgtatcactcctcagacctgtttattgctgttgtgtgtatatttgtcaaactaaaatgattctgctttcattcaactctgaaagtaatgcgttgattatgttagtcttatgaaggtattaatatgtgtttagtttattaaattatgatcgacaagtagtctttggggcttaattgaacaaaattattttgtttctaacctgatgaatggcacttatacatttatttttccccttctttctggcagcatcctttcctgaaactggccaaaccgttatctagcttgacaccactgatcatggcagctaaagaagcaatgaagagtaaccgttaacatcactgctgtggcctcatactcttttttccattttctacaagaagccttttagtatatgaaaattattactctttttggggtttaaagaaatggtctgcataacctgaatgaaagaagcaaatgactattctctgaagacaaccaagagaaaattgcaaaaagacaagtatgacttttatatgaaccccttctttagggtccagaaggaattgtggactgaatcactagccttaggtctttcagcaaacagcctatcagggccatttatcatgtgtgagatttgcattttactttgctgactttgttgtaatagatcccattcattgtcccctttggggtatttccaatacttgaatggcagattggagtttttcagagtatgtgtttcatctgctagtctttctctccttcatagcttttcttttcctggacttgctccttttgagttgcttttgcgtttctcatgcctaggcaagtgtaatagaaattatgtagctccttatgttggcaaaggagctctatatagtttcactttgtataaaagttaggaccagctgttgttacatgtaatattttagttcagaacttgacctgaaggaagggaagaaaagtatgtgatttttaccttttttaacaaatgtgaaaaagtcagttttagaaatttcgtggtagtaagttcggcatttgttacatgtatagagagaagactaataatctctatttataactaaatcattgagatagaaaaagattcccattgactgtagacttcttcccattttgtcttcccttctgcctgtttccccttcaggcttggctctaggaaccaaagtgatttgttgttgttccaacctgggctttgtgactttggttagtgccactaccttcttccctcctttcccccttcaatttggaaataaatttctgtatatgttgcaattttaggtttaggtttgttctttttctttttcattaatcctctctcacctcacagataccccctcccatggcaaataatataataaccagtgaattttcaggaatttaaaaattagcttttttccacttaaaggagaaaaatatttgggactagcagcagaggcagtaagagatgtgaaccttggtgagctctgatacagtgagaagagattatactcatgaaagagaatgttagtgttacagagaagcagccgatagcaaatcgactgtagagacttggcggcggtggcattgccccaggtcgtcagcagtgtggtattatctatgagaacttgagcgacagagtatttcttgatgaatttatagatcatttgagatgttgagttactttagtttagttttgttttgttttttcaaataagtagagactattgtaaaaaacgagaaaggaaaatgaaatgtgcgtgttgatagcaataatttgtttcttttaaagattctaaaaggtctgagacctgtagcattaattatttgagtgccctcccttctcccctcccctcccttttctcttctcttttttcctctcctcttcttctcctttattcattgttttgcttttggagtgggtgttgttcaagtatctgtggtttggttctggcattttgttcccaccatccccttcccccattaacttcccccctgcttgccatcctgcagtagtataaatcatgaataaaaaataattttgctgttgtagtatacattggagaaactggcaggttttatttccattattttatttccactatatctatgataagatgcaattataaggagagaagtgactgttttttattgataaggcaagattttcagaaaaatgagtaaaataattaatgaaacatatttagagcacttaatggtctctgttttcaatataattcttgatttcatttttctctggaatatattggccttctacagctattactgaattatagaaactggtttatttctggcagaaagctgcagtgccacctgagttccaaattttaccattctttgtaaacagttggatggattatgataaagaagatgctaccaatgaaatagaaaaccaacgagatgagaagactgtgatcctcatgtactcagaggcacttccctcctaagtcaaagaccatcctcactgactatgtgccaacgcctcgtttcaggcttgtgactcaacaaagggcttttccattgatagaagcagtttgggatttgtagttgcgacttcttcgatagttacctgcacgtccattgctggcaactgacttgtcattaaaacctggctctttggttaagggagctacgctgtggtttattcttaagttacgtggataaactaacctctaacagaaatatactttggttaattttgaaatgtgtcatttttaaacaatcttaaaagtaatacagaattgtgatttattaattttaaaacattcagaacttgttgaaagaaaaattatatctgaatcaagattcatgttttttatttttatttt

SEQ ID NO: 13920 - DNA, 3035 bp, Homo sapiens
acccagttaccctttctgaattgggaggaaaaccaaccaatgtatgtatgagaaactcagaagtctgaatagaaaaacaaagtaaatggcagaagattctcgagtttatgcccgcgtaggtttggagtgttgaaaaagctaaaatgtttagtttcacttggccctgaggtatggttgagaaggctgactgccagcagttgaggattgagtccgaccatgtttacatgcagggttcccaacaccagtggtgacactgggaagcagccccagcactttcctctcctgagtcctccagacccaaaatccttaatgtcaaaccaggtcagtgtttcttactgtgtttcaagtcgttaaaaagactgagagtagaggcactttatgctgctataggtggggttctgtcagcgttaggaaaaaatgacagtttagggtaaggaagatctcataatgagtttttcaaacataattatgcaaacatgagatttttcaaaacatgccagaaatttgcctctgattttttttttttttttttttttttttttgtgggggtgtggtataccaaagtagccagtcactgggctgtcagttcaaaatgtcttgtacttcagagtgaggaagtgtttcagttcctcagtgacagaacctggcatgcagaagagacagaattgttcctgtaagaaaatcaacgccgagagagagctgcccaaatccagtgactcttccacttccagtctcatgcttcatagggcaccttgaggtgtgctgcccagtgtggcttagactaaatgttgagtttgggttttttgtttttttttttttttgagtcagagtctcactgtccctcaggctggagtgcaatggcgcaatcttgcctcactgcaacctccacctcccaggttcaagcgattctcctgcctcagcctcccaagtagctgggattacaggtgtgtgccaccacgccccaccgatttttgtacttttagtagagacaggatttcaccatgttggccaggctggtcttgaactcctgacctcaagtgatctgcccgcctgggcctcccaaagtgctgggattacaggcgggagccaccgtgcctggccaatgttaagtattttaaaagtcattttaaaatatttgtcattgatgaaacttggtttcagcacacgtaattgctttccctctcttcttgtgattaggtgtaaacctctatttaactcaagtcctagattagaatgtcctttgtcctgatgtttgcagtaattgcttccttggttaataaagatatttttgaaatatactctggactgttggtgaaagaggcaggcatggctttactggtactagtttggcactgaactgtttgggtgcccatgaggtaggcagaccttatgctttttttttttgagacggagtcttgctctgttgcccaggctggagtgcagtgatgtgatctcggctcactgcaacccctgcctcccaggttcaagtgattctcctgcctcagcttccccaatagctgggactacaggtgtgcgccaccactcccagctaatttttgtatttttagtagagacagggttttgccatgttggtcaggctggtctcggaactcctgacctcaggtgatccacccgcctctgcctcacaaagtgctgggattacaggcatgagctaccgtgcctggcctaaaccttacgcttttgaggttgagtgcaggccttgtgataactaagcgctacttttgacgagccttcaacaagctgcccagtcctctcctcagcagacgcatcaggttgtagttgcatctttacagtggtctttccttttattaaatctatagcagtgaatatagatttgattcaacttttagttacgttctctcaagaatcctaatcaactttcagttagcctcttaagaaagggaaaaaaaggtgctgccagtcatccccaaattatgtttttggctgtgcattctattttctacatagcactgaatctgagtaacagtcatcctggatttatagttggaacagaacagtaacagacctaactgggactcagccagcactagcctcatcttagctgccccttttctctgctttgcagtttactgcttccctgggctagccataacggggttctgggcaggtcagactcttcagcaagacagtgtattaatagtgtgaattagatacactgatgacctgctctgcctagttaagaaactgaattaatcagcagttacaaagcacatactttgttacgtgctaggctttgcctcctggcctctagataattaagacggcccagggaataccagcagagaagtgctaattgtatttgggtgttacaaaagcagacctagacgagctgttcacttaactggtacctgttggtcagaaaaagaatttatttagagattatgatcatgtaaaattacagtactcaacccttctagcaaagtatttttttgaaaaataaactaaatgcctttataaacttgtgttctctcgtcttgagtaacatgtactgtttggcgaggagtaatttttttcttgtgacattccagtcacgacagaggtcatttcagaacagtgagcagtgcaggccctaaccagctcaccctcagagcagcagcaccatcactcgaattttctacaacggaaatgttctatatcttcatcttagcttgactgagaaactgaatgtttaattctcacacttcactaacatgtattaatagtgatgccttcatctgtacgtttgaattttcacttttctccgattaaagtgagaaacaggtcagatgctatccatgagaaataggaaagaatggtgcagtaaagagactcacatttagtgttctctagcccaggaaacataagatgttcttaatccacccacaatttcccttcccttgcaatcatccagagcatgttttttggaaaactaacctattcttccatcagtagaggttgcttggtgcctatttgatcactttcacaagaaaatctgtgcgctctcttcacacgca

SEQ ID NO: 13921 - DNA, 1352 bp, Homo sapiens
agtgcatatgtcctgcttgaaatgttcacattgtggcatctgaacaggtttcactgtttgtctaacatgtttgtgggaggcatatttgttacaccattcttttccatactgtaactctggattctttccattaaaggttcgggatgagtatcggcaggactacgatgctgggagaggaggctatggaaaactggcacagaaccagtgagtggtgagagctctgtcagtgacaaacactcctttggcctgttgaatttgctgaagaacatcacctaaagtctgcacacgagcccatttttaccaagatttgatcagtgtctttactgagctggaagcctctgaaagttattaaaggacagaatccaaaagaatgcctttaattcttgtctgagaatcttggccatgtgtcagattatcagaacaattttgttaccaggtcagaaattgtgttctttgacaacagattggatctgtaatgttgattagtctttagccataaccactacacttttagaaagacagaaaaatgtaagaatttgtttttaccataatgagtcttaagtaggttcatgatctacattggggcctgggattatttttttaattttaagtttgcatgagatagcctaataaatggaggtggggccaggcatggtggctcacacgtgtaatcccaacactttgggaggctgaggaggaaggatagcttgaggccaggagtttgagactagactgggcaacatagcaagaccccgtctctacaaagcacaacgaaaaacaacaaatggagttgtgctatgttgtattgctttgcacaaaattaggaacaggtgtttgacaattgaatttgttttctgtgaattctaacctctaaaggcatgcttagaggtcaaggaccttcctgtgtagttggtgcaaaagcaatctccacaggacagcactgcttccatgcttcatacatcaggaaatgaggccagaacttgagtatttactaacacgtttttcaaaagatgtcagtgttatacctaaagctaaaaaaaagcaagggtttgtcatagagggaacctctaaataatttcaggggtaggggagatgttgtcaataggaaatgggataaaatatcaagagacaatgaaaacactgccttgacatgaggaccagcaagtttattcttttcattttcagtgatgttgggaatggactgggttttaaaagggagcttgaagagggaatgtttgacagtcacagaaggttcctgcagcagatgcctcttttagccatttctcatttttttcctcaaattttacctactgaggctcaagccttcacagtgagctgatggtctctacagg

SEQ ID NO: 13922 - DNA, 1501 bp, Homo sapiens
aatctacttgagcaacactatcgtgtcttacaaaagttgttcatatgtaaatgatcatcacatttcgtgaattgaggccatgttcaggtgctaaggaagttcgccttttacacagaagattgagaaaatttcctagatataaatacagataaatcagacgttacagtggtgacgtagtaaccatcatggcaatggaaaggagtccaattcatagcctaaaacttcaaatgtattcttaggagtcagattttactgaatattttacccacaatagctgcctattttgttataataaaatatatataaatatatatataaaactttctttaaactgtaactatgggaattattttctttacatagttgcgcacacacacaaacatatatatatatttaaaatatattttgtttcttttgccacctactcctaactttttgtttggtttttaaattaaatattaattgaatagacttatcttccttaatcatgtgaactgaaaatgggggcatggtggtcatgaggaggaaacatttagggaaattagattataagtaaaagtgtgggcatattctcctcttttctacaaaggttttcaaatggttcctgaggttttttgttgttgtccgtgttgttactgttgttcttgtcatcaggtttgattttggtccttgccctttccttctagttctccttttattaataggaaggcaggcaaaagccccatttatgtgtgtgttttcccctcagacagctttcatccactgctctgcactagaattgcacaaatcttcatggtgagcaattttaagaaatgttagtgaaaggtagaaattatttcacaaatcagtttctctggtccttcatattaataataatatttggcttcccattgctctttggagttgtttattaaatatgtgtttttgacaacctcctcattagtttcttaaatgagtactggtttgtaaagaattatcaacattatccattccatttatgaagaagaggagaacagctaataaactgtattgtaaaatccatatgttaagtgtgtcttgaattttgaaagaaaaaatatattttgcaagctaacattttcttgaaacaatttgaggcatcatgtaacttataaccgaatccaagagccgttaggcagcagagtgtgttaccacattgaaatacacagtgctgctgttagactaaatgtcgtaggttgttaaccacatagaaacacactagtatgaagaaaactgttgtaaaatctcaagagcttcagaaactgccttacaagaccgcagcataagctattttgaagtatttaccaaatagtcacatgttgtaaaatatcaagtggttataaaaggatgccatttatatattaaaatttacataacattgttttctggatgtccttgttaagtgatttttttgtaagaatatacgtgcagctttctagattgtataggattatcaataatgagattactaattgctgagtat

SEQ ID NO: 13923 - DNA, 1120 bp, Homo sapiens
tctcaattcacctacactacagtacctgacatgctagcttaactgaaaaaagtagtatcaatctgtaatcagctcttttcccccaagatcctaccccaaaaaaaaaaaaaattatccttacatcatcctgtctatgggattgtacccagtttccttttttctacatatgtttatggagaaatcaggaaagttaagaaaataatttgttttaaaataataaagctaatatatgctcagatggtaaaagaacaaaagaaaagatctccaagtcttactttttgatccatttttaagataaaaattttatactatataaataggaaaattaatgaagtgagccttttttcctaagtgaacagtgtgtaaatggtgattcttcctggatgagtaactttttcaaagatactagcttctactatttcatcaataattgtaatggcaaaaatagacaattaatggagatttctgattttgtttctatcattacagctattgtacagggggatacgctggaagacatttacaaccaagtgaaacagatcatagaagaacaatctggttcttacatctgggttccggcaaaagaaaagctatgaaaactcatgtttctctgtttctcttttccacaattccattttctttggcatctctttgccctttcctctggagtctttcttgagtactgatttcatgttgaattgtatcccacacatcatggtctgcagcttctttttcacatgtagtgtctccttcaagttacatcgtgtgtattatttaatgtcactattggttagtggccatttttcagaactgaagatggaatggcctgaccagctattaagaacgtggggagacgcagaaattgtggtaaaattccttaatgtttaagggaaagtaactttaagagatttttggaaaagctttatatacattcttttcaaatttcagtacaaatgaaaaagtggttttaatcagtgatttagtagactttgagcaactgtgcacgcttcagtttaatagcatggtttggccagtgtattactctcaagtccttttctcaatcaacttctatcatcaaagcaattgtttcattatagataaataaggacattttttaatt

SEQ ID NO: 13924 - DNA, 1290 bp, Homo sapiens
ctatttcagaatggtttagaagatttgaaatgttcccaacacaaataaatgataaatgtttgaggtgatggatattctaaataccctgatttgaccattacacattgtatgcacgtaccaaatatcgcatgtaccctataaatacataccattatatatcaataataatatttttaactgtaagtattctttaagattggaaaagtggacagttttgtaagctgaaagtttttttccatatagatttcattcaggaagatcagtagtgcattgaatttcatcaaaaatggcattggtaacacttcaatttttataaaatgatgaggcactcatatctagaacgctatttgcagctctggtttctacacctcctgaaagatatattatgaacatggtaaaggcacctcaagggaataggagaaaaagaactttcatattgtgagcgtcagatcttattagtttggaaagtagatgagaagagaatatggtcacagagtgttgtttagcgcatggcacatggaaaatgctgtagtaatgtttgaaatctgttcatattcatgaatagactctaaggggaacattgggatatgtccatcaaggcctagatgtttaaaaagtagcaaaaacctgtatatatcaaactggagtgagcaaagtcagttagtaggaagtaccatcttatagagatgacagaaaatcctgacaaatgtttgtctgaaaatgtaaatagttttgaaacacactgatggatgatatttataatgattttttaaaaaacctggaatgtttggggatttaattgctactttttgaaggtgctatgagagaaagtaagcatgttccctttcacccatccattcatgcttcatttggaaaacttggctaagtgatcatttgatctcttgtttcatttgctactttagactcttggggcatgatgtttaggactaaaaagggacttagagaatccacttgctcaaaacaaataacttaaaacttaaagtttattgtactataacttgaaaaatttgaaaatcaaaaccattttgtcttaaacagaatttaggttatacttgtgtactaattcttggatatagtaatcttttccaacaaaattgcatgcaacatgcctctttgacttcatgtttgcttttgcaggactaaaaagaggattatttttgctaaaagtagttaagattgctcaattttcacaaagccttgactgttattctcttaaaatgcaaatcttcatctttaaagcagctatccagttttgtctttttttttttt

SEQ ID NO: 13925 - DNA, 2454 bp, Homo sapiens
gggatcctgaaggaacaaagagccactctcacatacaacaaagggggaagccgctttgtcaccgtgggataggtcccatgtcaaaggaacttttgagtgatgactctgagaagttgaattgcttgaagagttcatcacggaaattcaagaaactttacttcaaaatattcacaaggctaaataactcttatttttatttttgaaggtttttttttttaaaaaaaaaaacgtataaaataatgccctgaaagaataatagggattatacctgtctgttcttaaagatttcatggttggctcagacagaacaatcatctgtttgacttctttggttcctcatgcagcagaaggaagacagaaagatagaaattgattatttttatgatagcagtattcaggatctcatcacctttgcccgtgttttagactttgtcatggtaaatcctggtcttcataaacatgagtaggtcccttggttgctgtcacttgccctttaatagtgttgatgtagtcagtgccgttgccttttcttcattagagacacagaacaatgtattagaatttccagctgtgggtttgaagacttagggggacatccagaacgtgcttcctctttcagacggtgtaaagtcccctggaattacacagctttagtgctgagcttttaacaggaaatgtggccctaggtattagtcttagtttaaaatgttggtgtttagagactgtaaatgcatattcacaaagttatctgatagggccttggaggagaaggtccagttttaaaaaatgacagtttgtgtttaataaatgaaggcatgagaggaagtaagtagcaagttgaaggacaggtagttgagatgaaacacttcaaaaccctggttatagatgtactgtttggatgtagcatagtcttgagtctagcgtccacaaagaattattcaaatgatatttagaagaattataactattacattgaatggagtcccttggatattttgatagtaaaattaatagccataaagtcctagacttcttatttgaagttaaaatttcttatttgaaaagttgaaatttatgagctttgaagattgctaaattaaataatttatagctccaaaaacaaaaatatacttgtatatgtcacagagaaaaaaaatgcaaaatttataatagagttacattaaccttgttgtttacctttcactgatttcttatatggtataaattaaagttcaggcatttatggggagaaaaggccctccccaccgacccgccacctgccacctctgacggagtgggagaagttagtctgtgctaagatagtactgagtccccagatgttgtatactgtaaattacagtataatgccaaatgcagcaaaatcttccagctgtacgttacaagtttggtcattttgaagcttgacattttagtttgccattatgttaaaaacatctaaataggtgttagtttctcaggagtagattgttagtgttgacttttcctgtaaagcagacatcgttcttggcctgccctgcattgtatactagatttcattgttgtctctcatgcttcttgagttgcttcatggtttatgctcgccatggaaagctatcagtaacagtttcatgcttataccaaagaattaaatctgatctttaatatctgatattttcctggtactcgtactgataagggattattggaagtcagtcacagaatttggaaataaattctagtctctccttagctatttgatgcttttcatataggccaagaactcattgcaaaacatttttgcaaggatgaatgcctgtatttggtctaggaacagtacattttagtctgatttagaattactggtagcttattttaaagcaaggaaaagcagctgagctcaagtttgctgtctttagaatggtttgtgaaaatatggtataaaggtgttttcattttcctgttcttacctattattgtatagagctattcatgccattttttgggaaaactttaaaaattgccccaaatactgacattgagtgcattaaataacaaattatctttgatacattaaacttttattcttcatgcatctgtaatttaattttaagtataatgttttgcctttggtacaactaaattaaaactcttggtggtcacatattgtatataaacaaaacaatatgctttgttgaaggaaaattttctttattggaatgtggttgtaatccttgttcagttcttaagtttcggttttttttaaaaacaggatgcaacttaaacttttctttgcatcaaggtatatgcaaaacattggtgccgtgcatcaccaaatgaaagtttgtatttaacgaggaggtgctttacactgtactttttggtgttttttggaaaagttacatttagatctattctgaagctgttcatttttaacaaataaaatgttacaggttt

SEQ ID NO: 13926 - DNA, 1143 bp, Homo sapiens
cctaatgctgaccctagccctaaacccagtcctaaccctgactctaacccctaaccctgaccctaaacctaaacccaaccctaaccctgactctgacccctaacccgacccctgaccctaacaccgacccttaaccctgccgggagggcgctcagtcccggctcccacaaaggacagcagcacccgtactggacggcacccccggagggacccgggcctgaggactctgctgctccagcgccccagctcacgatcgtccaggacccgtcgggtccctcagcacagcgcggccctgtcgctctcctgaccacgcccctcatggccccgccctatgcctcgcccctggccctcgcgccccgcggctccctccgccgagtccaggcccgacgcgcctgcgccctctgaacacgcccctccccgcccctatccccaccccttaccgcctggccccgcccacgccccttgccgcggggtgggagcccagacgcacaccgcgcatgctccgagcgcggcgcccccgacgcggcgctcggctcggctcgggcatttccgcctctttgttttaaactccggacgggcttttttctcctcctcttgggggggacccagagggagcggcgccccctcccccctccggcgcggaccccgcgtgcgccttgctcgcccgcagccccgagaccgcaggtcagtgagtccgccccgcctggcctgggccctcggcgcccgctcctcaggctgcggcctcggcccgtgtccggcccggaaggctccgaaccccgggcccgcgctccgtcgtccccgtcggcctggcccgggaagcccttggcaggcccgggagggccggcaccccagcccagtcaggactccgggaggtcgaagaccccagcccaggcaggactccgggagggccaagagcccagcccaggcaggaccccgggagggctgggactccagcctaggcaggacgcagggagggcaagaccccagcccaggcaggactccgggaggtcgaagaccccagcccaggcaggacccagggagggctgggacagcagcccaggcaggacgcagggagggcaagaccccagtccaggcaggacgcagggagggcaagaccccagcccaggcaggactccgggaggt

SEQ ID NO: 13927 - DNA, 1150 bp, Homo sapiens
agaggatgaaaacacttcacagtctcccagagccgatcgtcctctcccccgccccaccccgtgcttcagccttgcagggagagtgatgctccaggcaacacggttctgagtcaccttctgacacgagctccctctgcttgctttccaggtcttgaaaatctgaattcacttcagtttagtttatgaattttaggtttcatgataagcctcaagtgtagttggacttttattgaatccttcctaagttattgaaaaaatgtcttttcatggtgaatgacaatatttatgttgcctttagcttcttgaagatttagaagttatataaaaaattaatttaaaagcaaaccaaaagaggtttccattaacattatgatttaaccattgtatttaatttcccaccttatgaaacacaacagcagctccctgactggttcgcctttcattgtgtgaggtcggcacttggactcactcagaactgtcgctcacctgtggctgacacacccagccctggaaacggggccccagacgccacgtcgggatttctgacatgctcagcaggtagaccagaggccgtgtgaccagctcagtgctggtttacggaacaactcttacttttaaaaattacttgttcccccaaattgttgagtgccgccgtttggtttcctatgttttctttccctgttttgattttgctgaagggagaggtggtggtggttaggatcagagctctcctggcatccgtggggaggatttgctggtggtggcttcgggctcatgcccagacacactcactgccccgtctgtccaaggcctccccttcccctttgctggtgggaggagctcgtgtgctccttggccgcttactggaagggcgtttttcagagctgcagggacagggtgagcagctgaagggctaggagggaagccggcccccgctctgcagaagctgcatttcagctgaatctgtgtttcagcctcagttggttgcaccgttagcccctctcctcccggatggtcatgtttttgtcacattagagaataaacagccacacacacatttttttttttcctttaaaacagtaacttggaaatatgaaaaggccagaaggaggagcaagggctgttttctggagtggttgaggtgttgtcc

SEQ ID NO: 13928 - DNA, 1287 bp, Homo sapiens
ccaccattcaggctttccaagaagccaaccaccttggagattttttttcttgaatttcgctgttttcttctgcttcctttagataaaaagcagctcaagagaccttatcttagggatgagaaaaacatgcatattaattccatctgagtgattgtcagtgtaaggccttttaaaacaaaagcaagttctttgttaggaattggtcaaaattcatctctttctttaagcccatcaactcccaggacggtttgagttactcagttacctaagcttgctattcatccaaatcattttctagagtcactgtataagggtctatgagtagctgtgtatgaataaatattacctgtctacctcaaaatacacatactgctgaagcattctgtacaaccgtgtgttatcacagtgcagttttaagtgtaacgttagaacttaggcattttcctgtgtggcggaataagaaaggattaaacagttacaagcctccaaattcaaataaaattaaatcacagttcagatgaaactgaatatcattgtaataatctcataatatatatttgtaactttgtagctatctttgaaatcacttgactttgcaatggtgctaagctgatagatttaaatacacagacgggcgagtggcgcccgtgtcgatgtcttcagccagtggtgaccctgcttttgtaaccgcgttaacctgacaaaacctcagcagcagaagtccctatttttctaggagttcatcgtgcagacagtcttcactacaggactcggccctggggcctctgcctctcgtctgaccttgcagccttagtcgttggaggctggagcgcaatggccctgccgtctgtggagcctctgggcggccttctttcctttctgtcaacctctcatttcacagaaaaaggctgaatttcattttttccagcatgaaagccaggatcggttagtggttggattctattggttttttttttttaaacagatggagttactgtgaagaagttttcacaactatttatgctggtaaaacaaatgctgttaaatcaccttatgcgtcgttttcaacagcagtggggctaattacccggaatacggtctcaccgatgcagttttcatggacatagaaaattcaaatagaatatataatattgaatttaagatttggggggttaaaaaagaaaacttaactttataaaattatttattctattttaagccttctatcatattttcccatccaattgtttggtttcagtggtccagctttatttacaggcatataaa

SEQ ID NO: 13929 - DNA, 1099 bp, Homo sapiens
caacctagtcccacgttgtacgtgaatgtttaatgtgctctcaaaacatggaaaataagtttagtgcacatagctaaatcacaaaacatccaatttctctgtttcctcaggaagtcattactgcgccaccacatcacatgaccttaacatgatcaatgtatttctctgccttgacatttaaatacataaattgagataagtagattagaaaatcattcaaatgataccataatttgtacgggacagggtgcgggcaatggccacgtggccaaggccctgcaggaacgcgccgaggtctccctcaccctccaggtgtccttcgcacccaacagtgcgtctgaggaacgagctgcagtttgagcgttcccctgagatgtgcgtagcctccgtgtaaatgtccactcccatggcttaattgcctatcagacgcattttcccagacgaaagcaatgttgggttggggaagacagtgcagccacccagcctttaccagcagcgtacggcagacgaaggcagtcgaggtgtggaggtgatcacgaagatacatgtgtttgactgtttaatttgaaagtttacattttttatgctttgtgttggtgtgtaatttttgtactcttggtggctagtttttgtcaaatcttttttggaatattgcttaaatgttttgattttatgatagtgaagcttgtattcagtgttttgccaattaatattatatgcttgtaataaaagcaaaagaaaagcttaagtgaaagtgtttctggctggaaatgtattacataaatcatttgtatgagcatgagagatgacttgctcatgggatgagcaatgctgtgggtattggatggaccactcaggcagcctggccgcacacacacacatgcatgctacatatgtgtacgctcagaccacatgcctgcacatatgtccacacaccagcccacggctcccttcctcaccccagccctccccactcccaggttaaccaatgtctcgatttgcttcaggcggcatttgtaaactgtcaccctgcttgcaaaccctcatttaaattggtccagcatttgctaccagagtttaggccacaaactttgtaaag

SEQ ID NO: 13930 - DNA, 1205 bp, Homo sapiens
atatgctgtctggacatgcacacacgtgcagatatgctgtccggatacacacgcacgcacacatgcagatatgctgcctgggcacacacttccggacacacatgcacacacaggtgcagatatgctgcctggacacacgcagactgacgtgcttttgggagggtgtgccgtgaagcctgcagtacgtgtgccgtgaggctcatagttgatgagggactttccctgctccaccgtcactcccccaactctgcccgcctctgtccccgcctcagtccccgcctccatccccgcctctgtcccctggccttggcggctatttttgccacctgccttgggtgcccaggagtcccctactgctgtgggctggggttgggggcacagcagccccaagcctgagaggctggagcccatggctagtggctcatccccactgcattctccccctgacacagagaaggggccttggtatttatatttaagaaatgaagataatattaataatgatggaaggaagactgggttgcagggactgtggtctctcctggggcccgggacccgcctggtctttcagccatgctgatgaccacaccccgtccaggccagacaccaccccccaccccactgtcgtggtggccccagatctctgtaattttatgtagagtttgagctgaagccccgtatatttaatttattttgttaaacatgaaagtgcatcctttccctccaggctggtgtttctgcccatgtctacatgcacgtgtgcatgctcgtgtgtgctcacatttgtgcctgtgtgtcaggcctggtctccagaaccagcagcctaaccctcttggagtcccctcgctgggccagagccacaggggctgagaactgcacctcccggcgggagagtttgggtatactgggcttcggtggtgttgggcgtgagcactgcccacatgcctggccaggcctgcgtcctgcacccctgtcccagcggcgccctctctgtgtcctggggctggcacctatggccctcagtgcagggcctggccactccccagcccctcctcaggctttggtgggtggccctacaggaggcagcagactggcctcagagctggggatggggccaggctcaggtcacctctgacctcagggctccgtccgagtgccctcccagccaccctgcggtgctgcgacggtggccgaccccatcttac

SEQ ID NO: 13931 - DNA, 1920 bp, Homo sapiens
cctggtgggaggggcggcgtctccactgactgacctggaggatctgggtagaattggtaaggccaacctcacctgaaaggcccatgagaaccagggcctcttggaaggagcctgggctggggtggccttcagggctcagtggacacaggagtgccatgggcacggggcctgtgggaggagggggctttgggtgaggcgaagacctcatgttcaagtcacctggagacaccagggctcccctccccagccctgagaagtagctgccataggcaggaacatccgtgtaaaggccgggatccttaccctgactgctggtcctcctggagaggccccctcggtgctgccgatgctaggagggcaggtggggcctggccaggccgcctacaggtgggcctcacggatggaccctctcccagcaggtaccctccgggcgtggtgggcgtggcccccactggcatcccagctgctgtggaaggtatcgtccccagcgccatgtccctgtcccacggcctgccccctgtggcccacccgccccacgccccttctcctggccaaaccgtcaagcccgaggcggatagagaccacgccagtgaccagttgtagcccgggaggagctctccagcctcggcgcctgggcagagggcccggaaaccctcggaccagagtgtgtggaggaggcatctgtgtggtggccctggcactgcagagactggtccgggctgtcaggaggcgggagggggcagcgctgggcctcgtgtcgcttgtcgtcgtccgtcctgtgggcgctctgccctgtgtccttcgcgttcctcgttaagcagaagaagtcagtagttattctcccatgaacgttcttgtctgtgtacagtttttagaacattacaaaggatctgtttgcttagctgtcaacaaaaagaaaacctgaaggagcatttggaagtcaatttgaggtttttttttttgttttttttttttttgtatgttggaacgtgccccagaatgaggcagttggcaaacttctcaggacaatgaatccttcccgtttttctttttatgccacacagtgcattgttttttctacctgcttgtcttatttttagaataatttagaaaaacaaaacaaaggctgtttttcctaattttggcatgaacccccccttgttccaaatgaagacggcatcacgaagcagctccaaaaggaaaagcttgggcggtgcccagcgtgcccgctgcccatcgacgtctgtcctggggacgtggagggtggcagcgtccccgcctgcaccagtgccgtcctgctgatgtggtaggctagcaatattttggttaaaatcatgtttgtgactgtaaccatttgtatgaattattttaaagaaataaaaatcctggaaagagccagcgtgcccagcatctattctggtgactttctctcatgaggacacgggtgagcctcagtcctggctctggtgacctccacggctcagctcagcctctctgaagtgggcggcctaagagagacccagagacagtgcagtggcaggttgggcagtggtctctgtgtgtaccgggcctgtccctctgcccactgggtctgtgggacgctgtagggtcctggcttggaggcggcctgcccgcagtgccccagtgggagggaagcagtgtgccagccgggccgttgtgtggatgatggtgtgactggctgaggtcctgccccactgcccacccctcccttcttggcatagctcctgcaggccggcctgcaacctgggaagactgtgggccacaggaggaaggaaagcagatgtcagggctgaggaagctccccagaccatgggtcagccagcctacggaaatgggcaaaaaagccaaaaggggtcatgcctcaccttggcccacagctgagcctgtttaccggcgtcc

SEQ ID NO: 13932 - DNA, 1312 bp, Homo sapiens
gttcattgtggggattttccatggaaatccgtgtgtacgttgtagtcgcttgccttaatgcattcccggttttatttttcagtctctgctttctatccgtcaagatgataaagtcgtgtgcccgagaaccaaagaagtcttccacttctcacaagccgagaaggtgtacatcatgtaggccccacgtcgtgaagcgcacgcctcggggacgggctgcagtgggcggggaggccacgccttcctcctgtcccacgctccagcctgccgcggcgtttctgtttcttgcgaccaaagatccgtgagcaacgataaatactcttaggaagagagaaaataaggtttcataagtttgtacttgaaaacatttggattggtaggattttgtaacacgtcaaccatttgatgcttctgaaaagtactttcaacttgcgaaggaaactcttctttaaagactgacctaaacaccgagggaaacttaagaacgtttaaaatataggagtccgtgatttccctgtgttttcagtttctttccttctgtgaacgatgagacttggagaacgggctggtccttcaccacttcctgttggccctggcctggccggggaaggtggcagcggcaccggactgacctgcagtgacccgcgatgccgcgccacgagggacacttatggcttcattcgagagctgctgccaaaacgcctggcgccgccaccgtcgggggctggcttcgaggacgcccgcctgcctcgcgggtcgtgtccgcgggactgtgttcgtacgtgcatagtttcgatatcacatcgcggggctgtgttcgtagctgcgtcgtttcgatatcacaccctctgtgtgccgccttacttcctgcttcgagaatgtataacgtggaaatccacgggaccaaatttctgcagaggccttgccggatggttccataactgtagagtctaattgctatccattacagaaattaatcgttcagttgaaagaagtactgatgacttttcaaaacaaatgaaccaccgtagctgacagagaaccgtatcgtagaggtttgtagttagtgcttatttttgcatgttgatgttgactagctaataaactgtaaatgtaaaccatgcgaataaaatggttttctatttctcatttccgtgtgagccgaggctgccgtgcgtttctaacaccgaggttgtgttctgctcctccccggggcccgggcagcatggcgggcatatgcgtagcttctggcaccacggccaccgggagttgagaagccggctggaggccactcctgcccggaccgcagtcctcc

SEQ ID NO: 13933 - DNA, 1141 bp, Homo sapiens
gctggcaccggccttcggccttcagtgggtggtcccactgaagcacggccttctctggccccatgcctgactgtgaatgggtgaggctctgaggaccacagagacctgtccctcaggccctgcccatccctcctgcctggggctctggggctgggtcagtgagagcagatcaggcagtatctggggagtcccagctctgccctcaacttgccctgaggtgacaaagcctcgactgaaggcgagtgggacccactgggtctgcagtagggaaggtccaggcccgaccacacctgggggctgtcccggctctggccttggcccaggccccccccaccaccccgaccaagctggccttcctgcctgcacccatctgggtcttctgtgcccctgagctggggcagtgcccccgccagcatcccaagaacaggaacgggccgcagaggaccagatgtgactgcacaggggcctggacgccagcttcttccctcccgcctgctttctcacctggaaccgtggccatctcagaggaaacccgcctgtctcgggattttctcacccgcagagcggggagggccctctgggctgcctgcagtgcaccgtgtgtccagcagggggcaagcgcccggccccggagccgcagcagggtccgcttggggccgcacagggtcctcgcccgacctgtgtctgaacacgcaggagcggccgggccaggcagtcccagcgcattttaatagtggaatgtaattcctgggcggcagaaaaatgaaagtgagaagtctatgaattattgcaaatgctctcgatctgctgggccgtgcagcggggccctgggctgcaaagcctttttttctcatgtttaagttggcgtggaagatgaaatagtcacagagacgcagtggcccctcaaagctgttattgccagctgtgtgtctcctgtaaacacttttctgatttataacctcactctgctttataaatggaaaaaccagaaacgccttcaggagcagcctttcaccgcccaagaggcctctgcgtccacacgtggccgcgggggcagggtgccgaggcttctggtcagccttccttcccagggccaaggcctccacctaggcctggcgcgaatgtgggtcccggaagggtg

SEQ ID NO: 13934 - DNA, 1175 bp, Homo sapiens
cactccgagggttgacgcagcccctggacctggaggaggcaggagggagctccaagccttcagagggagccatggggcaagtaccaggtaccccctggtgatgctggttggtgccgggtaaattccaggtggcttctgggctccagaccgtgaaagcatgctgctgttttaagctccacccctgcccgtggtattcattccacagccccagagcaagttcccctgggggccgtcctgtgactcccccggccacaccgcacctcacccggagtccccagcccgccccacccagcctcaggtcacgccttcctctgagcagcctccctacactgcaccagctcccgggccccctcctcattccctcctcggccccaccccctgcctctctcctggcctcaccttgccccctcctcttctccggggcgggcggcacccaggccagacacctcctgccagcccatgctgacgccggggctgtgctcagtacgggctcaggatgggctcaggacaggcgaaggcggccgagactcccgggccggcaggccggtgccgcgtcagcagcgggctcattagcggagttaactgtcaggcataaggagggggaaaaagctcaatttgtaaacacttggtcaatatgaggtaaagccaacaggatggatttgggaccacattggacaacgccatcggctgcaccggacgcccagcaacagtaggtaaattaggtcatcattaaattatcatgaggaaaaacgcataatcggcaccagcgctggtagaaagattacggttatttacaaaaaccatgctgtttgcaaatttgtgcaaaattatttgttcctagcagagttttatagagctatctgcacatgatctccgcccgagattcccagccctgcatattaactaatgtctgtggtttaattggaaatagaacaggccacattgtaaatcgcttttctgccatctgtctctgtctccacacggggcctgggagtggaggacacagtgaacagatggatgacagggaccctgcgctgcccggccccaccccactccccgccagagcctcaacttacccctgcaccgcccggccccacccactcccctccagagcctcaacttacccctgcactgcccggccccacctcatccctctccagagcctcaacttaccc

SEQ ID NO: 13935 - DNA, 8120 bp, Homo sapiens
cacacacacgcacacacacacacacagaccaaagctctgtgtagctgtctctccatctgcactgagtctcatgccggggagtggctgtgcaccagcagcagggtgggctgctagggacccctcacattgttggggaccagtggcccttcacgtccgcgagcccccactgctgggtggggccgggggcagcaggtcgtgggcaaacacggagtcgtcccctgaggagctggagctgggggtgtcctggccacccggggagtactgctcgaaaggcgccgacaggtccaggtactcctgctggcgggaggcggggtgagcgctgtgccaccgagcccctcttcgcacagccacctctgtgcccaggctgtgccccagaaggcccgccccacacctcagcactctggggggcaggatggccggggacggcagggggaggggcataggcgggtggcaccaggccagagccagcactcacgtcggtggacgtcacggtaaggacacggtccaggtcctccaccagctgcttgaaggtgggcctctgggagggcgcggcatgccagcactcccgcatgatcatgtacctgcgggcagggcgctcaggagtgagccccgccgcttcccgccttattcgggaacagcctgaagggctgccagtccctcccccgcccagccccggagggacccccacccctgaggacccagtggagggccagggatgccactcacaggtcgtgtgtgcagttggcgggcttgtccatgcggtggccctccttcagcagcttgaagagctcctccacagggatgccggggtacggggagccccccagcgtgaagatctcccagagcaggaccccaaaggaccagctgcaggggaaggtgaggtcaggctgtcctgagactcccaggacagacacctgggcgggcaccaggggaataggccagggctgcgctgctgcccccagggaggggtagaaaccacacccaggagctccagggcacaggcctggggactgcagctggggtcctggctctgcccagttcccgcctccacccctgaagcctgagctctgcaggacacgtacacgtcactctggtgagtgtagactcggtcaaacaaggcctcaggcgccatccacttcacgggcagccggccctgggagggtgtgggaaggcggtgttggcgccaggcgtcctactggcatgacccccacccccgcaccccagggccgggctcacgttggtcgtcttcttgtagtagtcgaggttgtgcacgtcccgggccagcccgaagtctgcgatcttcatcacgttgtcctcggtcaccagcacattgcgggcagccaggtccctgtggatgcactggggaaggggtgggaggcagggctgaagcctctccacctctccccgctgctcccagcatctcagggcagggcccagcctactccacccacacctgccgccctgcccaccttctgggaggccaagtactccatgccccgggccacctggtaggcacaggacaccaggtccttgaaggtgagctgctcctcgggcggcttgcaggtgtcgaaggagtagtccaggcccgggggccgccgcgcccgcagaaactcccgcaggttacccttggccgcgtactccaccagcacgtacaggggccctggggacacgggctcctcagacgggctgccaggcccaggagggccgcccagccggcaccaccgccgctaccgcacctaccgccctgcgtgcaggcgcccagcaggttgatgatgtttttgtgtttcccgatcatcttcatcatctccatctcagacaccaggtccgacaggtccttgtcagtggcatcgtctgtgcacggagcggggggcctgtgtcaggcggcggcggcgcccccagccctgctctgcacccctggccgccccctcctcacctttcagcatcttcacggctacggtgacaggcttggcggcccggtccttgtcaatgccgatggcctccgccatgaccacctggccgaagcagccctccccaaggggcttgcccagggtcagcctggcagtggaggcagagggaccatgagtgtgcaaactcgcccactctcagcccaccacggtccccaccccagcctggcccagcccttgaggcccagagccaccacctccaggaagccctccatgctccccctacagcctgctcgtaaggacgaagagtgtcacccacagcctcccgcccttgctgcccctccagacagggcaccttgagaggggcagtccctgccatacacccgtcccaggagcatctccacagaaccccagccacacccaacatccgccacatccctgacggcccctaaacccagccgggcctctgactggtggctgtttcacccccaccaccaagccccctacagccaacgctggccctcagcaccactgaccgggcccgagacagctcccatttggggtcggcaggcagctcgagctcggagacattggccagcgtggggccctcccctgaggacagccttgcgatgcgcaccagtggtgtgttggagctcatggacgcgttggactccagggacacctgcttgggtcagcaggggcaggttggcgccgcgtgggcgacagggcgtggaggtacagccgggggtcagtgctgggccagaagggggggcgttctgacttccaccagcattgaatgaagatttttagaatgtttcgtgccccaaagtaccctaggctctacatggtgagcagagacgaggagaggggagcccgcctggctgcagagagggctcacacagcccaggaccagcgtgggccgaggtggggctccaggaggcctggcgggcaggcagctcagaacctggtatctactttctgttacctgtcgcttgagcgggaagcgggagatcttgtgcacggtgggggagcccaggcctttcttgggggggctgcgcaggcggcagagcgtcacagccgccaccaccaggatgaacaggaagaagcccaccccgtagctgaggatgcctgcatacacactgcccgcctcgtcagcctccaccagctcctcctcggctgcaaagacatgggcgttgaggcctggcctggcccccccccccacggggctcccatggatgcccctggcccagagccgcaggcaccactgggagcggaagggggctcagaacctcagcacgcgccttgtctggagggtctcgcagtcagtaacgccagtgagtctagagggccagaccctggagagaaggagcccagcagagccagccagtcccacaccgccaccaggcgcccgggagacaccagagccacaggagaggcctttggggacccagatgggaagtgggctcgagggggctgagggggcccctctgggaccaggaccgggccaggccaactttgtccccacactgggcacagggccaggagtgagggctcaagaagcgggacggccgtaagtcacaggattcccgtccgtcctggcagctttggcgtgtcccgagccagcgtcccccagacagtgcggagcagcagcagcagcagaagccggtacctggcagcaccaccagccacgcagagtgatgagaaaacccaatagaattgcccgccaggcaggtgtactccccggcgtcctcaaaggtgacgttgtgcaaggagagaacctctagctccttgtcggtggtgttagcgcccgccgtctacaaagagagagcagagcgataggcgagcgccagcaccgccctgcgggcaccgcacagagtccacacggcaggatccagccgctgcaaggaaaacgccgccaccaccaactcctcagccaccgccaacttggtcaccgccacgcggctgagggccctccgcctggtacaccggtactgagcccgaagccaggcccctccaccggcgagtcctctgtcccaggtgagcggcaggcgggcaggcagcatgcgggttagcgcagagccgggcgggtgcaggtggaggatggacacagggacacacaggctgcggaagcgagcaggcagcgggcaggggtggagagaggcgcaaaggggtgctcacagacggcacggagccggcccggtgggcaccgggcacctcctgtgggggtcgcaggcgtgcgggaagggtcggcgcaggccacagggctcgaagcgggcggtcaccgtggaggctggagctgccagccttgccgaggcggccccgagtggagcgcgagccggggcgggagcgagcagggctgggcgtgcggggcgtgcagggcgcgcggccagggccttggagctggagctcttgtgccggccggcatgggacagagtcgttacctgctcggggcccgtgaacgctcagccaaaaggccttctcggccacgcctatgaaattggtggctcgacagaggtactcgcccccgtcccgctccgacacattggccaggcggaggcgcacgtcggcctccacactctcactgatccaggactgcggggacaagagacccggctcaggcacgcccccgaggcagccccgccgggcacgaggcaggatgtgggagacccccaaggtacagatcgaggctgggctgcgtcagccccaaaggctgcctggaggaggcgtggaggcacttcacggtggctgtggtttcacaggatgcacgtctctgcctccaccccaacaacccagcccagaccctcagacaacctctggtcactggcctgccctcccccgggctcttgcagaacctgcaccctggacagggcccgaggcggcctctctgggcggggtctggactccaccctcgccctgcgcctgctccccgcccccaagagaccgtcttctctctgaacagatgtttctctttgggctttgagtgtcgcaaccgtcccaattcagtggcccccacccggcagccatgggaacaaagctaagggcttcaggaggcgggcagacagtgagctcgggccccactgcacacagctgacgagagccaatcggccaggtcggggctcagccaccgcctctgaggcccagagggggcctggagggcttggccacactgccctcctgtcctggggcaccactgctgcccaagccgcacccacccccaagaagcccgtgggcagctccatgtcagggacttcagtggctgaggctggccctctgcagacacggaaacgggtcccaacgcagctgcctatggccctgaggtgtggggtggctgagacttggccccacaagcacccccacagcttctgcccccgaagctccaacccctagacccaaatcctcacgcaacccgcagccaaggggcacccttggggccagcccaggagccccagcggcggcacccacgtgcacacggtggcccaccttgagcacggtaacgtagggtgtgccgtccgggcccaccttgctgccattcacctccacgtgcttgagccactggatgtggggctgtgcgtcactgtacaccttgcagtggaactccacgtcgctgcccagcaccgccgtctggttggccggcagccccgcctgcaggatgggccggtgcggggagcgctctgtgggggcagatgacgctcaggggccaccccctccctcaccaccaccgccactgccgcccccacccccgcgccgccccagggccctcacccagcacgtccagcgtgtacgtctgccggatgctgccaaacttgttctccacgacgcaggtgtagttgccgcggtccgagggcaccacgctttccatgaccaggctccactgctgatgccgcagctgcaccgggacgcgggcgggtgagtgagcggaggcagcaaccaccgcgcctgccaggcccagagccaccccgccgcgcccaccttgatgcctccaatgcggtgctcgccgcggaactccctgccgttcttcagccaggagatggagggagtggggttgccagcggctgggcagcggaagcggacggtgttggcggccggcacggccagcagcttcttgtccatccgctcgggccgtgtccagtaaggggcccctgcgggccgaggtgcgtgtgaaggccatgacccgagtgggagcagaggcccctctgaacaacccccttcccagagctgcccctgcccatccccagcctcagtttcccgtcctgtgtaggaagagggcgggatgaggttcccaggagcctccacatcttgtcccctccccggggctttctcagagctgggccgtgtgtcccctcccctcccctccagggtgctctgcccggacctgtgaagtcacagggcacagggcattgtccaggggagcccacctgcccagagaggcgtgccagggccaggcccaccaacggggagactgaagacccagggggcaggcccatctagtggacaagccaggacctgggagcagtttaccaggagaggagcccagtcgcctgcagagccaggagccttggaggcagctgggcagcatgggcccacggaaatcaagaccctacaccaccctctgcagagctccaagtctggcgggcacccagagacggtggcaccctggaggccctgcctcctcccatctcgatgtccagggctcccaccacccctctcacagcccaactggtttttctccttcctcagggctggtgctgccttcctgccgggactccaggcaaggatgggctggcattccccaggagggaagcagccctcccctcagtgagctcactgccagccccctccaggcacacgcccatcaggggcactgaggcccagcaagcagcagtgtggacacaggctggaaagaggcaccccacggtgctgagctccctcccaggcctcctggagacccccagggtgagttcccccagctgtttctctcatggactcagcctcccttcctcacctgcttaccccactggcccagggacccagcgcacacaccatcagtccgcaagtcgtaactgccccccatgtctgtgccacgatgaccctcacctgcacgcactcccctcagagctccctccaaaaccagaagccccacctccccaccctacaacttggcaaagtccacctgccaccgttccaggccgggacgccaggcatcgtccccgactgctctctcacagccgcagcccacccaccagccaccctcctgccagccaccctgcccgccactggttgtggcaggtgccccggcgccctcaccccgggtccatccaccccacggcagccacctgagtgccctgccctgctgcgctaatgtctgcggggtccacctcacctatagccaacaccagagccccacaggccagccctggcctcctcctgctcctggaacccccagggccctgtgcctcagtctccccatcagcaacacggtgtccccttgcaccccagccctgccaccagggtggggcatctagagccatgtcagtgacccagcccctcctgtatcctgaggggaccagaccttcggggtgaccccagggaggttgttccggggccttagtccctcagctgcctgtgaagggcagggcttggcggtggcagcgggccccaccccggctggcctgaaccctggaccctgctcctacctgtgtccacacctgtgtcctcagcctcgtcctccccgtcttcgtcatctcccgaggatggagcgtctgcaaggcagagatggccgcaaccaatgcccaacctgccccaggaggcccccaggtgcccctcccagatggggcagggtcccccatttgggcagcacttcctgggggtgccctcctctccaccaatgaccagagagacccccagccgctcctgacccacgcagggactcagggagcccggcactcggctcctttctgtagctggcgtggccccagagctcacctgtcacccgcacactgaagtggcacagtacgcgctgcgtgagccgctgccggcagctgtaggccccggagtcctcgtgggaggcattcagcacctgcagccgctggggccccaccaggacacgctccgagggcaccagccctgtgccatccttgacccagacagtgggccccatgggaccacccccgggcgggggacagctcagctccacagcatccccgctgccgaagacca

SEQ ID NO: 13936 - DNA, 1168 bp, Homo sapiens
caagggacagctgcccagactcagggcccagtaacagtacagaacgaaccaactgaattcacggcttccctccaagctttgaaaggtagcagtccaggctataaaactctagaagcattgcgtaagaagtgttaagtctacaacaaatacatcttgtaaaaactcaataaattatatatatagatatatataaacttgtaacatctaataacatcggaacctgcacacagggccggcccctccctggaaaccgtctccctgcctgggacacacagcaattagaagaatttgtatgaaaataccagcttgctttgaagtccaaaaaataaatctcctaaagaaaaatcctatagaaatctaattctcctgaaaaaggacaaaggaaataaaatatcttcactggaatcacctccaactattaacaaccttttaggcttggaggggatcctccagctccggggcaggctggacgtacattcttggccgtccctctatcggcgggataaaccttctcggttgtcaataagttaaaaattaaaactctccgccatgtggccagctaaatgctggaagtgttggggtgtgggaacaagagtgccaggggcccataaatagctttacaaatatacaggtccagttttaaaacaaaactgcggtgccagaaaaggccctggtcctctgcttgcatgggtgagaccccctggggcctccctccacgcccccccacgccccgcccagggccatgcctgcctcctgtgcccccagggtcgcaggcctccgttgtaccagccttttcctcttccatatatgttatatatatatatgtatatataccatatacacagcatctatttatagaaatgtacactagtttccggaataaaccttttgcataaaaggtaaaggctcccatcttcaggtacccgtaatttcagtctctgaggggcagggtgggaagtgggaaagcctggaggtggggaggcggtgccactaacaccccaggcacaaggtgctggacatgtggggcttccctgcaggctcagctttgggtgtgggaggggccgaggcccaccctgtgatgtcccgtggtgcaaaggcagaggccggagccatgtcgggcccagctccctgccccacgggggtcccaccgggtgggcccacttacatt

SEQ ID NO: 13937 - DNA, 1506 bp, Homo sapiens
gcctcacacatattagctcttttaagtatatgttggtggacaggtggaaatctgtgtttcagggatgattggcaagttaagttatgtgtccatggccacactgtagattattagtggtatgactggagtgtgctgtcttgactgactttcatgttcttcctttaaaaaatgattcctttttctttcagctttatcattttgtgattccgtgtaatttttgtgatactaaaactgccttctgtgacctgaattattataaaaacatcataaattgcttacaaagaaaatcagaccccacaaagctgtagaggtcctggcatacctatcctaggttttaaatgtaattgctttttctttcttttttcttttttttaataccatagtgttctaagaacggaagcatctgggctggatggaatttagcatcaagcagagtcccctttctgttcagagtgttgtaaagtgcataaagatgaagcaggcaccagaaatcctcggcagtgccaacgggaagactccgagctgcgaggtgaaccgcgagtgttctgtgttcctcagcaaagcccagctctccagtagcctgcaggagggggtcatgcagaagtttaacggccacgacgccctgccctttattccagccgacaagctgaaagatcttacttcccgggtgtttaatggagaacccggcgcacacgatgccaaactgcgttttgagtcccaggaaatgaaagggattgggacaccccctaacactacccctatcaaaaatggctctccagaaattaagctgaaaatcaccaaaacatacatgaatgggaagcctctctttgaatcttccatttgtggtgacagtgctgctgatgtgtctcagtcagaagaaaatggacaaaaaccagaaaacaaggcgagaaggaacaggaagaggagcataaaatatgactccttgctggagcagggccttgtcgaagcagctcttgtgtctaagatctcaagtccttcagataaaaaggtatttaggagacgttgtgtaaggggtcatgtgaccttgagcagtgagcatggccaccctatgagggcacctgcacgagtactggggcgggcggagaaggtgaggacaggcctggtacttccagccacttgcctgagccctggctttgggttggagggtgggctccaggatgccctggcactgcctcctcagttctcagctggctgctgagccagttgagaggtctagagaggtgagctaagtgttcaagattcaaatggctaaaaagaggcaaagcttgtttcttaacgtggttctgccagtttcagagcccttgcttgacaacgtcaggctacactcttttcatggatctcatctccaaggtgttctttagcctgatgtggtcagtggagacaggctgggctctagagtgtgacttcttaagtctgcaccatctgatgagtgggaagcagagctgtgcagaggtgctcccgctgtccttaccctgtggtccagtg

SEQ ID NO: 13938 - DNA, 1227 bp, Homo sapiens
aacacctgctgtgtgctatgcactgtcctgatcctttagctgagagtgagagagaaattttttttttttttttttttgagatggagtctcgccctgtcgcccaggctggagtgcagtggcgtgatctcggctcactgcaagctccgcctcccgggttcacgccattctcctgcctcagcttcctgagtagctgggattacaggcgcctgccaccacgcccggctaattttttgtatttttagtagagacagggtttcattgtgttagccaggatggtcttgatctcctgaactcgtgatccgcccacgttggcctcccaaagtgctgggactacaggcgtgagccaccgcacctggcctgagagacaaaattttgatgaaacgatgttgaggctatcatctaaaacacagcaagggagcacactccatttttgggggtctgtgtgtatttggacattgtagcctggtgaatccttggtcttctggatacacaggtagtgattggatgtgttagtgtttgtcttctgttgttcattttcagattccagctaagaaagagtcttgtccaaacactggaagagacaaagaccacctgttgaaatacaacgttggtgatttggtgtggtccaaagtgtcgggttacccttggtggccttgcatggtttctgcagatccactccttcacagctataccaaacttaaaggtattgtgttctttgggttgtttttccaactttctcttctgcacttaatctttctcatctccaggcttctttcttactctttctaaatagccctgctatggttcatttttgcagctttacctaaagttagtgattgattcaagtgtgatgtgttgccatttctttttatattcaactcaaatatgtacttcatctgattgaattagtgttaagggacacatgacctttgccttgtataacttctgtttttatgatagtttattatttagttacgatgattgcttgtttcaggatgatttgcagcaagagtgttttatgctaagtttaagttgtaaaaatgtccaagtgaattttattaggcctatgggaagaatggaaaacactggaagtgatcatctttgtcttatgaagcttgggtagataaattgatttttacatggagcggctgatgtaacatattaagaatgtacggccgggcacggtggctcacgcctgtaatcccaacactttgggaggccgaggtg

SEQ ID NO: 13939 - DNA, 1107 bp, Homo sapiens
ttaaaaatcagttaaacagactttaaaaaaaaaaaaagacatgagcaattggacatttgaacgctagctgatgatataagagcattgttacttttaagtgtgggagtagcattgtggttatatgtaagactttatgtttagagatttgtgctaaacttcttatggatgaaatgatatgtctgggatttgcttcagaataatctggcagggggacgtggaaccaggtatggatagagccacgctggccccaggttgatgtttttgggggccaagtagcgaggacatggggttcattgtacagtttgtctgcttttgtttatgttcagatttttccatgatagaaagttaagccagaaggacaaaggaattcagaagattcatctttagaacttcacttatttgaggggtaatttttaagcagtaaaaagatcaagggtttatgatttgaaactttacaaaccaaaattattttacagcaacgaaaaatctgtctgatgcatgtaaaccactgaagaagcgaaatcgggcttccacggcagcatcttcagctcttgggtttagcaaaagttcatctccttctgcatccttaactgagaatgaggtaaaataataataataacgataaccatggcattggtatgaaggccatttagctgcccacgctgcagtgtgagtaatgctcagacttcataagcgcagcattggtgctcactgccagtgcagatgttttagggcctcttggctaactcagattcatgaaatggacaaacagtgcactatgttagtttatttgagcactttttatacacacgcacacagtgtctgtgtacatgtacagatatacttcagtcttgatgcagtttcatagttcttaaaatctgtctgaagaatgttgtgttctgtgtagccctcacactgtaagagttcacatggaagtaagtctgcgttggttctgaaagggcacagtgtcagttgagctgacatatactgggtggggtggaaggcgactcacacaccacacctgattcctgttgcttccagacctaggctcatggaggaagccaaagatttctttgttctcatgcatttcatggctttggtccttta

SEQ ID NO: 13940 - DNA, 1139 bp, Homo sapiens
cctgacctcgtgatccacccgcctcaccctcccaaaatgctgggattacaggcgtaagccactgcacctggcggggtcttgcttattttaaaagaaatattctgattcatattttaggactttttgtcaacgaaattggttttgatccctttgggtaccatttttattgttttatgtagaatgttagaaattaccactaatttacctggcagtgatgtcaaattgactgtaattagcaggtagaaaattatttgtattatattcatctgattcctatactggatgagcaaggagcatgcttcctttgggacattcttacagcagggtgtctctccaacagcccgacaggcctcatctttttggttggatacctttgaactccatggttacgtgttaggtccacatttgtgtttttttctagcctacctatagttgttggcctttttgcatataactctcgggtaatattttgaagcatgctgaccatccaggcatatagtattttcaagaaatgactgaggtaggggtgggggtcctggtccggctgatgggggtttgctcagcactgtgccagtggaagcaggtgtattgtgggcagttttgtcattgtcctcaagtccttcgcagacagtgcacagcctgctgtctgcagtcggccagaccaggctcctccccagcacactccctgtgggatggccgctgctcaggacacagtgggacaaagttgggttgataggatattttagattcattttacctttgacaagggcaggccttgaattgggagcagcagccacctggcctcactctggccacaggtgacacttggtccttgctgccacctgcttggggctatgtggctacggctacacaaaagcctgtgcaggttagaagacgactgtggtgtgcagtggtgctctgggagtggagacttcctctgttctcagagactcacccccagccctgaccctagaatttagggatagccaggaagtttctagtttgtgtaacctagaagggtcactttaataaaaattgttatgaactatagtattttagatgatgagtgacttattttaattccactttaacattttactgtgctgttaacttggaagacctgtttgaaattagtcttg

SEQ ID NO: 13941 - DNA, 1173 bp, Homo sapiens
aaattatgtcagtttatagaaatatttattgttcaaggtctgtaattgtatttcaaaaacgatgtcgtattcaagttgtgaagggatttgttttgtcaaaaaattaaaaactcaatgtgtatgacgccactctgaagagtaggtgagcgctttgcagtcacagaaggtggcatctgactgcggctcatacaggtcaccctgaagggccacgtgcttttagcagttggctggaatgtgttcactaggttccgttatgtttggtaatatcatcttgaaaagtccctgtaatagatcaaggagactgcattccctgccctgaaggaatgtatttctaaggcaaataggcaacttggtactatcttattctgagtagagagtggagaaagtattttcagactgaagaaaactttgaaaagtcaggagctaagctgctcggagctcagtgccgcagcatggctgtggtggacgcgggaaacaacgggaaagttcttgacagagtctgtgtccgctcagtccctgcacttttcctttccaaatgcatctcgttggatatggaatagatcgtagatgttgtagactgagatttgggactatgttgggaccgtacaggtgaatgtgccacctccacaaatggcttctccgagtgagtcacgtcacctggtgcgtggaggtggagcctgcggctggagtaaggcttgctgtgggacgccctcgtactttgctctccttgcgggtggttgccgagccgagagcattggatcctccccgactgtggctagttgtctgtccggtggctgggagggggtgtggtgggaaaaagtcggaatctctgcaatctgtgtcatggactgtactattgtaaggtctatattctgtatgtgggtcccagaccctgatcaggaaatgagcctcatgtgtgtcgttaacatttatatatttccattcaaaatatgtattcagtgtttatttcctcaaaacagactttgttaatgtaggaaatctctccaagtggaaacgtgctaactttttctgtaaatctgaaataaaaggtgctgttccttcctctgacccaggactgctttgtgttttctgtctttctctccatgcattttttttctcatttttaaagctttttaagtttgttccaccacgttaagggaagagcatgggttg

SEQ ID NO: 13942 - DNA, 1118 bp, Homo sapiens
acatacaggaaattatttgtggtgaaaatgacatttgctctcgtgctgatgtacagatcgctgttttaaaactgatgtttataagttaaggctgtaataagtgtagactgtgaagcactgaatctgggctgagccatagcagacaggctaagcctggccgcctcgccctcctcttgcaggggggagccttctgtgctgtgagtcctgcccagcggccttccaccctgactgcctgaacatcgagatgcctgacggcagctggttctgcaatgactgcagggctgggaagaagctgcacttccaggatatcatttgggtgaaacttgggaactacaggtgtgagacatagaatcgtatgcttttatgtcttttctgttcacatgtgttcgctttacagtacttaaagtattgaaattattatcgctgtctctgaggagtctgtgaatcctgtttttaatatttataatagatggtggccggcagaagtttgccatcccaaaaatgttcccccaaatattcagaaaatgaagcacgagattggagaattccctgtgtttttctttgggtctaaagattattactggacgcatcaggcgcgagtgttcccgtacatggagggggaccggggcagccgctaccagggggtcagagggatcggaagagtcttcaaaaacggtacggagatattcagatagagagtgagacagcactctcgtgcattttcttacccctaatttctattttttaaaatttgatctttatagaaaatactggactaagcattcaatctgtttttttaaattaggaaaatgtttgcagtctggtttatttgttgagcatagaataagatacactgataacttttgtaacattggtttgtgattaatttcattaaaattctgtaaacctattattcagaaattatttttaatactaatttacagaaatgttccatggcttgcctttatgtaaaatgcagatctgaaggaagggtcctgttgtctcgaccttgtgcagcaggctcttgggggctcgctttacctttcagtgcatgaggaatcaggggtggtcaagcagacaaggtgcttggcctctgattccccagctggggtgggagg

SEQ ID NO: 13943 - DNA, 1088 bp, Homo sapiens
ctcttgttcatcagcgatgtgcacagacactaagataaaataatgtgagggggcgttgtgttgccctgcctgcctcttgtgctaagaaggcagaggagagctcctctgggatctggggagggctgttctgagtagtgtgtcctagccaggactctgaagctttctaaaaggccacctggaggctgggtaaggagaggcagtggtgggtgtgcaagggtattcggaaggctctcatgtgtggaccaagacagcttactccttccctgcaggtgaataagccttacgggaaagtccagatctacacagcggatatttcagaaatccctaagtgcaactgcaagcccacagatgagaatccttgtggctttgattcggagtgtctgaacaggatgctgatgtttgagtgccacccgcaggtgtgtcccgcgggcgagttctgccagaaccagtgcttcaccaagcgccagtacccagagaccaagatcatcaagacagatggcaaagggtggggcctggtcgccaagagggacatcagaaaggtatgtgtcgttatcccctcccctgcttttgagaaattacggttcactgggtaattaggcctaggtttgcttgtggtggttttgtagtcatgtgagaatggtattttttggaaaaaaaattttttttgtttttgttttgagacagggtctcactctgtcatctaggctggagggcagtggcatgattgtagttcactgcagcctcagaatcctgggctcaagccatcctcccaccttagcttcccaagcagctgggactacaggcgtgtttgaccatgccctaataattttatttttttttggagatggggtcttgctgtgttgcccaggctcatttcgaactcctggccccaaaccatcctcctgcctaggcctcccaaagcaatgggattttaggcaagagcctctgtgcctgacctgaaatatttttttgaattgaattattacaattgaatattttaaaatgttacatgaaaggtatctgctataactcacacattcccttaaaacatgccttatgtcagaattctgatggttatttttatgaaa

SEQ ID NO: 13944 - DNA, 1392 bp, Homo sapiens
gtgacagagcttttacagagtcatgccagaaagatgaatacccaagttgaaaatcagtcccttgggagagggcaggtcacatggaaatcagcacagcagcccctgcctgtccacgccgcgctgggggacactcctgcacccggcacagctcctctcagttgccgaaacataaagagacgctaacaggtggtccttaggggcctggcaggtactgtggagtcaacaggccctgccagggagcccgcccgggctgtggtagacagtttgtctgcccgtcctgttcgctggagccagcactattttgtgttcatttgacctgacagttgtaagtcatcttcaaccacgataatgttgaagtcgtgattccatcacttctgtgtgctcacatcttgtgttctgttgcagggaagtgggaatgtccttggcatcattgtgacgtgtgtggcaaaccttcgacttcattttgccacctctgccccaattcgttctgtaaggagcaccaggacgggacagccttcagctgcaccccggacgggcggtcctactgctgtgagcatgacttaggggcggcatcggtcagaagcaccaagactgagaagccccccccagagccagggaagccgaaggggaagaggcggcggcggaggggctggcggagagtcacagagggcaaatagcgccaggcggccgcttggccggatccaggggcggtgcagggcggccggccctgcctgcgggagagggcgagcatgaactggcccggaggacccagctcgagccgccaggacacagacgtacaggcctcctcgggagggagcgcctccccaccactgagccatcctcagcagcgtccgctgcgtctgcactgatgaccgtctgagcccagctcagcgttcctggacaaacagcctcactcctcagcgttaccgccacacttgaatttctccgaatgtcaaggttccctcccactctatttttttaggttaaagttaattggcatatggaatgttttaatctcctctgaaatgtgtagcgtaggcttttcccaagggtcgctagaaactcgtcttcgcgttgccccctttctggctctcagcgccgtcgccactcgggagaggctgggtgaggcccgtgtgaggactgaccctggattcctcgaaactgccattgtgatcattactctgctctttggaaatggctgtatcatttttttgtactaatgtgaattgttcctcagaaacgcttcttttccatcctagtgagaagctggccctgcaggtggtggcagcaatggtgttgtaagatttcctcccgtagttttttctcctcatggatttgaatgaaatgccaataacacgtccactttcaacgtgtagtttacgcggagcactt

SEQ ID NO: 13945 - DNA, 1175 bp, Homo sapiens
agctcagctgtcacgggtgctgccccaggtcccaggccccaccccctgctgcccaggcacacacccccgcggcaggtgactccaccctgctcctgcgctctgctgtgccgggcacctgcctgctctacgcccctcatccccaggatttcccacccgcaggctttctgcgggagcagtggtggccccggcttctcacccttcaggttttcttgcatctgcgcaccggtggaagagtaggcccagtggactgggtgctgctgggaggtgggaggctgctgggagggcaccggatgccggggccttgcaacctggcagaggctgtgctgctcagggaagcaaggtggccctggggtgaggcggggggctcagaggaaggggagccctcaggaggaagtgttgggggcaactgccagagagcccggccactgcccagtgcccatccggaagctcagcagggagtgggcttggaagtgggcaggggcatggtggcgccggcagcatcctattttgcagatgaagggcgccctaatggagatcatccagctcgccagcctcgactcggacccctgggtgctcatggtcgccgacatcttgaagtcctttccggacacaggctcgcttaacctggagctggaggagcagaatcccaacgttcaggatattttgggagaacttagagaaaagggtatgttgtgctgctttaattcatgttgggtggagggaaatggatctttcttgaaaaatttttttctgaaatgaatttgatttttagacctttacgtttttccgtgtgtcctggtccctagaatattaactgtatatgcaccatcctcccccgtaagctgctgcctggcttttgccatctttgaaaacaaactccaaacagcccacaggccccatcctcactgctgcggtgtcagtgggaggctgtgtcacgccactcgccgtctctctctggtcggctccgtgagggtaggggctctgcccattcaggtggtatctgtagatcctaggttctagggcccagagcattccctggcccagagtacatgctcagaaatgcatgttgaaaatatcaacgatttagttgtttaaatgtgaactgaaagtcacttagaaaatattcacaaggctgggctccgtggctcactcctgtaaccccagcactttgggag

SEQ ID NO: 13946 - DNA, 1205 bp, Homo sapiens
agcccaggctgctgccaacagcgcccagcccacagcttctcccagcctgaaaccaacacattttctaataagttatttagacagaatagcactctgcatgactttaattcttgggacaaaacggtagtttgtaccctaagacacagtttctggcccagtgtgatgggggtgggtggccgggtgggtggagcgttttgctgttggaaacctggagggaaaccctgattggatgtcatttcctgccatggagcacgcctcccagccctggcctgcagtgtgggcagggtggggggcaagggagtccgcagcctccgggaggaggggcagggcgctgccttgggctgggtgggaagaggggtggccgcctcggcttccgctggccatgctcctggtctctccttcctgaggtcacaggcaggggctgccctggacggggggcggggggggtggcctggaaggggagacagaggtggagggtggcacaggctgcacattcagcttagaagtggacctggctttggtggcaggagaagaataaacacttgcccagacccctttgtgtgggggaattggggaggggtcgtggcaggcagggtgggccacggaactgggtcccaggcatcaaggccacgtgcagggccatggagggatgcttctcacgaggcgcttcagaagcgagcgaagggacagagaagccctgcgtccaagggccttttgtcctgttagcaattgaggtgtgcagagcactgtacagaccccactcccctgtacattcctccctggaggtgcccggtccccgcttggggatgggagttttgtagactgtacagaaatcggcaccctattttcttgcagctcagattttgttaatctggaatatacagacagacgtaaagtgttttagcaaaatggaaacaaacagttgtgcctttttcctcttttggtttggtttgggtttggcctggggctggtcccagttggtgcggggcatgctgggggcaggaggggcagggcgggccaggtggagtcaggtcttgggggtgtcatgtcggggtgctgccagcgtcccttggtcctgtgcctttggagcctcgggctcctggggtgcagggtgcttgggggtggctgttggagcccaccgacgccagggcagggcctggaggcccagggactgccagtgtctccttgatattgatcctagcaga

SEQ ID NO: 13947 - DNA, 1213 bp, Homo sapiens
cagaatatcagcaccaagttagtttctatagctgacaaaacatttgaatgatataggaaatccaataattacgtagaagtgctaaaatcaactggccaactaggacctattgaagtaattttaacttaagaaaaactagtaacatatacttggattcagtgaatagtgtcctattaataatgattctgattaaaagaagtataataagatctctattttggtagccgttactatatatatggtagtaatagcagtaaaatttagtaattcatacccttgacttagtccacatttttcccttttaaactgtaatttttgtttatatgaatattaaattagttttcattcattgagcttattatctggtcacctaaagtggaaagtgaaaataatcttaagatgatttcaaatttaggcatacagtttgaaatgtaattgcttttctttgtataggctgtggacaaagaaaatttggatgctaaaatttctagcttgaccagtgagattatgaaacttgaaaaagaggtcactcaaataaaagacagaagtttacctgctgtggtaagagagaatgcccagttattgaatatgccagtggtaaagggagattttgatctgcagattgctaaacaagattattatacagcaagacaagagttagttttaaatcaattaataaaacaaaaggcatcatttgaacttctacagttatcatatgaaattgaattaagaaagcatcgggacatatatcgtcaacttgaaaatttggttcaagaacttagtcaaagtaacatgatgctctacaagcaattagaaatgttaacagatccatcagtttctcaacagataaatccaaggaataccattgatactaaggattattctactcataggtacgtatgcttcattgtttctttagtaaatatttccttttgtttttgcgaaatactagagagagtttgagctaaaattttggaagtttttaacaattctttgcatttcacttttggcctttctattttttttccattttcatatgccttttttttttcatttttagtttttttgctgccttttccatttatgttagatctgaaaatagctactttatagcttaagtggatgagttggaggaatgaatgggtttattcccctttaggcatcattatttatataccttattttagatttggggcaggaagtttgaatacag

SEQ ID NO: 13948 - DNA, 1137 bp, Homo sapiens
tgcagagtggcaccggcggcgacagtggcttcgggccccactgccggcggctgggccgccccgccctctcgtaggcccgtgccctctgctccttggcctgcctgcccgccagccacgcgtgtcagccctccagttctccttcagttgacgccagcctctccacaggcccactgctgtgccattctggaagctccagctgctgctgggctgcctggcactgcccgcttgccggtcagggcctgccgagctgcctgccccttccagctgggcagagtcccctgcaaggaggcagggcccagcttccacatccggagccctggtcagcatagccgcccacggtctgttctcagattcctaatcattccagaagtattaaacgtcattgctgcaaacctcggcaggtgccgtgtgaggggcttaatgaccaccacagggagctcagaccccaaccctggatcccaggagaaaggagtggaccgaggaaggaaggaaggcaaggctgtctgtccatccgtccgtctgtccacctacctgtcagtccacataggctcctggcgtggacaaggggtctgtgaagggcgggaactgggtgagcacctggggcaggtgggtggttaaggtccttcccacttcgcaggtgtcagaacctagggctgggctctcggggccaggcaggccagcccagcccacgccgagctgggcagcgtctgctctggtaggactgtcagacgcacacgcgcacgcacctagacacacccactcatgtacatgctcacacatgcagacacacctgggcgtcccgaggtcacatgttctggggatgatggccttcaggggtcatctggcaaacagcccctgggctgtgcctggatccccctctagctcctgctcacccacgcccacccagtagtcctgcctgtctgcacaggagaggggcttctcttcctggctggggctggggtgaactggaggctggttaagttgcagccgctgggtcctcgggggcttactcatctcccttttttaaacaaaaagcaaaaaagtaaaatgctgcactgcccagcagcccggttagggctcctggagccaccttaggaaagggcttctcatgagctctgctgcggcagcttcagctgg

SEQ ID NO: 13949 - DNA, 1137 bp, Homo sapiens; identical to SEQ ID NO: 13948

SEQ ID NO: 13950 - DNA, 1787 bp, Homo sapiens
agcttccgggtgcaaatgcgtcctccttttttgtgccccatcctggctctaactgaaagctgctagtgtttactggggtccctcataaccctcttgggctgtcacactgttgagatgccatggcccctgcctcctgctctccagctgagagagaccacagcagacacagttagctctccagacccctccctgttgtagcctggcccttgctttcctttaattagtcatcttaggcataggtgggtgggattctctggccccatggctgctctgggacaagggcaaactcggaggctcttctttttaatgccttctagatcgtgcagaatggacgtctcatcgtttccacagaatgcggccatgtcttctgtagccagtgcctccgtgattccctgaagaatgctaatacttgcccaacttgtaggaaaaagatcaaccacaaacggtaccaccccatttatatatgaagtattcagagccccccaggagagacggatggacagacagacagccaggttctccagtggtatctgcctccattttcctgagatcaaaaagactgtttcgaaaccaacatctgatatgtaaactgctcttttgtttccaaccccttccttttgttatctccagtttgatgctatggcgctggacccagggccctcccaggccatctctgttcctctggggtggtccagttctagagtgggagaaagggagtcaggcgcattgggaatcgtggttccagtctggttgcagaatctgcacatttgccaagaaattttccctgtttggaaagtttgccccagctttcccgggcacaccaccttttgtcccaagtgtctgccggtcgaccaatctgcctgccacacattgaccaagccagacccggttcacccagctcgaggatcccaggttgaagagtggccccttgaggccctggaaagaccaatcactggacttcttcccttgagagtcagaggtcacccgtgattctgcctgcaccttatcattgatctgcagtgatttctgcaaatcaagagaaactctgcagggcactcccctgtttcctaagaacgaaaaagtgcaataaaggccattcgttacctacttttcagcagcccacaagatgtagcactattagtgtccccctcagaggcttaatgttgcctgtggagcagtgcccatcccagcccgtttctgcccaccagttgttctcaggaaccttacccatgctccagcgtccttcacctggcacaggacatgcaagataaatagggcaggcacgtgtttgggtgtcctctcttttctgataaaatccatcccgtgtttgccacacgccctccagtcctcagttcccactgcctaacgtctgcccccgtgtagatactgagaggtggtggcagtaattgtggccttatcagccgctcagttccaggcttttgcccaggtcactgttgccccatgttcggagaacctggcccacctgtcttggctttctcatccttcccaacccagtgccgtttatttcagaagcttcctggccactgggcttggatgcttcgggcttctgactgctccataggttttgactggtgaaacaggggcccagatgacaacctctccttcgctccacaggtacgcgggagcctcaggttctctcaggggcagcaaagtggcccaagctgcccctgacagcacagggcctggggggtggctaacgagagaggccttacagtgccggcatgcctcctcttccactgtcgtccttcctcagagggcctcacgcc

SEQ ID NO: 13951 - DNA, 1195 bp, Homo sapiens
gcagacacacttaagccagaattgccatcttgaatctgagccctggtgtgcagatgcctctagaatagtagtttcagacttcgttggtggtaaccagttctggtaaacagtctgaaaattgaggctgacagtttctagcatgtggtggaaaagtaatacagaagtcaaggtgaaggggttaattttgacaattttctaactcgtactaagataagattttctttatggcactatttaaagtattacgagtttctagaacattaggtttagttttattcaatacatttcctattttatgtttctgtatataaacatacacatgcattttagttttagaactatacatatattttaatattcttggctttgtagatgaggttttgaaaatagaattttttttttctattccagactccttttagttttggcatgaatcataggacaccaccctaccctgctggggattattgtcttctgtgcagaagtgaacggaaagactcatcattcttagagagtggaattaagactgcgagcaaattggccctttccatggctcccaagggcaacagcgtgctgcacctgccactgtgggtgtgcccggactgccgcaggaccgtggagaaggaggagaggcatggcggccttgaccagccagtggtgagtggctgccagcacaggcagcgcagggcgttggctccccccgcccaggttatggggtaactggcagtgaaagaaatggatttgcttttgcttcagggggcactccctcctgcaccaccttctagtctgtgtctcctggtacgttcctcctggtcttccctggccacactgcagtaggtggcaggacacctgccctccttgtctgggcacaattcagtcatcaagctatgtgaccctgaagggtgatttttggctttgagcttagtatttctttggtggtacagtttcttgaaaagggagtacaattttcatgtgtttagttctcaacaattcgacatgcaggtaattctttacgcgatgctcttaagcctcaccttcccttttacttatttgtgctgcttcagcctcttcgaggccacagcaggcttggctgggaagaccgcacccttactcttatctttgacctgatggagttttggtgggcccttgttccgggcaggctttcacatgtactgtttgggttctggaaggagtt

SEQ ID NO: 13952 - DNA, 1197 bp, Homo sapiens
acagctctcagattaaacgtttcttttctttctcaggactccttccgcccacccattcctcctcccgagtcctttccccttctcaagtgcagcctgtagcagggcctggaggggacccttgacactgtgcccctcaccgagaatctaaacccctgaccccgcagtgagtttctggcaagaacaggagtgtgatgggctttgccaagcaccagcttggttgtgggctgtttccttcagtgactgtttggctttttgtctttgcaggttctgcttggattctgctagacagacccgacaaagactgtctatcaactggtccaattttagcttgaaaaaagccacctttgctgcccactgaatgaggactccctggagagggacacgcgagaggcaggccaggctgcaccaccccaagagccacgcccctcgctggcgccccagagccgtggtgcttgccaagggctgtgcggagctggtgctgcctgaaaccccagaccgagaagttgatgctcggcccacgccgttagctcgtgtgcgtgtagtctgtgcgtgagactccttcgattgtagctctgtgctgtcggattggaacagtagttcccgccaagtcctcccaccaccgcggcctcggaggcctgggccgtggccagataggagtttgcatcatccacgtggctccgttgcctctgcattgcgccctgtcctgtcatgtgtcctcaccggggtatcggccgtcactcagctctcctgtgcccctgcgtctcaccctaggcgggctgggcggggcaggcctcctttgttctccacaatctactgtctccgagtgtacacgttgcgctgtttgtgtttgatccccctgacttgtagccagcttgtgtaagatcccttgcagaacgagaaagttaaaaacaagcccacccagtactcacaccatcaagtctgttatagagtgtacgactgtattaacacggaggcctgcctggctacttttttaacatattgttaagtaatattaaaatcatgtctttctttttgaaagatggaatacattagtacagcaggagacctcggctgcttctttctgctgggggagtggggggatagcgggagagggcgtgtaggtgatgtgtccgccatggggagccagggcaccaccccggagcaggtcccaggtctctccaggcaacggctcaccca

SEQ ID NO: 13953 - DNA, 1208 bp, Homo sapiens
cggaggcagggtgttctggtctgattttgagtcactgtgtcatttccctctggggatttgaaaggagccacacacagtgttgagcctgaggcgggggtggggccagtggcagggtaggccctcatcacagtctctaaataagtgtcacttctcagccctgaactcagctgagtcacccggggcttcccggtgtaggctgtgttaggacgtgcacttcctttgtcatttgaggggaattctcaaaaattatgtcactgagatacagtcagaattgtagggtacacacgagtttcaggagacttttcattcagctctgtagttgttagtgggggttggtttgggttgtggcttcggtgactcctgaccctgcgtggggcagaggttagattcctgtgtccagaatcacctggttgaacccgattgtctgcagacaggacagtgtcatgggctccaaaggaggtaagcagggtgcatggccaggcccaccctgggcagctgggggccccctcactggagatcctctggtttacaatgggattcagcttcctgccttccctgctgtctgtgataatggcaaatctctggcaatgagaagactttatcatgtctggtgtgccaatccctgcagacattatggctttagaatatttacattccaaatatttaaaagacaaacagctcaaactggtaggtgggacgggataaggacagtgtgaaaggtggtgtggcctgaagacctcccatccgggctctggcctgggccaggtggggtgggcctgggcagggagaaggtggtcccttgtccctgctttgcttctctaccaaatgaatgatcactacccgctgcactgggggacgcagtgataatctgtggcctcagcctctgggtctagctttctcccctcttgctgtatgtgacagagtgtcttctctctgtcccttcctcatgcagtcggaacacacagatgggcacacctctgtccagagtgttattgagaagttgcaggaagaaaatcgactgttaaaacagaaggtgactcacgtgagtgtctttcacatttcgtttgagaagaacacatggcttacaaactgtaagtgagggttctttccttggctgatgcccagagtcgccccccgccctctggccactaggacttgatacacacagtccctagagactggacttttttgcttaaaacgacgtacgg

SEQ ID NO: 13954 - DNA, 1235 bp, Homo sapiens
ataaaagacagcaatcgcacttgctgtaagaacaccaacactgatgcttttagaacaaaaggtttatcatcaagtggtggcaccattcttaccagattatcgagcatccgcatgagggcttcaaattcctgctcaccaatctgccacttgggaggcgatccagtgccttcccctaccggagaccctggggaacgggacttggctttgtacttctcaggattcagcaggactaagttgtctggtcctcctgcactggccagagttcgaaccttttccaaaacacacacagcatggcttgagttccttactgagatcaagagggtcagatgacttgaataaaaatgtaggtttcaaaagaaaccaaatctctagagtgtaagaataaaaaatgtagaatggatagtgacagactgatcacaaagttactttcagaagtatttctttagcatgacaaaaatattgggcaccaaagttggcagagaaatgagaaaacacagcacctttcaggatcctacaaaggacttgggacttcactacgccacagacataagtcaagaagcagaggggagaacgtgaactaacggctgacggagcggaggggaactcacagctgtaagctgcaggcaagtctctgagtctctacttctgtatacctgctttttcaaagagtactgtgggggtcacgtgacatcacatatgcgatgacacacactaagcacctgatgccaggcctatacacaccagtactccataaatggtagtgactgacatatttgaaaatttaaaaattagaaatgaaaagcccagtaatcctttgccaacttcaatcagtgaaacagcatttgtcctgatcaagtcccaaatccatgagcttatctttggcaaagagattgctcaaagactcctctcctactcgataagtatcaaaaaaaaatctatgtgaaccccagacacatctaaataaactgcagagtgactggaatggctgtcccctacctggatctcacaggcaaccacaaggttatggatgtaatagaaggcctcctcaacgctctctccaactgacacgagcccatggttccggagaataagaacctgaggggaagcatgaatgctctgtggagctgggcaggaagactggtcctttgctttattcttctttctgctgtaatttaaataccagattagatgcctactgaccttgcttttaggccccagatttttctgaatcaaaa

SEQ ID NO: 13955 - DNA, 1240 bp, Homo sapiens
ctgatgaaccttcagaagcactcggcttcccaatgttagagaaggaggaggaagcccatagacccccaagccccactgaggcccctactgaggccagccccgagccagccccagacccagccccggtggctgaagaggctgccccctcagctgtcgaggagggggccgccgcggaccctggcagcgatgggtctccaggcaagtccccgtccaaaaagaagaagaagttccgtaccccgtcctttctgaagaagagcaagaagaagagtgactcctgaaagccctgcgctaacactgtcctgtccggagcgaccctggctctgccagcgtccccggccacgtctgtgctctgtccttgtgtaatggaatgcaaaaaagccaagccctccgcctagaggtcccctcacgtgaccagccccgtgtagccccgggctgacccagtgtgtgctcagcagccccaccccaccctgccccttgtcctctcagagcctcagcttctgggggagacatgctctccccacaggggggaggcactaagtcatggtcctggctggaaggtactgaaggcttctgcagctttggctgcacgtcaccctcctgagcctcacctttcctgccgtccctcctgttgtgaaatcaccacattctgtctctgcttggcttcccctccaccctaaagtctcaggtgacggactcagactcctggcttcatgtggcattctctctgctcagtgatctcacttaaatctatatacaaagccttggtcccgtgaaaacactcgtgtgcccaccagcggccttgaagaggcaggtctgggccagatgctgggcaggaaaccccagcggcagatgggcctgtgtgcacccaacgtgatgctatgcatgtctgaccgacgatccctcgaccagaatcagattcaggagctcagtttctttttcacttgggtctctggattcctgtcatagggaaggtatatcaggaggggaagaggcctttctagaattttctttgagcaggtttacaatttagcttacatttttcgactgtgaacgtgaataggctgctttttgctttcttctttccagaccccacagtagagcacttttcacttatttgggggaggcttcaggggactgttctcaccttaactcagccagaaagatgccctagttgtgatcaaaggtaactcgaggtggagggtagccctggggcccctcgacatcaccgtcattgatggag

SEQ ID NO: 13956 - DNA, 1218 bp, Homo sapiens
atgcagtttggctttagtgatgttaacacatgattcaaacgtgaaattgattgagtattggtgaaatacagaggagatttaaagccagaagacctgggtttaaatgctggctgtatgacttcatatctgtgtgatcttgggcatgtcatggttggcacttcaatttcttctctctataatgggggaagtgaggccagtcatggtggctcatacctataatcccagtgctttgggaggccaagatgggaagatcgcttgaggccaggagtttgagcaattgggcaacatcgtgaggccccgtctctacaaaatattttgaaaaaattagccaggcccagtggtgcgtgcctgtggtccgcgccactcaggaggctgagacgggaggatcctttcagcctaggagtttaaggctaaagtgagccatgattgtgctatcgtactccagcctgggcagcagagcaagatcctgactctaaaaaaaagtaaaataaagtaaaatgggggaaatgaactgctttagtaacatcatctgttttttctgtgagcagcgtagcttgacagccattggtgaactcgtgccctgtgcttccctgtccagatccccattctgcccgcaacatggagtataacggtttattcatagtagtcgagaaacactcactgaatgaatgaatgaggtgtagaactaagtggagtgggtaattcaacacatattaatttccttcttttttttatttttagaaagaaagaactttcagctaccaagaaagaccgtgtgaatcattgtctgacaatatgtgaaaacatagtggcacagtctgtcaggtaattgcactttgaactgtctagagaaaataagaactttgtatattttcagtcttaatgggctagaatattctttgtgtcccagctattttaaatggattcagaaatccatttaagatgaagaaggacccttttcccatatttctggctatatacaaggatatccagacactgaaatgaataatgttccctttttgtaatcttttatgcaaaaattaaaaccattatggtaattgaacaacatgtttatgtttagttaacacccttagcaactatagttattttaaaaccatctatggtttgatatttttgcatttgttgcaatagtaggaacagcacaagacagttcagtttgtctctcttatttgctttttcttggcagtttgctgtcct

SEQ ID NO: 13957 - DNA, 1194 bp, Homo sapiens
ctcctttggattgtcctagaggcccatgagaaagtattccctaatttcttaggagaacagtttgtgggtagtatgcggtcatgtccagttaaattgcagatatttccgatcgaagatgttccagtcctgagaacttcgtgacattagcaggacttctacaagccatctcttagggtggggcatttactgcagttggctagtactcttttctccttaactttgtcatttgttgatttttttttaactgtccccaaatactgtgggcagagtgtatctagaattgaggcctccaccattgcggagaggacatggatgctgagcagtcccctgagtgaaggttataaagaagcaaatagactacacatgtctgtaaactgctcttgagtgtcccaaatttggggtacttcagttcagctgtaggaaaagcctcaaactgtttatactttgcaagaattggaaacttctaattcacgttaagttttatgtaatacatgataagcttcataggagcttcatcttttatctacttggacttttgcttccgtaggttttgttaaaggccttcatagcgaacctgaagtcaagctcccccaccattcggcggacagcggctggatcagcagtgagcatctgccagcactcaagaaggacacaatatttctatagttggctactaaatgtgctcttaggtaaggtggaggcatatgagtggaagagtctccagcatgtactcaagatagacctttgaaataaataaaaccagatgatccctcagcttctagaccaggctatttggcactggttgattgaatgtgaactgcactggggctgctgtgagcccgcatgggtctctgtgaccctgcagatgcagccgtgcccagggactgggcagtgggtgtgggctggtgtgagccctgtctgccacccagggcctggccctctgtctgtgtcggccatgactatggtgagtcttgtaggcttgagactgtgcctcgggttcctgcgggttctctgtaggtcagttgacagtttctcctgttgtttgggtaactgtggaaacgaacactggcaagtgctgaagcgagcatgtggacgtgcgatatgaaataacgacctggctttcaaaggcagtgaggctctctggaaaggaccttgctgagctagggatgtgggtgtgtagccattcccagtggg

SEQ ID NO: 13958 - DNA, 1117 bp, Homo sapiens
cgtggccttactcacagcctccacattagagagaatctgactgaagtcttactgctgcctcgtgtgaacataaatgtttgccagaaccatgagcaggaaatgttaatctgccttgtttcctgtcctttacacggaagaatttttttctgtatggaatgcgtgccttacaaataatgagtggaaatacccatcgctaatgaaaagttatacttgactgttagtcagctaaataatctgagatttctaatacttttaatttggcttttacaatgcaatttatcttagcttttttgatttcttaggtcatatctttagaactatatatttgaatgttaatgtaattttcatattgaaattaaaatgttgaactgcgatgttaagtgtttcctgtggaaaaacgttcacattttctctagttttaaagttgaatcaagctgtttgaagattttcacatttcttctagattttatcagcttgttactttatctgtcactttctgtgatttgcagctggagggggttcctcatgcagccctgtcctttcaagaaaacaaaaaggtgattatttcagaaatcagagtcttgtgttgaatcttactgattttcttgtatttctgtaatgtaatgtatcttgtatttcttgtaatactgtattggactctgtgtatatctcttctcagatgagtgattatatgtgtgaatgttgctggaatctgataaccaggcctgaatagttttgtagggtggcttttaaaaattactttcatatcagaattgctttgtcataaattttgaacgcatcataaatttctaatgttcggggtcagcagactttttttgtaaagggacagagtgtaaacatcttagctttatgggccatatggtctcttttgcaacattcagctctgccctgtgacaggaatgcagttgtaaagacatgagctactggccagctatgttccagtagaactttacttacagaaacagacaggctgtagtttgccaatacctgccttagggaatgtgttgttatattttgtgagttaccttctcagtaaattttatttagtattagtcaggaatattattaagtagcttcttttccagcctggtcaaca

SEQ ID NO: 13959 - DNA, 1160 bp, Homo sapiens
cgggagataaactattattactttttgaccctagacttagtcttcagtccagatgagggagattaaaagattataaatatcttgtgccagatgaggtgattttattttgaaatgaccatgaattcctatcagttgtcttactgggatatttgatagtggaatttgtgcatttgagtcttagatgatctgttttacatttattaagaaagcctttattagcttttatactgtgtattgcctgttgcagtgtttgagtataaatgaaatttctggaaaatattaatggagtacaaactgtgatacttaaaagtaaactagggcctgcatttgtatcatgacctgtttgagtattgatgagaagatagctgtgaagaaaaaggtttaaacaagtgtattttcctttaagaagccactaatagtgcatctccttagagtgtatatttctagaatcctagtgtgcagagtttagactaagactaaaaaaaaaaaaaaacaaattatactgtaatttcatttttatttgtattttagacaccaaaggctctattccctgctggacaggtttcgtctctccaccatgcaagactcacttagtccctctcctccagtctcttcccacccgctggacggggatgggcacgtgtcactggaaacagtgagtccggacaaagtaagtgtccagcgtgtctgcatgggaggcacagggcgctgagtgcctctgtcacctgtggcagatacagagagtgcagaggaggtgccgtggacccaaggagttctggcgctcggctcggctcagtgaagctgtggttagagacgtggggggccatcaaggtctgagggagccaagcagtgctgatgtgggacccttttggtaggagtgtggggtgagtagttagtgggtgaatcaaggaatagtcggccgtggcctgcaggcccctgactgcacaggccttcaagcacatgtcaatgccgttagcctccctccatctcctcataccttctggccacctgtgagttgcactgccactgccagccattctggtatgttgtcagcacctccactgctcatacctcatggttagggaccacctggagccttggtagagccttggtagagccttggtactctactttcctggacaaagttcagcttatgaata

SEQ ID NO: 13960 - DNA, 1056 bp, Homo sapiens
catatagacacatctataattttacacacacacctctcaagacggagatgcatggcctctaagagtgcccgtgtcggttcttcctggaagttgactttccttagacccgccaggtcaagttagccgcgtgacggacatccaggcgtgggacgtggtcagggcagggctcattcattgcccactaggatcccactggcgaagatggtctccatatcagctctctgcagaagggaggaagactttatcatgttcctaaaaatctgtggcaagcacccatcgtattatccaaattttgttgcaaatgtgattaatttggttgtcaagttttgggggtgggctgtggggagattgcttttgttttcctgctggtaatatcgggaaagattttaatgaaaccagggtagaattgtttggcaatgcactgaagcgtgtttctttcccaaaatgtgcctcccttccgctgcgggcccagctgagtctatgtaggtgatgtttccagctgccaagtgctctttgttactgtccaccctcatttctgccagcgcatgtgtcctttcaaggggaaaatgtgaagctgaaccccctccagacacccagaatgtagcatctgagaaggccctgtgccctaaaggacacccctcgcccccatcttcatggagggggtcatttcagagccctcggagccaatgaacagctcctcctcttggagctgagatgagccccacgtggagctcgggacggatagtagacagcaataactcggtgtgtggccgcctggcaggtggaacttcctcccgttgcggggtggagtgaggttagttctgtgtgtctggtgggtggagtcaggcttctcttgctacctgtgagcatccttcccagcagacatcctcatcgggctttgtccctcccccgcttcctccctctgcggggaggacccgggaccacagctgctggccagggtagacttggagctgtcctccagaggggtcacgtgtaggagtgagaagaaggaagatcttgagagctgctgagggaccttggagagctcaggatggc

SEQ ID NO: 13961 - DNA, 1161 bp, Homo sapiens
gtccaggagagcagcgacagcccgtccaccagcccgggctcagcctccagcccccctggacctcctgggacgaccccccccgggcagaagtctcccagcgggcccttctgcactccccagtcccccgtctccctcgcgcaggagggcaccgcccagatctggaagaggcagtctcaggaagtggaggccgggggcatccagacggtggaggatgagcacgtggccgagctgaccctgatgggggagggggacatcagcagccccaacagcaccttgctgccgccgccctccaccccccaggaagtgccaggaccttccagaccaggtacctccaggttctgatccctccaccttggccccgtaagcgtggtctgctcagcttccagtcagaaaggacagtgggcccccggctgccactgtttgctggtggtctccgtgaccccctcctcacctgctggttgggggcttccttggccctcttggaaaggaggggctcgtgtggccccaggccagtgtctgtcaggatggtccccccgaggcgctctgggcaggcatcctggtgtcctgagaggctcttgcaggaatgatacgtggcagtgcctgcagcgaggtctgggaacaccctgggtgaggcctgggggtttccgaaaatggaggcattcctttccaaatctggacagcgatcgtttttagtgtttctgtctcaagactggaaaacaatagcatttgtcttgagtgaggaagtgaagcccgctgtgttcatagcaggagagggctcccagacacaggcccgtcctcggaagagccttgagagtgcagctcggacccaccggcggcccccgtagcaggtggtgtgggtgctcgggagtggaggtgacgtcagcagcgctctctgaccgcgggtgtcacgggcatttctcaaaggaagcaggggattcagtgagtgtgaaggtgaacaggatggcctggcagcagggatgtttccgtgagccacaaataccagaaactgaggcgaggctcccagcagccggtagggaaaggtgtttccaggggtccgagggccgtggcctgcgtggccatcccctggagagaggagccgctcagggtgcgcgtcatggagtgtgctcaggggtgcgtggacacctctgctgtggtttgctg

SEQ ID NO: 13962 - DNA, 1210 bp, Homo sapiens
tgacagagcgagaccctttcagtaagtaaataaataacaccatgggcctatcacagagaccctgagctttccacttcagcatgaactgctcctggctggtggctcttagcgttctttggtgggattttctagttagtactgagctgcttttgtgatttgagcatttctggatgggtgtggaattggaaagtcagatgtgcagggcttgcgccttttccttttggatcgcgcgtctcctgacatgaggctgagctcacagagctggcctcgaggcgcgctgtccccagctgatgagacgtttctgtccacaggtgaagaagcatctgcaggacctgtccggcaggatctccagagctcggcacaacgaactctgaaggcattggggagcccagcccggcagggaagaggccagcgtgaaggacctgggctcttggccgtggcatttccgtggacagcccgccgtcagggtggctggggctggcacgggtgtcgaggcaggaaggattgtttctggtgactgcagccgctgccgtcgcgacacagggcttggtggtggtagcatttgggtctgagatcggcccagctctgactgaaggggcttggcttccactcagcatcagcgtggcagtcaccaccccagtgaggacctcgatgtccagctgctgtcaggtctgatagtcctctgctaaaacaacacgatttacataaaaaatcttacacatctgccaccggaaataccatgcacagagtccttaaaaaatagagtgcagtatttaaaccacccgcttgttggctggtcactaagtgtcctggtggctggggccggagccagtgctcttgaagggatcgcgtcatagccagcttcccctctgggccctgtgggtctttgcagccaacctccttttcccgtgagacggcccggcctgatttaaagccaagagcgcttgagttgagtttgaggggaagatgtggagcgtgtggttctgtggacagtcagagactgtggcctgggggcagcgtctttcaactctcacctctgcagctcagggacctcgggagacctcaccaaacctgcagggcctccgtgtccctaagtgtgctgtgtaaatgccccatctcatgggggagagacagccacggaggccttcctctgaccatagctgatggactggcggttgctcaggtccggctccgagaatgttcctgtgtc

SEQ ID NO: 13963 - DNA, 1243 bp, Homo sapiens
cctgtggtgccacaagcggctttgggcccggaggaatcctacacatctcagaacacttcctcacctgaccctgtcacccatctccccttctcgtgttctcagccccttctttgactcttgaattttgagtttttacagatgtttgggagctcttactctgacatgaagttataattggtaatggagactcagacaatgttgtagattacagagtgaactatgctttttagtgttaaatgcaatagcttgagatacaatgttttacttggtacataaatgctggttttctttcagatttaaggacatacacttttttttttttttttttttaagagacagggtcttctatgttgcccaggctgtctttgaactcctgggatcaagtgatcctcctgcctcagccttcgaagtagttgggactacaggcccacgccaccgtgcctggctggacatgtaaatttgaagtgaatggttaaacatccagctagctgaaagcatggcagaccctaacagaaaagctacagtgtgtttttgcagctatgaagtgaatggtttcctggggaaaattgtgactttgtataactgttgttgaaaccagaataaattatatttcacttgcatatgcataaattattaaaattttcagaagtcagtgatacagaagtactattttgcaatgttaatctgtttgagtctttggagaaagtggtttcattgtaggtacatagtgcactgttaatattttaaacaagtagttcactcttccatttaagggatagcagttccttgtataaaatgactggatgtgtataaaggaattatgttgtcatgtgcctttaaccagctttagtaattactataatctcatatttatgatagttttgttaggtgacaggaccaaatgaaaatattttatgttttctcatcactttagattttatcattatgtacattactgggtttttagcatttcctaatgtgaagttttaatcacttttaagtatacatttttttctgtatcatttaaataaaatatttttataactttcttgtgagttttgttcatgcgaactttggaataacttctggtttttagctattagcactttgaattaactgtagcaataacaagggctaactctgttcttcaaagaccttataaagacagtatttgcactttcaaatgccaatatgtctacattaaatctaagcagcataagcattgtgacagaatgtatctcat

SEQ ID NO: 13964 - DNA, 1269 bp, Homo sapiens
aagctaaggaaaaaggtatggcatatgaacaaacccacgtgtctaacagctggggagaacttatttctaaatgtacaattgtttgtttttttcttttttcacctaaaacactgaaaatctgtgtgtgtgtctcagtgattttcaagctgctccaaagccccacacagcctcagccagggtggtgcctagattttgggcttgtttataagactttgaagagaggctccatttatttaatttttattgtttggaaattattttctagatatttgctctcttttgcctatcccagagcagtggtttcttctcctttatttcactttgtttctcaggatgactcacacatggccaaacccctgcacgtggctgccgcctgggttttccaaggagagcacgccggtgtcgcttgctcctgggtttcttttattttttcctgttgttctatttctgggttaaagacagaacattttaagataattttccaggtcaaatacactcatttgatgtttttctttgtgaaggttttagctcagtactacacagtgacagatgagcatcacagatccgaagaggaactcctggtcatctttaacaagaaaatcagcaagaaccctacctttaagttattaaaggacaaagtcaagcttgtgaaatgaacatttgtgtatttaaaaattgaatccattctgctgacttcttcctttcactgctgtttataaaatgtgtaatgaattctaacaactcaaattttgctttttgaagctgtatttttaagttaagaaaatatatttttggtataacttttatgagaaaaataaaatatattctggtccaaacttctaaatttgttgtggcaaaaattactgaactttacaaaatagttttgtgtgaaaaaatttttttcaatgtagtgcagcaacaagtaaaaaagtaattcctcttttgatcagactaaaaagtattcattttaaccacatcatttctacactttgttgttattgttgtttgagaaagggtctctgtcgcccagcctggagtgcagtggcacaatctcagctcactgcaacctccatctcccaggttcaagcaattctgcctcagcctcctgagtagctgggattacaggcatccgccaccacacctggctaatttttatatttttagtagagccagggtttcaccatgttggccaggctagtcccaaactgacctcaagtgatccgcctgcctcggccacccaaagttctgggattacaggcatgagccact

SEQ ID NO: 13965 - DNA, 1148 bp, Homo sapiens
actttaatttctttcagcagtgttttttggttttcagtaaacaagtcttttgcctcttcagttaagtttattcctgattattctttttgatgctgttgcaaatggaattgttttcttaatttctctttctggttgttatataaaatgcaacttgatttttgaatgtggattttgtatcctgcaactttgctggatttgtttattctaacaatttttgtgtggactctttaggacttttgacatataagaccacatcatctgtgaacagagataattttacttcatcctttgcagttaggatgccttttattttgttttcttgcctaactgctctggctaggactccagtactatgttaatagaagttaacctatatatttttaagcatagacataaatacagaatctgggcttaaaacgtgaacgctttagccatggcaaggactttttcaattggctttcatgaaactcatgttggttgtttattaatagtttttcttttttcttccctttttgtagaaaattagtgaattaataaagagacccaatgtcagccccaaagtgagagaacttttagagcaaattagtgcttttgacaacgttcccaggaaaaaggcaaaatttcaggtatgaattgactttcttgaatggagggggccgtgtggcccatcagtgactgagcttgtgtgtacctgtccaagtgggatcaatagttctttttctttttctttcttacagaattggatgaagaacagtttaaaagttcataatgaatccattctggaccaggtgtggaatatcttttctgaagcttccaacagcgtaagtcagatctgattttagatttgcattgtggcaaaaataattagtaataatgaaatgggaatttcttatttttggaagtcaaggcagccttcttttttatttttatttttttgagatggagtcttactctgttgcccaggctgcagtgcagtggtgcgatcgtggctcactgcaacttctgcctctgggttcaagcaattctcgtgtctcagcctcccaagtagctgggactgtaggcacgagccatcatgcccagctaattttttgtattttttttttttagcagagacagagtttcaccatgttaagcaggctggtctcgaa

SEQ ID NO: 13966 - DNA, 1153 bp, Homo sapiens
tggtggttcgtaagcggcagcaagatgctgagagtagatgctgtgtctatggtcttagatgtgaattttacagtacaattgcctagacatgcaaagatctatttacatttttaagtgttaactcttggaaatattattcttagcaaacagaaactacttaattggatgctacattcaaaaagaggagattctttaaattcagcagaaaacactttggggaaaggttgatgaatggtttttcccagtgacaccaatactgagcgagcccgggcacttatttggagatttcacaaaaggaacaaagaggaaggagaccctgtgtgagcgcgcacaccctcctgcacctagcgccagcctggcaggggcaggcagaaagggcgagaacaattcagccctggggaggggccatctgaccaaggagaacgctcccccgcctcggtggggcaagtcgggctgaactgccacacccgggaaggtacaggggcagcctcgcccgcccctaggctcacccccgatccagagcccctggggccacggggcaagggaggagcagggcagctgcggggccagggccctctcggatgaggctcccaggaaaaacgcgaaggaatcttgccccaccgcgttccactgtcaggacgagaatatcatctaaggcagggctcccctcccccgcccagcatcccgcgatccagaatcccgcgcgggtacactgtcctcgccgcgctccctccggcctcccgagcccgcccccacttcgcgtacccagcgcacgcggcgcgtttcttttgttgcgcccgccgtgcgagatttgggggtgcacacccggcaacgtggaggggcgtgggggggcttaccttatccgggggcgggaactgcagctgattgacatcgaggggcgtcatcaggggaatggtgtcgaagccatcctccagcagcggctgcttggtgcccttctctgcgaaattgttccccaacttcaccatcgttccgggagctccgaggctgcagcctgcggcgggagggccggggggagtcaccacaagcaagacccggggcggggcgggggggaagtgggcacccacacccaccggcgtcccggcgtccgcgagctccccggccccgcttcgtctcggggagggctcgtggggac

SEQ ID NO: 13967 - DNA, 1228 bp, Homo sapiens
gggtctccggccatagggagggcagctcacccggcagccccgtgcagctgaacggtatttttgctgggagagtggtgctgggccctctgcctgtgtctgcactgaactccctttccctaatgcttgctctgccacccctccggggactgcctgcggcttctcctcctcgtaaggatcgccatttcccttcatggaggctcagggaggtgacatccttgctgtagtgcagagctgggtcacaaaaccagctcccagacaggcatctcagggctccgtcatctcttcatgtgggtgaccctgaggggagggaagtggggagcccgtgggtccctccagtgctggaggtcttgcagggagagaagcacacatgcatctagtcacgctggtagaaggtggggagccaggcacggggcagaggggggctccaggcccagaagagggagggctcacagggaccgcgagcatggggagggccacctggagaaggggggagggaggaccactaggatggggctggtgatgggaaaacgcaagggtgcgggttccttttgcccagaggcagggtggtcagagggaggcgtgagatgggagcagtgggggtcctgtcccagcctcgttcccacgtaccatctttcccccaggtggtcaagtaccccctgcacgccatcatggagatcaaggagtacctgattgacatggcctccagggcaggcatgcactggctgtccaccatcatccccacgcaccacatcaacgcgctcatcttcttcttcatcgtcagcaacctcaccatcgacttcttcgccttcttcatcccgctggtcatcttctacctgtccttcatctccatggtgatctgcaccctcaaggtgttccaggacagcaaggcctgggagaacttccgcaccctcaccgacctgctgctgcgcttcgagcccaacctggatgtggagcaggccgaggtcaacttcggctggaaccacctggagccctatgcccatttcctgctctctgtcttcttcgtcatcttctccttccccatcgccagcaaggactgcatcccctgctcggagctggctgtcatcaccggcttctttaccgtgaccagctacctgagcctgagcacccatgcagagccctacacgcgcagggccctggccaccgaggtcaccgccggcctgctatcgctgctgccctccatgcccttgaattggccctacctgaaggt

SEQ ID NO: 13968 - DNA, 1286 bp, Homo sapiens
aagatcgagcacgactggcgcagcaccgtgcatggcgccgtgaagttcgccttcgacttctttttcttcccattcctgtcggcggcctgaggatggtccgccacgaggagcttccagtgcatgttgccatgaggcctttccccagtgtggccccagcccgacaggcatgcaccagtgccgcctgtgcccacgtgtgcagactgtggctgcagagaccttgcgaccatgtgtagattgcgtggaccccgacaaagggaaggctgctgtgtagctctgtccactctgaataccaagtgtgttgggaattgcatgccatctccaccctgagcctgacctttctgagtgacatgggtgtgccaggctagactaggaggttccggtgtctggaaaagcactttacagatgagattccctctcctcccccaccttcaagcaccctgttccctctttctttcttttgtgttggatttgtttaaaaaccaaataagcatctgtgtaacctccacagtagcatttcttatttgtttggtcactgctacaccttagcagctcttcccctttcctgggggatgtgcacggcagcttgagcctgtcacgtggtcaaggcccggccccatcagaggctgggggaggcggcacattggcagtgtgtcacactgagctgggcaccacaggctgcctcatgaccctcctgtccagcaggtagtgggtgaatgtgtgaaggtcttgcctgaatccatcaggacttgggaaacagagaaccctgtgggggcggctgtgggggaggtccctgccagtgtttagaagagcctgactgtgttcagtgccttggagcagaaagccagggtcctgagtggctgaaataaaagcctctggtggaacctgcagcgctttccttcctttctttaccgaaaagaagtctttcttgtacgtgcgtgagaatcagcagagcctgcactcctgttgaatgaaatgcaagtgcaatttgagttataaaagagcaaggttgatgtttcacagttgatggcttcctgccacagcgagaccctggcttcatctccagctggaggggcccctggggcatctgccgtaactgtggggtggcctgggcatgggctgcctgtgcagagagacctgtgctgaaggtgaccatggagtgtcagcccagccatcttcagatcttactgagcggaaagtgcacggtcataattatctttgaattccagttacccatgaagtggagcctacagggtgattgatggcgtgggggctgctgtccatgcggg

SEQ ID NO: 13969 - DNA, 2823 bp, Homo sapiens
gtctttaccacatcaataggactttttatgcgtccgggttaatttttcactccagtgcgtcctgttgcagggaccggagctgatgggagctgcttctcccccatgcctcactggtcccagatcagggctccagggacagatgatgagtctcaaacgagccagccaggggttcttttggttataaatggggcaattcgccctgtctcagagctgatgacctcaccgttgttttttggatggtgaattcatgctgagaatttgcagatgcaagctcctctcctaggtcttctgaatgtcttgaaacatcccaggtcccaggtctggtgcggtttcccgagaggagcggagtggggtttgtcttctgtgtgcctgtgtcctcatctgattcacctgccatttgctgagcctctgctgtgtaccaggcgtggtgctcagccctagaggcagttgacttaccctctgcagccctccctgccgcctcacccttcagcattcactgggcaccttcccggagcggacactgactcccatgcacgattttttggaatcttcctcctgactgtgaggtgggtgttcattcatttcctccataaacaccaacttctcgaagcgtgccaggctctgggctggatgctggggataagcgggaacccttaggatcccctctgtccacgagaagaagctgaggctctgagcggatgcacaggtcacccatggcaggtgccgtgcagtggtgtcaggaacccgtccgggtcttcacacaaggttctctccagtccatctcgtgggcggctcatgttagagcgacattcaaatggaaggtttggaaaggaatgcctctgtcttgtgaagtaggacatggcagacttggcgacgacaagggtccaggagaactgagacgcaggatggaagacagagaagaccccccggagctcctcgctctgcttggtggcttcaggagtgtggccctccccaggactccacttcatcctgggcttgcaccctccttgagccaatgcactgaactgcctttgaaaggaaattgcatgttctgaccattttaggatacctttactttaaggaccacacagtcccagaggacacatccctcgggaactctgcccctctgacaatgagggccacagagaaggtggtgtttccatggtagatgctcctgttctggtgataccaaacctgcccacccctctgagtcgtctttgctcatggacttgcagcagagccacgtagtttggcattttgattcagaaagtggggagcagagacccagccaaatccaaactttttttttggttttgttttgttttgttttttacaagatataacataacccaggaaacagacccagctgaggttattctcagtggattacagtatacttttgtgtgtgtaaaagcacaaagtgcatgtgtactcacttctggccatataacatttacacagggaaatggatcattgatttttttttaatcaacgtgaatgaagaatgtttgtttatatatcactataaaatccagttgacctggacagtattatatgtacatatctattctaattaaatttaacaatcaaaggattggattacttttttcccccttgtaaagaggttcgagaatgtggtcaattgtatagatagcgtgttaaagccaaaacccagctctgagggccttacccattacttggatatttgctacgatccatctccctttgtgagtcaaatgttaagagaagaaacttgtatttgcagctagaggttactgtcacatcatagatttaacatttaccatcttcaaagtacaaatcttacatgtccttcaaaaggaggtcttaatacagttcctagttccttacttctgttttaaactttgggtaccaaaccaaaaagaagaaaaaagaaaggaaaagatcttctttgaagaaaagtatgtctctggatccctggaaaataatgatgtccaaagcaaattgtgaagatcaaatgtgtgttaagaaaaggtgtcgaggggagggacaaaaccagaaacggtggaaggaccagtgtaatagtcacagacttgcatcctggctctgcttacatttcctggtactctcgaatgtacgggcgttcacatagtcattgtgaagttgttggggtttttttggttttgtttttaatttagctcttctctgaggacgaagctgttggtggtggtggtggtgggggtggtggtgtgggatacatggtggtcaagttgtcagccctgatcagtttggactctgtaactcataggtgcattctttttttctttggtgtctcacaaattacccaattgttgaataaaactataaatatgttaataccagctttttccaataaaataacaaatgttacatcaaaaacgaggtccagaatgctgtttgtttttagtgagtccaacctcatggaggtggagcccatcaggaggcaatacagtgggtggggatgcccatgggctttgcactgggaagctgggttcacgtcaagggtttgctccctctagctcctaatgcagctcttaactttccctagctctgaattcatcactgaggaaatggagctaataagacgacctatcttgtaggtttgtggtgggagaggaaggacaagattaacttggatagtgcaaaacacagtgcttggcacatgacactccgtaatgatagttgtcttgttttgtctggcagcaggtgtgcatagcccatcatgatctccacacacactcacactctccatgagaatatgatacagatgaggaaactgattcagagaggttaaagaattagctc

SEQ ID NO: 13970 - DNA, 1120 bp, Homo sapiens
tggggtttcgacgccagggagaggagggaaagggttatcagggaaggttcctggtggcagagctcacagggtccgtgctgagccgaattttgcacggtagcctcagagtcccggagccgagtccagagggcgggatgcaggtattgcgaagaggcacacgctccgagaggaaccaccagagcgtgggctttgggcgaggaggggtctcctctggttgggggagatctggcaggcttgggggagatggggctgaaaggatggacagggagggaaggccagaaagctggagacggggatggagagctaaaccgcaaagagcaggcgccctgccccgctgagggccccgcgcctccagctcctccttcccgagcttcccggggtcggcgtccagccggcaaccaatgggccccgcccccgcccgcagccaatgggccgcgtccccgcccgcgcggccgccccgcccctcgcggacccggaagtgggcctggcaccttcccggcctgccgcagggatggggcagctgtgctggctgccgctgctggcaccgctcctgttgctgcgaccgccaggggtccagtccgccggccccatccgggccttcgtggtgccccacagccacatggacgtgggctgggtctacactgtgcaggtaggtgccgaccacgccccgcgcgcccctgaggctgcagcttccctctccccgcgggatctgagtgtgggtttgcgtcccggggcccgatgccggcgcagaaggaggctcagtgggttcaggaccccacgctgccattgactggttgcgtcgctaacttcgggccagtcacttcctgcctctgaacccccatttccccttctggagggtggtgcagattggagggacccctgcattcccggctggggaggggcttgggggttgacagtggtaacccattttccagggaagcctggagcaggagagggtggggctggcttcagagcaggtggatgtcaggtgcccgctgggaaggggccgggctggtcccctgcggggctgaatattggaggccagctcagcgtcctccgccccccaggacaggggtgaaggtggacctgtggtcacctcctggttctgctcaggaccttg

SEQ ID NO: 13971 - DNA, 1778 bp, Homo sapiens
cggcgtgggataatcagagtggccgggtttgggcgtgatgcgtgttcagtggaagggtcataaatctcagagtcgccaaggaaacagaaacggacaaggtcccgggccgtccagcaagcgggggtggaaatagaggattttcggggaagacgttggacaagtcaacgttgctagagactggagtgagtcaggtggtggccagaagaggtggcgtcctgcacagtggcgttcgtgagggtttgggggtcgttgtgcctgggattaacctctcgatgatgaatttcttcccattgtgctttaggtttccagccaatggattctggtcaactggtggagattggctgacaccctggagaagccgaaaccagagagccttttgttttctcttttttcctgtctatgctctgtctcacttaacactacgttttctgctatggtctgtggttgatgacctcaatatgagtttcgattgttaacgtgtttttgtttgggaagtaattttgtttgaaaatgctctcacatacaggaattagggcctagattgtaagctcttgcagcagtcacatttgttcccgggctttggtggttatttctaaatttttgaggtgctttgctatttcttgtgtgacctgatagctccctggaactttgggtctgtgtgtgacacatgagactcacagttggagttctccagctctggaggtgctgaaggagctgcattaattctggaagacgactccatgcagcaactactgaagaaaggaccagacttcaacggggagtgtggatgggccgacctggctgggactcgtgaatctggagaagagctggagaatggatagtattgtctgtatttggagactttaatttctgtgtgagaccaaaggaggagagatgtgttttgttcaaaatttaaatttgttgtggtacactatcttatgtaacctgtctggtgagtttgtttggacaacctaactcagctttatttgacatggaacctaaaatagaagataagatcttgatattctgtacaagttgatgtaataccctgatgcgttttagaggacttggcataaaatgaaagattggcaaaggcccttgaggggcttggggatgacagtatggaactgtctgcattggaccctaaactggactagaagaggcatcttcaaggttcatacgttgtccagctgtaagttcatttgagtagcagacctaacaaatatttgaggtcagaaccctaccatgttaaaacaaacaaaaacttaccatgttaataaaagtattcatttgcttgaaaagacgaaagacctaaaaggttattgagaaatgttagtcctttaagaatgaaatctgctgtctcccagatggttctcactgtcaaatggagggtgaacatcttaacggtttctgaggctcttagtctctaatcaaagggaagctttctctctctgctgttgggaaccgggtgaggaagaaacacacttggttcttagtgtgggaagaaaccacatgtaatcctgtggtccaggcctctgccttcagagagccaaagcaccttcagtctttccaattggaacattgttttctaggccttgcactgggaatatagcgattacagttgcagggtgagggatgacatagaggagatgtgataccccaccctccttccagattgaagcctttctgcctcagctgctagaagtgttgctgacaaacacccttcagctggttagccctctgggcagtgccttttcagaggagagctgcgttagcca

SEQ ID NO: 13972 - DNA, 1391 bp, Homo sapiens
tgtgcttttcaagactcaccaaatactgtgttttctctcttaggatttcttttcccctaaagtatcacggaagatactatggttcgtgactttcttgctaactgaagaagccaaggatttggggtgtggggtcgtatgcgagacacagtggggtaagggtgcataccccaccccttacctgctctcatactgcagttacatttacaccaaaaccccatgcagggttctttgtggtgagtgttccatacgtgctaaggaccttagttacagattgttactttctggtgacctatgttgaattgaaacccccaaaacttgaaattgtgaacatttgacatgcagtaaaggccacctcatcacccagagaaatctttggctgctgcagctagccgcttcttggctgtgatgtagtatagcttcgatctcattttgtgtttgagagaatgttctgggcaagttctgtgtgtggtgggttggggcgggtagagtcatgagttttccacatccctgtgtggtggttttgctgactgtcgctccgtgggactggctcccgtttctccttggtgagcccggggagccggcgcatcttgtgagtcgcgtctgtgcatggcgatccgctcctccggctctcatggcattgtgccacaggcagaggccaggaggagcagtatgtgcacagccgaaacattttacattttttacattgtttttcttttttaaccaactcattgtttaaaaaacaaaaacaaaaaaaacctaatctgtgaaatcagcgtagcatgcctggagcatcaggaatggcagaaaagtctgatgcgctctagacagcttcaccactcatttgggcaggcagtaaacacacatataatttattagctgggagctgaactggctgtgaaatctatgatttgctttgaacatttgggttttgttgcctttttcttaattgataacacagaaaagaaagtaccatcaaagactgtggagtcattgagggtctgtgtgtcctcaccgagagggacctggtgtgcccgccgggtcgatcttcccacgtgttagggtttatttttatacaacacattttttgacactttaaggtgggtgggtgtgtgtgtgtgtgtgtgtgtgcgcgcgtgcgcgcgcgcatgtgtaaggttttatgttgctgttatttatttacgaacttcagatacgtttttatgtatttttcattcttctggagcttcctaaaaattgataagcatctgcactgaaatataatttaacagcaaaagtaaaaaaggattgaaagttgtaaattcctcatatcactacagtgacgattattctagaaatcgttgcttgtgtagcaaagaccaaataaatagatttcagacacaaccttgagcaca

SEQ ID NO: 13973 - DNA, 1176 bp, Homo sapiens
ttctttcttttttttttgaggtgtagtctcgctctgttgcccaggctgaagtgcagtggtgctatctcggctcactgcaacctctgtcacctggattcaagcaattctcctaccttagcctccccagtagctgggactacaggcccctgccatcatgcccagctaatttttgtatttttagtagagacgggatttcaccactttggccgggctggtctcgaactcctgacctcaggtgatccacccgccttggcttcccaaagtgctgggattacaggcgtgagccaccgcgcctggccaactgaatcgtattcttctttgtgtactttcctgtctagatgttagactttgcaagcttactaaagggtggataatgcctgagccttctggagtccgtcaggtgtgaagtgagcgctggagctgatgctcgctctgcttcagggcggttttcctggtgtgttcgcagtgtgacaggaaaatcaccttgcctggaaatggtccatatcagttagtagattgttgtttttctaaattgtgatttctagagctgaaagaagcccagcgaaggaagaagcagctggaagaaagatgcagagtcgaggaaagcattggaaacgctgtgctcacctggaataatgagatcttacctaactgggaaacaatgtaagatgtggctctgggtgtggctgaactgcagagcatgtctttctagaatctgtgggccacagctgtagtcgtcatagccagcagtgacaccctggatgcagcgagttgaagttgcatcatcttccttccctctaccctggctcagcctgcgccatcccttgcttggagactgtgatagccccttcccctcccttccagttcaccttcttctcatctcctgagccagcttctaaagcatgagtcagtgtcccctcccttacctagaatttcagtaacttcctgtgactgtcagtacacagtttgaacccttagcaggcaacacccttagtgaggtggcctgccttcctcggcagcctcaccctcggatgcctctcctccacttggacagagccctctccctagggagccccccataggtgttgctccttttaaacctggggcctcgcatgttccaggccctgtgtctggagtgctcttgtcctgtacttcctcagccagcaaactcctgtg

SEQ ID NO: 13974 - DNA, 1768 bp, Homo sapiens
cctaagtgccagtgagtccctcacacatttgactttagaacgtgtgcttcatgacccgttgtacagacggaggagcgagcaacacacgtctaacagcctagacaatctcgtcagatgctcatactggaccatcagcctccccattttagctgactttcccagggtcgttggcaaattttttgttctgtcttttccttgactaattgtagaactttgtgtgaggactttggttatccaaaatcacagaaatgaaccgttttgcagctgcgcagtctaaagggcaggccagtgtctggaagcagggcccacgtggcggtccgctggcaggctggtcctggggagcattctgcggacccggtcacgggcttggttagtcatgcgtacatgtgtgccttggggtgctctgcactccacggcccttctcagccacacttcccaccccagggggtgcccccaggctgatctcatttctgatgttgagggctgtttggctctgtctgtatagcttgtaacaggagccttgggctaggggctggggaaggaaagccgagctggcattcgttctctggactttttatgcctgccatacccgctaatgctcctcgaggtgcaggagcaggttgctgagccagtggctgccccgtgccctccttcccagcactatcatgtgtcacgtttcccggactctgcccctacatctcagctgaatctccagggaggctgcagagcatcgtggagaccactttctgcctcggcctttaaatgctgactcacctcctctcggaggaggcgtcctgtcttcacgggggggtcccggtggcctccagacgtagccatttcctgacatcaagatgttgaatgtaatctggtctgagctgggcctgtgggaggggccgcctgaggcctgtgcgctgttgtcctcgcagatgtacttatttttgttcatgttacgggcgttccgttccttaaagatgtatatattttcttactgtacataaagatgttccttaagtcgtacagaaggtggcgcggcaaagggcctcgtgcagtgtgttcagattgcccctggggatcttctgtgtcttcagcgcccagccctgcgtgttcctggtgaagcagtttcacatcagtctctccagatagcactacgatgtattccgcttctgaacaggatcccatgccagtgtggaacaccttcccaatcttagttcagaagtggcttgtatgacctgttcaggggtcacatgaggtctcgccagtttcctgggtcctcttcagaggccagaaagttctaagttctgagtccccggccagggtcccttaacacctcggcacagaggctgttggcaagtgtagaggctgcctctgtgtgtggtttaagtaaactggaaatgagacattgacgtgctgctcctccagaggtctgcacactccacttcacatgccgttgactctcacagtctaagacttcagggccgggacctttgtccagcctgcacagtagagtgaggctgcctctcccgccaggcattgggatcccatttagaaacggcattcacttcagaaggtactttttaactgctcagtttttgactattttaaatagtttgctgaaaactcctgataacacttgctacatatcatgttttaattgcttgtacagttaacctttaattttatttagtaaagtgtatcaaagtaggacttttttgaattgtaaataggtggttttattaaataaaagtcaatgtaaaattgttacttatgt

SEQ ID NO: 13975 - DNA, 1199 bp, Homo sapiens
ggctgctcggtgctgctgttaagacgtgagtgcatttcacttggaagaacccattgtacaaagttcaaggctaagagttctgaattctggcgtcagcttcctcaggattttcttcagttgcaagtacctttccactgaaaatatgagcatgcccgcctggctagtaggcatctgtaagagtgtcgccaggcccgcgccagctgaggcctcagactagccaggcaagagccgtctgaccagttggctggcggtggttctggtggagcacgagggagcccgggtggtgccctgagcctcgagctgctctctgtcactgtcttgaatcagactcagaaatggcttcttcccagccctgcctacaagtttttctctggggtcctctttcaaggatgtccacggtaccttcctcctgaaacttgaggaagtcttttgtcttccagctgctcagggttctctggtccaagaccctgctttaaagagagtctttggcgtgctcagactccagcgctccgttcttcaaggaggttgacttgcctctcgggccccgtaggtaccaagagactgtttacctcccagaatgtttgggcttgaagttacattaaagtgaagttatttgaaagaaagaaaacctcatcatttctaaggatgacttaattactgtgccttttcctttctttttacacatcctactgtcccttagggtaaaattttcagcattaaataaaacatttcaaatatattgtatatggctttagttgtaaactatactgcatgctgacagagaagcgctcttttagctaagcccagaacttctcttttgacaataaagtactgagcagtggtatcatgagggccacctccacattgtcccctgcagaataaatgcggatgacagaaagcttatgctgtctaccactgaacagtgatggagatggtgctaagtttttacagttgtcttagccccagtggttctcaaggtggggctcctggcccagcagcagcaacttgtttgttagaatgcagacgcgcaggccccacctggcctcctgaatcaaaatggtgtgcggcagggtgcagcgagctgttttcacgaggcctccaggtgactggatgtaagcttgcttgagaactatgggttttagctattctggtgtctccctgattttctacagcgccaggatcctagtttggtgaggttt

SEQ ID NO: 13976 - DNA, 1275 bp, Homo sapiens
gaggcgattgatttgacaagttactaaatagcctccacatcaggtcagcagtgctcagtttggaattgccctgtgcggttggtatggagtgcaaatgatcttctttaacttcatccaggcattcaagccttctgcaaggacttgttggaggtggcagacgttctggagaaggcaacacagtgtgttccaaaagaagaaattaaagacgataaccctcacctgaagaacctctatgaggggctggtcatgactgaagtccagatccagaaggtgttcacaaagcatggcttgctcaagttgaaccctgtcggagccaagttcgacccttatgaacatgaggccttgttccacacaccggttgaggggaaggagccaggcacagtggccctagttagcaaagtggggtacaagctgcatgggcgcactctgagacccgccctggtgggggtggtgaaggaagcttagctgctgttgatggggtgggtgtttttaaactcacttgatgtaactctcaaggctggttcattgtttctcatctatgagtacgtgtgaccttttcccaaaccttattggaaaccttaagtaaccagtggctaaacagaaaagccggttgcccaactgcattaatgaactctaattcgggagtctgttcccttttagtgccacgcgttgaatagttccacatactttcagaagagctcagcagggccctgcctggtctcccgagcatcatgagtaacgtgtctgctcagactctgctgacaccaaagtattttaaacaaataaaaggtcttggggaattctgtttggctacctgggcacgccagtctgcaccatgtgtccctgcggcgcatgagtgactggcgtatttagcccgtcacatttcattcgctgaaggaaaggcaagagagttgaaacatttttcttacttaaaaaaaatgatctttgtgaagaacatagtgagttcgtttgtcttcagtcaacagcggctgaaactgaccactgagaaatgggtgtgggcactgacagttctcccccattatttggccaggaattgagcttggcttggcaaagttccttttaccctgttctgttcatctaaatgcagacatatttaaatcatattcaactagttactaatgacctcaagttgtattccctggcaaaatggactttctcaaaataggactgcacgcttggtgtactttaaatgttaatgtttaatttaaaatttttatttaagaggattaaagccctaatgtttattttcctact

SEQ ID NO: 13977 - DNA, 1133 bp, Homo sapiens
gtttgctgtggtgtcctcagtacctggggtgggattcagtgtgtggcaggagctaagtccacaatgatggcatgagtgggctgcccaagttcttggaggatgaataagagttttccaggtggagaagagctgcaagtacggcctatgccggggcccgagacagcagagagagtgggtgtttgggggcaggaaggatgggccctggatgggagccccaggctgcagaggcaggtcccaggtgggcgatgggctctgggtgttcgctaaggagtcctgtcctcagccaggggcagcagggagctctgcgggctgtttaagaacagagacaacatgactggcatatgggaagggtgtgtgtgcacactcacatgcttgggcggggtaacgtggatggggtttccaatgggaggtgcttttgaggactcgtgagactcatcttggataactttgattaaccgctgagcacaatttcttacctctagtgcaaatttatcttcaaggactccatcctcattacgataagatagtattaaaaggctgcggcaagtttctccaggctaggagaggtagcatcacaacaataaagaggcgccatctttgctttgctgtcttcaaaaatttcaaagcgtatatttcatatcatctaaaaactctcttggatgcactctaagttgcatcattactttattcacccctgaagaatggcgttgattataagccacactctgattttagagatgttaagttgtggaaaataaatggaggtcttagaatcaatgaaatgtggtaataatggaatgtacagatatgtgctatagcatgccagtttctttttgtaaatgcatccagtcaaatttatgttctgggggcttaagtgaaacaggctaggacctgctgtaaatcactaggcacgtgcccatgcaggcttcctcagaggtgagaccttccggttcattctggagagctggcctgggaagcatcttgcaggggagtggggcaccccaccagcgtgagatggggcttgggaatttccaggggatggacaatttgcgaaggaacaataccatccgcggcattgcagccatcaataatcgcaatcagatctcgcgcttcagggcgtaagctgaactctg

SEQ ID NO: 13978 - DNA, 1225 bp, Homo sapiens
cttggtgtaagccttccttctgtccactgtccagaatgtcctttttcacacagaggaagagatggcgggaaaacactgactgactccttgggtttcccccagacatactttcagagcgctagctgtgtggtgcacgggactttacagttaggattcatgtttaaggtggtggcgcttgaggcctgcaagggccacgttggattactgaagcggaaagcggtctcccatgtataagaaaaagttttacaacacgaattggaagctgcttgagtccacctgaacttgaattgattgcaaagccatctgctgggaacggttttgggttcctgagccatcagccagcctttctttcccctctgatgcacgttcctcccggcctagtccgtggaggcccatcacaccagcatccgtgacgccagcttcccactaggacatccaggcaggtcgggcggggacgccacacacctcagggccgtccgctgcattgccatagaggagccctccctccagtggtcacttcccaccattgcaggcagacttcccaccattgcaggcagctgggcccacttcatatcacacaaaatgaattttctataaagggaaaaaagtttgctcctccatagatttttgctgccttcgggtcaaatagtttccctggttgacactcttgggccactctgattggcagcctgctttgccaaagagaactgtgtgaggttttggtggttagtaagagaagggggagatggccagcctgaagtcacggtcctggcccagcacaggtgggcagcagcgagctggcaggtgaagtgtgagcagcacgcaaagtgtcacgtgggccttagccgtcacccaccagcttcctcaccaggcaaggaggccccggagccttagcagggacttgcccaacggcacagctgattggtgctcgactcccagcatgcatattttgttgtaaaaacccaggtttgtaattcacatccacaaccctaagccttttaaagcggaggcaaacgttaacaaaccccatcgtggtccatggagcctttcaaaatgggtgccctggaggggcctgacagtgggttccttccatggcggatactcccttgaaatttcacattccatcaaagtttaaagcatttacttcagaataagttatttatgtgtatatgttcaataaatatagtttttaatttatatctgtacatattagacacacgcgagc

SEQ ID NO: 13979 - DNA, 1284 bp, Homo sapiens
agccctgacccctctgcatgtgaccttacttggtggtagggtcattgcgggatggaactcgtccagatgaggtcatgctggatttgggaagggagaagagggaaggtgatgtgaactcacgcagggaggaggccacgtgacatcggaggcagagattggagtgacgcggctgcaggctgaggctcgggaggattgccggctgccagcagaagcgggaagaggccaggaaggtccttcccagagccccagagcctgcgttgtcctcacaacccctgatctgggacttctggtctccagaaccggggagagtaaatgcctgttgttaagctgccgtctgtggcactgtgtcacagcagccacgggacacccatcgagtcaggaactggggaacaaagatgccaattaccgagtgcccaccacgtgcccgggtaggggctggacactttcagaggcatcatctcatttagtctccctgcagcccagtccgtggtatccccatttacagatgaggaaactgaggctctaagaggttcagtcgctgggcccaggtcccagggctctggagtgttggggcctgttgcaggcccaggactgagtcacccgagggaagacagcggggtaggggccgtgcttcatgatgtgcagcattgctggggagcaggagtggcggtgagggagggtggcagtgagcaggccttccgcattctgttttctgaccgtgaggtgcctggagcatccccacggaggcatccagcactcagagggagctgggggcccagtgctcaggaaaggccagggctgggcgtccttctccagggactggatggtctcagatccctctaaacctaagttttacaatcctgaaaaagcactggtgtcttcctcgctttaagtctcagtgaaaatctctctcacctgtcccatgtgtcagggcctgatctcattacttctcagcttttaagcagcattcagaaatgaagatgtgagtaattataccccatccatgcccccgtgatgggtggcagccacagcgctgggctgtcagggagtgaggggttctgtgcaggggagggggtgagcatgagtgagcaggggggtgattgcagcctcgtgggaccatgtacgctgtttcctttccaaccaggtcgttcctgtgccacttgagccatcccgctagtacaccacaccccacggagggatgtccaggcaccccgaggcctgagctcggccggcacagctgtgctcggggatgcaggctgccgtgcaggggatgcgggctgctgt

SEQ ID NO: 13980 - DNA, 1158 bp, Homo sapiens
tgttccactgaaggcagtgcctctccccctgcttacacagcccagcccagcagcgtctccagcccctcgcctggacctctgtgaccttggacaagtcatcgtccctctgtgcctcagtgtacccatctgtaaaaacagggccactgccatcctcggggtacaaccctgctttcttctgacaccaccgccccaccccgcccactgtttgggtgtgaggcctggctgccattttagggaccctgctgcgcccacctttctcatctggctctcgagatgctcccagctgggtgagcagtacttgggcctcacgctgagggtctctggcgtggagggaggtgccttgccgcctgtggattagcagcttctgtggatgtctgcctggagctcgagctaggagggcagctgggtccctcgcgtctgtgggaaggactggggcggaggagggggctttggattctgggacgctcactggtccttgtgggtgccagggctggctctggggcttctcgccatcagcagcttccaggcctacaacaaacaggtctgctgcggataacgagctgggtggcttcatgtcacttcccttggctgaacatttccaaatgtgagggggccagtctgggtgcctcagaagatgcactggctttggggctgggcacacctgggctccagccccaatcgtcacttgctagttgtgtgtttctccaagcggattgtttaaatgccctttgccttagtttccccacataaaaagtacaggtgatgacagctgcttttgaggggttactgtagactcagagatgctgagtgagagtcaagggcctgggcacggcaggcaccagggaacgggcagaatggcctttgtcacagctgtaaatacccttcacagctcagggacaaacctgacgtcgtgccccgtgggagccgctttggcatcatcagccacaccctaggctgggttcatagcttcccctccccttctctggtcctgctgtctcccctgccagccccatctcagtcctggttacaaggctgcagcccagtgccaggagaagcaccgtctccagagagccacccagctcccggttttctcggcacagcatcctcaggaggcgtggtgtcttgagtcatcggtctcagctcgaagcttcattttag

SEQ ID NO: 13981 - DNA, 1513 bp, Homo sapiens
gccccacccccgcctctggatggaccgaatcagggactagagtttaactgcagcggaacatgtcatttctctatttctgtgacgcgcccccatgcccccaccccaccacaagaggcaggagggcccagtcatgaccctcgtctctgcagggtgtctgtacacgttcttctgaaagctttagacagtaacagtttgcacatgaaaaataaagcgagcacctaaacaatgtgtggagcataactaaaacccacagcccaaccaaaccttgagaatgcgaaacattccagaggcagtagcctccaaagcacacagagcccctggccccgccgcggctctcactatctgtcaggggaggttgtacaggtgaatgagccggggggctcatgttcctgcctgcagaacatttctgtactagtgagaagagggaatatgcattgcagttcagcaaagccggaattctgtgttgaacagatgtctgtctccctagtgtgtgactcacaccttgtggctgccttcagagcgccacctccagatcagatggggacacacaacccctggatatgtttcattgtcagattttgtgcttgattttaagaatggaattgtgggtatctttcctttttttttaatgtatcttaactgttgcctgtcagtgtttacaaactagtgcgttgacggcaccgtgtccaagtttttagaacccttgttagccagaccgaggtgtcctggtcaccgtttcaccatcatgctttgatgttcccctgtctttccctcttctgctctcaagagcaaaggttaatttaaggacaaagatgaagtcactgtaaactaatctgtcattgtttttaccttccttttctttttcagtgcagaaattaaaagtaagtataaagcaccgtgattgggagtgtttttgcgtgtgtcggaatcactggtaaatgttggctgagaacaatccctccccttgcacttgtgaaaacactttgagcgctttaagagattagcctgagaaataattaaatatcttttctcttcactgtgggtcactgactttgtgtgatgggggtgtgtggggcggctgggtggggaggaacgtttgtgggattttcatggctttagaggtcttaccagtctgcagcctcaggcaggaaatgtttggaacacaggattgtcagatccatcatgtggtggaagggaagccccagagaaggggctggaaccctcggttcctgctcccaaccataccgccagatcaccctctgacctgggtcacatccctgcccttctctgagcctaagtttctttgtcaactgaaaacactggaccagatgatgtctgcatcccatctacttctcaaattcttagcagcctgtatagctttcaggtaaggaatagcatgcatttagatgttaaaaatcaaattcccaaacatccaaattcattgcaaagtgaaaggcactgttctttgaaactgccttttgtacttttgtaacaattgtaaagttgtctaaat

SEQ ID NO: 13982 - DNA, 1713 bp, Homo sapiens
tagggccccttcacctaccaaacgcaaagaccgctcagatgagaagtccaaggatcgctcaaaagataaaggggccaccaaggagtcgagtgagaaggatcgcggccgggacaaaacgcgaaagaggcacagcgcttccagtggtagcagcagtaccaggtctcggtccagctcgacttccagctcaggctccagcaccagcactggctcaagcagtggctccagctcttcctcagcctccagccgctcaggaagctccagcacctcccgcagctccagctctagcagctcttctggctctccaagtccttctcggcgcagacacgacaacaggaggcgctcccgctccaaatccaaaccacctaaaagagatgaaaaggagaggaaaaggcggagcccatctcctaagcccaccaaagtgcacattgggagactcaccaggaatgtgacaaaggatcacatcatggagatattttccacctatgggaaaattaaaatgattgacatgcccgtggaaaggatgcatccccatctgtccaaaggctatgcgtgcgtagagtttgagaatccagatgaagctgagaaggcgctgaagcacatggatggaggacaaattgatggccaggagatcactgccaccgtcgtgctggccccctggcctaggccaacccccaggagattcagccctcccaggagaatgttgccaccaccgcctatgtggctcaggtctcccccacggatgaggagaaggtcccgctccccgaggcgcaggtcccccgtgcgccggagatcacggtccccgggccgccgccgccacaggagccgctccagctccaactcctcccaataaacaggccactgaagctctcgcccctgtaacttatacgccacccagctcagttttgtcacttttctagccaaagcaagaccagtaggaaagcaaacccttgactctggcaggatttgcaggcagcaggcagcacccctctgccagccgggctccggctgcagaagtgctgttggcttggatgctgtgtgcctgtcaagattccctccggttttctggctagaaagctcacccgtttccggttttaagagtcagttcagtggcagagccaccagggacaagtgaggctcttgggggtggtttgaccctgcttacctgggagcacacttttcccttccccgatgacctgggatggtggccaggccgtgcccttgctgttgctgggcagtgtctttttggaaagggagctgccccaggctttagtgcagctgccaacgctgttaggcctggcctctcgaggcctcttctgacttcaagggtcacagccccccaaagatcctctcacccatggtagttgctgctcatggttctgtctgtccgtgcaccgatgcatacaccacaccccaccgctgtactctgaaattggcgagtgagttgagagccagctctgcggggtcatcacgcagccatggttgtgcctgtccttcatggtggtctttcaggttatcttggcaacatgtacattgcttttattttttttcttttttgcttttattgtacagtcagttctataaaatttctcttttgagttttatacctttgtagcattttagatgacattgtgtttgtactttgttgtgtagagtggaagaattgtgttgaataaacccaagatcggaatgcaaatctaaaaaaaaaaaaattaa

SEQ ID NO: 13983 - DNA, 1222 bp, Homo sapiens
tattatcagggtttaatttttcattattgatttgtcagtttttcattagacttatgataacctcaagttaatgtcataaaaccagggacaactcagtagctgagttgccattctcttcttgaaaaaaaaaaatccactctttgtttgtttgtctggcttattcttttaatatcaactcctgcttcatttatggtgtccatcatcagaagttcagcaaagttcagaaaataaaaatatactttaaggagctctttctaaatgttctgatatcctgataataactctgttttcttttatgacagagggtggtgaaggcagatattgtaaactacaaccaggaacctatgtcaaggactgttaaccctcctagaagctctatgtgtgcagttcagtgagcgcatttttcttttgtgttgatagttctggctgcccttcacctctgggtgggcccgaggacttctaggaacttgttttatcagtgaccatctctgtagttcagttaacactttactcccaacttgcttcatcattgctattgcctcacagtggcaggcagctccttggatttgaaagaattcaactttgggaccacacactttgaattcaaaatggaaaacccattccctggaattagactgcttcattgcaaaagaatgatgttgtttctttgtatgtccttgcttcttttttcattgatgtaaatttttttaacttaatatgaaaactctccaagtcttgatcatcagccaggattttgccacagcaatttcattctcttatcggaacttgtatgtgtcaaagtatacttcagagtgcaaacattaagcaagtaatatattttacctacagatacttatgaagacattctttcgctatcgtgagtaaaagtatataaagctgtttctaactgaaaatgcttgaaataagcctgtaatagaaatattttttcattttttaaaaaagggcctaaattgtttatattgtagtttgtaactcacaaagtaatatttgatattgtatttttattactgtatcgttgtcgttatgtattgtgtaatactcaggtttgaaggctttctgaattctgataaatgttcagctgatgctccacgtggaatttctcttgcaaactgcataagagtactcccgagaatgagttatgacattgtggatcagactgtacctgatgttcagatgtttttctttcacaaataaacttatt

SEQ ID NO: 13984 - DNA, 1138 bp, Homo sapiens
gtgtgaggttgacagcaaataaccagttagttcaagctcttcgcgaggtagctccttttcatgtataaatgttactgggtttttctcttcttagctgtcaagttcaaaactcttctgttttttaaggaactcccaagttatttgaagcagctgcttttaaacctcaccattgccttgactttgcttaatgcagatcaaagacacagctctccccttctatcaagcgcaagagagaagtcagccctcctggggcccgaacaagaggccagcaaagggtggaggaagcccctgtgaaaaaagcgaagcgataatcctgaccactgctgccctaggcttatggaggaacacggtggagaggaaagagacatgccttggtggccataggcttctctttaaccaggaaaaagatatgcatgtgctgtaagtccctaggtgcaagctttttcttgttatgttttaaacagctttataaactattgttcatagaagatattatgtacatttatttcagataaaggacaataagtttactttgtatctgaactcaaaacaaagtagttgtatattttaacattcaaaattgggatttcccaatgtgacacatcatgaatgcaaacccctccagcccatcagacgccaggctgcctactggtaatctgtgtatagtatataaacatgtaaaaataggttgtattttactctatgtatgatgctaatcaatgaacactttatttattttacagagaaaacttatctgtgaactttactatatatctgtttattttactttattttttttttaaataaaaagggttttaaatgctatgcagtcattagtagaaaattttttaggactctgcctgctctgtaactatcttaatatgatctggcagaaactcgcatgtatccaagtaaagtagtttagctaaagaaaggttcttcattgcttttctgttcacagttgtggctctgttttttaagaatgtaacttgtttttagattatacttgcatctgtgactttactaccagccacgttgacacaaaacaggttctggttcaggtaaagttgcgtcagtcacctgcagcagaaatccctcttcattcctcttctctgtgttcattcctcttctgtgctgt

SEQ ID NO: 13985 - DNA, 1325 bp, Homo sapiens
cttagcagggggtaaaaatcaaggcaaagttttgattatttccaccagtaccacaaatgattacacccctcaggtaagcgcaattacagatgtggaaggaggtctctcagatgctctgagaactgaagaaaatatggaaggtaccagagtaaccacagaagaatttgaggcccccatgcccagtgcagtctcaggagatgacagccaactcactgccagcagaagtgaagagaaagatgagtgtgccatgatttccacaagcataggggaagaattcgaattgcctatctccagtgcaacaaccatcaagtgtgctgaaagtcttcagccggttgctgcagcagtggaagaaagggctacaggtccagtcttgataagcaccgccgactttgaggggcctatgcccagtgcgcccccagaagctgaaagtcctcttgcctcaaccagcaaggaggagaaggatgaatgtgctctcatttccactagcatagcagaagaatgtgaggcttctgtttccggtgtagttgttgaaagtgaaaatgagcgagctggcacagtcatggaagaaaaagacgggagtggcatcatctctacgagctcggtggaagactgtgagggcccagtgtccagtgctgtccctcaagaggaaggcgacccctcagtcacaccagcggaagagatgggtgacaccgccatgatttccacaagcacctctgaagggtgtgaagcagtcatgattggtgctgtcctccaggatgaagatcggctcaccatcacaagagtagaagacttgagcgatgctgccatcatctccaccagcacagcagaatgtatgccaatttccgccagcattgacagacatgaagagaatcagctgactgcagacaacccagaagggaacggtgacctgtcagccacagaagtgagcaagcacaaggtccccatgcccagcctaattgctgagaataactgtcggtgtcctgggccagtcaggggaggcaaagaaccgggtcccgtgttggcagtgagcaccgaggaggggcacaacgggccatcagtccacaagccctctgcagggcaaggccatccaagtgctgtttgtgcggaaaaagaagagaagcatggcaaggagtgccccgaaataggaccatttgcaggaagaggacagaaagagagcactttacacctcataaatgcagaagagaagaatgtattgttgaactcccttcagaaagaagataagagcccagagacagggacagcagggggcagtagcacagcaagttattcagcaggaaggggcttagaggggaatgctaactcac

SEQ ID NO: 13986 - DNA, 1890 bp, Homo sapiens
aggaactactgaagtgaatatagattctgaaactgttcatagaatgttactgagtgccccatcagaaaatgatagggtacagaagaatttgaaaaacacagctgctgaagaacatgttgctcaaggagatgccactcttgaacattccacaaatttagactcctcaccatccttaagttcagtgactgttgtgcctctgagggaatcgtatgatccagatgtaattcctctgtttgacaaaagaactgttttggaaggtagcacagccagcacctcccctgcggatcactctgctctccctaaccaaagtctgactgttagggaatcagaagtccttaagacaagtgacagcaaagaaggtggtgaaggtttcacagtagatacaccagcaaaagcaagcatcactagcaaaagacacattccagaagctcaccaggctactttattggatggtaaacaaggaaaggtaatcatgcctcttggaagtaagttaacgggcgtgattgtggaaaatgagaatattaccaaagaaggtggcttagtggacatggccaagaaagaaaatgacttaaatgcagagcccaatttaaagcagacaattaaagcaacagtagagaatggcaagaaggatggcattgctgttgatcatgttgtaggcctgaatacagaaaaatatgctgaaactgtcaaacttaagcataaaagaagcccaggtaaagtaaaagacatatcaattgatgttgaaagaaggaatgaaaacagtgaggtagacaccagtgctggaagtggctctgcaccctctgttttacaccaaaggaacggacaaactgaggatgtggcaactgggcctaggagagcagaaaagacttctgttgccactagtactgaagggaaggacaaagatgtcaccttaagtccagtgaaggctgggcctgccacaaccacttcttcagaaacaagacaaagtgaggtggctttgccttgcaccagcattgaggcagatgaaggcctcataataggaacacattccagaaataatcctcttcatgttggtgcagaagccagtgaatgcactgtttttgctgcagctgaagaaggtggggctgttgtcacagagggatttgctgaaagtgaaaccttcctcacaagcactaaggaaggggaaagtggggagtgtgctgtggctgaatctgaggacagagcagcagacctactggctgtgcatgcagttaaaatcgaagccaatgtaaatagcgttgtgacagaggaaaaggatgatgctgtaaccagtgcaggctctgaagaaaaatgtgatggttctttaagtagagactcagaaatagttgaaggaactattacttttattagtgaagttgaaagtgatggagcagttacaagtgctggaacagagataagagcaggatctataagcagtgaagaggtggatggctcccagggaaatatgatgagaatgggtcccaaaaaagaaacagagggcactgtgacatgtacaggagcagaaggcagaagtgataactttgtgatctgctcagtaactggagcagggccccgggaggaacgcatggttacaggtgcaggtgttgtcctgggagataatgatgcaccaccaggaacaagtgccagccaagaaggagatggttctgtgaatgatggtacagaaggtgagagtgcagtcaccagcacggggataacagaagatggagaggggccagcaagttgcacaggttcagaagatagcagcgaaggctttgctataagttctgaatcggaagaaaatggagagagtgcaatggacagcacagtggccaaagaaggcactaatgtaccattagttgctgctggtccttgtgatgatgaaggcattgtgac

SEQ ID NO: 13987 - DNA, 1181 bp, Homo sapiens
taagaattaagtgagatgttacatatgtgacagcactcaacatattaaatccacccaaatgttatgttttaatctaaaaattgattttggtatttctcatattttaacctttgttttctttcagcattgtgaaaaggaaaaaatttcttcttcaaaggagctgaagcatgttcatgcaaaaagtgaaccaagtaaacctgcccggagactttcagagtctttgcatgtagttgacgaaaacaaaaatgaatccaaattagaaagagaacataaaagacggacatctacccctgttatcatggagggggtacaggaagagactgacacaagagatgtaaaaaggcaagtagaacgctcagaaatttgcaccgaagagccccagaaacagaaaagcacacttaaaaacgaaaagcatctaaagaaagatgattctgaaacaccacatttgaaaagcctacttaagaaagaggtgaaatcctccaaggagaagcctgaaagagagaaaactccatcggaagacaaattgtctgtgaaacataaatataaaggtgattgtatgcataaaacaggtgatgagactgagcttcactcttctgagaaaggtttaaaagtagaggaaaatattcaaaagcaaagtcaacaaacaaagctttcttcagatgataaaaccgaacgaaaaagtaaacataggaatgaaaggaaattatcagtattaggcaaagatggaaagccagtttctgaatatattataaaaacagatgagaatgttcgtaaagaaaacaacaaaaaagagagacgcttgtcagctgaaaaaactaaggcagagcacaaatcaagaaggtcaagtgattctaaaattcagaaagattctctgggttccaagcaacatggtatcacattacagagaagaagtgaaagttattcggaagataagtgtgatatggactccactaacatggatagtaatttgaaaccagaagaggttgttcacaaggagaaacgacgaacaaagagcttgttagaagagaaacttgtgttgaagtctaaatcaaaaactcaaggcaaacaggtaaaagttgtagaaacagaattacaagaaggtgccacaaaacaggcaaccactccaaaaccagacaaggagaagaacacagaagaaaatgactcagaaaaacagcgtaagt

SEQ ID NO: 13988 - DNA, 1455 bp, Homo sapiens
cagccttacttctgctgactacttttaggataataaacttaagtcttccaatccttacgcctctcaaatcctacccttctgttaggttaggaatactttgacttccttattactctcattgagtttttgtatccctagcatcaagaatagtaccttaacaatagataattcactaaatacttaagtgattatattagatgtcaaatctttcttctggttttcatctacatgcatatagtcaaatgcttttgaaaaatttaacaatattcattaatagtcttgtcttttaattatagttggtcttggcttggttgctgccagagtcttcggcatcttgatctgtctggttgtgagaaaatcacagatgtggccctagagaagatttccagagctcttggaattctgacatctcatcaaagtggctttttgaaaacatctacaagcaaaattacttcaactgcgtggaaaaataaagacattaccatgcagtccaccaagcagtatgcctgtttgcacgatttaactaacaagggcattggagaagaaatagataatgaacacccctggactaagcctgtttcttctgagaatttcacttctccttatgtgtggatgttagatgctgaagatttggctgatattgaagatactgtggaatggagacatagaaatgttgaaagtctttgtgtaatggaaacagcatccaactttagttgttccacctctggttgttttagtaaggacattgttggactaaggactagtgtctgttggcagcagcattgtgcttctccagcctttgcgtattgtggtcactcattttgttgtacaggaacagctttaagaactatgtcatcactcccagaatcttctgcaatgtgtagaaaagcagcaaggactagattgcctaggggaaaagacttaatttactttgggagtgaaaaatctgatcaagagactggacgtgtacttctgtttctcagtttatctggatgttatcagatcacagaccatggtctcaggtgagttatcagttccagaatattaagaaatagacgtgttctcatttccaaatggaatataaaaattttgatctaagtcattcttttcagttgatttacttagcaaaaaggattaaccaagatctgccctacttcagagttttggagcagtgtaacttctgttatcagtatgaagtttcatttctgtcagttcaaatccattgtgatgtatggaagaacataaattctaaagtttaataaatacttagtaaatggctacatcacatattttaaggtactttagtggatgaagaaggtacaatttttactctcaagaacatgtaacaagaaaatatgcatattctgttgctgtgtattatttctgtatgttatagttttatactgagggttttggaaaacgtaggctgtccctggaagtcatttagtctgacta

SEQ ID NO: 13989 - DNA, 1110 bp, Homo sapiens
caatgatagactggattaagaaaatgtggcacatatacaccatgtaatactatgcagccataaaaaatgatgagttcatgtcctttgcagggacatggatgaagctggaaaccatcagtcttagcaaactgtcacaaggacagaaaaccaaataccgcatgttctcactcatagttgggaattgaacaaagagaacacttggacacagggtggggaacgtcacacactaggtcctgtggtgggggtaggggactgggggagggatagcattaggagaaatacctgatgtaaatgatgagttgatgggtgcagcaaaccaacatggcacatatatacctatgtaacaaacttgcacgttgtgcacatgtaccgtagaacttaaaagtattaaaaaaaaacagttgcttattgcctagggctcagatgttttctctttgtagagatttttatcgtaaatagcttagtttttcataattgcaggcaatctgatattattttgaaccttttacttgtttattcattgagtaggtgactggtatagtggtcccgcaactgaacttgatactgaacctgatgatgaatgggtgaaaaataggaaagatgaaagtcgtgcttttcatgagtgggatgaagatgctgacattgatgaatctggtaagcttgtttggaattaaaattattacatagtgttttaataattgataattaagtacttataattattaggtattagatttatgtattttgtgttttctaaagaaactggtgtttctaagcctactactttttaaaatttgaaggaataataatgaaattttaaattaattgaagtactttaaagagtgcataggattatttctcgtttttatattaaaatcaaaaatcagaaaatggtaccttttttcttatgaaaataatgtacgtttattatagtgctttgtagtttacaatgtgattttagcaccacttcaagtgatcagttgcacagcatctattgagtcatctatggcttgagggaaataggatgaaactgttgagtcgacttactcgtttgtagatagtcttaatacttgcctaataaggttattgtagaattaagaagtaatatac

SEQ ID NO: 13990 - DNA, 1132 bp, Homo sapiens
tggaaaaggtcatgagatttgtgtgtgtcattaaaaatgccttggagatctcataatctggctgactctatacttgttgatttaaagctgtataacctgttttgttcctttttcaagtgatgctgcttaatgctacaaagtgagtattgttttttctgtgatgcctttgtaagaggaagttaattctgtgttcattattgtagctcccactgatgaagtatgatttgggccatgatagtttaaccctactggttcttcacaagtttaacatccccatgttacctctaatacatgttatttcattttcacatcttgcaagcaggaaggaattgacttcaggcactggattttgtttatagaaatgtaattgtaatttcttattgcatatgctctttagcctttactggtaaagtttttcttttttatttcagaagcagaagtgtcagaacactccacaggtataacccatcttcctcctgaggtaatgctgtcaattttcagctatcttaatcctcaagagttatgtcgatgcagtcaagtaagcatgaaatggtctcagctgacaaaaacgggatcgctttggaaacatctttaccctgttcattgggccagaggtaggtaaatgggtttttaaaatattttcatgtatttttctagatgaatattcatttacattaatgagcaaggccagagagagaaactctgagaggtcaatcaaaaagtagattttatagttagatgatgttttggtggtatatatttttggaaaactagcagtgatgaaattcatgggtaaattataatgatgtctgtaattaaaaaaaattaggaaaatatatttgtgggaggggatgcaaaaagattgacaaaattgataattattgaagataagtgatagatacatggggattcattatactagttctgcttttgactgtttttcagaattaaaagttaaaaattcaattagtaagctttcaaaactgctttaaataattatgtttaataataattatatgaatatttttaaaatacagaataaattctataaaatttaagggtgatataccattatggctccattttggtgatggctcaaaataattgtgaatctgtttttgcctttgaccta

SEQ ID NO: 13991 - DNA, 1229 bp, Homo sapiens
atgttccattttaggaatactagatactttagaaagcaagtctaggaggtatggtgttagtagcttttcccctttcatctacccgtctgttgtatttaacctaatcaagtttccctctttaaaatttctgcctgcctgtatttagcatacatatagagtaatgaaattttaggtttagaaggggcctggtttaatctcttctctttaaagaaaccgtgatttgtgcacatatcatttttctgtgtcaccaggccctccagaatgcaaaccaacatcttcctggcctagtgcactttttattataccattataacttgttaatttatgaatttcttttatttgtactttaaccaagtgtaagggaagtatgctgtgtgcaaaagtgaatagggatgtatttgaatattttttatttgtgcatatttgcacgtatttattacacttttctttttaaatttttattcagctttctaaaaccaatttttccaacaacaacgatttccgtgctcttctgcagtctttgtatgctactttcaaggagttcaaaatgcatgagcagattgaaaatgaatacattattggtttgcttcaacaacgcagccagaccatttataatgtacattctgacaataaactctccgagatgcttagcctctttgaaaagggactgaagaatgttaaggtaagttgcaaaaatggatattcaactgtcaaaacttgtgccatcttctggtatatcattggcaaaacttgtcactgttttatagtaaatgatgtaatgttgaaaaaaattattttgtcacttgttaaagatggcaaggaagactatttaaaaagaactactgcagtggggagtttgcagtagtggagagagatcagtcccgacggtgaatacagtaaggacaagtagggatttatatccaaggggcaaagtgggaagagtggatggaaaactactgaggaaacatcaaggccaaggggattcttgctagactaactataaaattcttgctgaaggcaagaggatagtaacatattgaaggatcagtagtttgattagatgtagatgcagatcagatactaaggctgagagatttttcactaaaccaattcagcaggatttttgctgaaactggactaagccgaacaagaacagagtataaggtcaggcctaagttgagaagagggcccagaggagcctgactcaggtttggtgagagtcttcatca

SEQ ID NO: 13992 - DNA, 1211 bp, Homo sapiens
aaggtgctttttggttttatttgagatgaagattgtgtttccgcttaattactagtttgtggtctatatcatagaagttatttcccaccccattttatcttgacaaccgtgtttgcatttctgtaaaacttctacaacttctggtgtcagaactgtccagaagatggtactgttaactgttatttcctttgatgttttgattttgaagtttagctctcatgcaaatgtttcaggcgtacatacataggcagaaagcaatttttaggtgatttgtctgtttcttggatgaaatataaagcaagctttaatgttctgacttgttcatttgaaatacaaaaaagtaagtgaattttaatgttttgcattaactaaagaaatctgaagattaatgttgaggaaattgtatggacatgcctttgtgaaaccaggaagtattttaagttaaaaatgaaaaaggttttaattgctttgtgtgtgttttaatggagccccattttagaattattttttccatctccctttaccaacaaaaggaacaatgccaccgtgaatggaatagtttggggaaagctttgccaaacacaaccctgatttcagagcaggaacatggtttggatagatcttcagttccgcttgaattattctgttactgcgctgtcattttcagaagatttccattcctttgcagatgctgttgggagttcgggattatgttcatttcttctgttttaatggcattcagtactaattttataagtgcatcttgtgtgaatctcaataaattcagttttgtaatcttttttaaaaaggtcactgaatttattttaatatttactattgtatttggtagagtgaatttcccactgtataataagtatttatttgtaattcacaagtgatagagctatcttaatttgaattattgctttggtcttaatggtggcaaaatgtttaattttgtctttggaaaaaataggctcggccttgattatagaccatttaatatttctcagcaaatgaaggtatttgcattttacaagtgttttgaatgtcacacaaaatatttttcacatctgggagtcaagttcaagacagtgctttggttttaaaaaaatctaatgaaggcacaggataggccagacccttattaggttttcctttagaataagtgtaaagaccaagtgtcactgatacgcttgtccagattttct

SEQ ID NO: 13993 - DNA, 1216 bp, Homo sapiens
tgaaccatgctaattctatgatcttgagaaaataacgacctcactcctccgttttctcatctgaaaaatgggaatgaaagtaatgcttttttagggtggttgtgaggattaataaaataatccctagtacctgggtaagcactccaagaatgctattgtaactggtttatattattttccacaactgcctttacacttgctctgggtatggccgttttaagacaactaaagcctgaatgctttccatggggtccactcagacatgcttgctcattcaaactctgcgagtcctgaacgcttacccctctgctggcccaaatcctcaccagccgtctcaaatagcttcagccagctttgcacccttggaattctccaggctagagaaaggcaccagtctcatggagtgatacatcaaaatccgctctcggtagacgtcttcccttcgagatctgctttgagggctgccctaacttggcataagaggacaaaccctcggctttctctcgcgtgcgcggtgtggtggcagcaggcggagcctcgaaatgcagaacaacgccggcgagttcgtggacctgtaagttccgcggaaatgctccgctagcaaccgcatcatcggtgccaaggaccacgcatccatccagatgaacgtggccgaggctgacaaggtcacgggcaggtttaatggccagtttaaaacttatgctatctgcggggcgataggatgggtgagtcagatgattcgattctccgattggccaaggccgacagcatcgtctcaaagaagttttgactagagagaatcacggatgtggaatatttgtcataaataaatagtgaaaacctaaaaaaaaaaaaaaaaaagacaaaccctcttttcatcccacagagtgaggagtcaagaaatgtcaaaacgctggtacacctataaatcccctttaaggcaccttctcaagccctctcttacatagttgaagggggttgacggagttgatagccacaggttctgtattgtaatttctcagtaagtcctaaaaatgtgtccaatgtcactatttataatgtagagaacttgtacattataatcagctttgagcttcagccacaattccaagaaacaagaaacatcttgatgtggtttggctctgtgtccccacccaaatctcatgttaaattgtaactcccagtgttggaggaggggcctcgtaggaggtgactg

SEQ ID NO: 13994 - DNA, 1130 bp, Homo sapiens
cctggtacagggagatcacctttctcatgggaatttgtgtgacctgcttttagggagaaagggaggtcagagagtacctctgcacctgctgtttctcaagcgcctttggctgaaaataactaatgtgccaaagcggtatattttggagtggcatgttctgaatcctttcagggtctatcttggtgacaaatagatttttcttaaacaaaacatctttctgctttatttgaaagtgaagccgtctcctaggagtgagcacagaaacccagggcaatgtccaggacgggcagtgatgggtcttgctttggcaggaatctgaaacacttgggcaggtgcacatgtagctgaccccagcacctgcttctttttttgctttcttctgtccatggggaggacacggtttgggtggaattatttgttccttctggaatttggggactcctgagcctctctaagggatctactctaattctattatatttacgttttttgcttattcccagggccttgttttaggaatctattccaaagaaaaagaagatgatgtgccacagttcacaagtgcaggagagaattttgataaattgttagctggaaagctgagagagactttgaacatgtaagtgttgcttgtgggctctagttcttaaagtgcccccaaatcgaaacagtattttttctttcttttcttttttgaaacagagtcttgctctgttgcccaggctggagtgcagtggcacgatcttgactcacttcaacctctgcctcctgggttcaggtggttctcgtgcctcagacacccaagtatctgggatcacaggcatgcctcaccactcccggctttcatatatatatatatatgtattttttttttttttcagtagagttgggtttcactgttgttggccaggctggtgttgaatccctggcctcaagtgatctgcctgccttggcctcccaaagtgctgggattacaggtgtgagccactgtgccaggccaagaatatttttctatgcctttttgtcagaagagacaatgccgggaagtgctctggccagaagcagaagtgaaagcctgtgtctttggaatgcactttggtactttctgtttcagtatggatgggtctgca

SEQ ID NO: 13995 - DNA, 1098 bp, Homo sapiens
ggtgtcagattactagactaattgaatttttagcatttgaaagaagcattcagataatctcgtcttagaaatatttccataaaagcagtccttgcttttggaaattttgtttaatcagatcttaatgatagaattgcatgtgaccatcttaacattgtataacttagttccattgtaggtacttctaaaggaattagttatgagaaaatttacctgatcatatacaattttaaaatggcagacataaagctttagcgaaatacctcatttgaccaatctcaatgagttgtttgattgattatattctttccatgatggatgcctagaatacagttgacaagaggaagtaagtgtctaagcctactagataatgaatttctttgttgtgtttgggtcctaggcagagtattaacattcagacaccttgttgaggagatgtgcagaactttcctctagctaatcccatgtctcctctgcagcaaggaaattcttgcttgctcttctgagaatttaaatgcaaaatatatttctcctttcttcttctgtggagtggaagtgaacaaatgctaaataatgatgccacagcttttcagtgggaaacgctccctaggtgattttccatatcctgtgggccggtatgggaaatgggacaagtagaaagggacaggccaagcatgttagattttgtggtgggagtggagggggtgtggaggaggagatagtatatgtgtaaataaagtttagaaacggcacattaagatttggaaggggaacacagagctgtagttgagtaatccaggatcccagaaatatcaaattctttttttactactccatcttactagctttgaatgttgctaatacagaattttaaaaaagattttgtagctacaagggctgttattatttattttcttctgactcctcttgtttcctccttcttatatcctacataatattttaataatgattgatgtaattggaatagaaaatttcctattgcaattacataccaaagactttctcttggcttattattgtgctaatttctgttacttcgtaatccttcatgaaactaatgaatgttcttctttctct

SEQ ID NO: 13996 - DNA, 1196 bp, Homo sapiens
atagtctgacagaacattcaatggacaatgatattaaaatgcacgtggcgcctttagaagttcagtttcgaacaaatgtgcactcaagccgccaccataaaaacagaagtaaaggacaccgggcaagccgactcacagtcctgagagaatatgcctacgatgtcccaacgagcgtggaaggaagcgtgcagaacggcttacctaaaagccggctgggcaataacgaaggacactcgaggagccgaagagcttatttagcctacagagagagacagtacaacccaccccagcaagacagcagcgatgcttgtagcacacttcccaaaagtagcagaaattttgaaaagccagtttcaaccactagtaaaaaagatgcgttaaggaagccagctgtggttgaacttgaaaatcagcaaaaatcttatggcctcaacttggccattcagaatggaccaattaaaagcaatgggcaggagggacccttgctcggtaccgatagcactggcaatgttaggactggattatggaaacacgaaactactgtgtaacattgctgggcttcctaggcagaaattcatataaactgtgatactcacattccttgaagctatgagcatttaaaaactgtttacagccaccatagggattcaaaagaatttggaataaactttgaagttttggattttacttatttttatccccaaattgttgctattttttaggatctgaaacaaaatctttctaaaacattgttttagttgtcaaagcaccaacaggacattttgggatgtgaaatgtaatttcttggaatctgtaatttgtacttaatatttcaggcttgtatttaatataataaataggtgtttgttattgtgtcgatctgttatttttatattttacaatataagcatttagttctattttaatgaaattagtggtttggggtattttaattagagttacacataagtcagttatatatatatattgcatggttaagtgtattgattttggcacataaatcaaagtgatttttgggttgctgtattttataagtctagttttaaatattaccaggttttaaaaggatctctcaggatgttttttgaaaatggaaatgcctaaaaaacttcctacgttgccttacttttgcgttattccttggatcctattaatactattttcaacatggtcgt

SEQ ID NO: 13997 - DNA, 1324 bp, Homo sapiens
tctttacattaatgtatcttgaggggtttgttattaagtttatggtaagtccaacatcagaaaattcacatcttactaaataaaatacttaacacatttctaaaagtgctatttgtaaggattagttatttgtatttttctgagacttgaattcatagatttgccttggttcatcagtatattaatgaataatgcctatcctattaacaactccagtacttcaattaaatgttaatttggaaatttttctgcccacttctaaacaggttggtgaaaattgcccctcaatattatgacatgagcaatttcccacagtgtgaagcaaagagacagttggaccgcatcattgccaaacttcaatccaaggaatattcacagtactgaattcagtgcttagaactgaagttattgagaggacagctttaaaagatgaatgaactcaaaagttcgagttgtgctcttcacgttggttcgataatggcctttatttgaaagctttttaatttttctttacagtaaatattccattctgatttcataaattaaacatttatgcctcccttttgtgttgacactgtagctcatactggaaaagtcgatcaatgttttgcagtttattgaaagtagttctatatataacaatgttataagcatttctttagaaatggttgaaaatgcttctaaaatgtgattatcgaccatggtatgcatgatcgttgtaattgttgacattccttttagaagttgtgaaatgttacaacttgtgcttatgtagacacaatcttctgtctcagtacagaggcactgacttcaataaagtctatttatactaattttggccaaagccctttggtatctttgttctagtctctaagtatagttgtttttcaagtgtggagcttttttattattataattatactgttactacatatttagtatctttctaccaggagtactccttaggaaaagtagctgttaaagcagtatttttaagagcatggcttagcgctttgttaggttaatcaggatgtgatcgatctaaaaggggtaaaatgtgtgtagtgatcatttgaaactggaccccaaaagagagaataatgaaaggagagctctctacttgtctttcttagagttcctttcataaggctcataatttattaactacatttttgtcagatgtttttattatacttctagcttctcaaacacgtttattagtattaggtaagaggaaagcatattttagatctcagtttaacaaaattcttagtgatggaagttttatgcagtatacaaaataatttgtatagtgtgttaaaat

SEQ ID NO: 13998 - DNA, 1162 bp, Homo sapiens
gaagtggattataaaagtattgagcaaaacccaccactgttgactgtaatgatgtgaggtggagttgtctttatctccagtagcagtgtttgtgctaacttctgaatatacttttagtgcacaaaatacctcttcacaaattgaaggagaatttgagaaagattgagatgccatcttcttttactcaatttggacctatcctttcttcatcctaccctcagtatctgatttctgttgtctaagtaggaggggttttacttgcagcagactgagttcttgtgttacctcacctaatgttaaaagttaaggaaggtggggcatcagcaaggaagggaaagatgtttgtggtggagaatgggaaacccttgattgtagggtattttttattatttctgatagttacataatccattggactttttattcatttgaacgttggacatttactctctttgtgattataacgctaccgtgaacattctgcataaaattcagaatctgaattctaaatttttgtttttaggaaggatcgagatcgagaccgggatcgtgaagatcggtctaaagatcgagaccgagaacgtgatagaggagatagagagcgagagagggagaaagaaaaggagaaggagttgcgagcttcaacaaatgctatgcttatcagtgctggattaccacctttgaaagcttcccattcagctcactcaacccactcagcacattcaacgcattcaacacattctgctcattcaacgcatgccggacatgcaggtcacacgtcacttccacagtgcattaatccgttcaccaacttaccccatactcctcgatactatgatattctaaagaaacgtcttcagctccctgtttgggaatacaaggataggtttacagatattctggttagacatcagtcctttgtactggttggtgagactgggtctggtaaaacaacacaggtgagttattgtataccatggtacatatttcatttatgtttaagtttaccaaatgttgcatatttgattctggtggtcatttcccttgtctgtcctatagaacatcttgaagaatagctgatttgatgtttaattggcactctgaatttcagagtggaaatcctatagagaatacctctcccctgaatctaggggaaaatagt

SEQ ID NO: 13999 - DNA, 1151 bp, Homo sapiens
gatctaaacaggtgatgggtggggtgtgagaagggggtgacccactcaactgcaatcaggttttccttttttataatgttattttatacaagactaaagcctgtagtctacagagcgcctgtgctgtggaaggagatatttgttctggccaacttactaaaggagcatagatgttcttggcacggggtggtgatatctttgcttcattaatcttactgctccatcccaagaatccctgaagttttaaacaacttctgcaagaagcattcttccagtaataatgtaaaacaaaaaaccaaccaagcaacagcaaaaatgcaaagcagagaaatatgtggaccgtccccagtggagatcagcttgaaggagggggtggatctttcttctactttccctcccatcacccactgggtggtcgtctgctcagcttatttcttctttatgaactttgtggcgaggctcctggactgatccctctgtgcggccatgtggctttaaggcctttccttaaagggggcttgtccccatactccatggggtcgggaatgggtctattatcaagactctaaaaataactcttagacatgaagagcactgtgttattggacagtggatgataaggccaccttacatttagcaaagctttatatttttccaatgcacattagtactcacctcatttgttcataaatagctctgaagtttattgcagggcaggtattattctaatttcagagagaaggaaatagacatgaaaactatatgaattgcctgccatggttatccaatagggactggcaaagcaataactttccctctgatcagcagacattgtattttctttctaagacaccctgctatactctcccagagaaagactttcatttctagcatgattttgaatttggcagcaccttgagataaagtaaaaagtgcaataaaatatgcatagccagaagaaaaatcatactgaatagacaccattcaatcaactggtccatttaacaattaacaaacatgcaattgcatgccccactctttttacattcaaggccccactcttgaaagtggtccagaaattttggatagttttctgttgtactaaggaggatatctagctggtctggttgtttctccccctgcatagctat

SEQ ID NO: 14000 - DNA, 1161 bp, Homo sapiens
catggggagaaaatgtttacagacaaataattttgggagctgcctttgcaaacctgcctgttggcatattgaaggctctaagaattccttcactaaataacccagttttaatatatccttatccaaagagaaactcatttttttaaagtgaaatatttgttaacagcccattgaacatacttttaaaaacactatggtagagaatgctgtgttgccttctgggctgcatttttcttattgatttggaattgtaacctatgtatgagaaagggattttctggtattttggtgacgttgtacattgtcccagactgtttgtaaacatgaggtcagacatgtgtaaggtagacgcctatggccactggcttgaccaccttggaagtcaatgactattttgagatgaagtatttaactatgaatatcatgaaggttatttaaaaatgtatttattttatctttggggttcaaacattaaaaaaatttacataggtgtagtaactcatttcaagggaataaatgctggattaaaaagtgtaaatttttcatgagaatttgggactaaattgctgaaccaataaagctgaagagttgcaacctctagagtcaaaaaagggattgaaatgttgttgcaaatgtaaatgctggcagtgcagcttgctatacatgtaagccaaaattgttttatagaacaagtgatctatattgttgtgatcatcatttagcttaagaaaggccagagctgggagagtagcaaatgttttctcatctgcagtgtatcagcagttcttgggcttcagctgctgaatagataataattctaattgaacataaattacatgaactcacatgtgaatgatagatatgttacaatatttcattcctgatgcagaaaatcagctgtggtttttattattaaccctttctttttcagtggttttggaattctagctctattcctcctggcttaaaatttgagggcatagaattcacaagagtttttgaagagttctgtctattcaggctttcctttgtccccaccctagtgtcattttcactcactcccatttctacacataagtattaaaaaggatgtatttattataattcgctagtactgattggtaagcctcataattggcctttgttatctttgtactgtga

SEQ ID NO: 14001 - DNA, 1194 bp, Homo sapiens
ataaggtccttttgtgcaaatatttttactgtgatttatagcttgtattgattatgatcatgtggtggccttagctatttagttcttgttctgataaagcttactaagtagttaataataatactagattttaatctcacgaaattgccactgttgttatgtggagatctttttatacaaaatgaaggctgaatttattgattttgttgtaaattgatgggaatataactttcctataaaaccattctttgattcagacttctgatttctaattctttatatatgataagccattaatttaaaaatgcttttatggccttttcttttttagttaagctcaaatcttcgtcatgtgagagtatttgaaatggacatagatgatgaatgggagctcgatgagtcttcagatgaagaggaggaggccagtaataagcctgtaaaaataaaggaagaagtgttgtcggagtcagaggcagagaaccaacaagctggtgctgccgctttagctccagagatagtcattaaagtggaaaaacttgaccctgagctagactcctaatctagcttgccattattgtgtgtgtaattatggccaaaaggacataggagatggactaagatgtcttggaccacctttgtgtaacaaagaaataaacagtaaattttattttttcatattctgcttcatcttctcttagtgatatagtcactatgatagactttattttttctgagctttctctttaatgctatgtgcagaactagtgtttaaagaaaacagggccaggcatggtggctcatgctggtaatctcagcactttgggagtctgaggtgggtggctcacctgaagtcaggagttcaagaccagcctggccaacatggcaaaaccccgtctctactaaaaatacaaaaatgagctgggcgtggtgcatgcccctataattccagccacttgggaggctgaggcatgagaatcgcttaaacctgggagccagaggtttcagtgggctgagattgcgccattgcactccatccagcctgcgtgatggagtgagactctgtctcaaaaaagaaagagagaaggtgaacaaattgaatatgaagaaaaagtctaatcttttctgtcagaagggtaggtatcaggaattgttcctgtatcattgaaatagtcgctcatcactggaaattttaat

SEQ ID NO: 14002 - DNA, 1248 bp, Homo sapiens
gggaattagttgacagaaaggaaactagactctgtaaaaggagttaagagctagggagaggcagggtggggtgatggacaggttggtagcatgggaactgaatgggtaatcagaaactgggtccagaatgaagtagcaggtgaatttcagcacagcattctccttgtcctttctctgctaagacacagaaaacattagggttttaggtggatggaccacctgaggtcaggagttcgccagcctggccaacgtggtgaaaccccgtctctactaaaaatacaaaaattatccaggcatggtggtggatgcctgtaatcctagctacttgggaggtggaggcaggagaatcacttgaacctgggaggtggaggttacagtgagctgagatcacaccattgcactccagcctgggcaacaagagcaaaactgcatctcaaaaaaaaaaaagaaagaaagaaaagaaagaaaacagtagggttttacagtttttcacatcataacagctggtgtcaaaatcaaaattagttactaaattacctgaaattttggaaattcgtatttctaataatctgttattccagaaaaaataggaatttactataggagagttatatcacattgtcttatgttgtagaacctgaaacataaccatatgtttttcttgtgaatttgtattgttgttgacttttatttgtgttgatgaacagaaatagaacatatgatacttgggttttgccctgtctgattcccaaaagttaaatcagaacacagtgattgatttctttttgtgaaatgtaacttagagactattgatctgttttccttttttttttttttttgagacagagtgtcactctgttgcccatagtacagtggtacaatcttggctcactgcaacctctgccttctgggttcaagcaattatcctgcctcagcctcctaggtagctgggattataggcgcccaccaccacatctggctaatttttatgtttttagtacagatggggtttcgccctgttggccaggctggtctcgaacttctgacctcaagtgatccctaccctctcatccttccaaactgctgggattacagtcatgagccactgcgtccggcctattgatctgtttttcattactatgaacaactggtcaggctcagtggctcatgcctgtaatcccagcattttgggaggccgaagtgggaggatcacttgaatccaggtgttggagactagcctgggcaaca

SEQ ID NO: 14003 - DNA, 1199 bp, Homo sapiens
ccatggcttcctggccatttaatgccaaggttccggcagcctgctcacaccatctcaaactacactgtaaattgcacagctcagttctgatgtcattttgtttgtttggggtggaggaaagtggaaggacatttaaaaatgaatcctgtttttgttcctgtttctttccatagggttaaaagtgtggtctgatccatttggcaggaaatgagagggctgtcatcagctctgattaagaaaggagatttcttcatgctttcgattctgcatggggtacagccagtcacctcaccagagaatgacggctggagaagaaaactctgtaataccataaataagagtgcttgtaataaaagactgtgcacaaggattaatatttcccttcttaagtatcaaaagaactctggaacaaattataccattaggaaggttttcatgattcagttgattttccaaaaatgaagctatctcacccagctgggtttggaggagcaatctgcttattattctgtcgttaccacttactcaagcgagctgtgatatgaatacaagcaaccagtgggctcgggaaggtccgggtctcttctgccatcttccagataagagatttcagtaaaaaactgccatgctgagctgccttatagagctcttcgaaaatgttcgagttgataaagctctttgaggacaaggtacttcgtgcacctcatgctgaagattgcaccgtgttggaaaataaatatgaagcaagtcaaactagatgcatacacttgtgtagaaatcaataatcaattaatagaagtgaaaaaatagacattaaaatgatttatttctactttgcagtggtgtctttttgtaaatcatcttttgtaaagcaattaaaattatagtgccgagaagtacaatttgactacattatatttgactaggtatctgtgtgcgattcatctgtttgtactcaggtaaacgttttagaggtaaataacaaatttgttgagacaaatattgaatggtgattctctaccaggtacctcactaggtgctgcaaagatgaaagtgagaagactagttgagtatcccttatccagaaaagcttgggaacagaagtgttttggacttgagatttttttggattttggaatatttgcatataaatgatgagacattttgaggatgggacccaagtctaagcatgaaattta

SEQ ID NO: 14004 - DNA, 1158 bp, Homo sapiens
gtgagcgggaagccgcttggaaaacacccattgaggaggtgtttcatctaggcctgtgaaacgcagcccattttcccaggacccctcctcccttctcctcggccccgcctcctgacccctccattcctcgtccccgtagtaatcccctccggttttcctcagtctccacgtacgtccctcaaagcgcgtcctaaaacccggataaccggagcgctccccatggaccacacggagggctcgcccgcggaggagccgcctgcgcatgctccatcgcctgggtaggtttccagggaaggcagcgagcaggatcccctactctgcgggcggcgcgaggcgtctggctcttcgcggcggcggcgaggggaaagggagcgcgggggctgggtggaatcgaggagtgaggaaaaagggaaggggcgggggagagggaccagggaaggcgtcggggggaatctcgcgagggttggagttttggcgagagtttgtggaagatggcgcctgttgtgacagggtaagtctgagggaatcggagcgccgggaaccgggaaagttgcgggcgtctggcagctcacggcgggcagcgggttcgggggccgcggcgcgcttggcgttcgggggcccgcgggggcggcgtcgcgtgcgccgagcgcggcggcggcggcgtgtggccgtgcgctgccgctctgcgctgccgtggctcaggctccagcgcgtgagggcgggcggcggcggcggcggcgaggccggcgggtgcgggcgtgagtgcggcagggcgcgcggggccctcgggcgccgtgcctcccgcgcgcctccagcgggctctgcctgggggccccgtgcatctttgttcctcgcggccgttgtcgccgcttcgccccgctagtgcccccggccccgggcgctttgtctttcaccgctacccgctgcgactctctacccccggccctttgtttcgccgccttgggcgctttgtccgacccgtggcgtcccgcatcccctctccatctcctcccctccgctgtccttcctcccgtgcccctttgttgtgccacactcttgtcgttagcccagtgacctgccacagcccgggcaccagatttctgccttaattgttcttccattgtctttctcctgtgggtcccctctcacctttctgta

SEQ ID NO: 14005 - DNA, 3159 bp, Homo sapiens
cccttaatggtagaatgaggaaaatgtccgcaaaagcatgttttattatctttacttttttggggggttggagggggtagcctagccagaacatcattgtaatcttaaaacataagatgcttttattagatgatcaactaaaatagctggaagacagtactttagaaacagatagttgtaagattataaaatgcaaatgtaacttatgttttcatttttttctctgccttttttgtttgtttgttttctcttttccagtactgagcatctccacaaatgtctcctaactcagaaaatgtttcttttcttttcagttgagatttggttgcattcagggttgtaggttggccttgcttgctaaccccgccggttttaccgtgctttcattcctgaactttgtttatgcctttgtttggtttcttcgaaattgcagcagactcattgggctacatttagtacaggaaccacgtgtgtaatgttatacaacacagtctagtaatacaatcatccctcttagagtaaaaactacctctagattgtggtaagcttttactgtcccataaaacaggagccacagtaccttatgaatgcaaaactgtaacttcctacagtgtttccctacagaacattgtctttctggtgtcctgggctgttttgaaaaagtttccattaatagactttttagaaattattattagtagcattttttttccagctttgctgtcttcatcactcactctatgctcagactatgccactgtaaatattcttcctaacatctttaaatcgccttttcctcagttttcaaggggaaggtcatttgtaaagcacgttaggtggttaaatcagttattgcggttttctcttactgcaagcctttttaatcacccccaggctgcattttattctatatcgccttttttcttcaaatctgctccaatcactcacttctctcttataagctaatcctgcctcacaccttaaatctgtttcagtgatcaagggcagaactcattgtggccttatctttctttgttgtaattgttcactgtctctttcttacagaccacttatttctgagtagtagttattcctctctatggagtcatggcaggaatcattacacagtgcttttgttcagagcatggacatgttcctagtgctgctttgctttaacggccacaagtttcctccacttcctaggtttggtatttagttaaggaatcatattaaattaaccaataacaaaagagatacttttgaagaacaaactattccttacccatttttgtagctcaaaaataatttttcaagttcatgaccttattaaaatgaacttgtgtttttttaacaaacatgtatgttttattttgatagtttctttccgtaagataattgaaatattatactgtaaacccttttcttttctttttttgaaaagtccaagaatgtacttatacaggcatttttccccacctatttttggccattctcataccacagactaaagagtgaaatgatttgtccattgtagcttattgtttatcagtagttcttttgtcagctgcttacattttttctttcatggttttgtgaatcattttcagtatgtaatttataggaaccttgtcctctggttatagtagactgtgtgccctcctccagtgatggcattattagacatgctggtcatttaccctcagaaagactctcttattagaatggtgagtgcttcagttatagtatgtttgaatttttaaaaaattctgttttagaaatgtatcttatgctctcatgactatgcagtttctaaacatacacatagaagctgagtctctgatccaatatgtttttatttgttccatttaatttatcacatagattgggaaggcaagctaaaagccttaaaaatgccctttatattttgagtgatttcagcgttgaacactagtatactatctaaatttgctgctcactttctttaaactgtggcaattaaaggcatgtttatacatgacttaatcgtgaaatgtttgtcactcttactgcacagacttatctgcaatcataactggttagtttttttgttttgttttgttttattgtttttaatgaaactggtaccatctgtgctttcacaaaaaacttccaatgccatttttgagaactaacctaactagtcatgctaaccagaaaatccactggggaggaggttccttttgaaacaaaatgctgttcagttagtaaccaagttactttgattgcaaaagcagctgtgtttctgataagtactgaacaaatgtgtgtaattttctgtgccagacttatgactttgttttcaagcactgtaatgtgggatggatggttagaaacaataatatattagggtttctgtttaaccctttcaggactgaactgtatctccttttgttaattttcccctgtgttgtgataaatgtttgccagcattcagtactgtgttggtccagatgtaggtttatatgctcatttttagcttatttcttgtaccttgcagcatgctctacgcattcagtccttaaggggtttattttacaaactgtgcgcctgtaaggtttattagcaataagatagaaaattgagcaagtttataccataattttgtagaaaaaaagaatctgctcagttccatatttcatccgtgaaaaacttgcaatacgagcagtttcaaggaataaataaaaaggaaatgtaaaccattgtaaaagtcttctgtcgaatgtgcctgatgcatgtattatcgtcttttatttcagaatacttcataaagataaaattaaattctatattatagttggtgtatttacaatcttaccatgtacatcacatcaaagtgatagctctactaatttaatttccttgtcaatgtttttaactatatagtgctttaaagagattttttttccctgtgtaaatggtgaaatgggctttgtcactcaagggtcatatctctcaaatcagaatcatttaaagctgattgcaacaaaatttgagaatattacttagcaataacttacttttccaatataagatggtcattttgtctgctataggaaggaacacataatcgtttgcctttgaggggtgggggtgggtcctagaagtggggatagtattctt

SEQ ID NO: 14006 - DNA, 1566 bp, Homo sapiens
aaaagcctttttaagaagaaatctaagtgaactggctgacttgatggaatcatgttcaagtggcatctgtaaactattatcccccaccctccactccccaccttttttttggtttaattttaggaatgtaactccattggggctttccaggccggatgccatagtggaacatccagaagggcaactgtctactgtctgcttatttaagtgactatatataatcaattcatcaagccagttattactgaaaaatcattgaaatgagacagtttacagtcatttctgcctatttatttctgctttgttctcagtgatgtatatgcaacattttgttgaaagccacgatggacttacaagctttaatggactcgtaagccagcatgggcttgcaaaaatttcttgtttaccagagcatcttcttatctttccacagagctatttacatcctggactatataacttaaaagaagtaaaacgtaattgcactactgttttccagactggaaaaaaaaaaaatctctgcaagtgaaactgtatagagtttataaaatgactatggataggggactgttttcacttttagatcaaaatgggtttttaagtagaacctagggtttctaattgacttgatttctggaaatgaaaacccgcgcttttattatgggaagcttcttgaactgcatttactattgtgaagtttcaagtcccgctgtaaagatcatgttgttttgttttccccagggctttcactgtgatttactgcattgcaggctgtatgataaaacacacataatttaaagagagaaggctcttgattccttatgcaagtggaagagttgaaacttgattgaaggacttaaaacattcacaaccttaagccgaggtggggggatatggggattcaggcaattgtttacacactttgaataactgcaaaggatttacggtttgtgaaaaatgtgtactgtggaaaagataataaattgaagacattattgtgtgggattgtgctgatttttgttgataacacaaaaaacactatgttttctggagagctgtgtaagctgtcttgttgcttagttgcaatataagaaatagtgatgttttggacgtaagttgtcaacaaatttctattttatattgttatatttttatgtagtttgaaatgtaaaaatgttctaatatcaagattaacaaatataaatttatggtgcatttagattgcgttgtattaatttataaagtatggtgttcattaaattggtgggttgtataagggtagcttttgttgttaaaaaaacagtagagagttaagttccatatagcaacaaagtatgttaacatctagggagtttctgcttataccactttaaaaatatgcaatcataagtgatttggttactgcaatgcagatggatgtttggatgaacaactgatacattttagttagaatgctttttcagcattatggctaaaatatatgtctaacccagtgctatttaggtgaaaatgctaattgataaaccagaagtttcttttgagatttgctttaaagaaatgctttag

SEQ ID NO: 14007 - DNA, 1151 bp, Homo sapiens
cgaagatggtctcgatctcctgacctcgtgatccacccgcctcggcctcccaaagttctgggattacaggcttgagccactgcgcccggcctagaaccctgcttctcatataagatgggcctgcacctacctctggcatgtttttctttgtgtatttcctgtttttcatcctgtaactaatgctcattatttaaaacactccagttacttttccctttaggcctggcaaacttttctttttcttttttttttttataactgtacattttacaaaacacctgaaaggacccagaggcataaatagtattacatgatttatggtagctctggggtgagctgtgggggaggccagttacaaggtctccaagacccgcctccatgtcagtgttggggggtgccttgagcacttcttttatttcatataggaaaatgcacatctttcatttgtctcccaaaagatgatttccataaaaatatacttcaaagtatttactgtacatagacttcaatgattttatttccagcatcaaactaaacatttctaaccttttaaataaatggggaatttagtttcatgagaatttttactgacaactaataaacactgtatgtgtacatattcatatacactgtggactggagaaagtcagtatggaaataaatttcactgagatccagaaagtagcaatataggacttttaggggtatgtattagtgtaaataatatatgtgcagtctaggctaatcattttaattaaaaacaaataagcatacttttttgctttaaaaatatgccctcaaaatggtgggggataaaatgtaagatattctttagctttaattatttttccatcttattcaagtcagagcacttttttttaaatagcaatacaacaggcaagagaatactcaaaaatatttaaaactgtattgataccaagagtatgttttaaatattttctaataaatacttgagcggtttttgtctggcaggcttccaaatttgccaaaattaagcgttcagtattttcaacacatacgctttttactggtttatactgaactatctgatgagaattcctgtgttcccaaagcaactgatgtttacaggtcttgtgttactcctcctcctttctaaggatgagggaatc

SEQ ID NO: 14008 - DNA, 1097 bp, Homo sapiens
ttataattcttctgtgtttttaaatattcaggcagattaatatgtgatatgatgcttacccttggttaaagatctacattttttgttttctcttgcagcaatgacttgacttgaagagctctaagagactgaaaacttatatgaagttgccttgggaatatttttatatattttatacagtttctatcatggagtcagcaggcacgtggataaaacctaaaagggaatattattgctgtgccatatacagaattcagtttgctttgaaacaagttttggttgaaagagtctgttgaaaattttattatacttccagggaaggaaagagctgtttttatcttcttaaccactcccagcctctactcttcccagcccctaatcccaggccttggtgtacacactgtagtttttccattatgatgagtatgtgcagtgatactattcatgtacagtctgagcttatgctcaggggtgtgtgtgtatatgtgtatgcatgtgtgcacgtgagtgtgtgtttctttttccagttcctgcatcctattttgacactggttgtaagaagatcttgatacatacaggttagctgttacaaaagataaaagatgaatcttcagtggtaaaagctcagtggaaataatctagttagccctgaggagttgattccccaagggaccatggagtcagatgggaccagatgctagactttggattccttgaccacaaattcagcattaactcctgccaccaccatgtcactcctacagcacttacacattttgagaaggtttttttttttttttttttgaggcagagtctcgctgtgtcccctaggctggagtgcagtggcacaatctccactcacctcaatctccacctccccaggttcaagcgattctcctgcctcagcctcccaagtagctgggattacaggcatgcaccaccacgctcgactaatttttgtatttttagtagagacggggtatcactatattggtcaggctggtcttgaactcctgacctcaggcgatctacccgcctcggcctcccaaagtgctgggaatataggcgtgggccactgcacccggttttttgttttt

SEQ ID NO: 14009 - DNA, 1232 bp, Homo sapiens
aagcagttggagggagtaaactgaatccacaaacttctgtctcaggtagaagcattgaaagcattggaatggaggcttagaccatcgttgtgtttgaagaattttctagctctaccaagtagaagatggaatgagaaggcactgaggaaattactcacctttcttattaggaaatacatcctggaattatgagcagccagttaattctaagggtaattgcatactgctggggtgtggctcaaaaatattatgctatttatatattatgtttattaaaagggagcaagttggcatgaacagtataaaatagacattttaagaatatctggttattttcgttaaaaactgtttgttcttgtttcctgctatgttacagcccttcacagtatcacatttgaaactttgtgctggaatcatgataactgcatctcacaatccaaagcaggataatggttataaggtattttcctttttctactccacacgtacatccttctgtaggaatcctgtatctgtaatttttgggaccataggtaataggtgccttatttccattaactgtaaaccttctgaatgtgttcctgggtcctctaggtctattgggataatggagctcagatcatttctcctcacgataaagggatttctcaagctattgaagaaaatctagaaccgtggcctcaagcttgggacgattctttaattgatagcagtccacttctccacaatccgagtgcttccatcaataatgactactttgaagaccttaaaaagtactgtttccacaggtaaatgaattgtgtcttcactgaccttaagtgagttaatgtgattcagccaaattctattagtgtttgtgaagtttttctctttaatttgctcatgtactacagctgcatctgattttattttattttatttacttattttgagacagggtctcactgtgtcacccaggctggagtgcagtggcacgatttggctcactacaacctctgccttctgggttcaagcgattcttgtgcctcagcctcccaagtagctggtatcacaggcgtgagccactgcacccagctaatttttttgtatttttagtagagacaaggtgttggcatgttggccaggctagtcttgaactcctggcctcaagtgatccacccaccttggcctcccaaagtgctgagattacaggtatgagccaccacgcccacccagctgcatctgattttaga

SEQ ID NO: 14010 - DNA, 1388 bp, Homo sapiens
aaagtcatagtaggtaaatgctttatgggacagctgacaccttttagaccctaccaggtattgctagcatgtgagctgcagttgtggggtctgagatatttctttgtggtagtttcatacccatactatagagtcatgtatttatttttgcctgttgtgtgatgtaatgcaatcatgttcctttgagtctccatcccttggaaatctgacttcttgcagaaggagtaggcacatcaagatattcaggggtgccccaagagtctgggactttcaaaaaaaaaagatcaggctgaaactgcagtcagatttatgacagctgacagtttttcagaggtcgcacacagtgactctcctctctcaggatgacgaggacctgtgccttcaacaagcaaaatgctgctcacggttgtcctgcttgcagccagtcactgtgtaaagcctctctgatgtgcacttaagagtgggttgctttctcacaaagatggggttctgtgcagtcacaggtcacttccttgacaacacaatcatttctgatctttatcactgtaaccacgtcttctattccataggagtttcttttgattctctcagttgcggggggcatctcttaatcctggggtaaaaggagagattgccatacttagactcactgtgagtctccccggccatttcacgaggagaccacagtgctgccaccagtgcctaaacaggtggctggcattcgagacttcctcctgttccctgggtcagaggatagcggtttccatcataaaccaagatgatgagttcagcctttatccctcgtggttccgctagatgtaacttataggagttaacatttgaggactttgttctgcatcagatcttactatttgaatgtttactgttggattttgggcatcttattactgttactcaaaaacattgactctgcatcaagaaagaaacaagaaagcaataaaacaagaaataattcatgctcacatttttatggtggttttttttttttttttaactttggatttttgcttttcagcccaggagtaaaggaatgccttatgaacacctgtggcctacgtgtggtcatgacccaaccatcagtgagattatttgagatattggtgtctgcatccagtgttgttatctgagtgtttattacgtaagttgtaacacctctacacagggtgtgagtttagcactgatgagaccagctccatcattgtatgtggcagtgagtcctgttacgagattgggttgggcagaaaggactgttgacatgagcctgtggatgtaggttggacagtctcagcctgtgactgactaggcaaggagcggagaggcaactgtgtgaggattctcagagccaaatttttaagccatgttttggg

SEQ ID NO: 14011 - DNA, 3005 bp, Homo sapiens
aaagtttaagaaaatcccacaaactttcaatttggagttctcattatctcattaaatgaatagcactgcatataattaagctcccaagcaggtttaagatttgggagatgtgcaaatacagatcaccatgtgttcattcactatttggtagtccctcagaatggatttcagtgactctgtgttttaagaactcttaaaattctcctcccgtttttttggcagagagccaatgaaacattacggtattagttcattttcttcttgcttgtcttgcagtagtttataatgcactgtgttattgaagaacaaatgtatgaacatatcttggaaataatatttgtcaagcattaactcaaagatctttactacctttacagaaaaaaaaaatagctcttttctttttccttttgcaggagaaaaaccctacaaatgtacatgggaagggtgcacatggaagtttgctcggtctgatgaactaacaagacatttccgaaaacatactggaatcaaacctttccagtgcccggactgtgaccgcagcttctcccgttctgaccatcttgccctccataggaaacgccacatgctagtctgattgcctctgtgtcctgcctcagcgtgactccccactcacctggctctctctctgtcctgcctcccattatctaacacattttttacatgtacattttaatttgattcagctggtctgaatctctgaatttatatcatccaaaacttccatatggtcagtagtagatgttctctaatcctccctctccttaccacgggtcagacctaaagaatgtgaacacttttttttttttttctggggatgctaagcaaacccttcttacagatacgtttaatgtaataagaacaagggaacatgtaaactaacataaccaattgtcagttctccatgtattcctcaaaagaatgtcagagtaaatgtattagaaatacagtatccagactgctagtccttgccagagacattcttacctctgccctgtgataatattttatgcttgacagtgaaaacaagtgtggccccttgcaccggttagctagaagtacagccagatttcaagctagtgcagtcacctcttccgtcattcttcacaaatcttgtcaacctggatcttagacttcatctgaatcgagttctttgccctcctttgtgcctgcagctcatatggaggtctttgccaccaatgggagatgagcccaaactttcgatctaggtgggtgatgtgtagcagttcaagggaagggtgctgtgttttcatagcatggagtcggaggagagggccatttagcagggggagcagaagaggcaattcctcctgggctaggggttgtcagtgaggtttcaacattttgttagctgtgtgcagcattcccagagcttcagtctctgtgcatactcagctttgtagaaccatgctgcaaagccatataccgatggggttatccatgcaactatctccattcctacaatgtccttaatatgagatcatcaaacattgatagtagggactccatggaatatttgcccagtaatggtaagaaatctttcgggtaagagtatggatggttcttcttttacccaatctgcttatagctttttttgtaaacagggaaatgttgagtggtacttgtattcccttatcaaattaatcacatagcttttatacagaaactcttcctgtgtgagctgttaaggtgccaaattggctgtcatttgtattcatgacacataccataaagcatctgctaatgctttaatggattgattcaattaagacctgagtgacactatttgtaaatataactagttgtgaagcacacatacctttattttgggaatttatgagaaaatatagaaaaccacagatcagggattcatatatgtagctcaaaaattcccaaaagtttactgttagagttggcaatttcctatcactatttcagtgtcagaacaaactgaaaataatggctcgtgtttatgttgaagataaatagcaccattattgggggaagttattcaaaagcaggcttttgagcaccatagtctaaatgccaataaaaataattcatacatagaaatgtcattggtcctgaatttgaagaaagtgagcaacagtagttaaatgtgggtgcatataaccaaattccccttcatcaagaatggaggagaagagagaagaatgaaatcctgaagattcatcccagccgcaactcaggatccaacacaactttaactgggaggaatacattgtttgatcatttttaaaacatctgtgaatgagtgattccggaggcctgtgaattgtgtggggagcttgctttgatggcactgtgttaataaaagttgtagggactgtgcacctaagaggctaagaggtcccactcatccgccctgtgaaccagctgtaaagaaatgtagttaagaaatgcaaagaaatgtgttatcttggcacttgggtttgattttcctttttttaaagcactgcaaaacttctttaggatactaaaacatcctaattgggctgtttttttgttttgttttgtttttcagctaaaggcaaagataatttttttttcagctgaagtttttcttttttgcaactatgacatgaattgagtgataaaatggctctttgaaaagtagatattgtctgtattgtaaatgcttagtcatattcatggcaaagtgttcatttcttgagatggttctttcacaacacacaagaatcaagatggaacgcaaggaaaatctttttgttttgaccgaggtaaccagtttatgtgtgttccaatccatagagaagtgggggaaagggcgagaaaggatcagattgatctgggatcagctttgagcctgagttcagtgaatagcctcatgggcatctcatggaattgatgcatttgctgtggcatatttaaattttgttcaaaagatttgaagcaagaccttgcaaagactcttaacattactg

SEQ ID NO: 14012 - DNA, 1131 bp, Homo sapiens
tctaaggttttaaaataatttggtttgaaaatatacagttgtcttgaaggaattgctgtcatacatgaagttgctccgagctgtctttattctcttcttggtcaaggttaacaattgctaaatgatcgcaaattcacctaaacaatacatttacaaagccatctttacatgcattaaacgagggctacaacaatattgttttacaaatactagcacttttttttctgttatgtacttagtgttagagggtcaaaataatctttctgcttagcatctcttaaaccatacctgcaaatatagcaggattattacatttacagtactttaatacttgtataaactatgcagaaatttttaataaagtgtaatatattttataagctaataagactgaatgggtaaaggtttttagcatgcattagtatacttgcagatactgaaacattttggtaatctttcttactaaagatgtgaatgtttaatgtaccttctctgtttctactctgtagtccaatgggaattcagtaatgacattttgtcatgtcaaactgtgaacataaatttgtactgtacagtcctcatatactatatacagtatgcaatatatattatatacttgttaataaaaccatcagaatattaaatgtgatcatgtgattacttcatatgcagtgatcactagagcaaaacttacagagcaatgtaagaacccttgcttagaacattacttactctgatgggcagttattgttgatggagggacagaaaaatagatctaactggaagatgaactaccggaattaactcagccctcaagctatgtccctggttttctgaaaacagccaacaggaagtctcctaggctgaaatcataaaactgcagacaatccagcaaaaatctacaaactcacctagttcattcttgaaatacttcttgtatttgttatttatgaacccctgcctgcttccaaaaagaacttgcagcattttgtattaaaagacgcatgtgtataatactttaaacttttagagtaaaatatcaagactctcatgttggggagtggggaacgaggaacagaacaataacgcattaaagtaaataactctggataaaagtaattatttttcaag

SEQ ID NO: 14013 - DNA, 1202 bp, Homo sapiens
tgtgaaacagggattcaaacagtttctcatatcactgtgatgattaaatcggtacatgtgaagtgcctaacctatggtaggtgctcagagaaggttagcttctttccttgataataaagtcttaactattaaaaaaaaagccatggtatatttatacaccatattttgtctattctaagacatattttaacacctctgaatttccatgcatattacaaccaatggtgacttgtcaaagagatggcagtgatgaaacagttgtcactgccttcatgtgcagtttgttttccttttcatgtatatacagagtgatatatgatacttacatgtgtcatttcaaacatagcatacttttttaatgacacacacattgacagtgtgttttataactgatggcaccttaaattcaatgagataacaacataagaagagcctctttgttctaagcataatggcacatgtcttatttatcatttcatatattctttttgcagactttatgcagttggtggtcgtgatggaagttcttgtctcaaatcagtagaatgttttgatcctcatactaataagtggacactgtgtgcacagatgtcaaaaaggagaggtggcgtaggagtgacgacctggaatggactgctgtatgctataggggggcacgatgctcccgcatccaacttgacttccagactctcagactgtgtggaaaggtaatttcctgggaagaaaaactaggaacaaaaaagatatatataagtctctgatacttacatatatttggagaacgtgttggagaattggaagggaaagtcggcattcaaaaatgcaaagcaacttcactttataacagcctgctctcacaggaagtgatacttccagaaaaataagtttgtattgagcatgcactacatgcaaggcaattttattttatatgggatattggacctaataagaagaggagcttgatgaattttaggcagaatgacttaagggctgtagactaaataaaaagcaaaaaggatagggacatttctatgtgttttgatatgaaataaaaaactaataataaggcttacaaacgtaagtcatcccaactggcctcacaaaactcaagtgtggtgccaggtagagagccaaatagcagtggaagatttggatggtaggtcaggttcccatttattatgtttagtctagtacaaggaata

SEQ ID NO: 14014 - DNA, 1168 bp, Homo sapiens
ggaagattaaataaaatgcgtggtctcacttggcacagtgactttttttaagcactcttaaacctagtgggtacttaataaatgttagttctgtctccccttttattctttgaataatagctattagcatgtgaggaaaaccttgttttgttttttcttcccctgcctcctccccatcacctttccccaattctaggtcagataaccctcaggaatagaacaaacctgaaaattaacctgttaaacaggaaataccattaagtttcttgcaacttaaggtttaattctttaattgttttgcatataattttattttctattactttgtttcaggtaaaccataatggaatgcctgaaggcaaatttatatggcaactaagattaaaatgaaatttaatctttaagattcaatttaattatttaatcatttaagattaaaatgaaattttaagttcagaatatttttgcaaaagcacaccttttaaaattatttgcaagtaggtatgagatagttttaccaacattttaatgtgttggtttttaaaaattgctacagctgtgaaaaaattgaaagatatggagtatctgggaacagtagccagtatttgccttcattctgactatgctgctgcactttttgaaggcaaagtccagttacatttggtaagtataattttgatgtcctggagacgcgctaagttataatgaacagcctaatgtctgattatcaagaatattggtcaggaagcaaggatgtacagactaactagaaagccaagtgtgagtaaaggattaacaaaacccttccccttctatattagaagttctgttgactttctaaccctgttccccaaaaacctgataaataccaacagtgctactcacaacatagcctttagtaaaacagtaataataataataattaccctgttggtaaattggagctagaaggaactatacatgaactataaaaacctgatgggaatgccatacctttgggcttcctggaaggtgttgactcataatcgggcattttgtgtgggggggtctttgaaaccatgcctgctgagttgttcaagagatgttggcacctgtgaagagggggcttctaagtcagggcatctctcacatctgtttcatggctctttacatctaggaagacaaagag

SEQ ID NO: 14015 - DNA, 1380 bp, Homo sapiens
aatggcctttataggaccaatgctgattttttttaaaggcagttcctattatgtggtgaaattttgtaaataaatgattatacaaaacagtcaccacctagaactgggtattctttgtacattgtcagatatctttcaaagtataaattaggaataaaaatgttccacatgatatgtgtacaaattctttttaagattgtcatcttgtacagcaaaatattatgttggtatattacttccttattaatttgcaaatgattggattaaaaaagctcactgtattccttactaacctgttgtgtgaaacataacattggcagtcgaggagtcagaactcggattcccagcctcactccctctgtgtgtgttgaccacgtctctgctgtgaataggatttcatgcagtggtctgttatggggctttgcagcgtggggggctgcagaagattctcagacattcttatccttctggagtctcaacccatcaggttcagaccagtaggaaccaggctgggtcaggctcttaatttcactatggtgggggacaaaatgaacactggcttttgttcactttgcccctgagagatctagtcctgtcctgtgatggcttccacaaaccctgttggaagtttgggttattcctataactgtatgtgttgagtggccgtgaggctatggacctagcctggaatttagatgtctagctattttttaatcttgttggtaaatgctcagaggtctgtgctacctctgtgaggtatatactaaaatgaatgtaaaataaggatcgtattccctgctttaaggaactggtagtcttgtttgggtgatgagacaaagttcttgagacatttaaactgtatttaccagtgtgaaaaatgtcatttatggagattaattcattatggaaataaaacattgcctaagcccttgcctgctgagtcacgaccctgtctttgttaaagtccatcttgaaattcttatgcttcaggaaaggttttctcaccagtagggtgaggctggctttcctattcatgttcttccatttctatgccttttggatatgcaagtcacgtctccctaggtcttctgcagcccccaggagagagacttgaatctccatgcagccaggatgcggcatagtgtccttcacttgttcattatgattttgtttgtaattttaaatgttttaaacccaagattgggataatatgtgtgtaaaattaatagcatttcttttagaattagaaattgtaaatatgccctttatgaggatggcataggtctgattcctctttgaagccctcgtgaccatgaggtgaatgagtgagattcatggtaggaggcagttggtggttctgcagcagtttggatgtgaatc

SEQ ID NO: 14016 - DNA, 1101 bp, Homo sapiens
agtaacagtattaggaaatgtgagggaagcattcatatatgattttgtgtgttataatcagggaccaaaaggtgttatacacattcacacacttgagatagggaatttcattgccttatactgatgcttttaatattttggaacttggaacgagtcatatttatgaacacaaagaaacattctgttgcctgggccttaagagtagggtggaagtagaatccacgtatgtttttcagtcactgatgtaggtaagtagaaaatttcctttgggcacattgatgtgtacccattaccctcatgctgtggtgctgggctttctaaactacaccagctggctgtcaaatagtaggcattccattcagcattattgaaattggattgaactctgcctgattaactcagtgctgttatgcacagtatgacttgagttgatactttgctgttgactatgtctcttttgttgtggtttcagaacttactccagcaaaaggactgtaaacatggattatctgtcgcttctaagggatgcacttgtacagcccttgacctcacaaggagtagacggagtacaggatgttgttgcacttatggacacatattatttgatgaaagaagactttgagaatatcatggaaatcagcagctggggtggcaaacctagtcccttttcaaagctggatcccaaggtaaatcatgtcactcactggttcttcgtcactttctattaccaggtttgtactgacaatacttcggaggtgttttagatgctttaagatttacttctttttcccctcaaatgcttgttgcttcttatggcctatattttccaaagatactatttgaatgcagtattaagagtagacttctgggcttgactttacaatttgtatttttatctttgctttatgctcagtggaaaagcaagaagtgaaatttgaggagcaaatataaatatattctttataaaggatgagtggatgagtctagggaattaaaagttgagcggtgagctctggtggtaatgggttgtaaaaataaaatatgtttattggctgaggatttgtacaaattttctttttcttagtctacctaatctgtgga

SEQ ID NO: 14017 - DNA, 1216 bp, Homo sapiens
gataagaagtgattctgattttaaagtacattgtttcgaaacattaacagaaacatcaaaatgataggagtatacctgcttctattaaattcttgttgggaaagttcttaagaacaagcagtttcctgaatagcaagagtttctacagatggattgcatttggttgtttatttatagttatgcaagttaactagtagtttagatatgaagagggcataatggaaaatagtatgaatgggtaattttaatagctttgctaacagtgttggatgtatgtttttcactgcttgttttgtaagtttattaaacgttagccatatcaaaatttcttaggatctaatttcaggtggtgcttatttgctgtaaatttccagcaaactttccatgccaaggttatttatgatgtgaaatgagaaaaatcaacttcctgcagttttgatgccaaatgtttctttggaaagctaccatgtaatttcctctctgcttgaacattttggtttttagggagctgaaaattgcttggaaggccttatatttgtaatcacaggcgtgctggagtctattgaacgagatgaggccaagtctctaattgaacgttatgggggaaaagtaacaggaaatgtcagcaagaaaacaaattatcttgtcatgggtcgtgatagtggacagtccaagagtgataaggtgggtactgctttgttctcaacaccatgacacctcctgcctgccttggcacactcttgatgtgatttgccctttactcagagttaaatgaaggaaagaaatagaaaagtaatttcttgcctacattatttcttctccacagaagtgttattggctctgacaccaggattttggttttccaatggaaggcatagttcctgtttacttgacttttttttagtgtatttaagtttaagtctttttttatttttgaagatagaaacaaatgcagttttctttttcttccagtccgaagtattcctatatatgccactgtatacaccatcttaggtttttttaaattggtgtttttagaaaaagaatcagcggcctgttgggtaggattgtgtttagctccaaacagcagaatatctgattaaccgtggattaaacagctgctaatttttctcacaagaattctggaggtattgctgggatagttcggcatctcaacgatgtggttcctccatctgtccttattgtgttaactttt

SEQ ID NO: 14018 - DNA, 1212 bp, Homo sapiens
cactggcctttattattgggcatgggcgctctgaagggataggatccccccaccccacgcccaaacccgttcgccccgccgctcacccggggccccagggtgcgggctgcatccccgcagcgtagagacatttcctctttaggactagcgcagtgcaggggttgagggatcgctaactcccgggaaaggacaggtcgaaattacgtcgctccatttatgacaagcagccaagctgctccacgattggctgctttagccttacgtgcgtcgcgcactcatgacgcaatacgcaggccccttacgcgatacaagtacgtaatgacgacagacgttctttctttgctgcgtctactgcgaggtaaggatgtttctgtgctcgtgggggtactgggaatctgaaaccatctgctctgggaaaggctgcggcgcggctcccactctcggaaccttgtcctgtttgtcccccagctcggcaagcgccatatgagcctggcggcgccagatgcgaatcctgttgtgggctttttggcctattcccgcccctcagtcttgccgggatggcaccgcccgcataggacttccagggttgggctgagtgggagttcgactgctgggcctcgtaattctcgctttggggctgctccttccaggctgggacacactggggcccgctgtcggtctcccgtcctccgacatcttgtctggaacttccgcctggcagtctccagtaggagtggagctctgtgcggcgtagtttggtggaaaaacgggccttgcgtcggcctcacccccagtgtttgtgtttcagaatgaagactattctcagcaatcagactgtcgacattccagaaaatggtatgagacttgatgtcttttacttacatctttactgcacgttccaagcgttgtgtggcctgacgagtgtgttctctcttctagtcgacattactctgaagggacgcacagttatcgtgaagggccccagaggaaccctgcggagggacttcaatcacatcaatgtagaactcagccttcttggaaagaaaaaaaagagggtgagggtttttcttctgataattcagttgctcgttggaaggtggtttataacagcatcacatttggttgctttaacaattttcgaattaaggttcagtgcttcagctttaaatgttgctgtccagaataccagcctgttcagtgaaattgaaaaac

SEQ ID NO: 14019 - DNA, 1191 bp, Homo sapiens
acatcataataggcatttcaataataagaatttgagaaaaaattctacagaaaaattaagagaagcacagccacttactatttgtgcttccattcactggttttacttacttttttcctcaaacctattctgcaccctgcctcacatgaagaaaagtgccatttactatttatgtttttattttatgtactattttatttaccaaaatggattttattctctgttgtattctcatagcatctaccattattctaggtaaattgtaagctcctagtaattgttgggtttgtttaaaggcggaacatttattaaagagtttgaaaacaacatatgttagtgacaacattcagcttactggatcctttgtcttctacaccccttctttcacctaggcaaaatgatgtaatagatatagggacctttctttttttagtttgaagatttcattttcttgtagttctacttaaactgttttatttctgttactgaaaaactcaagtgtgctttatattctaggtccggtttatcactaaaatatggcatcctaatattagttccgtcacaggggctatttgtttggatatcctgaaagatcaatggtaagagattttgaattcaccttctctccttctcatatgaataccaagactgtaagagtgttaaatgtgtaattgcctcaaaacatatattatactttatcttgtttgggcagtaactttaaaagtctcttaagtgcataactgaaaatgcattataattgagatcacaatccatatttaaatagaaacttgttagataatgttagatgctagctttacactttgaaaagccttggatttcatttgttattttggtaaatttgattctttgctatcttaagaagatatttgtgaaagactaaaaaagtagaaagtaagtattgaagtagtcatatcccccttagatggaatgtaagttacaaaattgttgcaggttgtgttaattgagcacagttaagattttggtttatgaattctaacaaggagcacctttgtaggtgatgtcttcatttggatagcggtattgtgctttcactttttttgtctgatttgctctgcacagcattaaatgttttaagagttcctactctggagccaccaggttcacatcttggctctccagtttaccaagctgcatggttatgagcaaatt

SEQ ID NO: 14020 - DNA, 1432 bp, Homo sapiens
gctgaggtgagagaatcccttgggcccaggaggtcgaggctgcagtgagcgatagtcatgccactgcactccagccttggtgatagagcaagaccctgtctcaaaaaaaaaaaaaaaaaaaaaaaaaaggaaaataagagaaaatctagttttggtaaacatattttctgttttcaaagtcagtgatttttttatttttactaattactgtcattgattttagaagctttccatgcactgcaaatgtaaatcaacttacagaaaagaaacaaggtgttaattcccagtataaagagtgaatgattcagtattgtttaaatgtttccttgagatttaatttcctgtccccttttcttctctacagaatgcagtaatagtggccttgtcttcaaaatcatgggatgtagagactgcaacagaattgcttctgagtaactgaggcatagagagctgctgatatagtcaagcttgcctcttcttgaggagcaccaacatctgttatttttaggattctgcatagatttcttttaaactggcattcttgcctaatgatgttatctaggcaccattggagactgaaaaaaaaaaatccctgctctgtaaataaagctaattaaacgtctgtgtaaatttaaaaaggggaaatactttaattttttttcttaatagtgtaaaaattccctgagctaagctaaaaccatggaagaaacatgctactttagtgtttagcagtgtaccaagactagcaagagtttgcttcaggattttgttgaataattaagataatattttgagtgtgtcagggccattcaaattgttggtgttgcatcacagctaccttaactgtttttaacatggatcctctgtgcctgtgaatttacttgcatgcttgtacttgacttcttaggatgggtagctgaaaagaccaccattttaagcatttgagaattcttaaatatgaaatttattcagaattgaagatggtgacctattcagagcctttttgtccttgtcaacagactgggacagtgtctgattcccccttcaccccccccacccccgccttgccacacacagctaatattctaatggtaaatttctctgtatcaggtggggaaatgtgctgaaggacagtatgtatcccttgcttcatttttaggtcgtaggtttggaatgtcttgtcccagttcttcaaacactcttaaatttttcttaagtaatgtaaaaatggaactgccaattttatttctcttgcaaaaatagtaaatacttgatgttacattattcccaggtttaatgaaagaacccaacttagtttttcagtgaatttgacacctattttttagtgatgaaatttttctttgagaactggcaaggatgcagtcagctgtttgcagtttttagcctgattttggggtctatagagattgct

SEQ ID NO: 14021 - DNA, 1672 bp, Homo sapiens
ccagtgcccaagaaattggaaagtacaatatttggtttgagacattcttcataaaagattctttattataaaaatttacctcatttacatttaatgtgatgatcttttttttcctttctggtatatttcccactgtactgtttggtttttgttattctcttgtctgtgggtagatttagttacccaaacatagaaactaaagcaattgcttttttcctctggtcttaaatatgtttggacaaaaagacactaaaaggtcaggcctaggggaaaagtaccctggtggaaattatttttgtaattcttaatatttttgagttggctccgtttgtcagttttaaaagcctcaaaaattatgttaaaaaaaaaatccagtgaaatcccatttagggcaggccgatttgttagaagtcactgatgctccagtaggcttttgttataatcaggcctgtttcctgagtatgtgcctcttttaaaagaagaaataattagctgtatagtatttcagtactgatgaatgaatgaatgaatgaatggcagttagtggacccaaataagtattcagtggtatataaatatttgaggaactaggtactgaattaggtgctctgagttggcaccccgaaatgtttggaatcacgactatgatttacttaaacacgtaacacattcaaggatatataaatggagtctaagtattttgcttttgaagagaataatctatgaaatggaagacttgattttttttttcattttttagaagtaatacacatttatgattgttggcacataaaactatgcaaaataattctttttaagtatctgtaagaaagaattggcagtttaaacggattttgcttatttatgcactacagaatgcagcatactgtattactgttgaggctgcttaataagtttaccaatgtgaaaagcagatcttgggtataagtgtatgcctgatttgagcttttaaaactgtgcagtaggtgtatggtaatgttttacaatcctatgtagcaaaataggaaattatgaatttttgttgttattgttttaaagatttaagatggattggggtagggaacagctggagccaggtataccttctagtatgtagagggaaacaatgtttagataggaaaaaggaagccgtctgtttacagttaactttatttcatggacttctacaaaatgttgtattaatcactttttctagttcaaggaatttcaattccagggtacaaaccattgatttaaaaattacgtttccattctttttagtatcagtttaaagtaaatgcttaccatcagccagttgctgtcactgggaagaaggcaacttgaagtatttactgataaaatagcctttattcccaagtgtgacttttcttcagtgtctacatattatgtcacacgttctatttgcactgctgcaatatagatcaaagatcttgtggcataggggtaggggagtgttagtatctcccttgtcccatttgttctgttactgcttcattggactgatacaccctcatgaacttgcaatcacctaaatggaagtcttgaatgtgtcaccttttgcttggttatttcaaccatgctgctatatataatcaggtgtggcacagtttgtcagtttgattataggtgtgagtggatagaaatcattaca

SEQ ID NO: 14022 - DNA, 3398 bp, Homo sapiens
caggcttcccagatcgcttgagctcaggagttgaagaccagcctgggcaacataatgagatcccgtctgtacaaataatttaaaaattagccagccatggtggtgtgcgcctatagttctagctatttgggaggctcaggctggacgctgagcctggaggaccacttgaacccaggagttggggctgagtgagccatgatcgtgccactgtacttcagcctgagtgacagagtgagatcctgatgcttaagtttaaaaaaaaaaaaaaagattttagataacaactatggaaatgaaatcattttcgtttggtttatatcttctccacatcttttctaactttgcgttctattcttaaccctaaggtaaaaatgcatttgcaaagggagaaaatgaaggccaaacagaagcaggctccagcttctgcaaaaacttggattcacaaatgtccctgaacagaaaatgaagctcacttcagaacacacactctctgccttgaaaactaaagagactattacttccttttcacatgaccacaagtcctctgatggaaatgtacagcagaaactcttgagagagaggctaaaagcaactctgttctcccccttcccctagacttttcttacgaaaagtcaataattaagcaaattgcttaacacttggttccagttcctgcctatctggagtttaaatgcgtaatacaccattaatttccacgctgcagtttttattttaaagaaagtaacaagatgtctttacactgacactgaaaattcatccattttagagccaggaattcccatgttacacaggaaaaaatagaagtctactgaattaattttttaaaagaaaagagatcagattaaatatttctttgtttttccttttggaaacttttatgtataattctttctgcctgcctacttttctgcaaaaatgagatgtacagatttcggttccctgctatgaaaagtgatgtggtagcaattttataaatgttgctttctgatttttatcagagtgagaaaattaaaattattgatttgcaagtagtaaacagttcatattttgatttcccctcattttagtttaatataatttgcaataaatgtacatattgttgtttgtttcataaagcatatcactttaaaatggtttttactcctgtgattatgttggaatatttggaattttaaaggagtaaagactgtccagcatttggttttataatgtttgtcaccagatttttattaatgtaaaaaaaatcaatttttaaaaaatagttggactttggcagcttttaaggaaagttggaggtgttttaggattgctatcaattttcagcattgtgctatttggaaataagtgttttgcttttgtctgatggtctgggctcatttttatgtttattttagaaaactgttgcatcaatatattatgtttcttggcattgttcagcataggtaatgtgtgcactttatgtgtacacataatcatatttaagttttttgcataaaataaatgcttctagatgtcatggcagtctttttaatctttttatcatatgctttcttgtgaattttttcatgttaaagagctaaagtcataacatgattacagtcaactctccattatctatataaaatagtgactaagcctcaggtttttaattttgtgataacaaaataacgaaggcatgtaagacctgattctggaggaacatgaaatttgtcttttctcatgtccagagttctatcctgcccccactgtccactgtagggtcatccgcaaagccctagcagaatgtgctcactccatttccttacacgtttctagcatgggtcagaggaaacaacatttgtgttataacttcgtcttgataggctgtagtgtacatgggatgtaaaacaaacaagtgtatcaaaggtggatgattctgttagagtgaagtttgagagtaaatgtcacttacgtttctcatagataatcaagagttggctgtgtattgactgaaagatgggtaattattttaaatatgcatttacacacatttaggtatcagaagatgcttagggaacaatggataccaatgatagaaaatgatacctttacaggggcagaaaaatccccactcttccttattgcctcttcagaaccctttagaaagtataaaatattgcctccaacatgctgaaaaagagtatctatgcataagtatcagagaagtccctcaagcaatcagtaggtgtgttctatttagagagagtttaaagttctcttagcatcagacaacttgattcctaaggtttccagtgtgtcaccaacaaaaagtgcattgatagggacctttgtctcttcctccctttgattaattgcccggcatcacagtttactagattaccaagtgttacatcatattaaataaaatgtagcagaaccatctgcatcaatatattcctgtttagatttttgcaggagagaagttaaaaggatttgctccttgtatgatgtaagtggcccaccccaattttgtaacatgatgcaagtgtctggcactaagggaagcaagagtagggttgtggaaagaccaagctgatggggagggacttgtttacgggaatttttttagttttccttttcaaaggaaaacattaaaatcccttaggaatttggtattcacatctcagagaactacaacacaaaagtgcagacttatatttgagaattaatgttaaccctttgtgtctagtttgaagcttcttgtatttgtctaaaacaacaagccagaattttgtatctcctttgataaaaagtgtgtataatgtaaagtagttttgcatattcttgtgctgcacatgggctgaatttttaaattttttttaaaaacttgaagcagaaccttgtaatttgtgtaaatgacaagtgtaaaatcctaccataaaatgctaaaaatatgcactgtttcaaataaaaccaagaaatgcagcattatatagtagtgtggagccctgaatattcatgtacccctggtatgtcacaagttgataaaatgtctctgcatattttctgttgagatgctggagtctgaatatcctaattagaaatcaaaagccaccttcaaacttcctggctgggtactctgaggtagcttacagtggctaaggaagaacatagtggatgataaattctgaggcacattcggaatttccaaacgaggtttgttttagggggtggctttttttttgaaatgagatcttaccctgttgcccaggctggagtgcaatgacatgatcatggctcactgtagcaatcctcctgccccaggctcctagaaaagtgctgggattacaggcctgagccaccagacctggccaagaagttatttttttaacctaaga

SEQ ID NO: 14023 - DNA, 1152 bp, Homo sapiens
cgatctcggcttaccgcagcctctgcctcccgagttcaagcgattctcctgccataacctcctgagtagctggcattacaggcgcatgccacccggcctagctaattttgtatttttgtagagacagggtttcaccatgttggccaggcgggttcgaacttctgacctcaggtgatccacccactttggcctcccaaagtgctgggatgaggctcacaggcatgagtcaccacacccggcccgaatttatgatgtggtggaattcagtgaataaatttaatgaataaactgcattgaaccgtatgaaaacatgtgtgtgctttatttatggtgtgatttaggaaatttatctttgacatttgcctaagtctgcgtgccatcagtttaatttaaagctagacttatggtatggctttgattgttttgattgtttgataaattggtatatgtgttagcacaagtgtatttattattgcaaggcacaatacctaaaaagccttattgagataattaaaatactcatgttcctttgattggtgtttcttttttctttttcttttttttttttaataggacttctgtaacgataagagttatatttcagaagagacaagagtacttctgttaacaggaaaggtattatttacttaataattttgagatctttgtttcatgtgtatcttgcttctgctattcctagaaatacctttaaatgaccactagattgtatagttcctgattcttagggatcacattatggatttaaagcatctaaagcagccatgcttttagaatttttctgccagcaaccactcctctgaaatgccactgtgtgttctcatcagtaatgttaagcacagtttatttacaattcacaaagaagactttcctgggaaatggtataaccaacttaggtatataagataaaagaaataattttatactactaatgaattagacaattcatgttctatgtaagtaatatggtgacacctaaaacagcaaaaggaaatttagttttttgtaaatagttcctaaactattactatatatatatccaatagtttatttataggagcatttattatgtatgtattttgctatattttaggggaactttgtattttgattgaataataaaggatacattaa

SEQ ID NO: 14024 - DNA, 1308 bp, Homo sapiens
cataaaaaaggagccatgtgttttgtgttctaagtagcagagtagactaagaggtgaagaagaaaataggacaaaggctgtctgttagttgtgtcaaggaataactggaagctaccacaccatacagtatttctgattagccataactaactgcaaggacggctaggagatgtatctctattctgtgtagctagcatatttaccccagaatttaattttttttttcttttgcgggaagtaattcttttttaatggattaaaaccattgtctgtacttctaaagctgtatctgttttttcaggttctgtcttttacacatcctacctcgttccactctgcagagacatatgagtccttgttacagtgcctaagaatggaggatgacaaggtagcagaagctgctattcaaatttttagaaatacaggtcacaaaatagaaacagaccttccccagatacgatcgtgagtacattttttctcccgtggtaaatacaaaagtttctaagtatgggaaccataaaatcattgttttccttctgtgtaggaagataggagggaagaaagacaactttgatttagaagctacttttctgtgtcctcctctgctttgtctttcccttgcttcacacccctctcccaccattagaatgcaggcagcagaataaactgaaactacatgtttgtttataacaaaagtattttaagatattaagaatcaaaagttatcacagaatttagtgttttattatatttatgactaatgtctttctaatccatgtatattcatctttttttctataaatgggttataaattcaataactgtcactttgctatcctaccaaaaaatggggcaaatagttcactttggcatcttaaaaaggttaaggtgaaacttgtgctgagatgttatatttagacttaaaatatgcagaagacatcttttgaaggaaacaatacattgcaaatggcagttgaatcatatgttcagggtattggcaattagttcagagtatattcaactacataccattttcctcacatgataatcatagaacaagcagtctcctgaagtttttattaaatttgtgagctaatagtttaacttgtgaaataattcagtgtccattgtacattctcttcattctccgcattgttctggctaataataaaaagttaccacaattagtccctgccctcaaggagtttatagactagaaataataaattttatacattattagaaaaagatcactgacacaataggatagtttttgatgagtttttcaagggaggaaatcctatacat

SEQ ID NO: 14025 - DNA, 1235 bp, Homo sapiens
tactcaggatgctaaggcaggaggatcactttagcccagaaatttgagaccagcctaggcaacgtaacgaaaccccatttctttaaaaagaaaaaagtagatcatttagcaatatttgcattggaaaatttctaaataggaacagattcaaaattgtttgtaggctgggcgcggtggctcacgcctgtaatcccagcactttggggggccgaggcgggcggatcatgaggtcaggagatcgagaccatcctggctaacagggtgaaaccccgtctctactaaaaataaaaaattagccgggcgtgcgggcgcctgtagtcccagctacttgggaggctgaggcaggagaatggtgtgaacctgggaggcggagcttgcagtgagccaagatcctgccactgcactccagcctaggcgacagagtgagactccgtctcaaaaaaaaaataaaattgtttgtaaagcctcttttgaagagaaatagtgtgccagtttataaaggcacacataagactgtacaacctaatgaagccaaggcagtctttggagattagtacagagttttgttatcttgctcatctaataaattttatgctttttagtggcgagtaagaaaagaagctatgatgggtctggctcagctttataagaaatactgtcttcatggtgaagcaggaaaggaagctgcagagaaagtcagctggataaaggacaaacttctgcatatttattatcagaacagcattgacgacaagtgagtttaatatgttggtagaatggttgagtgtaaaactactttttacttaaaaaatgtctatttaatattttagtaatttcttatttttatgtatttacttcataaataaaattaagtttattcaacttgattaatcatttatttctaagtttagagatagctttttacatatttttatgtactgtgtttaaacaagactgtccacgattataaggtagccttataatatgaaataggcatgaactttggagttagagaccaaatgttcactctgccctttattagatgtgtattcttacataggttcattaaggtcttgtgcgcttcagttttatataaaaaggaaaaataatagtgcctttcccacaggattatcatgtagattaaataaaataatgaatataaagcatcctagcccaatgtgtggcaagagagcactattgagttaactgctagttactttcctttttacaccact

SEQ ID NO: 14026 - DNA, 4378 bp, Homo sapiens
ataagggtcaatactttggtagtaaatattatattaagcgtaggtacttggaattgattacaaggtatattccttagctaatttgaaattttcatctttaaaataactcttttctcatttctgcaggttctctgaaattaaaccagggtgcttgaaagtcatgctaaagtaaaataaacatccttgaattagaagtatgaaggtttgtaggttaaaattacttttatttgcagtaattcagtcaattctaccctaaagatgtgttttattataaataatattcaattatgaaacaaaaaaattatgatgtttttcaaaatgcaagtgaggtttgattttttactgaatcaaatgcaaatgttacctgttaaagatattacagagaaattttattgattacaaaatatgtaagaaaattatcagctacagttttaaagtttaaaatgctctgattgtttctcagaaaaggttacctttgtattaattgttgtatgacatttagtaatgtcctaaaagtcttttgtgagaggtatttaaagtgctttgagacctgattcatgccccccaaagggtggtattaaaagaggaaaaaggacatagtagtggtagtaaagaaaaaaaggagatctaacaaaaacacttgaatattttttattttcaaaactaaacacataaaatgcttttattttgccatatcctacaggaaggaagacatgcttttgccctttcttctgctttgtatatgaccttgatcttttaccttttgttctgttcttctgtgtgcattttatggaaagaaagttgggtctgagattatattgtaattttatactttctatagacagaaaggttttcagagaaaaagaaatggttaaatatcttccagatgttgctgccttatcgaaatgcttctagaactgtctgtataagtcgtatttcagacagtactaaatacttatattttatttttgaggcatgtaattttaaaactgcagtaggttaaaattctattaaacaaatatagaaaatattttgtttataattggcctggtgtggtggcccacgcctgtaatcccagcactttgggaggccgaggtaggtggatcgcctgaggtcagaagttcaagaccagcctggccaacatggtgaatccccgtctctattaaaaatacaaaaattagctgggtgtggtggcgtgtgcctgtaatcccagctacttgggaggctgaggcaggagaaccgcttaaacctgggaggtggaggttgcagtgacccgagatcgagatcacaccactgcactcagcctgggtgacagagcaagactccgtctccaaaaaaaaaaaagaaaaaaaagagaaaatattttggttataatcataagaagaatccttacaatttaaaatattttcacttttattttgaaaaagagccaactttctcaaaggaagctgtcattaacttctgttgtttggttagctaataaattctgttagtatgcaagttaaacctgtgtaaaggaggttataatgtggtaaggtataattttccaatatgagacaatggcttaaatttgcctttggagatggagaatattttcaacatacataattttaacaaatagttttgttgctttttgttaagcttaaaaaaaaatttggatcagaaattataggattgagctggtaccaaaagaatcctaaagtacagaatggttttccaaaagagcagacatttcaatgaaaataaaaccccaaaacattttttttatatatcatgattgcatgcttttaaaataaggaggcttatcattgaattttagttccataaaaatgaaaatacatgtttattatttagaaatggttagtgactggtattgaagtattattcacacttatgtttgtaataatttatttaaagaatgccaacagtttagcacacttttgtaatctctagaacagttctatacattaaaaataaacattaaaaataaagcagttcctttaaacaacttactatgaaactataattgttaatgaaataagatattcctatgtatacattagtatgatttaagggtatgaaaaacagtgctaaaatgtggagttaattggaatgtgtgcagctgcatactcactttctgtgtttttatatttccttacctagttttaaaaatcatcacttttcggcacttcagctagacttatttcaatattataattatgattaatgaaggagcagtcagaagtagaggtgtggtattccgtgggcagaagtcaaatgaaaaaagctatattgtttacttgtttactatatcaatgttaatattatgccttattttgataaatcaaatagtatatcttaatcattgttgataaatatacaggcaaagtttgagcatcatatgtatttttatgaagctgcttaattccaaattgcctcccaccccactatctagcatagtttaagcaacacataattttgaaagaaaagtttgtaatccctcctttcttttttttgcccatttctaaatcctgtatgcccgcagtaaagatagtttggggattttaaaagttttctctattacccatttctaaatcctgtatgtcaaagatagtttggagattataaaaattttcatgtattggtgtaggttgagtatccctaatgagaaaattcaaaatctgaaatgcttcaaaatctgaaatttttcgagcacagacatgatgctcaaaggaaatactcacagagcattttacatttgtaggttagcgatactcaacaagtaaatataatgcacatgttctaaaatatccccccaaaccccagcaatccaaaacacttctggtcctaagcattttgagtaggggatactcactcaacctgtatatttgtgctaatacatgactcattagaatgattctttgtaaacttaatattttaaaagtacagcacttctgtagtatggaaggtttcagtaataattatattcattcagtagtctcttaccattatctcccagatggaaaaagaggactaatgtggaaaccccagagggtgtccagttggaccagggagatattagacacttaacagtattttcagtctgtccatctctttattccaatgtgagaaatggaagtgtttttttttttacgtttattggctcttcatatttctctacattatttttaatgtgcagtttcttcaattggttagtatttccatactatttgcaactttatggcctttaaatataggacatattatatagcagaaattttgactttaaatcctcttgagtagtatattttgagaagaaaagctatactgctcttctggatggtttccatcctttatttaggtcttttctttttgaattcaagtgttttgtatgcttagaaagtagacatgtataatattgagatcggttatttctgagctggaaattggaaactttggaaactcaggaaattgctctgacaatgttttaactgctctcaatttaagaaaatgacgaaatgtataaaaaagacaaaaataacgtgtgctgttttttccaagtgctttttctaagtgcttttccattgtgcaatgaggtgaagtttggtaatttttcggtgtagtagttaaatattgctcaatttttatttacatgtaaagaaaacagatttaaatgtttatgtggccaaaaggtgtcatttaaaaggtaaaataagtttatgtagaatgtatgttcatggtgcttatttttaaaatgtaattcaagtttacagtattacttaatgcttctttacagaatttaatagagaaacaaggctagaacacatctacatcctgaagagccgtttataacttcatattatatgatgacaaagttcattattttccttaaagttgagcaattgacttttatggtccaatgatgaacttattattaataaatgattgagttaactgtgaggcttctcattaaaatacaatattgcagctatcagttggagaatatattataaaattttcagacagtatatcagaaaaatgtttttatttgtactgtatagaaaatgtaattttgctgttaactctgtactttttaaattgaaaatgttttataaatttgcttttaaattttcttatgaagccatttgcaaattacatacttaatttaataaaatactttagccacagtccagtgtgaggaaatccttcatttgatgtattagagttagtgggttaaatattttaaaatattttcatgtctaactttgtaatttcagggggaaagtgtcatgaaaattttatttctgtaccaaaacttttcttctggtttacgttttctgtagcaaataagagtctacttttgaaccagataaatgga

SEQ ID NO: 14027 - DNA, 1946 bp, Homo sapiens
gattcccaatcccaccgcaatgtttggcaagcctaggactgataagtagctctgatagaggagctggtggcttttatacttcttcctgggtttttgttggggtttgttgtttcgttgttttttgtttttttttttgtttggttggggaagtattgtcttctacgtgtgctattttcagtagcagagtaagcacaaggttttaatcgagttgcataagacacctttgcatagctatttaattgcccaatgtaaaactttaatgccatttctaatgcttttattcatttttgaagtatgagtttgtagggacaaagaatgtatgttatcgtagacaagacccccagagactcttttcagcagaaagttatgcttctagttgccttaccatgtttcttgcaaaactgtccatggtcctcaagggtgttggaaacattatgtttattaaatgggcctctcttcctttgctgtgcacttgatgggtgaactggattggggtgtgcacatccaggaggaggaggagagacctgtagaagtttaaagatagtttgtaaatatcttctaatgcttgtttttagtccttttatgttggagaagttcatggtatgtagtttaatgcaaaatgaaaccattttatttcaatgttattaaaaaggtttgttttattaggaagttaatgtattgttgcagtgttttgtgcctgtttaaaggcttttgtttagcagagtgaatgtaaaatacagtaaaatgttaagattgtcatctactttttaaaaaaaaatatcaacttggaattgttttttaaaggctcaatcaaggaagtgaggtgtgcaataaggtagcaagtaaaacgcagttgcgtttttatgtcatgttagagatccatacaattttccactcacgggatttttgttgatggctgaattcttgtggattcataagaggatcatgcccttagcaagtacttttgttttgttttaaattaagagattcccaaatgcctttttccccctcatcttgaaatgagatgagtttttatgtgtaagcaatatttatttaactattctataaaattattgagtgcctactgaggcctttaagcaccgctaacattcctttccatcattcttttaaatgacataaaataattgtgcaatgttcctgatgatgtaccccacaagctgcattcaaactcaaatctgtgggaatgagtgactcgacaaaatgtaattcggatcagatcctcatcccctgactgtgtgaaaaaagtactctccttctagtgaaggattgtcacagagtttcactggatgaaactatgacccagtattcttactgtattttacatatgcctgtaaattatttgcaaaaaagaagaagaagaggaagaaagaaaagaaagaaaagaaagaaagaaagaaagaaagaaagaaagaaagaaagaaagaaagaaagaaagaaagaaaaagaaagaaagaataaaaaaaaatgataacatggcaaccaccaaactcccttaaaaacaaacattggtgacatggccaattaagtatcagtgagcctcctatctgggacttatctgttcctattgtttcaaaaccatttcatgtacactactgaggtaagtttataacttgaaatgtgaactttttttttttttagtgttaagaacaaactatataaatgtaaaaaaaaagttttagagttctgttttcaaacattgctagtggtttagttaactttagctgctttatatttgaaaagcttttatttagatcttgctccatttacagtacattcttaggatgtatgtagtaaataaagctttctttaaagcaatcgcaagaccttattttaaattgtgttttctttatactgatttattttttctaaaaaaattaggaaaacccttacagcatagaaaggattggctaattcgatattttccg

SEQ ID NO: 14028 - DNA, 1140 bp, Homo sapiens
attcagtgtgctgtttagtttgggtaagaatcactggacgaagaaagataccgtgaatcccttttttctggtgctctgggggtttacttggccaaatgggttttgggccaccaggtgtcctgtatttgggctagatgtaagaagtatggacggcactgtccctccccacagtgaactcacagccacgtagcataatggagaatgggacccacatcacaccccatgacagcagtgtagttcagagcaagaatgacctccagaacagggtagccatgcagtgatggcctcttcagacatttgggcaaggttccgcctttcgagaaaaacacaggtcctttctgaattcggcctggctatactttctgaatgccagttcctatgtgctgccactcttaagcttgatcctgggatctcctgattggatgccgcataatgtctcttgcagaatgaagaggaagtcttagtggaatgtcgtgtgcgattcctgtccttcatgggtgttgggaaggacgtccacacatttgccttcatcatggacacggggaaccagcgctttgagtgccacgttttctggtgcgagcctaatgctggtaacgtgtctgaggcggtgcaggccgcctgcatggtgagttatcccggtacaggctgttgagccctcccgcctctgctcatctctaatatgccatacattatagcagaatcactcacggaaatgaaaaaagtcgaatccctaaagtaatgctttactttataacgccgtcattcctagggccagaatcagttatgataaacagattacatctccaaaggccagaactcctgaaagaagtggggccagatagaggctccgatgagtttcataaccaccaccttgacgacggtcaatccttgatcccaaatcaatttcatgtgtgaaatgttggtcgtgtatgagttggtactgtttgggttcaattcagtactttaaaaatcaatacattgaatgacttttgtttccagtgattggtttctgtacaccgttcttatatattttatttatatctgttaactcagtccttccgacaactctgttaggtagttgttagttctgttttatttatgagaaaatagagactttagggaagttagagaatgggcctc

SEQ ID NO: 14029 - DNA, 1366 bp, Homo sapiens
aaattaaagactccatcaaaaggactgctccatacactcaaggaacacccaccaacaaatcccgtctccacaaccaccagattatctcaccggcgagtgagactgcaaggtttgggggcccggccgtaccactccgcgctgcgcacggggggttcgtacccatctggccgcgaccgtccgtttccccctcgcttggttctgcccctgctccccctgcacaggcctcacagtgcgtctggccggcgctttatagctgcagcctgggcggctccgctagctgtttttcgtcttccctaggctatttctgccgggcgctccgcgaagatgcagctcaagccgatggagatcaaccccgaggtgagcgccaggtgcaccgctacccggagagcgcgaggccgagggagggggagccgagtcgctgatcggttcggttttgcctttttctttgcatttgcctttcagatgctgaacaaagtgagtggcgtctcgcgccgtctctggccccctcccccgcgagcgccgaggcgggggcgcccaccggttccggctgctggcagggaccaagccgcccgctgcgagcaccggagacggccgggctggggcgtgggctgggcgcctttcctgggcccctgcatttagcgggtgactctacgaaaccggtcacggggagacggagggggctgcgccccgtggcgagcgagcgccaggcggagctcccgagggcgtggcgcgggcagcacagactcggctgcacgggcttcgcgggcgccacgtgtgggccgcgctttgtgctgtgtcattgcgccggcccgggtgggggtggcagggcgggactggggctcctcccaggctcgggtgcgggcgcggagggcgcgcgcctcctggccccgccccctggcaggtgcccgcgacccgcgtgtccccgtgcgcctggccgccttgtctcctctccgcaggtgctgtcccggctgggggtcgccggccagtggcgcttcgtggacgtgctggggctggaagaggagtctctgggctcggtgccagcgcctgcctgcgcgctgctgctgctgtttcccctcacggcccaggtagggcgtggggcccaggatgcgccggccgccggcagtgcacgccgctccccagcttgagtcctcgggggctccccgccccgccccctcccctgtaggtgatgcggggcgcgcctacaaggaagggaggagcctgcattttcgtggtacctactccctgggctcctgttccagcggtgcctgtcgccttcttgcccatccgtccacaattgccttaaatttggaagagaggcagtatctcagttccatctatcccgttatccagggaaatcattcatcct

SEQ ID NO: 14030 - DNA, 1240 bp, Homo sapiens
aacgttcatagttgtgtttttgttgttgggtttttttgtttttgttttttttaacttttccaaaaccaggtacaaagtgagagaagcacaaaaccatttggtggaagtgataagtcaaatccatgatgtaaccttgtctttcccatcacctgattttttgctttaagccctggttttcaaattaatgatggaattaaagttgatgagggtgaactttgagcattaatagaccttggagcctttccctatgtgactttcattttgagctcttgctgtttggattttaatgacatttctcctttccaggacgctgccaaggtctgcagagaattcaccgagcgtgagcaaggagaagtccgcttctctgccgtggctctctgcaaggcagcctaatgctctgtgggagggactttgctgatttcccctcttcccttcaacatgaaaatatatacccccccatgcagtctaaaatgcttcagtacttgtgaaacacagctgttcttctgttctgcagacacgccttcccctcagccacacccaggcacttaagcacaagcagagtgcacagctgtccactgggccattgtggtgtgagcttcagatggtgaagcattctccccagtgtatgtcttgtatccgatatctaacgctttaaatggctactttggtttctgtctgtaagttaagaccttggatgtggtttaattgtttgtcctcaaaaggaataaaacttttctgctgataagatagccacagctgattctcattttcttttaccctctcctcaatatgtcaggttattttggtagtaatatatgaatgtcttccacataagtaactcatacagtgctgccaagaattaccataaaagcattggtttgatgtgtctttggatttttttttgcatttgtattccctatgtatacctgtagaaactaatttttaaagatttttaaataggcaaattttgtagcacaattttagacttataaaaatattgaagacaaaaagaaaatactggacattgtagaagtcccataaacccaccacccagtttcctctattgtattaagcggggttttctagaggacagaactaataggatatatgtatgtataaaggggagtttattaaggagtgttgacccacacgatcacaaggtaaagtcccatggtaggccctctgcaagctgaggagcaaggaagccagtccgagtctcaaaacctcaaaagtaggaaaa

SEQ ID NO: 14031 - DNA, 1265 bp, Homo sapiens
aatatagtataagcattattagcagctggtacttctgctaggggttgtaaattccaggtgttacactgacctcaatccaatttacataatttacataaatgcatctcggtggaaaaataatcattttcttggcatgttaaatcaagcttaaaaagttttgagaaaattttactgcgctgtgttgctaatggttaaagaagtctgtatctagtgataaatataccagtttttttaaaaagatgctgttgtgcctatatcatgaagtacattaatttctcatgtaaaaaaaatagctctaaaatttgtttcaacctaattggtaacctgagtttatatctggcatgaattcattatggtgatacacatatgtgaattcagtacattttgagacagtattctaccattcagtaattttggttaatgattttaacacttctcagtgtatttaatttcaaattgtttttttaattggttttatgctgctttgttaggacagatgtgttttgaatgtaccattataagaagaattctatgtatcttaaactatgatcttctaaaattttatttccgtaagtacttctgtggccttgagtattttttaaaaggctcaactgtaagcctcttagccagttggataaatatttggggtcacctagccattgaaagcagaaagcagtagtgacacagctttcccttcaaagagccattgagaaacatttctcaaacaggaaatccttcttttactaatgtggacatatagattattcgtattatagtttgtagaactacctagttcagaatcttgactgccagttttcttggtttcttaggcttgaattttcatagacaattgcaacagtttagatgccttttgaaaggaatgtaatgaagattcagcatctgactatatgtgtgtctatcctgaaataataatggagagtatactgtagattacatgtttacccatcaaatctgacttaaaaggttaaatggaaggttttataggtaaggtaattgattgggaatggggtagggggaggagttgtgggggaataatgtgcatttcagtctcaacgcatagataaatttaggggaattggatgtattattcaactttgatttgggttgtaaaatgtgttaaatcctgttcattgaactcccatcaactcttataaaattcatgctgatcttcattaccgttgcatgattggaaatgtttaaaacattgtacagttttagtatagagaaatgtaatggtttttgtg

SEQ ID NO: 14032 - DNA, 1172 bp, Homo sapiens
ggtgctgccaaatagcagctcttcaataaactaaagctgttgttattagtaattatatttaattattatggtttagaactatggggttcattttattataatgattaattgataacaactaattaacatagaacttgtccttattgccaaccctagttttaaaatgttgtgcttatttgtttatcttttgagatgccatctttaaagtttggaggcatgaagtttctgtcttgctgatatgaatgcttttcttttagcaacacttcttgttgctgtaaatgaacttcgtaggaatgctcgggctaaaggaatgtcattttacaagtatggtatgtattttagaaaccaagtgtttgtttcacctcccttatttgcttaaaattacttagtactgttattgctttgttcctaatagaaatgtacaaaatatatctgaatatcatccctgtgtggctcttacatatccttcagcccttattaaaaagaaatgtagtatagaaatttgaacatggatactttatatttggatttgacttaagtgaactaaggtatttctttatatggttatataacttgagaaagtaatttgactttatgtatcagttattgttgacatttaagccaagaaattatgtttgcattgagcaaggtttttaaaatcataatctctcatacacttttttatcttaacttatatcttgattttaaatggatacttattaaaatgttacctgatagtatcaagttaagattttagaaattttcttgtcttgtctcttccccaatgactagtaatggaaagtcgtgatcctagtacaaatgtgatattattggaggatactgctgcagtcttgggagttataatagcagccacttgcatgggccttacttctataacaggtaaatattccttaaattacaggtgatttatttgtcctacttaaataattctctaatatgtgggaattttctcttatatcattgaataatattaaaccaacaaattgttaaatgttaattcctactaatcattgacttatgtaagacatttggtcagcagaagtattcaggtttatttgaattaaaaatgtctctaaattagaaataaggaaggctatttgtaaaggatttctgtaatgctgtacgtctttctagctgtgacttaaaaaatt

SEQ ID NO: 14033 - DNA, 1400 bp, Homo sapiens
tcttcaatattctggctaaatcttggtatgtggtttttaaacagtcactccgtttcaaagtctgtctttccttatagaatgtggaaattatttctccataccttgtgattttgacctgagtgctaagagaatcactctccttacctagttatctacaaatgttcattccagaaatgtttagttactgaattgaatgaagacatctcagtacactcttttaggtcatagtagttgccattttgtaaaatttcttttttcttctttgcttttttccccttatttggtttaatttttctaatgttaggagatatagtcctagatatttccatgggccagtgtgatgacttttttttaaatgaggttcagtaccataatgtttatttactggaagataatgcatttataagcattttaaaattctgtaaagtgggttagaaatatttataattttacaggcaggacagcatttgacttttatttaaaaggcggcactacttatgtaaatctgagctgtgggatatttcttgctttaagagagagacagaatctctcactgaaactcatggtcatgattttgtataatatagttcatactgtgtctgtgagtttcttcagttacaaatgggcatttagtatagttatattgactataacatgtaagtaaatagctttctactgaccctaagttatcaaggtggaaaaaaaacatgcaattcagtaattgaaaatgtggtgaaaagctgcagctgtcatcatcaaaacaactcataacatactttaaaatgttcaggtagcagtgagcattgttcatatgagaatggcggctgggtgatctctttgctgaattaatgagttcttaacatgtggacccaactgcctgtgtgagatctgtgtcttaaaacttactggaatggaaatctatgaattattgcaaattgtaatgctggaaacaaaaaataaatccttggttaaagggtttgtaatggtgatttttgacccagaaatctcatttactggaaaattgtgagactttacgttggtgtatttttcttttttttttttttactattacagagtattttgcatgctgtacattttaagtgaaataacattccagttttatttttaagatagaaaattgttatatatatatataatttgatactctattcttacagtttcaaattccttatcccttctttacaaaaaaaactttttttttacctgttatgatttattctatacttttttcttcttccttcccctttcccacttgccatttattacttcatgtcattgccatatgagaaagtaccaaattatatccagtttcctcctagtgatattactctgaaaaatttcacaaagccagacaagaataattactcattttttttccc

SEQ ID NO: 14034 - DNA, 1165 bp, Homo sapiens
cgacttttgctcctgagtgagatattccattgtacttctactgtttgtgtatctgctgggttcctttagccaagcctagcgtctgacgcaggcactagccgccactgaggccgtgatacagcatcactgtggacactgctggctcctctccttgggacatatccacactgccccttgagcttcacctttaaggctggtatgtacgtaagttcacggtggtcgtctgcatggtctcctcttgtttaaatcaggaccaacaaaggatgttcatttgtattttggcaaggcccattgggcctctgtgtagccaggttaaaagctcactcactaggatcggatgctgtcattgctctgtgagcctttcagttgaaatccttggagacttgaaggtgttgcttattattttgatttgattttctgcatctttatctggcaaatggacagattgctctcacaagaaacttagtcatgtcagcttttagagtccttcttgagtcatgttagcattggtagtgtaaaatagattgagttaaaacagctcaggatgcagctgtgcccccacttaattggtgagaggaggaggtcacggggctggcttgacaacaaagactaaatgtggcttttttgtcggtgactaggtgtggtccataagcagaagagccatacctacaaaaagtgacaactgtcctgtgttttccaaattaaaatcttgttacaaagatcatgccggcttttcgcagtgagttgaagccccaagctcagttccagccaggctcaggatgaccctcaaatgatatgtattggatagtgtaggtcaggagcctgtggaggggaccagtattttgcaagcagttactaaagtcacatttctcactgactcttgacggtgcattgttcaaaatctcatggcttaaccttagtgttaaatgctttcaagaaaaactgtaaccatttcaattttacaagtactttctcattttacttgaacattttacaagtactttctgtatttacttgtaaatatttcctctagcccttgaacccgcgcatcacttttttggttttcctcattccaccacagcatttaggtgaccgttaccatttatgtttcattaagcttcactaggaatgtaaggataatattagagcatttgcagaaaattgt

SEQ ID NO: 14035 - DNA, 1057 bp, Homo sapiens
tagatgacatcatataccattttgacattaataatgtctattactaaaaggaaaccagagaacagaggcaacatctgcagacagtgattaattacaggtcaactgtttttctgttgtttaaaaaccactgtgttgatcaagaaggcactatttgatctctggagtttacaaacagtagtcatttttcattgttagtcaagaaacatccaaagatccaaaaccattttcaaatgctcagttttgtaggttaataaatccgcagtttccatagccttaaatcaggctttgttgacacaatgccaaagtgatgggtagaacaatgaaaatttaaagcaattagttgtttggtgcactgaagaccaaacaagtggtgtgactgatggtattcgctgaattgactagatgttctggcattgtatacacacagcttcaaggcgattctgacaactatgcaatgggcttgtcagtaattgctctgaaatttgagggtctttctctgctgagctgatctttagaatttgtatgaaacttgtttcccattgtccttgatgaaaacatttcatcccctccgtgcctcctttaccccaatgtaccccttagctatggctaagtcagcactgtgccgctatcccctggttaatttgttgagttccatatgtgaaattagtggtatctttggaaactttccatattggcaaatgctatagaggtgctagagtcatcatttctgagggcttcctgtttggactcaggagaggctttctttaccaaactagtccagattactacattctttgtagagcaaagggctaaatggacagcgtttattgaaggctactaatgtcatctacagacatgaccaagggtttttgaaaattggttggagattcaggttaatgagcatccattgataaagggtttttgggctatttttgtcaacataaactcataaattgtcctttagatttaatatttagtttgtattcactatatacaaagtcctagaaacaggtctttctgtagcttttgtttattagcttttttgtattactagaat

SEQ ID NO: 14036 - DNA, 1212 bp, Homo sapiens
gtcatcttggtttatgacagacagtagaaatacatatttttaacatgtttgaatgttaagctgaaaattgaggactttatttatcttttgccgttggctgttggtcactgatgtgtcctttcatttgtttcagagagtcgaatgatcttggatgcctttgcccagcagtgcagtcgagttcttagcctcttaaattgtggaggaaaactcctggactccaaccattctcagtccatgatttcttgcgtaaagcaggaaggctcaagttacaacgaaagacaggagcactgtcacattgggaaaggggtccacagtcagacctcagacaatgtagacatagagatgcagtatatgcaaaggaaacaacaaacttctgcctttttgagggttttcactgactctctacaaaattacctgctctcgggaagctttccaactccaaacccctcgtcagccagtgaatatggccatctggccgacgtggatcctctgtcaacctctcctgtgcatacattaggtggctggacttccccagcaacgtccgaatcccatggccacccatcttcatctacactgccagaagaggaggaggaggaggacgaggaaggctattgtcctcgatgccaagagctggagcaggaggttatttcactgcaacaagaaaatgaagagctcagaaggaaattagagagcatcccaggtatcctgccatattccttgcaagacaactgcaacccttctttctttcacttgtctcatctgtctgtgtatttctgtactcatgtatgtgtatgtgtatatgtatgtgtgggctttttttgttttttggccagtgatgtagaaaagttggaaaaaacagacatgctcaagagcttctcagcccgtccagtgccaaacagaaattttaggaggagccactagcctgtttacttccagccaccgtgttcttgtgtataggcctgaacaccatagtcctattaaaaggtgtgtctgtcaatataaaaataatttcttgatgtgctgctttgacattgaaataggtcaagtgctataagcctgttttcttaaaaggtggtcctcttcctttaaaatgggttttgaatttttaaaaactttgatcctatgcattttattagtcaatgatagaaattaaagtgaaatactttgagaggcaggactcaagtagtactgaacaaatgaaatggtctcttc

SEQ ID NO: 14037 - DNA, 1573 bp, Homo sapiens
tagtgtttaattctgttaatagagaagagctgcttctgtttgcgctcacttcatcagtggcacccttctgcagaattttaatataaaaacattatggatataatagaactggattttctgacttaaaaatgtaagttttattttaatcttgaaacgtggattgtttctgtggagctcttaaacatgagaagaatacttacggttgataatgtgtaacatgatctgaaatgtgactaatttgagcctctttgtcccatcgtcctgtttttgaattattgacattgtcagtctctttgcttcctgggtgagacttggggtttgagggacagggaatgaccttcttggtgaaacttaaaatataacattgcaattgcagtgactttacagtgttaaattagagaaaatagtctgattttttaaaccttccttaactggaaaaaagtcacatggttttaccaggattgaaataaacagtcaatgtgacttttaacatgtgtttttttgaaataaagggcacgtactcttcaattaaaaagttccttatagggactctggcaaatgctaacacagttgctttacaatgtttacaattcagacaatacgacttataatagaaaatcctcattcatttagcattgaaaagctggaagttgcttctttaatgttgaatagtatacagtggtattgagcatggactttctaaatgttttatatatacatataaaaatatattggtgtctcacacccagaaagatgttatattgtagatattattaggaaaacagtgtttctcaggaacgttgtaaattttaaatgatatatgtacttcccgtcctcccacctccactctgtgctctaatgtgagactgcttcagcagtgttgctaagttaatggaaaactttttctaatcaagtcaggtgaatgtgtattctgctaaataatgttagccatttacatgaattgtatggtcattaaatggaatcagtgattcctctttaatttccagaggggaaatgaattatggaaatcagtcagcattctgatcattaaattttatactttaattttgccgttcagcattctaaatatccaatgtgaaagtcacatgataatttgttttgcattgcgtgcactgtacaacacttacaacttgtcatttaaaatgttttctcgggaaatgaatgctagtcagaaagtaatagattgtattattcatagttttaaaattatgacaatgtcataattactacaaagctaaataatcgtgtttatttttgtgcagttgccctttgatagttcctggttttaaaacctattaagtgtataatcttacaaatagtcatctacaaaatttatggagaaagtgcccagcccattcacatcacatggaccaggaattcttttgtaaatgacttaaggtaacatcatgcagttcagtgcctaataaatgctttttaatgatgaacatttctataatgactcgtaagataccatagtctgatttttctcacattaaaataactgaagtcacttgtgtaacgtagttatactttgctgcattttaattaacct

SEQ ID NO: 14038 - DNA, 1139 bp, Homo sapiens
agaaatgtaagagaaagtttacttccagttccgctgtaagatctgcatgcctgactttccaaatgtaagagtgatttacaaaaatgaatatttcaaggcatttgctactaaaatcggtgatgttgcacctttggccttacaaatgcttctttgttgtttgtcgtgtttatttgttagaggacacacgtgttaatgtgactctgttgttatgacactgatttttcaaactatgtatgtttcaggtatttctgatgaagtttcatcatcatttagatttttctaaaaatctggctaatgcagtagattgagtgatgtcattttgtcttaaagtttttcctcttaagaaacatatgctacgtatttacgtgggatttccaaagcttctgttgcaatatttggaataacatgtcagataaatgcatgggcttttgtcctgtgttccagttcccactagagatgcctgtgtcttgtgtagcacacccagtgttatggtgactgccccctatactgaagactgaaaattatttcacagttcactcatcaaatagttcccaaaattcgtcacatgctgcttattgggacaaataggtagtacattttccccatttaaaaaatgcggattttactcaggccggtaactttacagtcagaggacacgttcatcatgagtagcttttgttagtatgttttaaaatgtatcttcagttcaattattttcagcatttacaagacatctgaaaatggctattttgctaccaacagtaaatgaaggggctgtttaaaaaccacaaccagttttctacactattttttaaataatactttcatttgaaaaaaaggaattagttttcagatacacttcagagattgaagcaaactatttgccttttactcaaaagcctgcttgcctttacatggacttaccagcaaaataggtagaactttctcttttaaaaaaagtcaactagaattgagaagaggtgattttttttcagatcgcttctcgagtttaatattttcacattcttttcaccctttttctcaatctagatttaaaattaggatatatgtcatttccttgtctgtatttgtagctccttagttaccagtatgcctctccattttctacaaataagagg

SEQ ID NO: 14039 - DNA, 1235 bp, Homo sapiens
ttctaatgaaatcagttctttaacatcaaagattaatttgtttataggacctctaacatggcagttagtaggttaagtcataatttaacaaatgttattcaggtgtttattcttttcagccttcactttcaaaaggtaagcaattattattagttctcccttagttctggaagaaggtttaaaatctagtcatccacaaatgaatagctttggtaacttggtaaaagactttttggagtctgagccacccttcttagggcactttatttcctgggattgccaggacattagaggtgtatctcacaggacagtattttgctaggacaatcgaagtgtaaccaacagtttatttgcactccagtacttcccagctagttgaagtccatgcccttgattctaccttgtcatggtcatcttgtatttctgcaggggatatcttgtaccccccaattaaaaattaattaaatttctgttgattttcaatcagtggctagaatagagactgacatctcctctttcatatagttgaaaatttacccctattttttctttggtttttgacatgagagcaacaaatgggaaaataccttggttgtgttttatttatttctgtgataggaatctctttttcagaagaacaaaataaaaatgctaaaagcaatttcaaaataagtttcttttctactcttttctggcacctatggaattaaacattttagaaagaagacaggtaggatataatcaagtatgataagatgaattttattacaaatattattttacctagggttgtcagtgtagttaacataaatatgcatgctaataaataacctaggctgcttgctcagaaaataaacagaaagtcaggagataataatgtactacttcactctaaacctttaaaatgtcttattttcctaataaacaatcattatttcaagattgtgctaacctacctggattattgtaattcttacttttcctatttttgacagacaaatcaccagccaggattacccataataatagcattttcagtcatctcacaggtcaatggcacacctaacctaggcatcccattttgagataaagaaggacagaatttaaagtgttgccaaaagtcatccagcccaaaagagctgaagttatttaataattagaattatagaagtaattagaatcactaaaagttggttcagtgatgaaatcatgataaatattcaaaaattaacatc

SEQ ID NO: 14040 - DNA, 1306 bp, Homo sapiens
tgaatacatcctgtgaagtcttgtgtgtccacctaattatccaacccgttgtaattgacacatctgtgccatggagtattttccaaaaatgagttaaatatctctgctattcattaaagtatttatggcatgttgagtggaaaaccaagtggcagagaaattttaaaagggaaagaaaaaacaagaatgtccatgtttgtctagagaaaggtgtgcgaggattcatcagttagtactccttactgtgagaaactggccttgagaagaggaatgtcagcttttaccttgtatacatacctgtcttgctggaaacatgtattgattttgtcatttggtagaaaacattgaatatgtatttaaaagtttcttagatgtgtacatttgggcagtatgccacatttttctaagtatttctccaataatgaattgagagagaacatttgggtggagaggagaatgcactgtttggctggagacaaagattcgcaaaaggtcggttggagaaaggaggtaaataagtttgaatgtggagagaaaactgatcagagcaaggttgagggaaaatgagcacgtacagaagatggaggcgtcaagcagatttgaaggaggacggcagaagtgcagcagatttggaggcggttttccatgtaagtgccactggcttccactatccgttattgagtgaagactctctggcataatctgttggatctgagaagcctgttgtgacacttcccatgtgttaaatggcacccaacaaagtggatcagggctattttttacatgtgaactaacaaacatctgtaaagtcacagcatgttgaggagggctagattaaattacagagctggaaggagtggccctgagctgataccagagaacagtttgtgttagtgcctctgagggttacataaccatttctaactgcttgcactgaaaattggtttagtcacttataaaactgagatgtctattttaagcaaatgttaaaatagttcattggcatctttttctgtagctattttttaattcagttatagttcacataccatataactcaccatgttgaaggatacagttcaggggtgtttagtgcattcacaaggttatgcaccgatcaccacaaccttaattctagaacattttcattaatccaaaaagaaaccctatacatgtaaacagtcagtctttctttcttccttgaatcccttgcaatcactaacctaccttttgtctccatggatttgtctgttcttggcatcttatgtacatgggatcatacaatacgtggccctttgtgtctggg

SEQ ID NO: 14041 - DNA, 1245 bp, Homo sapiens
tcttcttgatcctcctttttaaaaactctgataaacttcagcttctctccacactctgcatttgctcaaacattgtagtgctttgattaccggtccacatgcctattaaccaaacgagcagctcaggcttggctggatggctggggctacatgtgtgaagggtgcatgtgatagagcccgatataaatggtaacagattctgaaccgtagattccagcaggcatatgtcatcagttactgtgcattgtacttgcttgttatgagttctccatgccctttttcagagacttcaaagcatttaatatggaatatatcagcatcagtcttgtataacctgatattttctcttcaatttgtgttttaaggtggtcctgcagttgaaataactggaaatgatgaataccagtcctatcagattttattgctccaacttatatggcagagtgaatactgcgtgttcagaaaccttgtgatgtcttgactgttgcaccaggctgagaaagcagcaatattgatattataaagataaaaatttatcaacattccttaacaggaaattacatggttgagaggaaatgcataaaatgaaagatgaaaaatctatagtagcagtttatattttcatgattgttttgcctcatttattaaatatttgagaaatctttggagatacatagttttattgaaagctaaaaataggttctaaagtaatgtaaaaatataaagcacaaatatacttgaatattgcttaaagaattgtgtgaatagcaacatatattatggatatatactttgtgatatttttaaaaaataattttttcaaagaatgtataagctgcatatataactcaggagattccatgtctttctcatatttcagaggaaagattataaaatataaaatttcttagagaacacctctttgtcagagataaacaagaacaaatactctaaacttatgtgaacagttttgagtttatgaattctagaaactaaaatcaagaatacagaaaaatgaaaataacattttacttctgcgcttctatgtttgggaaacattgctctgataaaaaatagctgtcattatgcagtgtgtatattcaaatatgagataagactatgtacacatccacttttgttaataaactcaatattgaatactttgggatgttaaattcattggaaaaacaaaccatttgtaacctcagttaactttaacaacaagcattctgagcaaatgaaaag

SEQ ID NO: 14042 - DNA, 1920 bp, Homo sapiens
ttggaagagggattttgaagaggtatctctccaagcaagaatgacttgtttttccataagggacatgagcattttactaggcttggaagagctgacatgatgagcattattgtatgtttgtatatacatttgtgatagagggctagagtttgacctagagagagtttaaggaagtgaaatatttaattcagaaccaaatgcttttgtaaaactttttggattttgtaaaagcattttcattctcttagaaattcaagtattttcaaggggagtcatttgagatatatttattttactaggagatcttatattctagggaaatgctttaaatggtcaggctccagtcggaatttttttaagaaaaaagtagtttttaatacattggttaggactcagaggaaatacggaaaaaacattgtagatggttaatttacagataaaatcccaagagccttttaaacaacaaggtacctaaaatagggtataattatactgcttaaaatacagttagtgcctattaatagctttttatttcctatgggaagatgcttttggtcttctggctgaagatgtaggcatacctctcactcatttcaatgttttcctgaggtggagccttcattggaaaggggaaagagggattctagggtttcatcagggaccaggaatgcattcctctgtcaggttccaatcaagagaagaccttttatgagatctgcctctgtatagatgttgtcagttaggaaactgaagccataggtcaggcagacatcagctcagcctgtggcccattgggtgatttcctgtattttaaaactgacagtagcctgatcaaagtgatacaatcaatttcaaaacaatcttccagagaccacttgaaggttcatagtttttacaataccctgagacttttcaggtgttggagcctctaaaatatgagatataaacagaaactaatacaagttgttctctggaggtttctatgaggttcttagaaaaatttggttttaaaatcatttgaggacaggaatgtctatagcaagtttactcctattgcgaatcatgtatgctggctttagttgtaacaaacgattttattctaagtaaggccaggtgctactataaaatcatatattcctgttgaagttcttttgaagtcctatctctatttattatatttgaaagttgtcagccaccagtcatccagaatttccttcctgaatctccatgctcatatgcaatgtctacatcaaggtcttcttaatgactattattctcagggtttagttttctaccttctgcctactattttggtctgacatttttgtagccttctgttattattggaaatagtctcttacataagctgatttcgagaactttcaaaatctcacatagctaatggaagttgctttctgctttcttatgactgtttttataaataaactgtttcataaataatgtatactggaaaattgtcatcactcttgtaaacatttgccaaatccaactgtaattagtaccagaacttagaaggaaagtcacaaagcatgccttttaccagaatattgctttgccttttcttatatggaaaatcactgatgtcatatcatttattatcctcacagcagctggcattcattccctgaaatcgtcgtctcctgataaacaataatttagagatatgttcacttgtaaataaaaaggttagaatctaaggacaaagaatgatccaaaaatactaaggaaaaagaacaattttcaattttcagaaatgaattatctgtacatatgaatagaggaaaatactgagtgctaatgttacagggccacaatctcatatccacaattccaaaatctccaaacctctgaaaactgaaatatttttcataaattaggcgtaaattctatgccctgaac

SEQ ID NO: 14043 - DNA, 1145 bp, Homo sapiens
ggcagtataatactgttttaaagtgaaggcatgactgaaactaaaatatttcataaggcttagctagaggcagagtaacgtgtttttgttcattgggcttccttgtacttagttttttcatttaataattcaaaccaacacttttaaaaaaataattcagatgagactgagccatatctgcagtaagagaaatatttcttaatgttttggttacttatgatagagtacttttcttgatactgttaactttgtgctttttaaaaaaagtgattctctaacagacctcttaaattgtgacatgaaggtatgtaattagatttcagaaattggtttattagtgaggaatttttatcaataaatgtcatggggcgtgttcttcagaatatatagttattttcaacaaatgccaggctagattcctcacatgtggctatttcttatgtaagaagcttttaactgaagttggcatgtttcgtaaaacttgcgtgtcttttaaaaataataaaaggaagatgagtatttatgaagaatatgtgctgacaacagggcttatgaggtctatgtaccttaatctcgtttctccttaccacaatcttaaatagatttcagctgaaaataatcagttcttatgaaaacaaatagagaaatatcagtaagtcaaatctgtttgaattataattcctttcaaatagttttgctatttaatttatatgattaatgttttcattaaaatttttgataccaaatttgtaatctagaatatttattattagctaaaatattcaggagcctataattttaagttaggcattagtgtcaatgtatgaaattctgatacttcatgtggaagacagtcattgatggatacctaaaagtatctaaaaagtagatatgttttttttattattattatatttttattattattacacttcaagttttagggtacatgtgcacagcatgcaggtttgttacatatgtatacatgtgccatgttggtgtgctgcacccattaacttgtcatttagcattagctatatctccaaatgctatccctcccccctccccccaccccacaacagtccccggtgtgtgatgttttccttcctgtgtccatgtgttctcattgttcaattcctacctat

SEQ ID NO: 14044 - DNA, 2383 bp, Homo sapiens
tacaccaggaaactacagattgagattagggggtgggaggaaagaaacctgggctagagattaaaacattcctaaatttagcagaatttcagaaatgatttttgcagattcattagaaaagaaaaattgtcatttaatcttaagttttggatgtagctcacatgtcaccaccaccagatagtgttacagcatgtatccatcatgttgcattgacacatcaaacttgtgtgtgtttgttttgattgccaaaagggcttaatatcagttgtacaatctttctgaactttatagttcctggctcaggaaagatggcctttgctattgaagccaacttcttcacatgctgttatctttacagaactaagagatcttgtttctattagcaggttttcatgataggaaagaacaagtagtgtgtgtctttattcttgatacaacaccacctcggtgcttgcaacctggaacaaaaccataccatgagagagagggggaaaaaaatctatgcacttaacctacaaaatctctggtgatgacagttgtattgttgctattacatggcataacggtctattatgtggtaggaaaatatagcctgctaaatcctacttaagttgatccactttaaactgagtaactgtataaaacatctattgaaaattcttttccttttgacttagattctgccttacatcaatttttgcatttttggtaaaaaaaaaaccctactacgtatgactctaacctgatacttgctctctaatggctcttaatatatccttgaaatcggctatttcaattttatcagacttttaccagagtaaaacttgcttctgtagcaggcctctcattttttattatgaggtctgtttttaaatacttaatttgaacagctctaagatattgtcacttaggtcatctaaaagcttttagagatttgaacataagttcatttcctgttaatcaaagacattccgtaagttggcaaaagaaattgggagagagaaatagaaggcttgatattctggacagcattaaggttgataggttgatgataaaaacttaaaaccaggacctccattctgtcatgactgacaccatggtagtctgtcagcttgaccagtggagagtcattcatttagcacaagcagctggagatttaaactgccagtactatgtatttggtgtataatgcaaggaagaaactttatccttgaatttgagggtgatggggtgggtcaggaaaggatggcgccagaattctacatgataatgaactaaaaaatgttgcttttcagaggaagataaagcatcttcttttgggaggggggtatctcatgtctaagtaagtaaaagaaagaagtagctactgtctcttttaaaaaccacgtacaaaacagaacaagtctcagttttcagtgcaacatttcaaaaaatatatatgctgcaatctaataattaaaaggaattttacctattatgaaacatattacattttttaagttagataatcagtttcaaaaggagtattcaggttatttaactttgtttttaaatggctgcatcagaaaaaaatgtctatttttttttattaaaatatttcatcacttgttaaaacatatttttgatctgagtttggtaaagtattattttacctgctgttgtactaccacagactgttgacttttagtttcttaaagagaaaaattgcctttttactagaaagcctttgtatattgcaatttttctgtttgggaaaatctaaggatttactgtggttagtcttacagaagaaatgtggatttgataaactagtgcctatgattttaacttatgtttgatatatagtagtaagggttttatgaatgttgattattttgtgccaacagcccagaattgtcacttatatgtaagcagaaaacaatgagctctgcttccaaagttatttaattttctcagtgtttgaatgttattttttgtaagtgtgttaataaaagtgtaaagaattggaaaaaatataaatattcttaactcaagcatttgctggatcatttttctacaaaacttgtttgtacaatataaaacactctctgaagagttgactttttttcagtttcgtatcctggaaatcacattttgtaaaactggggaccattcataattgtcagatactttttaaaattatctcaatacatcacttttataaaaaaaaaaagtttttttgaaagaaaattagatacatatgtggccccagatgtttgtataactctagaatgatctagactatgtatgtttaaattaactttttattgaatgtacaggtgtccatttttgacgttaagcatggtcctttaaggtcacatgacgtttgatttgcaaacatttc

SEQ ID NO: 14045 - DNA, 1221 bp, Homo sapiens
caaaatgaagaatatcctttactgaaatggaacatcacaggtccctagaatggaatgggttttgttagtatagctgtcacaagtgtgtgcctcttgttacattaatgctatccctgcttttgttagttccatataaatgattgatttggcttgaatggagataaaagtctaggtctacaaccaatcctagaacttcaagttaactttaagtttggtgttgtatatggacaggctgttacactacccattttactgtgcatattaaacgttactgttacttatttttagtggctagatgattgtaagaggacatttggtgccaaagaagacatgtataggataaacacagatgcacaagtaagtttcttgttcctgtttttgcaacatacattttctgtatcaggtaaaacaatgcatgtgttcaaatatccttatttgattatttctaaaaataaagaatatttgtaaaacttttcattttggttatcaaaacaatctttgtaaaagctcaatgaaatactggtttcataatgaaaaattcactttaataaaaatgaacgaccagcttgtgactgaagcttaataacatccaatagataagcttgatggatatctggacagtccaggtcggcttttaagttgcatgtgcctcttaaagaaaaatttgtcccatgttagtattctgctattctgttagataaattggtcaagaaagcaaacctaagaataatgtgatataatatatccatgttaaaggtaaaattagaattggataaattataatgtttttctttaatataaggctcagtgaaaacaacagcattatattttcttagaaaggtgcacatacataaacacatacattgtagtaagtgaggataagttagggcctacaaattattccaatggaagtgtagcttcacaggggaaaatacattcatcaactgaaatttatttccatttgacatcagaattccagtcttttatattctacctttggttatattattacagatttctagtgtctgtaaaggttatactattattaggttatactatttattatagtaaaaaattgaagttctgcaaaaactgcagtgttgagaaaataatagtatactcgctaagtgttaactatttgccagcctctatagtttctttatccttacaactcaggcaagtagttgctctaattatcctggttttgaagatgaggaaact

SEQ ID NO: 14046 - DNA, 1186 bp, Homo sapiens
tagaacctaatcctcatatagttgtgaagactgaatgaaattatccatatgaggcccctaacatagcccttaacacaaatgaccatgatcaaaactttaagaatattattatcaccaatgtgaggctgttcaaataaaagcctccaaaattgaccattgaaaatgaaagcattctaatcggtattattcatagaagttactaaaatgaatccatagtggtggcatattataggacttgggttattttaaggtagttgcttgaaattagagttctaattctaaaaatgctaactagaaagaacaggaattcacttattcacactttcttacaagatttaggttgttgtacattttctaaatcagtgtgtatgatgaataaaaataacctgtcaaatgacttaagctgtcttacgtgattgagcctattctttttttctgagatagtgttatgatatttatgatatctgtgttaatagtcaagatgaagaagagcaagatggttttccagaagtacagacgtcgcctctgccgtcaccatttctttctgccatcatagccgcctttcagcccgtggcatatgatgatgaagaggaagcctggcgctgccacgtcaatcagatgctgtctgacaccgacgggtcctctgcagtgtttacttttcatgtgttttctaggctgtttcaggtcagtgaggttcagggtttctgaattcatattatagttacctaatcaagttacagtttttcttctaaaatcagcatctccgattttaatattcctaccagttttaacaaattttttttttctaagctaatggtattacttacattgacactgtgacattgtggtactgctggtacattacacaatgactggtagagatttctcccctaaggcaattagaataaaacttcaaaacaacgtctgatatgttttctgcagtatgcttaggcaccatcaggataccaaagaaataaaggcctaagctctgccttcagggagcttacagttaatatatcataaatcagcttataatcaaggcttaaagtaatggactaaaagtgtccattgactttgtgaggaccttaaagtttttagctgttaaggttgcttcctccccaataataaagataatacaagctaaaatttattgagtacccactacttgctaggcactgtgctaaag

SEQ ID NO: 14047 - DNA, 1220 bp, Homo sapiens
tagtttgtcatatcagggcctaagaaaaattgtagggattatatccttacaaaaggaggagcagcttagaataacagaaacataacttatataaatccttaagtgggagaaattgaaatttgtcatatttcctcttgaccttttaaaattggcaacagttatgttttgatggctgtgatcttgattttaaattatattttgtagcaaaaaatgaccattgaatttagccagagctatcctaccaactgaaataattgtgaccttgtatgttgtcaagtgcatgtgggtatttaaagtcagtttttgcattgtactaagtattaaacctttgtaaatcttgaagattttcttaaagtttgtgttgccaaagtgtatcatagaaatgttgttttaagtgtctgtctctgactttttcacaacatattttgcataaaaaaagatttgaatcacatgttgactttctgcacaaagcttaatccagagcttgaatcagtctttgggtttgagaaatcacaaagagtttgccccaaaagtgtagtgtatatttaaatgtttgtcttcgtttttttctaattctgtgtgttttcctttttgctaaccaggagctgcaggtaagttgcagcctggtgttatggattgtttatttgttgtcatctgtgatgtatttgtcttctttgtggtctcattcatgtttgtgtattagaatagaaatggcttagatagtagatttacttggtccccagtaatacaagatagaaagtcaagaaaattatttcgttaaaacaggttgtcaaccaaataattttgatctttttaaatataaatatttgatggtgtgttaacagtttaaagaaattgaagggctgattgaaactctgcttttaatgatgcattaagtatttttcatcttggtatatgtttttctggtatattacatttagtacatttagaagcatgtatttgaggttttagaaatcgtgtcttgcttttccagggtgaaagtatggacaatttcaactggggagttcgcaggcgctcactggacagtattgacaaaggggacactccatccctccaggagtaccagtgctctagtagcacccccagcctgaacctcaccaatcaggaggatacagatgagtcctcggaagaagaagcggcacttacagcaagccagatactctcacgcacacagatggtatacaattcacttttcttac

SEQ ID NO: 14048 - DNA, 1254 bp, Homo sapiens
tatggcttaatatgtgccacacttaggtagtatggtaaagatgtaaaggtacctaggctttggatctaaacagacctatactcaaatctcagttcttgttagggcttgtaccttgggcaagttactaatcttttttctcaccattaaaatgagaattgtgtttagaagtttgttatgaggactaactatttatgtaaaattctagatacaatgcatttgtccaaccccaagttcacaaaagtctggtcatcccctttttgtaattataatttgactctcatgtgcttttattcaaatgagagagaaacataacttttcatcatagcaacaaacttaaaataatgtcttttacttattattgcttggaatcatcaattatttatgcttttttcctagtcaaagtaaacaagtatggagatacttgggatgagtgaaaaattacatcattggacatgaaggagtttcaacatccagcttcatctaggtggtcatgattacctgcatgctttgagctcagcagcagtcttcataaacacatttaaaacaagatcctgggtttttgtggtttgacttctatggtgttttaaaaaaacacagatttttagtgttaatattgtgtaaatgtactcaccttagggattcatttgaatgatggtattataccatgattgtatacagtttgtgaaattgttgcaagggcaaagataactcttaaaaaaccgtcgagattacaatgctctagaatcagcatataagaaaataaatgatatctgcatgttgaattggggtggatggggggagcaagcataatttttaagtgtgaagctttgcatcaagaaattattaaaaagctttttttctccagtattttctgtattatcttaatgtttatggcaaataaaatgtaaaggaacatgcaacagccctcatcttccttgattttatggttttattgtttgtaatttattgatttatttttaagctagttataatcatgtaggtataggaaataaagtcatctataatatttctataatatggctataatatggctataaatctataatatggctggaggcagtgggcagtggttcatgcctgtaatcccagcactttgggaggccgaagtgggaggattgcatgagtccaggagtttgagaccagcctgggcaacaaagcgagaccctgtctttacaaaaaaataaaaattagctggcgatggtgtcgtgtgcctgtagtcctagttacttaaga

SEQ ID NO: 14049 - DNA, 3075 bp, Homo sapiens
ccaacgtcctcactgtgattatgtgtatattgctgtttaaattttgtatatgtgtataaaaggaaaaaggttcacctagagattatttctgaaaaatgtattgtaaaaataattttgtggcatttctagtccctttttttgaatgaaccaattatactttatttggtctcctatgtagcatttcagaaaacaagagaaaactgttaccatgaacaaacattgccagaattaaccttactgtttaagaggccaacttctggaaggaggtaggagtcataactttttagaggcatatgccaaatatcatttggtatacttaacaatattagtgttttaaaatgatgagttataattatttgaacatatagatatgtaacatgccacaaatcatttctaccatgcaaggtgtataagttgtttattttttagtgttaaaactataatagcttgaatataggtaccaatgaacaaattcaaattgcacctcttttcttaaaagaatgggatttaaactcttataaacattctttaacttttttgtttgtttgttctctttttttccttttgcattcttctagccagtgattgatctgctaatgctttctttgccactctaagtaaaatttatttcacctcctcaatgaaaacctcatggttttgctggctgtttataactgcatcgcacttctagttgtggcttgaattttcagttaagctttcatggtatgtaattttccagccttttgagaaaacaagcatactataagtgagagctgttttgttttccttgtttgtttgtttcatgctaggcttttcctggcagcatgtccattgcaggcagtggacaagaaaccaccagcattgagctaacccagtacatgctaggacctgtcctagaggggccacttttcattacctgagttatttgtacagaagggcaatagccattatttttgtggatgaggaaacaagaataaacagaatggtatttttaggtttgtattttatgtctttttttttttttttttttgccattcttgaggaaatatagagatgacatgttttcaccccaactatctggtgctattgaatgactaattcagtccctaaagttctgtgaaaacacaaaagtctaatgatttgagtgagtaaaaggtaatggtgcatttgaacaagtaaatgctgtcgtggtcagcaagatccgtgatttgaacatgtgatgactggaaaaaggtttgggttatttggaactctggctaaaacttctttcgggtgacatgtgatcgtttaaatggcattaagtgaataaagcacacagacagtgctactcttgaccactattttaccatttctttgcaaacagtgttcacattttcatattttttccctaactaaaccaccaaagaaagaaattttgtatgtatatacagtgtgtgtgtatacaaaatcatgatatagtagaatgcaactactttctttttctaccaaacgaaaggttttatttgctgtgaaataaaccagaagtttaaaaaaccctgtagtgattaagcatacttaaccactccttatttgtagattcactttcaaccttaaaaattaataccagtttgcataaaccaatatctgaaaagaacaggaaatgttaatggcaagcaacagctattaatactgatgtgatggatgcatttgttttgcagtggtgactggcctaggcaggtttggatctgtgaagaattgattcattttcaaaattattccataaagttaaaaagttacactttaaaggcaacaggtcatacagttctttaaatctgatcaactgtagctttatttaaagcaaatataaatcatagatgaagttattttaaacactatgttagaatatagagatttttaaaaaatgctgataagcacagttaattctaaaatgagaggattgttacaggagggagatgttacagttaatccacaatcaacattttgatggtagggaaaaaactgcgtaaaaactattgcattatgtatgataagaaagtaagtattccaaagggataatcttgcatattaagaaaactccaaataatctttaaactgccttgaaaaataaacctctttgactgctgagcggcagagtgcttacccttgattgtcttgattttatatatttatttctaaggggagaaaaaggggtcagacagagtaatatgatacattttcttaaaaacttctctaagttgcacaaaactgaacaatcatcaagcacttatttactggctaatgttgaataaattagggtgccttcatctgggttttctttagtacctaagtctacaaccctttctctttttctattgtgtttcgaactccacattgcaatactctgttgtcatggaatacaacctttagatgtttactgctgaagtaggtcagaaattgtattatttgatttgcctcaaacatccactgtaatgttacatgcaccttttttgaagcatgaactctgaattatgtttttataaatctgactaggcaaacctagattctggtttcacaatggatttattttctctctcagtctccattttaacagtgcttttgaagtttatacagaaagctttaaaagttagtttgtgcccttggtttttattcttaaaactgctaaaatacctctgtaagccttatcctttattctttcatatgttgtataataaatgtatagatttcattgaccaactaaaatgttgggtgtctgtaaatgagaccaaaacgtgggttgcttttttcataaaataatttctattgggggttactgttcaatgacagcaggtaacctataactgtgaatgcttcgtgtcgtcagtatttgcattacattcataaaagtgtgcaagtcctgtgactcccagcttaactgaaatactgttatgccacctaacttgagtacagcaaactggttttaggtttcaatgacattgatgtaaaatgatatcccatgaataaaaagtatttgtgtttggtttcagaacagatgtgtaaattttttcttctctcttctggctttcatttcaaaaacca

SEQ ID NO: 14050 - DNA, 1114 bp, Homo sapiens
ataactcataattattttaatggcagagcactgctgtatctgttttatggtctacatagttaaaatcttctcagagagcctaaattctaatacattttattaatttatactaatcttcatatttactgttctctaaaataattatgagaagcaaataaaatcaaaagtcatgtttaaagacgtgtttttaaaattccactatcccttttctaaaggttaaaggtctgaagcagctgtttagattcactgtaagtaaactttggtaactctaatggggatagacccacttaagatatttaaaaaggtatggcatcagcgtttcatgctctgccttttagcttctaaaaggaaagatgcagatttctagtgcattaagcctgagccatattctcacatgcaagtgaagtcattaaagaactttacatatgtgagatagaaacaatggttccttagttttgcactgggaagaaaatattttgtaaaagaatgtttatttgaaataatgataactatcaattgttcacaatgtggtggaaattaaaacaccatctcagctttaacttttaaataataatgataactatctttattgagcatcttctacatcctaggcattgtcctaggcattgcatgtttatatccccaattctcaccacaaccctgcaagtaggtggtattatccaagttttacccattaagaaactgaagatcagagaagttaagaaacttgctcaacatcatatagtaagtagcagagttgggattggaattcaggcatgactcaaacctggatgtacttgattccaaatgccatgttgttttcactctctgcactgactttttaattatttaaaactctagaaagatgaacaaaggttaatttaaacttacctaagaagatgagaatcaaacaaaacagatatgcttactctagttaaaaagaaaataaatctcatgtcagacccagaaaggaccaatcactgtccgattgtaagctatgttgggccaattccaaaatattatacgatggagaggtcaaatttacctacttctgagttacctcagtttcccaacaatggaccttggcacactggagtaacaatacataacagag

SEQ ID NO: 14051 - DNA, 1214 bp, Homo sapiens
tgatttatttggcagagagagtcacattcagtattgctcagtgggacaggggctccgtggtgatatgttgctaactaaacaggtcaggcattcgtagccactctgggtaagtgcccggtggttaggtaatgtgtgacagccagcagccaaagtggacatactcagagacagttcctggctggctgcccaagccttacatctgtagctaaagaattactgaaaatgtgaatgaaaatatctcctctcctggcttgtggtccagagctcagactcaggaaccgaatttacataggtttgaatcccagatctgctcttattggctgagtgagcttgggcaggttccctacatttttttcatgtgtagaatggggatattaagagtaatctgccttggggtggcaggcaagattaaatgaatatgtagatgtgaagttctctgaatgagtggcacctactgctaacttttcccctgcttcccaagtttattcagtgagcaaatttatcaagtgccttctatacaaccagacattctactaggtgctggcaaatgaatcagacctaattgctgcccttataaagcttatggcatagtacaggggttggtaagcttttctgtaaatgtctggacagtaaatgctttagactttgtgggccgtagtgtctctatcacagctacgcaattctgctgttaatattgtgaaagtagttgccataagtaaatgaatgatcatggctgtgttgcagtaaaactttatttatgacaacaattggtgggtcatattctgcccataggctgtaatttgcagacctgtggtctagtgggaagacagttgttaaataattacaattatgatgttacagattgtgctaagggctgtggaggaacagacaggattctatgagtgggaagggtcagggaaggtagctttgaagaagtgacattgaaaccaaatgatgaggagaggcagccagaggaggagatggagggtgctccaggctggtctgtgggttcgtatcttttaaaggcataacagatattctgcagctttctttggattaaaataaataatttcgttcctctatttaattcatcgccagttttctcctcccctaccctctccctgcaataatccaagagataagctatgttaccaagagataagctacattaatatattaacacattttgttctgcatatgcactttctttctct

SEQ ID NO: 14052 - DNA, 1850 bp, Homo sapiens
caaccctggagtaacctcgatgccctctccagaagggcacccgaggaagggtctagggcccaagagcaccaaaatcaccaacgccggggattggtaggtagcctgaaaaatctaattcagagaaggatgctccgcgcgcagacatggcttatccccgtgctactgcatgagccacacctaggccggccccggacaccgacagccaatggccgggcccgtcccgccccatccgggattggctgtgcgtgccgcggccctccaccccgccccgctcaggatcttcccgggattggctgagctacccgacctctccaggggatcggctgcgcgccccgcccttgcccagagtcttcccgggattggctgcgggcctcgcgaccctcctgcttccctccccgccccgcgccgcctctctggtttgtgcgcccgtcgcaggtcgcaggcctctttgtcagctggagttgcgcggtgagtgcatctccagtcttcggctttcggtctcccgcggggagggcgcccggccggcccgtgggtccgatcaggggctgggctcgcccggtgtccccacgagctttgcccgcctcgagctcctctgctcccggcggccagaacggaggggtagagcagccctcggcggcccggggggcgggcggcggtgcccgtcccggggctgcgcgaggcacaggcgccgcgcccagcggaacagccggaggttcccggcgcaggtctgggcaccgtaacaattttgcgctttgcttccccagggctgacgcgccactatgtagcgggtttcgggcgggccacgcgtgcgggacaggaacccaaccccagccgaccttgagctccaggagttcgtctcttacgtctgcggaagtgcagctgcctcagttcttagcgcaggtatgttcctagccttgagcggggtgggggaaggaatgagtcagcctggagcacgtggccagtgggaccggagggttccccggcgtctgtttgtcgccaaggtccgaatccggctccccttaactggaaggaaacatccatgtaggggctcaccaaacaaaacagctgtgtttctagtgtggtttcagacttagagaagcagagatccacgaggtattgagagcaacgcggaaaatagtagtgaaccctgtaaaaatcaaagaaaaaaaatcacaaagcaccctttcctgtgcccttttaaggttgacccagtgctttaagaggctaacacagaagggtaaagtaagtctccataaaacccagagaagagactggaaagctcctctttggatcctgtctggagtcacaactgaaccagaaaaagtttcgttacaacttgagcgcctttgtgattttctttacagtttatagaacaagcaatacatttcagttttctttggttaaaacgtcattttaaaacttttctttctataggttgacaactacaggcacaagccattgaagctggaatgtcctgttgctggtatttcaattgacttaagccaactatcccttcagttacaataggaaagtgcctctaataaggccaaatatgcgtactaacttgtagcaaccacgtgtccgtgcagtgccacaggagctagagcagtgacaatgctggtggcaacagggcagtgtagcaggtgcttcatgttcaccttttcaaccttttcatttaattgtcacaactcggaggtggattctgttagggacaggctgccccaggaccactccgcccccgctaactcaatgcagctgacccttaccctgaatactctgcagctgcattcctgaaccgttatctaggcgctatagcaaggtcaccagacttgctacaccgaagccctctg

SEQ ID NO: 14053 - DNA, 1850 bp, Homo sapiens; identical to SEQ ID NO: 14052

SEQ ID NO: 14054 - DNA, 1850 bp, Homo sapiens; identical to SEQ ID NO: 14052

SEQ ID NO: 14055 - DNA, 1217 bp, Homo sapiens
attttttgagaaatagtactgattgtgatttcttctctattcagtgaggaaagggagtgacaggtaatgattctgtatcaaggctgattaaagaataaaagaaggcctttctgaagattaaaaaacaaataaaaagttgagaagaaagagcacgaagagtagaagggaacaatggtgtactcgccagcaatggcaatacgggttattaaaaagaagggtgggggcggggaaccctggccgactcaggacgccacgggaggaagccacgcaaaatagcaaaccgggatcctagaggggcggggcccacctcagcgcgcaggcgcaaccaggcccaggtggccgccgcggaagcgaagccacctatacgcgccgcgccgcttgggtctcctgcgcatgcgcagacggacctgcgctggaggcttcatctttgccgccgctgccgtcgccttcctgggattggagtctcgagctttcttcgttcgttcgtcggcgggttcgcgcccttctcgcgcctcggggctgcgaggctggggaaggggttggagggggctgttgatcgccgcgtttaagttgcgctcggggcggccatgtcggccggcgaggtcgagcgcctagtgtcggagctgagcggcgggaccggaggggatgaggaggaagagtggctctatggcggtacgaaacttcctgtctctgtctctcgggttctctcaggcctcccctcttggccctcaaacggccggcgtccctggcctctcgcgccgccgcttcgggcctctggttgggagtcctgtccggcctgacttaggccgagcgcggcgtgcgcgtgcccccagtccccgcggcggtctcccgcctggcccacgcccaccatgcgcatccacccctgtggcggccgggccgggctggggggctgtgaccggtcctggcccccggcttcgctgtgctttccccgaggcgtctcgatcgcctagctgctgcgctctttacccttgtttttttctgtcgattctgaggtggtggtttttggtgtctgtttttgccctgtggccttagggtgcccttcctgtcccttctttcagaaacagtcattctgtaataatagctaaataaagttaatgctgtacaactaacgtcttgtttcttgatggtcagtttgtatggaatgcacctgcaagggtacctccttgtctgaaagtcgtgctttaaaaataattaat

SEQ ID NO: 14056 - DNA, 1223 bp, Homo sapiens
tagtacgcttggggaagtataatacatgctgaggtcaacagatatttcctgaacactatattacatggaggaatgggtagcagcaagagtacactgttttaaaatcagagcacagctaattttgtgccaggcactgtgctaggttctgggaaagtactgagaataactgaggagcagagtggaagagaagaagagaagaaacaattggatagaaacaaagtgtctagagcagtgtggatcagcaaatgttggttgattaaatgaataaatttattagtcaaggagattgtggacgagtataaccataactaacccactgctgaggaatgcggtgttctgtttgattggaatttatttttattgttattattttgtaattctgtattataactatatgcctaattgttgtacaccatctcacaatcaagccttgtgagattttccaaattttatcttgatcaaactggtttgcaaattatttttcagggttttcttaaaaaaaaaaaaaaaaacccaaactttataagatcctggctatcctgtggatttttaggcccttgtatttgttcttttttatagcaacatcagagctggatctagaaatggaagctcttaaaaccgtgtataagtcaggggaaacgattgtggtcacctgtgctgtttttaacaatgaggtggttgaccttcaatggacttaccctggagaagtggtaggtaccctcaaaacgtgcaatggcttggagcagagcaacagggctcagaagacctgcatttgagctcggtctgtcactgatgggcacatcactgagtttctctagaccttagcttcccacctctgggatgaacacatttgattaaatggcctttaggactccttgatcaatgggagagtttgaaatgatagttcctggaccaggcccttcagaatacataaagagtgtgccgtaagccttctttttcagaagtcagacagaaataggaaggttctctggctacaagatatcaaccaaaaaattagaagagcaaaaaaaccactggattttactattgcggagacagtgattgattctcatcgtcttggcttctgtgccctgaggtttgattcatctgatagtgttgattgcccgcaccccttcctcttctgccttgttggcacccaggacaatgtgtcttcctgttccacctcctatgtgcctgacctttgcatggctcaccttcagtga

SEQ ID NO: 14057 - DNA, 1144 bp, Homo sapiens
caatcagccatttccaggtcatgtcactttaggagggttgcttttatgacaccgcagtttcatctatgaaatggcaataataatagtactgatcatgggaggggcaatttgaagattaaatgagattaagtgtaatggtccaagcttagtgcgtgatacatggaaagcgtttaataaatgttaattctcaatagtactagatggataaattttgcttttgtttacacagaaaaaagcagccatttgggccactagtcatgaaaggcaacatattagatcttttaaaaagtgttttcagtgtctgtgaccagccattccaactactgattttggatatgcttctatagatcctgccaagcttttccttgttgaccgctccttgtatgggaaagaagacaacgacacgctggtccgctgtcctctcacagacccagaagtgaccaattattccctcaaggggtgccaggggaagcctcttcccaaggacttgaggtttattcctgaccccaaggcgggcatcatgatcaaaagtgtgaaacgcgcctaccatcggctctgtctgcattgttctgtggaccaggagggcaagtcagtgctgtcggaaaaattcatcctgaaagtgaggccaggtactggctctttcttatctgcctctgggagttgagaactcacttatctaaagaagacttctcttctcgttgatccaccttagtgtagtcaatcagggagctagctgttcatagttcccccagcttcaaaaaatgtcatctgcttttgaatttgtttatttcatggtcctgaccccgtgtggcagttccatgactgcctctcatagaggtgaatgtatctgccatagattggcatttagactggactgacttaagtcagcccaaagtttcataattgcatcaagtactcgttctaagggaaacccattgggtagcttgaattatgttggttgaaaagattagcatgcagatgattcattctttgatttactattgacatatgaattgactttcccttcagctgatcaattgcaatgcatcctcaaactgtttgagatctgagaaggaaaattccagttgactgtggaacttgttatggttgtgccgttatgtagaatatttcgttagctggaaga

SEQ ID NO: 14058 - DNA, 1184 bp, Homo sapiens
agttggcattcagctattgagtacagtttttattaaggcttttgaaaaagtatacttattgaaattagggaaaatttgattatttaaaacctgggatttccagaggtgagcagggtaggatttgcatgagaaagacgcctgtttgcttaaaagaatataagtagttgttggtcacatcctcctgacaccatcaaggttgtctgaaataaagattaaagcagcttctctatgctagggcttctacttggtttggaaaaagtgttttccagaagtattataatctcacagtgggcatttctgtctttttcactcaatttacttgaaggatgcttgatttaattgctggtaccttcagatatgcaagtagtacagataggttagcaccatgctttgtattttatttaaaagatgacaaagtaagctgtacacatttgaggagaaatggtaaatcaaaatttcatgctataatacaaattatttgaggggccacatttcttttcattctagccttcaaagctgtgcctgttgtgtctgtgtccaaagcaagctatcttcttagggaaggggaagaattcacagtgacgtgcacaataaaagatgtgtctagttctgtgtactcaacgtggaaaagagaaaacagtcaggtgagtgaatcgcttcattcttctcatgttctgtctctgtgggagatgataagttttctctttcagaagagtctgtcctgaaactgcctcgactagtgcgtctgtcagaggtggattgtctgggagagtgttgggattgcatatttccccctttcatacctccacatggagatatatacatttattattagtaacaaataaatttcattttatacatttattttgagaaacttgagagaacttcagattcatgttattacttcatgctgtttctttgaaaaactgttagggacttaaaaaacatggttaactgcatgaatactttgatttaaagctattgttgataccgtttaggccagactatttaaaatattgaaaagagttgccacttccatacttaaaaagaatagagagtctcaattattcaccagaaaacccttccctcgcccacaaattggcctatccatttgaagatgggtttctttttgtaaggatctgatttcctcctttgaggctggttacctgagattaagttgctaa

SEQ ID NO: 14059 - DNA, 2388 bp, Homo sapiens
tcctcccagcctctgcttgtgcacgacgatgtctgagcagaatcagtgtttgggtcacccctccaggaatgatctcttcttttggcttccatgatggttattttcttttctttcaacttgcatccaactccaggatagtgggcaccccactgcaatcctgtctttctgagcacactttagtggccgatgatttttgtcatcagccaccatcctattgcaaaggttccaactgtatatattcccaatagcaacgtagcttctaccatgaacagaaaacattctgatttggaaaaagagagggaggtatggactgggggccagagtcctttccaaggcttctccaattctgcccaaaaatatggttgatagtttacctgaataaatggtagtaatcacagttggccttcagaaccatccatagtagtatgatgatacaagattagaagctgaaaacctaagtcctttatgtggaaaacagaacatcattagaacaaaggacagagtatgaacacctgggcttaagaaatctagtatttcatgctgggaatgagacataggccatgaaaaaaatgatccccaagtgtgaacaaaagatgctcttctgtggaccactgcatgagcttttatactaccgacctggtttttaaatagagtttgctattagagcattgaattggagagaaggcctccctagccagcacttgtatatacgcatctataaattgtccgtgttcatacatttgaggggaaaacaccataaggtttcgtttctgtatacaaccctggcattatgtccactgtgtatagaagtagattaagagccatataagtttgaaggaaacagttaataccattttttaaggaaacaatataaccacaaagcacagtttgaacaaaatctcctcttttagctgatgaacttattctgtagattctgtggaacaagcctatcagcttcagaatggcattgtactcaatggatttgatgctgtttgacaaagttactgattcactgcatggctcccacaggagtgggaaaacactgccatcttagtttggattcttatgtagcaggaaataaagtataggtttagcctccttcgcaggcatgtcctggacaccgggccagtatctatatatgtgtatgtacgtttgtatgtgtgtagacaaatatttggaggggtatttttgccctgagtccaagagggtcctttagtacctgaaaagtaacttggctttcattattagtactgctcttgtttcttttcacatagctgtctagagtagcttaccagaagcttccatagtggtgcagaggaagtggaaggcatcagtccctatgtatttgcagttcacctgcacttaaggcactctgttatttagactcatcttactgtacctgttccttagaccttccataatgctactgtctcactgaaacatttaaattttaccctttagactgtagcctggatattattcttgtagtttacctctttaaaaacaaaacaaaacaaaacaaaaaactccccttcctcactgcccaatataaaaggcaaatgtgtacatggcagagtttgtgtgttgtcttgaaagattcaggtatgttgcctttatggtttcccccttctacatttcttagactacatttagagaactgtggccgttatctggaagtaaccatttgcactggagttctatgctctcgcacctttccaaagttaacagattttggggttgtgttgtcacccaagagattgttgtttgccatactttgtctgaaaaattcctttgtgtttctattgacttcaatgatagtaagaaaagtggttgttagttatagatgtctaggtacttcaggggcacttcattgagagttttgtcttggatattcttgaaagtttatatttttataattttttcttacatcagatgtttctttgcagtggcttaatgtttgaaattattttgtggctttttttgtaaatattgaaatgtagcaataatgtcttttgaatattcccaagcccatgagtccttgaaaatattttttatatatacagtaactttatgtgtaaatacataagcggcgtaagtttaaaggatgttggtgttccacgtgttttattcctgtatgttgtccaattgttgacagttctgaagaattctaataaaatgtacatatataaatcaagtggagtcatttgattgttgagattcgttgagattaaactttaaagcattaaagtgcaatcatcctgacaaagttttgtacgcagttttcataaaatatgtgcagggctatcagatcacgctaggatttacatgcttcgagattcaacagatattaagaattttcatacgtgtgatattttctcattttagtct

SEQ ID NO: 14060 - DNA, 1217 bp, Homo sapiens
ggcggaaggctctggaggaagcagaagtgaaggacctcgcagtcctgggacggtggggcacagagagagaaagggagccccgggcgcggcgcggtgaggatgcgagcagaggaaggacacgcggcgccgggtacctgccgggagcgccggatccaatgggaggagggcccgcgccgcacctcaacctggcagaggacgtcacgacgccaaggcggtcgccgggccaatgggaggccgtcgcgggcagggacggggccgggaggagtcggggctgggccgcgccgaggcagctggctgactccagtttagccgccgccggagaggacgggcgccgagccggggctgcggacttcggcctgcccctcacctcactcccgctgcttgcacctcccggatggtgctgactgctccctaagcggcggcggcggcgagtcgtgaggacgcgccgcggaggctgttcggggtcgaggcttcccgtcgccggcacttcctcttgcggcgcccgtgcgcggccggcccggcaggcgggatggcggccgcggctccagggaacggccgcgcatcggcgccccggctgcttctgctctttctggttccgctgctgtgggccccggctgcggtccgggccggcccagatgaagaccttagccaccggaacaaagaaccgccggcgccggcccagcagctgcagccgcagcctgtggctgtgcagggccccgagccggcccgggtcgaggtgagcgggccgggatggggcgagcgaggctgcagggccggctgcgccgagtaccaggctccaggcctttgaaagcgccgcactccgccggcctcggctgggggaggggagcccggcccctgctcccggggtggagggcggtcggctgcgctgttttccggtgaggcctggtcttgcccgctcctttagggaaagggagagggagagtccaagaggagcccgctataaacgttgatctccggagggccaagatgctgctccgggatgggcgttttattgatcagatgtgtcttagagtagctagaaagactcatccctaccaaaaagtttttaacagaaggctgctaggaggctttttgtattccctgaggatcatcacatcggccatttcattgttgaaatagcttatgccaaactgcttacccaaattcaacttggcactgcctgtgctttttgccaaatatggattatgaaccatgac

SEQ ID NO: 14061 - DNA, 1139 bp, Homo sapiens
ctagaagtttgtgatttaaagatttgtgatgaagaaattccactatgcaagtggcatggcttcccagttataaaatctcagctcttgagagggcctcagagctaacttctaccccaggtactgtgccttgcacaacataaggcaagccagcctctgactgaacatgcctggaaaggagttcaatatcttacttaacatctctcaggaagatgtgccatcttcaactggaccattggcttctgagtaagctgtgttaggcctgggctagacctaatggtttattattggtggagagaaagatctggaaatacttgaggttattacatactagattagcttctaatgtgaaccatttttcttttaacagtgataaattattatttccgaagttaactgttcccttggtcgtgatacacactcgattaacaaacatactgttgtattttttccagttttgtttggctatgccaccacagtcatccccagggtctatacatactatgtttcaactgtattatttgccatttttggcattagaatgcttcgggaaggcttaaagatgagccctgatgagggtcaagaggaactggaagaagttcaagctgaattaaagaagaaagatgaagaagtaagccatggcactgttgatctggaccaaaaaggcactcaactaggaataaacactctacagaggtttctcagtggccccatctgtgtgatatgcggggctacacaaaaatagcttcttttgctttgttctgttcttatacctgtctgtgatctgacttggggttggtgtgaatgtagtagagaaaggaagctgacagatgaatactgaacacaggtaatcagtttccttaattaggttgattataagctcctgaaaagcaggaactgtattttataattttacctgtttctcccgtggtgtctaggatagtaagtgagcagagcagtaaatactgtttggtttgttcagctgaggagaaacggaagaattgagactatagcatttgttgctgtgtgagaccagtggttcagaggggaggtttgggggtcacataaatgtagtttttttggagcatatttcatagaatttaaacacttagaaaagtcaagtgatttgtgtgctattttga

SEQ ID NO: 14062 - DNA, 1098 bp, Homo sapiens
ctccccctaatctgagtgtctgctttgctcaggtaacatgtgttcactggataaatccttgattcctggcactgaggcagggtttctgttcccaggaagcagaggcatactattctgtgaaggattgactgagtttctcctaataccaagcagtatctgagggaacagatgtctagcttaaaatcctccctagcacttgtcatagcagtgctacgtattgcctgtgaaggaagtttaataactgctgaaaggttcgattagctttatttcatcaggatttgtttgactttacaaattgatttgggttatttcaacttttaggtctagtcttaagtataactggtacatattccttcaagcagccattacacctctcataaatttattatacacctgcatttttataactattatgctttttaattgttggccaccatttttagtgcttctgaattgttatggttctcaagcagcagttgtcaccttggttttgaattaatgctgtgacgcttgcttccaggacccctatggtgtagccgtgggtggaactgtggggcactgcctgtgcacgggattggcagtaattggaggaagaatgatagcacagaaaatctctgtcagaactggtaagtcttgaaaattacaaatcagataacattttagaatcactgagagattaaagggtgttagctttgattatttaaatttctgctgctgaagtatacttggtttttctaattacctaccatctcttatagaggtattaatcctggtattgcaaatacggacttttttcacctgtgtagaagttagcaaaatacaaagtcatttttatcgaattcatagtagcttcttgttaacatattatcttagtaaaacaattgtcatttggaagtatgagaagtttttggctctaaaaatgtgtcttacaagactggaatcatgtggagaccatatgtactgattctgctgaatatgtcctgtgaagccacagttaggtctagagatggaagaatcgtctctttgctagtcagaagacctgaacattttcttttataactggattttaagatgagttatagttctactgttgcttgc

SEQ ID NO: 14063 - DNA, 1842 bp, Homo sapiens
cctcaaaagaaaatgtgtaacagagttgaggttgttaaaacagaaaaggttctgaataatgaagattaacctaatgcagaattgctaggtaaagaggtcaggggaatgctaagccagttcttaagacttctctgtcctctgctttgctgttatccttaaggcatatactttgtctttctgcagaaaattctacctggctacaattactttgaacattaatgttgaaaaagaaaacaaccaaagaaaattggtacttacccttctacaaaagaagtgtgactagatatcaatcagtaattaacatatcaaggagctcttctagctaaatgaccatccagtagagatttcccacattcccatgaatatcaagaatagttgtcagaatatgtatgtacctgagcatatgtacacagacaagggggatgttgtggaatatggcaatagcattgttcttctcccctttcaaattgcctttcttgaccttatgccattccatatatatctgagttgtgcctcatttatttattggcaatacctagtgatacggatttagctaacaaaagatatgaagaactattatattgaggcctgtcctctacataccacacttaaaagatggtgaactgtgagtactacttaggttgacagcaacaaagcataagacaagccccaggtaaacgtctaaactgtttactcacattgtcctactccagccccttcaattatttcccatctccacaaatagtcgggggaaaaaattaaaattttcctttatgattcttactgttcttcgcagctcatcttttcctgcttagaattaaccattgctaatttaaaggagcagctagctgcttttctgtcagtctgaagcgtagtagtggaagaggtagtaagcaccagctgcctctttgctgctttgttttcctcctgattctcttaaatttgggttgcaaagctatcccgccccccaccctgccccatgaaacttgagcattcaaatgaagattcagcagtgtctgttcttcatttctatagccaaagctgttagttaaaatcccaaatctatagcatttaaagataccaaatagaaacaccttccagctttaaaaaaaaaaaaaaaaaagtcttccctctgctttattctcactttcttaaaaacacttattctgggtggtactttttaggtaagaaactactgagtttcaggaaaaatgctagctactctgcagttaccgtgctttggacttgcagttatcatagttttgggagagtcagtattgtttaacaaatgcaagtgagaactagaagggttaataaagttgctccttagagtggtgtcaaaccagaaccgagacacttaaaaagtacttcattttttgaatggaaaatattggagaaaagtatgggagatgcaggtagcatgtgagtaaatactacggtctagccttcgagcatcccaaattccgggggtaacttgacagtgctgtgctctcctttgtcatttatatctggcttaggaatggaatagtaataacaagatgccagtgatttggaatagtttgttatagaacattcagtgcaaaatagtgaaaatgtttggtcttcagaagtgctgtagttgttggtcattgccttaaagcagtctgcttgacgctaggagcactgaagcagtccagctccatcaagagcactgttgaagggagaagaacccttgttcaggaagccttagaaagggatccttaaaatagtactctacgcagacaagtgaaaattcttttaaactggatattactcaacatgttttcagatgtttccactacattgaggcaaactttttaaaag

SEQ ID NO: 14064 - DNA, 1159 bp, Homo sapiens
taggtgcctggatattttttgatggaaaaagaatatattgccaaatattaagaagctcagctatgaaatgacctccagggaatcagaaaggcactaatgatgttagtaacttttagtggttctgtgcctcttatcaagtgttacagaggacataccactgccatgtcaggggtttgcttacagtgatgccatgaagacagtccagtagacttggtagcgaccccctcccccaacccctctcccttttcagataatgatggaacagtaattactttcagaatgttgtgtgggttcaaattctctatgtacagatgatgtaaaaatatgtatatgtctagataaaaggagagaaagcaaaacattttgtatgctgcatgaaagcgttatctcttccttacaggtgtgagcacctttcctgaaattctgacaccatgtgcaaactgatccatcctgtttttccttttgtttacaacacagtagtgttctgttcacttttccggggcacaagtttttttgttcatactttggctgtgatgtcacagtttgttcagtgaggtatgatgtgctgctgggaatggattttttttttcaggttaaattattgatacaacaggattttcaagttattcagaaatatccctcatttcattatttttcaattatgtttgaaaataggatttgcactgctttattttaggtggctgggagttttgattgcatattttgttatagttcatagttggaaatatttgcgtaaatggttttcaacaagcctgaaagtaatttcaagaatgtttcagttatagaggtaaaatttgcacacaaaacatcttaggcactttttaacattctcaatcatgggaattttaacttttgggatttgttgaaatcttttttattatccttcacaatttcaatgcttcttttagtcagaaatgattcagggttatttgaggggaaaaaaccccatagtgccttgattttaattcaggtgataactcaccatcttgaagtcattgtccggtttccgtagcagttttgaaaccttagtacctttttaacagcatgtgggtgtcagtgtcattattagtctcctaataagttcctctgaagactgctatcagtctcttggactggaggtacaaataatttagaaata

SEQ ID NO: 14065 - DNA, 1156 bp, Homo sapiens
tcggcctcccgaagtgctgggattacaggtgtgagccaccgcacccggccacattagtaattttaaagtcaccatacaagattttgactactctatcttaacaaatctgtaacagttactgaaggaaagtaaaaaaaaattaagtgtggggtcctttaaatttgattttattgattaattttttatatatttcatatttacattgtggtccgttgagagagaagtctccatttttacctgcttcattttcatctgtgtataccactgccctcccaaatttttttgatgctctgacccagcataggttgatgtatcaagttaattttcaacctcattgtcctcagtaaagttaccataatttcataagttcagagattcttcatttatatatctttgatataattatttttgtgagatattattgtagagaagtttttccctgtccctccaccgagctctctaaaactccctctccccctaacacttctgtatatacacagggttctgtgctacaaattgatgtttagataaacttcagtgaaatgactcttcaggaattggtgcataaggctgcctcctgttatatggacagagtagctgtatgttttgatgaatgcaacaaccagcttccagtttactacacctacaagactgtggttaatgctgcttctgaattatcaaattttctgctgttacactgtgactttcaaggaattcgggaaattggtctctactgccaacctgggatagacttaccctcttggattttagggtaatattttttagaactgtaaatttgatgttactccaagctaatgtaaatttttaatagagtatattgcaagttattgttctgtttactattggacttttctatattgtttggtcaattgtagagagactaaagaagtttgcatttccccagtattatttttatattatttaaattaattattctgagcttatttaggaaagactagaagctttcactaatagaacgtataagtatctccaaaatgtaagggcttcattaatctgttaaaggaaaacaattataacaatttataacactttgttgttagataaaagaaaacaggatttcacagataacatgactatgttttttgtccgcaactgaaatttgaggcactaaggt

SEQ ID NO: 14066 - DNA, 1110 bp, Homo sapiens
tctgtcagtagaaggactggtttcatctgtacaagaagggataaagtttaaaaaacagaaagagaaaaagcacgatattatgatccaagaaaatggaaatggtctggaatgttttgaaaagagtggtcattgtacagcttgtctcactggaaaatatcctgtagaattagaatggtagctggtagggttggatgtgtgtagtttcaagatagaaagttggtcaagaagttatagtggtcacacctcatctatttactgttactcagttggtacaatgtaaaatgccatgcttatgtttataagttttgagattttttttttttctgaaaaggataccaaagtgcgataactgaacatttccaattgcatataatacaacaatatgtggtgttcttttttttacacaagcattggctagcctttttaacctggtcagagaaggcaggtggtcactgacatttcccaagtccatgctttaaagggtttgcaagaagttagggttaaggagaggtgatgccaacaagacaggtgagttaaatataccatttcacacaaagtttgaatagaatacattatacctcataggtgtctagcctctacagttctggctgtagttatgaccttggcttccctgtctaactgtagacaaatctttaaaaaaaaataataataatctggtgcctcagtttccccacatgtgcaatgggatacttattaaataattaataagaatgtgaataagtgtcatacttttgtgatttgagccatcatttcacttctgattttaagacaactcatgattgttagctttcagaaagctaatgattgttaactttttgaaattagtttacaattaattaagatttcattatgatggaaggagacataattggcagatctttgccatctctctttgagatgtcctaaaaagggttgtaaaaatctgtgaaaaagtttttcctacatttgactagaaaatgtgatccatagtatttagtgccctgatactataagctcagcaagtaacctggtacatttgaaataaaaaccaaatttttagattcaaacaatccctttatccttaatttaattaattatcatatgcttttt

SEQ ID NO: 14067 - DNA, 1172 bp, Homo sapiens
tgcggaagctcgcataccccggccccttctcggctgcgggagcgactcagaagttggagcgtaccaagtcttgacggcctgggggaagcatgcagggaagggcatatgaaggctaaatgctctgaaagagaaatgaggttaagtccgttactcccattacgctactgttgggtgctggaaaataacggagatttccacgtgcagcaaatacagctttccaggcagctcttaggggaaggctagctccaccctacagcatccgtgaccccgcccctcagccgcgggaccgcccctccgccctcgctcgttggtggactcggagggggaggagcagggctgagctggccacgccacctagggacagcgcgcgccgccgcagtagctggggccaccctcgggaaggaagagcctgtcgcgagcgcgagcttctgagctcgacgggccgagctggcagctggttggtgcttacaccttggccgcagcggcaggtccttccacgtgctttcggcggcgacatggagctggaggagttggggatccgagaggaatgtggcgtgttcgggtgcatcgcctcaggagagtggcccacgcagctggatgtaccgcatgtgatcactctgggactcgtggggctgcagcaccggtgagcaacagggtgggggtggcgggggcgtgcgtctccatctctcggagccgcttcccgcagtcggcgttctcatgagcgcccgagggcccgggaggaccgacctctccgacctaagccagtacctgcctgtggcgtcgaccgggttgcctaggcgtgcacgaggggcacctcgcttccatgaactttagcctgtcctgcccaccctcccagccacttatgccttttaggggctctctccctccccgccccccggtgtgtgcacccatccagaggctggccagcttgtaaaccgccggtttgcttggtctagctgggtcagggctcctccccgactgcaggcgggttctagtctcccggagcctgtggctgctcctgtaataggctagtgtggcgtggcggccagtccaggtccttcaacacctaaaggttttcgcgcggggcctccaaccaccacaagcttttgtttgcaagggcagagctattgagcagattatgggtttgaaagtagttatcgctatgggaactt

SEQ ID NO: 14068 - DNA, 1760 bp, Homo sapiens
agcaagaagcacagaactactccctcttcatctccatattttcataatttcttgtgtttcaaatagggaaacatcttcctcaaagtctgcctagtgagatatggcctactggttgcctcatagctttgtacagattatgaggactgaaaataattgggcatttacccatcttggtatctgttgtatcctttatctgtgtgtgctgatttgatcttttttcagtttcacataccttatctaaggtttcccaggatttaaacagaaactacttctatgatttcagctggagtctgaagatacttgtttctgttcaagtcccactttaaattatgtcttaggagactgaaagtggaatcttctgagcattcctaaatatctgcttagaaatatcatgtgataaagagggaccttcttaatacactgatgttcttcactaaatggatggccacaagaaaaataaagtaaatgtcttaaataatttaaccataaattttctgtcatgtgatactggaatatgggatacttttcatgtttatatatatatatatatgtatatatatatacatatatatatatatataaacatgaaatatatatatatggctcctttgtgccccatgtcattttcagattatggtagcatgctgatacagcaccatgaaagaactcaaggaaaatatatcaatgtaagaagttcactcttagacccagtgttctgaggtcacatgggtttggactgtctcaatcagaaagattaatgactgttatcaagaacatgaacattggcttcctccatagagaagaaatcagtatctgagttgcataccaggcagtattaaaatctaacaggtctgtttggcccattgatagatactcaaatggtgtctccttctggttatggattttgaccattgattacctttctcaatgtaatgaagtattttacagtcaatttgtggtgtaaatgttgctcttgtctttccttgcttacaaactactttcacattgaacagctgtgagacagacatattgagatgcctgcccttgttagtattcattttatgctgcccaagatatcatttaatttagacttaacaagtatttccttgtgattatattactctgtccttgttaataaagtgctgctgtgtttgactctgaacatactaccaaaacttcttcaaagagttttttatgaaagactttcctcctttacaagaaagaaatggggtgctgcctttctgtttagtaaaagcagaatttgcagtggcatctaaagagatcttttttaaataaaaattatgtattgtggcataatcctttttttgagctctacagagaacagtcttttggtaatagtggcaggtatttattccttctgaatatataccccattataggaataactgttacttatttaggattccatcattgaaaattttgacccaaggcacagcagtgaaatttatagttctcaatttagttgtcattattgacaggcattggtattattagtcattgctaagcaactaaaacttcatcagttcaaataagttttaattgtcaaatgaagtataaacacatgaactttctagaaatatttcctcttttggataggtctttaaccagttcatatatatactttgtcaaatatatggatgtgtatgtgtacatttataagaaccagtatggatacatccattcactgtggtacattttaaaataaaatattttagcagtgaatatggattaaggtgttt

SEQ ID NO: 14069 - DNA, 1168 bp, Homo sapiens
aagggagtggggcccgcctcttttctgacctaagggcaggagtgaggggccgggaggattacgggcggctccccctagacgcgcccccaggcgagctggagactggggcactccttgcttggtagaggggcggggcgcgcctagcggccacgcgcgcgggcgtcggagggggcgtgtctcgcgggcgcgcgcgggcgtcggagggggcgtgtcccgcgggcggtggcggcggcggcggcgcggactgggtgcgcggcgcagcgtcctgtgttggaatgtgcggctgccgcgagctcgcggcgcagcagcggagcgagcgccgccgaggcccggggccccagaccctggcggcggctgccgcagccgagacggcagggcgaggcccggaggcctgagcaccctctgcagccccactcctgggccttcttggtccacgacggccccagcacccaactttaccaccctcccccacctctcccccgaaactccagcaacaaagaaaagtagtcggagaaggagcggcgactcagggtcgcccgcccctcctcaccgaggaaggccggtaagtggggcgctgggctgggggctcggtcagggtgggggagggccgcccgggcggcggcagtggcgggacggggagggcgcggaaggacgcggagtcaggcgctgtccagggctgatttgcagatactgtggctccggcggcggcggccccgccgggcgggggctggcggccgagcaggatcgggttacacagcagccgcccgggggctgggggcgtttgttgggagcagcgcgtcgcctggaccccctccccactggaggctgggacgccgcctccgcgctggcccggacgctccaccgagtcaggtcctttgaggccaaggagcggagctgctcgggcccgtagtcctgaaacttcctctgcttcctcctcctgcccccgggtcccaccgcagccccgcgccggcccgcggccctcctggccccctcccccagggcctctccctgtcgccggaaggcgccgttgagtgcggccgggcgggttgagtcagccccggggcccgggcggttccgcctgcggggctggacagcgatttctgcgcttcagccgtccggcgccgctggcccccgcgtccggccacccgaccgctggagctggcggggc

SEQ ID NO: 14070 - DNA, 1587 bp, Homo sapiens
cagaccattgaactgttgaaggggggaaaagttgggaggacaataatttactactcatgttttgaatttttaaaataattttaacagtaaaaatgaaggttactttttatccccaccagaacaattaaaagtgcttgaggaggcaccacatgccagtggctgaatgatgaatgagttgtgcaaacaattggtagaattgttttatagggatagtagaaatttttttttggtgattgcagtagactattgggaattaacaactattttaaagatttgtttttaataggcgatgaagtttactgagttataaagatcatactggaaaatttttaagttatgaagaattacagcgatgtggttttaagccagtaacagtagtgtttaaactggtgctcttgttttgttttgtttttaattcagaatacagttatggccacccaggtaatggggcagtcttctggaggaggagggctgtttaccagcagtggcaacattggaatggccctgcctaacgacatgtatgacttgcatgacctttccaaagctgaactggccgcacctcagcttattatgctggcaaatgtggccttaactggggaagtaaatggcagctgctgtgattacctggtcggtgaagaaagacagatggcagaactgatgccggttggggataacaacttttcagatagtgaagaaggagaaggacttgaagagtctgctgatataaaaggtgaacctcatggactggaaaacatggaactgagaagtttggaactcagcgtcgtagaacctcagcctgtatttgaggcatcaggtgctccagatatttacagttcaaataaagatcttccccctgaaacacctggagcggaggacaaaggcaagagctcgaagaccaaaccctttcgctgtaagccatgccaatatgaagcagaatctgaagaacagtttgtgcatcacatcagagttcacagtgctaagaaattttttgtggaagagagtgcagagaagcaggcaaaagccagggaatctggctcttccactgcagaagagggagatttctccaagggccccattcgctgtgaccgctgcggctacaatactaatcgatatgatcactatacagcacacctgaaacaccacaccagagctggggataatgagcgagtctacaagtgtatcatttgcacatacacaacagtgagcgagtatcactggaggaaacatttaagaaaccattttccaaggaaagtatacacatgtggaaaatgcaactatttttcagacagaaaaaacaattatgttcagcatgttagaactcatacaggtaagagaagctttctagtccataagttcagttctcttttctgattgttacttgagtggttagttaagtagtgcttgagaaaaaggactctggttcaaatccaggttccattttgctatctttgtgaccttgcacaagttgtttaacctctttgttcagaaatttctccatggagtaacaatatctaggttgggaggattatgtgaagttacatgtaaagcacagaggaacagccaagagatcttaccgtggtcttacta

SEQ ID NO: 14071 - DNA, 3293 bp, Homo sapiens
cttaagatgttgcacattttttttttcttttggtttctgtttatgtttttttgcctatgcagttaaatttttcctagaaatagcatttgtgttgaacagtaacactttatacatatatatatgcatgtttattttgtttggcgtctttggagggatgcttttagacttgtttgcaaaagggcagttttctttttctttgctgcagttgtctattttgcagaataatagtgtgtgcaagtttgtgagcaaatgaaatatgcaggttcaatctattgattttgatttttacatcttatatctatgccagaatctgtatttcatataacttatttatttcgaatggatgtagtaaattcacagctatcagttttgattttgcaataaataaaccactaggttgcatgtcgaacaaatttttatctcaaataccaaccatcagttttttttttcatgtgttttggtacagctaattcctaattgtagagtgttaaatgtttgaggagaaccttttctcatagatggttggtgttcatatggctactttacaataaagagaactgtaagtgatatttggaaactacaaacctggaattaggagatataattattccttcaagttttatagaatatcacttgggagattccaaagccatagctattacgcggcaaacctaggataagaaaggtagtatgagtgctggtagaccagctgcaactttcctatacagtgaaaaaggctggtgaaacaagtacagtccagattttttaaaatcatactttctcagggatctccacaaactggtgggtgtcctggctgtctgtgtgatagcctctttctataggtgaggcctcaaatgaattgcagctatcctggtgttcctatgagggcactttgtatgaaaaagggcatgtactccaaaacatttttgtaggttctttggccagttgccaaagagtgtgaaagaatccaatagaggatttttcttactgatagcagtcattcattgcagtaaaataaaatatgatcccattagggaatcttgaattctgacctcccatactccgttttgaaataaccactttatatttcattttttaaaaatctgatgatctctttgaggcaggtttcagatttggcagtacaacatgaaagattaggaaaagcattaataacgtgtgggtggaaagcttgttaaaaatctgagagtgaagtttgagttaaaagttgtttgaacatggcattgactgggaggccaaagatttaaagaagcggaagattcttctcttaagacatgaggagtaagttgtgtgataatggtatgtgttttgtgtgcatgaatggacattgtaaatgttgaattctaggctccgacaatcattgtcaacagaagatcaagctgcaaatatttatgttttaaaacttaaattataaagctagttaagtctttctaatgactagttttaatgttcatgggtacattttacctaagttaccgtttacattgtatagaaaaagatacatcttaagcacagattggttattaggaattagtttggggaagaggtttttttgtggattctttcatactgcaaagaaaaaccatttgccttttggggaattgagctaacttctaatctagtcttaagactagaatgctaaaaacaaaaacatgaaggaaattaaaaccccttattattaaattgatttgtaaaaacattgttactggaaatttattggacttgaggccttcctccagaaaataaggacttgattgtcaggcctatattaggttctgaaccttaatgccatgtatttgtacttactaaaaattgtttcaatgaaaagtacattagcagtatgaacttctggtccagttggaagtttttccatttgaaaaatgtgatgtttgcatggaactgtttgaaacttttttattttctagtccccctcccccacactggatagaatttagcctagaattttccctttggataaaagaacaaaaattgaacatgttatttgtaaattgatgtttagtaattagtgataaacttgaaatactagcatatattataagccttaatcttaggtagtcttatgaaaatgaatctcttaactatcttttgaacctgtattcacattggttttcaagatattttaagttatattttttcctcttttcagagctgcttcttattctggggctacttttttttttagttgtgtaattcacaaagggctgcatttttttttttttttaataaggcttataactatggctggatcttttgctctagtcttctaagaagggccattttattttttagagtcacttctaaagtcatgtggtaattaactttggagactgttttgcgtatgagtgctgatacaaattaaaacccaagtagacctcattgcatgtcaccctatgaatgttgacaatggaaggaataccttgcctgtagtatactgtcacttctggattgataagctgaggaagaaagttaagtttcttttttacataagtcagaaaaacttacagctggtgttcctagtttcctggttgacctcagcagatgaagtgaacagatagtgttaattcagattgaagaaattatctgaatcttggtttgtgtagatttacaatctacatgcaatattaactaaatcagatagcttttacagtttcacatgtgtacataggttccctcccggtcccttccatatccattagttattgaactttctaaactggcattgaaacattacaacaatgttttgttgcaccaattttataaacttaagcagtgcaatacgtgttacttttctgaggcaaaccaaaggtaaatttctcaaggttcttgctgccttctttagcagcatttgatggaagatcttttatacatttgtaatagataaaaataaaccagattgcaaatccttttttaaaatcctaaaccatgtaccaagtttttggtccaaattatgtaggataagttaaacttaaattgcattctattaaccaatatgagtgtatttctgtaagcatagttatgttgaaataaagttttaaaaaccatgatgcctttgtttattattggtatatccagaatgtaggaaagccaaatttatgttgctggaactgcaagtgtattaataggcttttgaagattatttctcaggctgggcgcagtggctcacgcctgtaatcccagcactttgggaggctgaggcaggtggatcatgaggtcaggatttcaaggccagcctggccgacatagtgaaaccacgt

SEQ ID NO: 14072 - DNA, 1194 bp, Homo sapiens
tgatattgccccactaaggagcctcttttaacatttttgtttattgagatggaatttcactcttgttgcccaggctggagtgcaatggtgccatctcggctcactgcaacctctgcctccagggttcaagcggttctcctatctcagcctcccaagtagctgggactacaggcgtgtgccatcacacccagctaatttttctgtttttagtagagacggtgtttctccatattggccaggctggtctcaaactcctgacctcaggtgatctgcccacatcagcttcccaaagtgctgggattacagatgtgagccaccatgccccacctctttgacatttttgtgtagttgctcccctgccatgtatgttcacgtactatacatatatctgtgctttagacataaaagagcaacaactttcactctgcccaaacaatttttgctcaccttccccacgcttttttttgcaatattcctcctgttgagaatatatgttgtagacctctacatgtttaaaataataccattttattcggcagtatgtttaagaatttgcttaaagaagtgcggatctatgcacagaaatttattgatcgaggaaaggattttaacttggagttggcaattaaaacacggatcatatctgatggcctaaaatactctttagctactggaaactggggtgatcaaaagaaagctcatcaagccagagctggagtatctcaggtaagtgtgccaactatgactacaggctcaataggaaacatgtttataggactagtagattcttttgtttgttgaatataaattattttgcttttctttcttggtcaaaggtaaaactactgggtgccgggtgtggtggctcacacctgtaatcccagcactttgggaggccgaggtgggctggatcacctgaggtcaggagtttgagaccaacctggccaacatggcgaaaccccatctctattaaagatacaaaaattagctgggcatggtggtgggtgtctgtaatcccagctactctacttgggaggctgaggcaggagaatcgcttgtacctgggaggtggaggttgcagtgagctgagatcatgccactgcactccagcctgggcaaaaagagtgagactccgtctcaaaaaacaaaaaaaaaaacttactggggacttttgaattatgaacatgaaatttt

SEQ ID NO: 14073 - DNA, 1113 bp, Homo sapiens
atccacaatttctgtgggaggatgtgtacagagggcatccatagatactctctttttaatttaaaaaaatttttctcctgtacccactgatggcagagatattctttctcttgtaatatagaaatcagaagatgacaaaaaacatatccaaagtcactcgataaatgtctgtcatggaagaatctgctttcccagtgctgattccaatgttcttttccttcatagacttttttttttgttttctgtgtgggctgtagtattagagttcagaatagtttgtaatatttggaataagggtgtgattcatggtatagagactcctgtggccttctctctgacttggaactgattcatgtatgtggtttttaatctttgttggggattatgtgacattccgtgtctatttcctcacaggcatgaggcatgccatttacgacaagctggatgatgatggtttgatagctccaggggttcgtgtatcaggagatgatgttattataggcaaaacagtcaccttgcctgaaaatgaagatgaattggagagcaccaatagacgctataccaagagagactgtagcacttttctcagaactagcgagacgggcattgtggatcaggttatggtaactctcaatcaggaaggatataaattttgtaaaataagggtgagtacaactttgttcatgtagctagttttagaaagtaaaccaaatccacttaactaacttatttttatatgaatttaggtacgctctgttaggattccacagattggagacaaatttgctagtcgacatggtcaaaagggtacttgtggtattcagtatagacaagaggtaggtatctttgatctccctcatgcccaaaccagttttgttaaatattttttttttaatcaaaatttgctttaacttaagagctcaaagatgatacaggttgaactttttgattttattgttgaataagtatatgaacataccatgtttaaacagaatttgggacatacagtaattcagttgggagaactgaaatgtcagttctagtttagtatatgtatctttgagtcccttttaaaatttttctttgtaggatatgcctttcacctgtgaaggt

SEQ ID NO: 14074 - DNA, 1237 bp, Homo sapiens
gttgaagtgtatgggttttcctctgggccaagataggcatcttaaggtcagaaaatccctgcaattttaataatttatcctttaaatctaatggattgcaagaacatattgtttatgtgtagagtcagcaatcggtcattatccagggcaagacaggaatataacttcggagccctgaggaatgcaaagtttcggtgctctgtagcttctcaacgcggcttatgtaactaaaattttttaaaaatacttgtactatagaataatagtaatagcaagattctaagcatttcttccataccaagtactttactaagtgctctgcatacattagttcatgtacttatcatagcaaacctttgacttagatactatttttatgactattctatagatgaagaaaatagctagtttatggtagagctgggatgcagctgtaggtttattgactccagagtccatgctgttaactatgatactacactgctgctaaaaataaaataatagcaattaaacaaatgcaaggatgttcaataaagtgctcttttcaccccatgagaactctatttgttcttattctgaaatattacataacaaagtatataaatggatctctctcttactttttttttcctctctttccttgtctccctccccttggtattcttgttttgctgggactttgtcttagttcattcaggatgctataacaaaatactataaactgggtagcttataaacaataacaatttatttatcaccaccctggagggtgggaagtccaggataaaggcagattgagtgtctgctgagggcccacttctggctcatagacagttcattctttattttattttattttgttattcttatactttaagttttagggtacatgtgcacaatgtgcaggtttgttacatatgtatacatgtgccatgttggtgtgctgcacccattaactcatcatttagcattaggtatatctccaaatgctatccctcccctctccccccaccccacaacagtccctggagtgtgatgttccccttcctgtgtccatgtgttctcattgttcaattcccacctatgagtgagaacatgtggtgtttggttttttgtcctcgcgatagtttgctgagaatgatggtttccagtttcatccatgtccctacaaaggacatgaactcatcattttttatggctgcatagtattccatggtgtatatgtgccacattttct

SEQ ID NO: 14075 - DNA, 2282 bp, Homo sapiens
tacctctgctcgtttaaccagtttgttatatcactgtgtccccaaaatcaggatttttgttgatagcatcagtgttgtaggagcaataggtcagatgagacatattaacttagactaaacgtgaacagtattatatggactctcacaacgctcttagagaatccgtgaatgtgaacagacaaatgtggctaaccatttgattcttcagtatgccttctaatgtggctattttatttatgtgagactctaaacctgattgtcctaatatataaaactaaaagattttgtaaagggagtgtctttagaaatagatgaaatgtagaatgttaaaaattattgctagggtagtcttttttttttccagaaacctaattagggtattaaattttgtgttttttttgttttttttttttaaacagaagcatgttatttcattcccattcccagaaagggagttaatgaagataaaaatttattttttaaggtctttattgagagaaactttgttttctgatatgaactattgcagatgtttttataaatactttcattaaaatgatgtaaacagtagtacccaacactgtaaactcagtgaaaatagtaaatgattcttttattactaagactgtcatgcattctgaagcagttggcttttttttaaccataggaagtaatttccctctagctcctttccttctactctcctgctcagaccattagtaggtactttgttaaataaaaaactagattaacatcaatattactccaatttggtatcttttacactatgtattatacctactttctttttatttcatttacaaatagtttaaattactttatcaaccagctgtattgtttccctcttgtaaaagtaccatcaagtggggaaaatgtatgtggaagtggagagtgaatttgtatgactaaaggataatctgtacatggggaagtgggcaaaagtggataggatgaatttaaagaaaatgactacctttggaaaaaagaaattaaattttgttcacatatcctaccctttcccattgtgcatatcccaagtgtcatatttaaaactaaggttacttaaaacagaatccaggaatatcaaggctctgtggcttggaattttagaggataggactaataaaaggacttttgcaaagaaggcttttttccacgttcactttgttttgtgttctttgaaagtaactgatacttttcgggtagttaattcagcagtccataaatatgatccagtaacttgcttatattttattgaagtctcgacagctcttcagaagtaaatttagaacgatgctgtcagttcatatttatagatattagtgttttagcagataaaacaaaatcaacaaaaattaagttcattttgtgattaaacctgcaaccatttttccattactttttttctatagttaatggttattgccatgatttcttctgtttggttctactaagctagaaagccagggtgaagttaatgataattcccattattttatttctgtaccatgagattgctgttgatgactgaaataccaggtgcaaaaattaatgatttgatttttgtacagtttcaatgagtattttttacttattaaaaataaattaagaaatgtaagaatatctttgtaaatcatgtttcataagttgactccagagattctgattttgctgtttattttgtgagtaatgttgctttggtgtttcctgattttcaagtttgcaatcatggagatacagcagttattaggtgtggaaggacattacctcaaatgtcctcagatggctccaggaaattcttttaaaacagttggagagaaatagtcgtgaccatgtaaaacctagaggatctggtaaatcccatactactggttagggatttgtaaagtccatttctttttagagttcaaagcagttctgttacttgtccataagttcctcataaattgtcccaaaggtaggacatggaaataaatgtatatctttattttttaatctactatgtcacactctggtgatattcatggaacattaaaaaagcaactatgtttattttataattagtaaaatgaagatagaaaattgttcttttgaaatttttagggaaaaaaaaaatctcgtgacctaaatctttccactataatgaatattcattgtgattgcaaatatctaattttatataatcactgtgtatggatttagcgattttacttttcatagattcaaaaacatataatctgaatgctttctctgaaaaaaaa

SEQ ID NO: 14076 - DNA, 1133 bp, Homo sapiens
aataagctcaagatagattatgatttttcttataggcaataatcttttcactgatctttacgtcattcatacaaagcaggtactctgtttttcttgaataaaatgaacttccctaatctttattcataatgattcagaatctttaagtgcggccctagttattataccatattacatcattactctatgtaattatctatgaagctatgtagttatttacccctgtattaagtgattttagactgttgttattttttgagttacagcatgtgctttcaaaatagggagactgtatggttgaattaatatttttttaaataactgttaacatgtatagagtaggttgaaagtttgaaagtataaaatatactaaaagtatacagacctgtaataagaaatttatattactatagtcccatagctgcttttactatccacagagaaatgcttgaaaacgtgaaagttgaatagatgcaattaaaatcacggatagttttaggctgtttatattatcagatcaccttcttttatctaggttgccttggagatgatcaaagtaactggtggctatccatttgaagcttacaaaaattgttttcttaacttagccattccaattgtagtatttacagagacaactgaagtaaggaaaactaaaatcaggtatgtatgaaagtctatttctcttgtataatgagaatgaaataaaatattttaccttttaaaagggaaaaatactagcttcacctcttttttcttctattgtgtatgtgtaaatttttgccatcacttcaagatcagctcaaacctcatcttcattaaatatttctgactaaagtagccaaagaacccttacagcactttatctgccacattatttggcattatggtttcatctgtgtctgccagatgaattagaaggtaccctggtgtctgactgtaggtcatgagatttagaagaattccacaagcttgagacaaagcagaacaattcctgggcctgtactttttagttttcagattggcaacaaccaaaaacttgaaaaaaaacctaccttaacaagggtgtgagaaagcagacactctcatacattactaatgagagtacaaaatactataatccacagtaaggg

SEQ ID NO: 14077 - DNA, 1213 bp, Homo sapiens
taacaatttagtttgaaagaaaatctggaacataatactcagtttgtaaaattgaagttggtagaattggaggaaaaatgtagagctagcctgtgccagaaaaacattgatgacatttagcataattggcagtatatatggataatagttgaaggtcatcactagttaatatctttggcctaaatcttactgaagggatcagatggaaaagtcattaaagttaagtggaaaactgcataaagagatttgaataatctgttgtagatgtctaatgaggcatcatcctttttctaaaccatgtcagcatattaccttctgtgaattaatttattattgcatttctttggattgttctctccgccgattataatacagagacttttctttttttatattttaaaattgtttatataaatttttttttcaaatcagggatccacttaacactatttgcctttttgacatacctaacacatttctttccttttctagcatgattatgatatgagggtggatgatttccttcgtcgcacacaagctgttgtcagtggccggagaagtagaccccgtgaaagagaccgggaacgagagcgagaccgccctagagataacagacgagacagagagcgagatagaggacgtgatagagaaagagaaagagagcgattatgtgatcgagacagagaccgaggggagagaggtcgatatagaagataatgggcttttggaagcactgattgtttaaagatacaaaaaatcttgtattttttttttgtgtgtgtttacaagtagtaaatttattttcagctgtctgcctatgaagttcattgtgtagaaggatttattatgaccccctttgttccaagcatgcagtatcataagaactggaaaaactcaaatccgccaaaaatccacagctgacagttgaattgacacttttattggggcagaatggaacagtccaagaatgtagatactgattctttctccataaatgttcttatagtgtgttcatcctagagttatttttttgtttgtttttttcctttttggatcttgattgataactgccatgatattttgctttgatgtgtttctacatgtagttgcacacggttcagtaaaaataatgctgctatcgagtatgcaaatattgaagtatgatggtttgactgtatggcagtgttgtagcagcctcttgtttttttcccca

SEQ ID NO: 14078 - DNA, 1272 bp, Homo sapiens
aaatgtagcttttcaattaatctatcccttactgaaatttaagagagcaaactatattcaagaagggatatcatgtatttgaagagagtcagtgatacacttgtgaaacttaggcagttaggagattgatgttagtgatcattatagcactattatgtaacaagtggcttgattagcctcattcttccaaaataggttgtcctgttgtagaaagtgaaaatagtttttccccagtaacatgactactcaaatgtttttacattttaatttgttgggttcttattaaaagaagcaggggaaagaatatttttctaaccaccatcgatttttcattttcagtgtatacatcttcatttttgcaacttttgcaattttttccccctcccccttaagtttacattttaaaaagcttatctgtggttttcttggtaagacctacatatacccaaggtggaaagtaaacatttgttttaaggaagtcctgtcatagtgtgctcaagatagttcctctgcccttaccttccctgtgaagcagaaggaagaaattttctgattagcaagatttggagtgtgaacatagaagatacctatctgaaagcttctctagcagtttacaattctatgatatcattagttatttcctagattatcatgtaatctgagaagaaaatttgaaaatgggataatacagtagtagcatcacttaaagtacatatttcatggaaagaattgaaacgagtggtaaggaaggtttaattataatgccataaaagaaaaatataaatttgatttactaaaatgcttgatgtttgaacagggtatttaaaggatccacgataccaggaagtggacaggtaagtcgggttcactcttgcctagttttgaattacattcttggaactagtttatgaattacctgaatttagtttcacaaatcttattcccaacagacgattttcaggagttcgccgagatgtgtttttaaatggggtaagcatttcattttatctatttaatgtggataaaatcaggctctgatttattttgcagttctgtgataatttttaattatattgacattatcatcttttattttagtcctacaatgattatgtgagggaatttcataacatgggaccaccaccaccttggcaaggaatggtttgtattattctatttttataagttacataacttaatttgcagttctagtatttcaggtgcttactcggaatatgattgttacagttactcattaaagagacttaaact

SEQ ID NO: 14079 - DNA, 2021 bp, Homo sapiens
ctagcactagactgccggtcgcaagcgccgggtacacacgcagttaaacctcaatggaacgcccccgggacttctccggggcgtaaagcgcagcgccctctattggccatcgggacctcgcctggaggtgccgtcaggattccgtcccccagccactcccaggcactcgagagtaagcgcattagcccgagaaagcgttctgtggaacggaacttccttatcctatcgtttccacacggaaagattttaattcaccggaatcgactggcgttaaagggcacagtgaaaaggaagttggtatcaacgtgatctcgactaagggaccgagcggaagtcctcaatcgtacgccacgcggagagcatgctgggggccggaaggaagaggaaattccagtagccgatcaggagtctgcaaactccggtggtaggggagcgcgctgctgtttagagccacgagttaccggagcgcctgattcctgcgccgaagtcagtggtggccgaaagtccggagtcgctgtaaaacctgagattgtgagccatggtggggagatcccggcggcgcggagcagctaagtgggcagctgtgcgagccaaggcaggtcccacgctcaccgacgaaaatggagatgatttaggattgccaccctcaccaggggacaccagctactaccaagatcaggtagatgactttcatgaggcacgatcccgggccgccttagctaagggctggaatgaagtacagagtggagacgaggaggatggcgaggaggaggaggaggaggtgctagccctagatatggacgatgaggacgacgaagatggagggaatgcgggggaggaggaggaggaggagaatgccgatgatgatggtgggagctccgtgcaaagtgaagctgaggcctctgtggatcccagtttgtcgtggggtcagaggaaaaaactttactatgacacggactatggttccaagtcccgaggccggcagagtcaacaggaggcagaggaggaggaaagagaggaggaggaggaggcacagatcattcagcggcgcctagcccaagcgctgcaagaggatgattttggtgtcgcctgggttgaggcctttgcaaaaccagtgcctcaggtagatgaggctgagacacgggtcgtgaaggatttggctaaagtttcagtgaaagagaagctgaaaatgttgcgaaaggaatcaccagaactcttggagctgatagaagacctgaaagtcaagttgacagaggttaaggatgagctggagccattgttagagttggtggaacaagggatcattccacccggaaaaggaagccaatacttgaggaccaagtacaacctctacttgaattattgctcgaacatcagtttttatttgatcctgaaagctaggagagtcccagcacatggacatcctgtcatagaaaggcttgttacctaccgaaatttgatcaacaagctgtccgttgtggatcagaagctgtcctcagaaattcgtcatctgttgacacttaaggatgatgctgtaaagaaagaactgattccaaaagcaaaatccaccaagcccaaaccaaagtctgtttcaaagacttctgctgctgcctgtgctgttacagatctttctgatgattctgattttgatgaaaaagcaaaactgaagtactataaagaaatagaagacaggcaaaagctaaagagaaagaaagaagaaaatagcactgaagaacaggctcttgaagatcaaaatgcaaagagagctattacctatcaaattgctaaaaataggggacttactcctaggagaaagaagattgatcgcaatcccagagtgaaacacagagagaagttcagaagagccaaaattagaagaagaggccaggttcgtgaagttcgtaaagaagagcaacgttatagtggtgaattatctggcattcgtgcaggagttaaaaagagcattaagcttaaatgaagtttttgcttagcataaggtttttggcagttttggatcaata

SEQ ID NO: 14080 - DNA, 1545 bp, Homo sapiens
aaaatttttgtttaaactgtccaggatctgatttaaaaatatggtctttgttttatatgattaaatggtttgttttcatagatgatatgttactcattgtaaagaccacatatttttattcagcagtgttctttaaacggtttcatttaaaaagtaactttttttttttgcctgtgaattgagtgctctgatgtaaaacttctcatggagtgaaacagtgatttattttaaccaaacattcaccaaagcaaagaacggtttcagacctttgaactggtatggtttggcagaatagttttaaattttgctgtatttgattacttagagataggaatttttaaaaatcaaaacaaaaaataccacagcttagtgtaaatgacaatttggcggttttatgtctttagaaatgttttgcctttctaagccttgtgctaaaggcgtataacggtggtgcctatctacttaagggggcattctagtcttaacttaaaagttgtctaaactgtccctccctggctttttttggtttggggtagacctaagggtgtttgttagtctcaaaactgtgaagtgacatgtcagaacagtccagactggtaagaaaattaatggcttcacttgaatttaaaccagctctagataggaaaaaaatcagtctcctcatttgctttttaaatggagtagtacatcccatattttagaacaagtaggggtgccttgcttaaataaaaatagcatttaatgtataattgtgtgaagggtttatggataaagctgtacttctgtcacaatgtggcagtactttctgctttaatattaaacagcttgttatttaaatattggacaaaatggctggcttcaaaatatagtcattaataaactaactttatgtgcacctgtgtaggagaatcaaaatcctgtatgctttctttgccttgttcctgttctcagggtgacgactgccaccaggagatgcagttctagttcttaaaattaaatttgcccaggtttctgacaggtgatacctggaagagagactatgtcttctcttacttaatacataaccatctttgattaccagctaagatgcgaaatcactgtactgtagtcaataaatgaagacttgtttcaggctgaagattacctaagagtatttattattggagtctgtgagtcaactgaatatattattacctcaagtcctgctatattaatataagtagtaagggttaattttcgtgtgtgtgttctctaaaatcctgtgaacatgacttaaccagcttaacatcatcagtagtactgcctagatggaaatgcgttttcatatatggttgaatatgccaagctatgagaactggtatctgtagttgtacgaactattagaatgtgatctttgttgctctttcacatttggtatctgatttgctgtggaaaagatctgtggggcctactgtgaggaattcatctgcaattgatttaagctaatgagttttatttgcacatctctggaaaaagaatgcaagcaaagcattaaaatgctatatg

SEQ ID NO: 14081 - DNA, 1225 bp, Homo sapiens
gtatttagattgtatgaatgcattcttttataggatgtgaaaataaaacataaagagataaagtttcttttttttgtgggggggatggaatctcactctgtcacccaggctggagtgcagtggtgcgatttcagctcactgcaacctctgcctcctgggttcaagcaattctcctgtctcagcctcccaagtagctgggactacaggcacatgccatgatacccagctaatttttgtatttttattagagatggggttttaccatattggtcaggctggtctcaaactcctgacctcaggtaatccacccgccttggcctcccaaagttctgggattataggcgtgagccagtgtgcctggccaatgaagtatcttacaagctgtgagaaataaagaagttatgcccgcatggtaaatatgcaataaatgtcatttgttattttctctagagaagcgcataaagattaaaatagttattgaattctcagataacccagcaagttgtaatgattttttttaatgggtttgttcctttgttatgtaaatttttcatccctgttgggttttttcttcgtagtatatgagataaacaatgaagatgtggatgccttaatgaagagcttgcaggtcaaatcttcgcctgtggtaaatgatggtgtggttcgtttgagaggacttccttatagttgcaatgagaaagacattgtagacttctttgcaggtactttgcagttgtattatgcttgggagctcatatcttttttcccttggtatctccttctatatcttagatgagcctgtttctgggcaaaggcatgcagttatattaggttctttaggggagagctcttcacttaaatttctaatatttatagattttatatgtgtttttgttctatcaggcagattttaggagggaagtcagatttcagaataatttcatgagggttttactattgaaggaaataacttctcataatagttgctgtatttgtgtaagacaataacaatttatataatttaaaagtattttctaattcctagaaccattagcagtgaagtctgtgatttctattgtttcctagtatataattaacagcaaaaaaaaaaaaaaaaactggtggggagaattgtatgttttgggtgggcttcttggaccttacctattctggaaatacaagtatgtaggtgttgactgacttttgactgcataataattttctt

SEQ ID NO: 14082 - DNA, 1202 bp, Homo sapiens
ccaccgcctgaaaaaagagcagttcgattgcacccacttccccgggccccgcccaaaccatgggcagccccgcccaaaccatgggcagccccgcccaaaccatgggcagccccgcccaaaccatgggcagccccgcccaaaccatgggcagccccgcccaaaccatgggcagccccgcccaaaccatgggcagccccgcccaaaccatgggcagccccgcccaaaccatgggcagccccgcccaaaccatgggcagccccgcccaaaccatgggcagccccgcccaagggcggagactgggcggagcgtcgcgctctcctccacctccttccgactctcggaggccccccacccagtgcccgcggcgcatgtgccaggcacaccccacccccaaccggccctggattccacttccgttccaccatcgctgctggagcagctgccttcaggccctgcgccgcctccggagtccatggccggcacgcgctgggtactcggggcgctgctccggggctgcggctgtaactgcagcagctgccggcgcaccggcgccgcctgcctgcccttctactccgccgctggctctatcccgtcgggcgtctcgggccgccgccgcctgctgctgctgctcggggccgccgcggccgctgcctcccagacgcgtggcctccagaccgggcctgtgcctcccgggaggctggcggggcctcccgctgtggccacctctgccgcggccgcggccgccgcgtcctactctgccctccgtgcctctctgctgccgcagtcgctggcggcggcggccgccgtcccgacgcgcagctacagccaggtacgtgggcgccgtgagggacctggcgcgagatccctcccgggccgcgtgcacgcgcccccgcgcccctccgtccctccgtgtgcgcctcgcgggcacgcccggggatccgcgacactcgccgcacacccgcccccgtccaccctgtgctcctattgggccctggaacaagggaagctctcccaggcgtcgggtcttctgcttgttttgttctcgcctcgagtctctggtcggttgggcagtgtaagtgtggctggggtgaatgttgaggccttgttccccgcctggcccatggtaggtttcgtgaggctgctgacgcccccacctcgcatcttcttgctttccgccggctggttgtgaagttgcgaggccc

SEQ ID NO: 14083 - DNA, 1096 bp, Homo sapiens
aagatgcaaataatgtttttgctatttattctgcctttctttatatcatgcataggaattcaaccttattgatagaagagaacttgcaccactccaagaactgattgaaaaactcacctcaaaagacagataaaaggatgcagagctgtgcaaattgttcctcaaatgaagcagtgtggagtgtattggggattttgttatattttgtttttatctggattgtttttgtcctaggtttgggggcgggggcttgtttgggttcctttttctttattctgattatgtgaaaccatattctattgctaggggaagccaagaaccattctctatacacttgataagggtaaatttatcttagtgtttttaaacttggttttggttacttgaggagttttttaataatattgtgtgctgcaagaaagtgcttgttgattgaactgccgatggattggtttctgtgtggtataaattgtggcccatttatgaagtccccaaaagagttatgtttttaagtgccttggcaggctcacttctgaggtgcaaaacatagatatagaactgaacagggcttgaaacaatattaggattactacccagggcacttactggtgcatgttgtaacatatctatgataaaagccatagtttacctaaaatggtgatttccagcctttactgctttgaagaaacagaatttgtaaaggtatgcatgtagaacataaaaaatatttcttaattattttttatattgatggtaatatattacgttcaacaatgcttaaagctctacaagcaggtcttttcccacctcttgatatctgtgatactgaaacttgaggatgttgaaatgtattacattttggcttctttctacatgttaactgcactgtagatgtaaaaattcaggttatatataggattgccatcttcagaggtgatgctgaactgtgaggtttcctagtaattgccaaatgagccgtaagtctgcagaattcccttctactttgaagagaaggggataggaatgtatatttggctgggggcatggagatgttcgtatgtatgaggagttagggatggggagtcaagttctagaa

SEQ ID NO: 14084 - DNA, 1336 bp, Homo sapiens
ccttatacagtagtacactgtacttgtttttagtagtaagacctactttcccactatatgtagatagtttgttttcactgtgccagaatctcaggtgcctgcttagagtatttctttaatcacagtcactgggaagtaaggagatgtatatatgtgtatatatggtaacaaagcatagcagttctctaggggagaggcctggcattgcacatggtgttacatggctacaagtaaggaaaaaatcagaaagtgaaagaactgatgtaataaaaggttgatttggttggttcccatgaaagttagtaagatgcccttttaaatataaggatcagtgctttgttctgcagcagagtttgctgataaatgtctgttggattctttttggatttctttaattaatttgtaagtaaccaagataattattttcccccttgctctctatattaatacgtagctataaagcaacagttggttttcttatcctttgataaaagcatcccataaaatataaagtagtaagttaacatagtattattgtcacacacaatgctttttttggttaaatgttgatacgaagcaatgttttggaattactttaattgatggagtagtggtggtagagagaaattaataacaaaaagagtgaaaatattttaattagcagtagatggtgctactggctttcatttgctgacttgattattccctttctcttaaaaaccatggcattagactgcactaaattaacaagcatgttagttgctggtagaggttttggaggttaatttaccttaaattggaagacttttaattgcagtctctttctaccttccctctgttagtcatttgtaaattctaaatggtcaccataaaatgtattaggtaggagaagatacgttttatgtataatatatctcagactgagttactgcctgtcttatcaggatggataaaacactacagtctcttatcaggaaatagagatgatgtggatatttatatattacatatataaccaccagactccattttatatattagcattttccttgcttatgggaaaatagcaaaacaacatttcatttatacttttgtttacccctctctgagacaggttttgataaccactgaaatggtagaatatgtgagatacaaatattgagttgtagaactttctttttaaggtgaataagtcatgccttaacatccaaataagagttcatcttcagagtggttcttttgggagcactgtttattccagctatactgcaaaagtataatgtttttggaactgttctagagcataccatgaaaagcagtttgttattatgcagga

SEQ ID NO: 14085 - DNA, 1254 bp, Homo sapiens
ggctgattttgcaggtcttcattgttagagattctgaagtatttactgtcaattcataggtttcagtttatttaggaaattagtgtttgacagctttttttaaattatttcactgaagctgagattattagtgatacaaagttaaaatttcaatatttaatttctctatatattattaatattaaattgttttttacttataaattcatgttctcatctgatttaatattaaatttgtataggtgggcgtttcttaccattttgcacaagtttttgtttttctgaaatacttaattgtgcaggttgtaaaaaagattagtgcattttcattttaaggatgctttgctccttaaattgttcgacagaaatgactttttagggaaagtagtttttttggagctactaacttgtatttattattgtacatgcataaccagggtggtgagggcactaatcttgtaggaaacacttacttgatgttttatttgaacttttcctataggtttaacttttactgcatagaattaacactaggaacagtgtcatgaaatctgggttgaaggagaatacagtatatatgagaacacttaaagttcaaatagaaatcatttctgaagacaaaagcagaggaatattgtcagtgccaagtaatggaagaataagggcggcatttacactgtgcaagtattgagaagagtgcataaagacagggaactactctcatggagacagtttctctcttataatcaagtaactagaaggggaaaaatcatctaagttatgaaatccaacataggcgctatattacaaactgtgccggattatgcaaattgtagttgttactgatcaaagtttaattgcttcatttttgtttaaaaagggatactgatgtcagaaaatctgtaatatgttttattcaaaagatgtaaataatgtatacagacttgtatgtgatgggatgggaaatatttaaattctaggtgtttttttttttttaaagaagaaactcaatgtttataagaaaaaaatgaataaatagttacgtttggccatgaatcctgactttgcattactgtttatttttgctataggcattcccacactaaacacattccaagggaaatattgatggcatatggaatatgttgaacatttaaaatttgttaggcactattttctgtaatgttcacaacaaccagtgtcttaacatcttagaaaactaaagctcagaaattgtacaagtcactgatttgg

SEQ ID NO: 14086 - DNA, 1196 bp, Homo sapiens
caggtttattcttaaagattattcagatagttcatggttgtaagctggtggtgtacatcctgttttttgtcttcacatacttgtgtcagtatgttattaaccataaagaagggagaaaaatgctttattttggacattttaaaaatcagttattaactttgttatgagtctaaagaaaatgccttagtggtctgggatatctttcaagagagctgcctaaaatgctcttactttatataatgtttttccagctccagtgacttttttagttgcaatggatttttacaataccatttgaagaagtgagatatgaatggtaacaataataagagctattatttagtggagggctactatgagccaggccatcttctaagcactttgtattatatattaactcgttaacttttcataaccaccatatgagggaagcatgaaaatgcattagagtctgttacccagaaggagaggatattactaagaatagagttcaacacagtaggtatagcaggaaaaatattcaggaaatataaagaattggctgactacagaaacccattgagcagaggaatgagagagatgaggaagattctgataaactatccaagtagggagaacttaaaaagctgtagatcatggtaagaaaggagtaaatcccataataataagaccaggagaagaaaattaaaagctttggtcaaagaagagatgtttagattttgagagtttggaaggagagaaagctgagattgatgaactggtccaaagcatgtggctagctcccgaagcatgttgacaatgacgtccatcaaaacttgtaagttagagtaatgtgagtctggtgaactgaaagtatcacctgcctcaatattgatatgattggaaagtggcacagagcatggtagagaagaacatcatgggaaagttgctaaaaccataagtaaaagtatataactgtcctggaggtcggcatatttagtgatgtggaagggcagaatgaagaataactgggcttcaatacaaggcagttcataaagcacgaaaacaagtgaggtatgctcccatctaacatggagagtaaaacaaacaaacaaaacaaacaaaccaacaaaaaaactagactgtcactaaagaacaaatctctgcaagaaatcagtgctcccaaaggaaaccaagtggttttcacttatgatgaa

SEQ ID NO: 14087 - DNA, 1915 bp, Homo sapiens
agtggtaccaaaggcaggtttggggctaaaattatgaaaggtattgtatattctactgggtagcagataataaatgaaagattttaagttgcaaagtgactgtcatatgattttatacattaaagtttactagtggtgtgaaaagaccatctaaaggttatttattaaaggtactataaataactctgagaattcacataaatggttgtatattttagtttagtgtatgtttaatatctttgatttatttttcttccacaaccgtgaatctataaatgctcaggtaatgattttttttttaaaggttgtaaatcagattctgtttgagggataagaggtaggaaaataatagaaaaaaggtttttatcatttttttccattagttcctagtatattgcaaattgaagagtacctccttagttttttaaaagttttattttaataaaatatatgctagatatatattttgtaaaatgcatgctctatattcataggtgtggactggaccctgggcacctcacatgaacagtgtgcatatgaaccagcttggctgatgaggatcagcttgttagcctgcagattccttttcatttggaggaaatcacaagtggccgaaaaaaaaaattatgctcccaaatcattctactgatgtgcttgactgaagtgtgtaggctttttgcagaagatcttactaactgacctattttctgtgaacatttgtgactgcccattccccatcatcatccgttttaccttagttagcatttttcttatcatttttctttttttctttccctcttcccctttggacataactttctgttgaagctgttctttggctggttggttttagtactgtaaactgcttctgagcaaacacggaaatttagcaaaattatgtaaacttgatcctgaagttttagaatggcaaataaatgtacaattgtttacataacagaaaaggctaagcagaaagtaaatttcaatatgtcagtatagaggctctactttatgtagacttaaattaatgtgagatatgtaccttcatattcagaaatctggatgtttccttcatacattaaactattaataagcataacttttctactggtgtaatttaagtataaagtaaaataatgggcattatcattggatgtttccccacattggcttttaaaatacccatcttgctttctttttggtttatttgtagcaaggcacatatagaagaagaaatttctggcttttccatgttgttttattaccttttctcacttttaaaactaatacagacttatctcctcactcctttttctctccttacctttaccactaataccagtaaaattatctttctgatagtgaaaaggttctgtcaagattttcactgtaatggctgctacagagatggaccatcttcatcatcaccagtggtttcttctaattataaaatgtttaaactttctgagaatttaaaaagccaccactgttcccagtcagcatatacaagctcttaatattctgtttattaaataattcaatgtactattttatattggatgatattgattcttaacattggcttttcagtcatcaacagtcaacataaaaatttcaattttcagtaatttagtggaaaatatcttatttcttttttcaattttaaaggcttcctgcttttttacccttgtatattatcagtgaaaaggatcaacagttaatttgagccaagtaataaaagaaattctgcatttgtcacgaagacaatttatggtagacagataaatacacagattacagtgtaaagtctccatttaacctgtttataaaagatacaaggccacactaaactactcagtgggatttatatattccatccacttgaaacaataaacagtaatgtatccaagaagat

SEQ ID NO: 14088 - DNA, 1154 bp, Homo sapiens
ttctacaaatgttacttataacacacacacacacatctgaaatatatgccgaaaattgacgtctttgacctcagggagagcacctgtccaggtctgcctaaaggaaatggctccagtgggtctaaacaaccacatcctatccatggataggtctagtcataacactttagagagaatgtcagagcaggagggaggcaagccgcctcttctcggccatcgactgcagatgatgaaagagcgggattcaactttgttttcttttcctgtggccccagtgaaacctcctgccctccctgcacgtctgtgtcttcatttctaaaatgggggtgatgctttcatattgacctcaccccatactacctcacagatgtgttgtgaggattaataaaattatgtctatggtattttcagtttctggagaaaaatacttatagacagtttaactattacatagatatataagtgatctcagtttcttgtttgctgtgatactaatgtgttgttttaacttattccataaaatgacagttgtgtcctagccacatcagacagctatctaagctctggactacccctttgtgcagctgaatcactgcagggttgaccatgcctggtgccacagccatggtttccatttctagatgaaaggatggcctaggacataggtctcaaagactcttggatcagaatcaggagattagggaaaacaggatggatacctgagcactaacagcagtagacgtagacctctgtcctttaccatctgaggtcttctggattctttgtggggttaattttgatttgatgtcatctgtttgcccttcatcttgcttgcaagtgtgcatggttcaatccctcacatccaggaaatgaattttgcaattgggccagatgctaatttgcacgttgattcaccttctttgcctttaagccttttttttcttttttttttttttggcaaatgaatgtaccatttcaactttgattttaatagtgctagttgatattggtaataatgctaaccaagagatcaatgccagatttttctcttggggtaagttagctgaagtcatttaaagatggaaaggtgggaaaattctttgatatttgatgtcattgtatccacatttgttgtaagacatattgcataccaa

SEQ ID NO: 14089 - DNA, 1186 bp, Homo sapiens
attgcagtgattgctcttattaatgtcttcctcctccaccagtcttgttagttccatgaggtcatggtggagtgtgtctatttttccttactttttgtcctcacggtttagctggtgactggcaatagtgaatgtcagtacatattttgaaagaacagcaagtaaacgggaaagggaggaagcaagaagcacttcgaggtgccagcgagcaccctggcgtccaagagcagcgcgcgggacccgctgagcccagggcccgggccgagctccgcccctttctccaggctccccgccaccggagggagagagggaggacccgtcacaggtaacgatgcgcccagtgagcgtcctttcctctggggccaaccagcgtctccgcgccgctgccgccaacctcgcgccgaactacgccctgagatttgggcgggtagcgattgggggaaaacaggcaacctaagagttattaccgttagcagcgaagactgcgactaacgtcaacgacggagactgcgtctgccttcgcttccgcctcgtagccccgggaaccggaaatccgtctgccccgggtcacgtgcttaggagccatattgtcgctagtggccgctggggctgggaggggtgtgctagagaggcgcagcttctctgggcgtggtttttatcctgggggaaggatcggtggaatgtgaggggaggtggaggagatggcggcgacggcccgggaagatggcgccagcggtcaagagcgaggtcagcggggctgcgagcactatgacagaggatgtctcctaaaggtgacgccttctatggactcttccctgacaagcttccgtcaggttgggctggggcgggctgggcaggtggttaggcttggatttaagtttgaggttaacctgattttcaggataccttttccacctggaactgggttcttcttgaggagaacgtttttggcaaggcgataagccccacctttcctacctgcttcgtacctttaaagcaaaacccttcttgggaagtgattaggcttgcacagtggtctctgccagtgggcttattcgtcttttgctgccgaagtagactgaggcagccccgggcctgtactggggttttccgttcaggtgtgtgatgaaataatggaagtggagataatggaaataagcaagtggagaacccgaatacgatttca

SEQ ID NO: 14090 - DNA, 2461 bp, Homo sapiens
catctttggttatcagttaaattgaggtggacattatttccccaatttcacaacaggattcacattgttaatttataaatctagacttggagaattaaggactgagaaatgaccatatcttaaactatctacgacaaagtgaacttaaaaggacatgcccactgaattcaggtcctttgagtaaaaaaaaaatcttctgctgcacattttgtttaagtgttactgtttctgcctgttaatgctgggaacacaaatagtgcaatttgtgcaattggagaatcttgccttttttcttggctccccccaaaaatacaaaccaacagaaacttgttatgcactcatcaaaatgtactaatgggtactctgaactcattaacattgacatctgcaacaggaggcaacagggaaaaaatctcatcttcttttccagtagaaaatagtttgtgaaatgatgagggcattttatctgcttgctgtgaccagcgtgtgtacacataaaccttaacaagactacaagtatattccagaaggaaatcattttagttatgaactaaataataaaaattagaacttcaaatgcgatggtcttgactattagaccagatttagtagctccatatctaagatttttctacctgcccctcttcagtacagggatggctggctgctcaacacactcctcctccccttttttcctttctttaagctgtgtacagtgaaaattgtctttactgtatttttgttctctggtaatgtaataagcatgatggtgccttctattaatacatcattccagtcttgctggtaattttgtacagtatagtgtatgaattgctgtgctgcaaagccaaacagctgcaaaatgttgaaaaatcatcgaaatgtataaaaattgcagtatctttaaaatcagtaaaatggactagcatattatttatcttgttcttcagttaacaactttgtgttctctgtgggagggagggagtcctgtgtgtttgtggggagagggaaggaggaagtcagttatttgagtaagcctctagttgacttttctcttagcctgaatgtggacgttgaaacatatcacttcagggcttggaaaagtcagtcaacttgacgtacatttttagtgacattttaaaagcagtcagattctataaatggcaagtaagcctgaagtgaggatactgcaattttcggagaaaagaacagcagctctttaagtgtttgcattttctatttggggggcagggaactgtcattcattttgcacaattcttgaactgatgtcagcacccgagtggctcctgaatttaagtctgggacgacatcttttatttttacatgaatctttaaacaattctgtgagcaaagtttgtagctgctggattattgtctgtctttatagcaagttccagtaaaccacaagtatggcaaagcttatccaattttatgcttggagcagtcagtacataccagtttctgatgtttcaggcaggagtggggtaaataagtgtgaccacttaaagctgctcgttagcatggaagacttctccattctatctttgtaaaacagacaagatatgcacttgacatagtagcaaattggttctgaattatgcaactgtttgctatttagtaaactagcaaatgatgcatgtattttgtttttcatgtactgggcaatatgagtaaaatctgtccctttttccccctttgaatgaggtcttccatgtttgagggaaagtcttgcactattgcatatattttggggacacagattttcatagtttccatttttggggggcttaaggattttttttttttctgtttgaaacagttttatactttctgatatagtacttgaaattcttaccagaaaattactttggagttttgaagcctttattaatactacttttaaagaagcagttgttttattgtcaatgttttttttcccccaagcatattttcttgtatttctgtttccatatatatatatatatatataatttccaattcaggatattgccctgccatccatgaaaactgttctggcaccaaaagtaatgacaaatgttaagtgtaataatagaaaagtagagcaaagagccattcagcttcagtctttacataccatgaataaaacattaaaacatcatatggagaagtttacatggtgattgttcacctgcagtactgtggagttttaacattttgtcctcttttcagtgaaacagagtaaaaatattcatctaccattactgttatttgctgattttgttttattttttgatggtaatattctatccttatgacactattgcaaccaaattggctttaccatcttggctttagtaggtatagaagacaatggattaccatctttattgctgtaatgtgttaagcattatatgctagtagaatctagtttaattgtttcaggtggaaagtattcttt

SEQ ID NO: 14091 - DNA, 1390 bp, Homo sapiens
acagtggttactatgaagctcaccctgtgacgtaagcatactatttgcaaggttaaatttggtctgaactatgtcagcaaggtggtttctgttcctagaattattgttgaaagtaaattcttgataaaaccacctattatgtcagtatttgagtacctattgtgtatatgcaagaaatttggaaagaatggttttatttaatacaaaaattgaacatggcttgcaccaaaacagtggttccttactgataatgtagagtgttgaagacaacacagagtaagcattttatttttataaaagataaggtttatagttagcactaaagtaaacattcttagtaattcagttttgaaatggtgggattaaagaactgctacttgagagtattattccttctgtcttatagctctttttggaattttgctttgaatactttgtagatctagaacaagttattggcatataactagttacacccattggattagagagaaattgaattttttcttacttgaactcctactaaaaagtgaactaaatattttattgtagtaatggcatagaggagcctttggaagaatcctctcatgaacctgaacctgagccagaatctgaaacaaagactgaagagctgaaaccacaagtggaggagaagaacttagaagaactagaggagaaatctactactcctcctccggcagaacctgtttctctgccacaagaaccaccaaaggttagatcaaagaactctttagacttacaacatcacatgttcaaatttggtgctgttaatgaagtatgacctttttctattatgttaaattgtttagtaaattattttatgtatatgaaagaagctgtggggtttgtttgttacctgagaaaatgttattgtttccctgccccgcaaaatacccctctaagagtgaaacttataacttaagatgaatccttgtctgtatgcattgtttagtaacttatatgaaattatttggatccatgtatagagctgtcagttgttctttcattctgtattaaattctctgagcacagatgcaccaggaatcatgcagtttcccaacttaaacaagttggtctataattaaaagaagagatacctgttgtttgtggtttaaatgggatcagtttcctttctacaccaattaaactatcttggaaagatgagtgacatccttagtgtatcatgtaagcctacctgaaacttcttttatctttcttcaaagtcaaaggttaaagtatatttgagtggtgataggaggagattctttgttcaatttgtgaatgtcagagtttccagctaatactctcttctttcctatccttccctctcccgttaacaccatcacacaccctatcttacccccaaagg

SEQ ID NO: 14092 - DNA, 1196 bp, Homo sapiens
tgcattttaagctcgtctacagcagcaacctgcagacacctattcagagagattactaaattccctccttcccattaataaaaaggaccagaatatcagtctacaaaagacactgcgttgctgcgaaccagctctcgcttgcgcgatcaggaagaagggcggcaaggctggagcctcgggaccggagaaaggcagcctgcttgtgacgtcaaatcagcggactcttatcttggctttaggccggttccggttccccggctttccgggcgcgagcgtgtgcgagcgcggcagcgtactgcgcgtgctccgcagagggacacgggaaggttgggtccggctctggaggagatgcgtgattggctgacgctgtgctcgggggttccctggccctttcggcaggggtaaaacaataagagggggcggtggcaaagggggcgggacgtccgtggtccttgtcgcacgtcgcagcgcctggcgcccgggaagaggtggttgtgaggcagacgaactcgcggctctccggcttccgaggcttccgagttgtcggaggaagggggcggcgagcaataagaacccgccgcacccggtcctcagcgactcttctgacctccgcgcgacgtacccgccgccgccgttggctggaggtgtgtacgggcgccgggaggggaggtcggtgtggtggtcggaaagggacattccattcgcgctccgcggcgcgaggcaatcgtccggtgtgtgagcccgggagccggaggtgtagcggcagagacattgttcttgccggctccctacggtgccgtgtgtgcgtgagagaagaccagtctttcctctaggtgaggggtgggaggccgcctgggaagggaggtgacccgcgagcgtcttgcgggcagagggctccgagtgcacaggtggggttgaggtttattggggatgaggtggcgaagtggggggggaggcacgcagcagctcccgaaggcgcgctgatggaagcttaatacaggaagtgtgggagcaggctttctggaggggatgttttagggtgggtagcccaccgttcctgtttccgaatcgttttcggctcttgtaccttgttccttcggagcggagaggccgtcgccaccccgcccgtggggggaggggaaaagaggttgtgtcgacggaggcagaagcgacgcagatgcgaaagtggcggcctc

SEQ ID NO: 14093 - DNA, 1590 bp, Homo sapiens
tgaggtcaggggttcgagaccagcctggccaacatggtgaaaccccatctctactaaaaatacaaaaattagcagggcgcttggtggcaggcacctgtaatcccagctactcgggaggctgagacaggataatcgcttgaacctggcaggcagaggttgcagtgagccgagatcgcaccattgcactccagcctgggtaacgagcaaaactccatctcagaaaaaaaaaaaattatcagtagtatatattgttaaatgttgaatgtgacatgaacagattttcacaatattaaatacgtctttttcctctaggttgaagaagaggatgaacttgaatctggagaccaagaggatgaggatgatgaaagtgaagatcctggcaaggatctagatcatatctagttttcaaatctctaggaacaatagagattatatcataactctgaagatggactctaaactttggtttacctccatggaaaataaagatttagaaaccaggtggaaaacattcactattaagactattgatatatttttgtaatgttgccacccatgttgaaaaccttaaaactgaatttatgtagaacacacatcttttatttaaatccatctgaactgtcccaaaatgtaatttgcaaagagcttcaaacaccaaaaatataccattttaaggcatgtggtgacaatgctatttgccttagttcattcgttgtttactttgcaaaatttgtgacttttaagtactaacacatttgattgaatgtgtattgaattggaattattatttctaaattcagcatttgagtccttagttgatgattttcttttaaagaaattagtttatttaaaagcaagatagcctgggttgggagttagtgcatatcatcagccctccatctaatgtgattgctaagatgtgcaggataggacagcttagaatgagtgccttgacacctacatatggctgcattccatacctcagtgaagaagccgaaggatgctgacacacagtgatgtggagggcattccggagaaacttttgcaacagtgtattaatgtgattggttttctttttgttttaagctaaacatctaaaacaaatttcaagttaacagttcatacaactcagatttagtagtattgtttatcataaaacatattatgttcctagttttaaaaagacccaaagtatgattaatataatttattggcatttttgctgaataggtttaagtcagataatagattttaaaaaagcaaatgaggcaatgtgtcaaaatttaatgtttcataataaaaatagatacgttgacttaatccttggtcatggttccctttgtttacatcttaaaagtattttattcttaataaaagatgaggcaagtgaaaatgatgaggcgacttttcttattaggggtacacaactataactgaatgttaaaaacaatcttctttaaaaccaatgattatgattccctaagattggagggggttagaagtacagaagtagaagaggttggaaaagggtttggacgtttttaaattcagcactggagttcttggcaatgatttcctgttgaagaagtg

SEQ ID NO: 14094 - DNA, 1168 bp, Homo sapiens
atgccctctatatttagagcacttactaggtactgtgttgctagtaaaatagtcaaagtggagtcttttttcctgtgactagcttgcagttttaagaaattaatacattaatatgttgtttcttaatttgttctagcatttgaaacaacaacaggaaggccttagccatttgattagcatcattaaagacgatctagaagatataaagctggtcgaacatggattgaatgaaaccatccacatcagaggtggtgtctttagttgacagttcacaaacttgtgtaaaggtttgtgaaatgcatcttcttactgcatcagaccttccttaagaatgaaaccgaccacatggagggaaaaagaaaacaattctttcttggattggttttttgagaagtttactgacaaattactgttcatcaaatctgaaatagtcacctcacagctcttcaaagaaaacctttgaaagatttatatctaaaagctgtatttactttaaaagaagtgcataattaccaaaattgtatgtactattgtacatttttacaacagcattttcttaaacataatctgtgtttaatgattattgtccattgagcctgtactctgctttccataccaagtaaatatgaaataatctactttgcacataacagaacaaactataattacttggctgttggagatttgtacttgagtataaatgtacaccagtttttgtatttgtgaactcatctgtgggaggagtaaagaaaatccaaaagcatttaatgttttgtttttgttctataaagatatgaaaatgtatttttatattattttacttatttggaatttacagagcacacctaagcaattaggatataacaaaactacttaaccatttttgcaaccattttgttttttaagcctttttatttctaaaaagatgaaaacttataaataaattcttaatttgtaattacttttatataattctgtctggtgctttatttggcttttgaggaatgaccattttttgtccacataggtactaaattcataatcacaagtcaggaattttagtcttaagtcttatttttgcctcctagggatttttgtcagtgctgttatattttgattagggtatggcaagtaaaacttacttcagatatcatctagtattaagaat

SEQ ID NO: 14095 - DNA, 1204 bp, Homo sapiens
catacatagtcattttagaattatggcaataggcttaatgtgttttctcagctgtaactgttaaccacccctttaattgaagggtatatattacattgtgatatttctattttaaatgcttagttcatttcttgtaacattttgacttcttgattggtagtatagttttttaaaaaattgatcttgaaagtagggaaaggaaaaattagatcaatatattttgattttatatgtagcaattataaaataattttaaaaagaagttgcctttatatatacaaaagattcttcctttctatttttgttcttttttaattaggtgggtttggaggatttgggacaacatctacaactgcaggttctgcattcagcttttctgccccaactaacacaggcactactggtaagaggccatcttaagtcattcatagaagtaaatgaagtagaggtcagatttttttttttttttaacttacgaagttccaatttttcattcaaaggactctttggtggtactcagaacaaaggttttggatttggtactggttttggcacaacaacgggaactagtactggtttaggtactggtttgggaactggactgggatttggaggatttaatacacagcagcagcagcaaactagtaagtatgaggttttcagcttcaaatacaaaaccgtgatgatactagctgacattattgagtgcattcagaatactttagtggactttttataagaattattaatatattccaaaggattaggaatgttacttttcatgtttaaatatgatagcaactggggagaacactgattggcacagttaggattataaggtccctgtgtttaggatcattccatttaaatttttgttgttaaaaataacaaatagagaaactgcacaaaagtacagcttaatgaattatatataagtttacaaaggttaacacccttgtaatcactgcccatgtcaggagatggttcctggccagccagttcagaagcctaccacatttccctaccaattgcttccccatcagaggacctgcagtcttggcttttatggtgatcattttcttactttatattttgtcattcaagtatgtaaacagtatttggttttgcctgtcttaaatctccataggctcctcttttatctctcttttttatttattttttattttttgagacggagtcttgc

SEQ ID NO: 14096 - DNA, 3720 bp, Homo sapiens
aagttgaatagagtctaagttttataatccagatcaacacagagaagggtactgctctggtattgagggtgggagtggtcagagaaggcctcctggaaaggttaggcctgctgaatcttcaagaacaagcagcagcccaagaggggaggtgagtgagatgagccaccttcctataggtctctcctccttccatgcccccactccccacccaaacttttcacactggggagaagtttctgacatgaacatctaacttgttttctctcttctgtgtttcagggaacagcggatgaaagagcacccctcattcgaacctaaacattgcctttgcttggtgaagaaactgtgtgagctgtcctgacctggacgatgacgtggggaaaccctccacctccttgcaggcttgttgcctgttgaaagaaggaaaaagacacggcgctggcaagtgataggaacattctggccagaggttaaagagcaggctgacatggctggccattaagctttataaaatcatgtgggctctgaaattgttcttttatgtgtctagcaagtatttaataaacccttgtatagtaattttgttgttgttgggtgctggtagctccagaattttgtgaccactattgtgggtaaaatgtctctgcatcacttgttaatgctactggtctaacttcattcagtatgcttcattcaccgaactttgtgctcaaaatgcgtatataccattttatgttgtattcctccatttcacttgcaaaacagaagtaaataagagttcgggacccagggtaaaatggtagcttcatccaatatatcattcaaatgcatctgatttctaaaacatattacattttatgctgatcttcagttcataattcttccaggaaaactcagtcttccaactgcaataaaatactgggtagaatcaaatgggaaaggggttgggtggggcaatacccatgagttgatagtgataagctcctaaggatttttaacttgtacttttgtgaacgaagagaatgcataaataatgttggtgaggataaagtacagatatttcatgtagaattaattgctagttatgatgcttgtggatagttaactgttttttttttagtcaaaatgatcatgctacgaaaagatgcttctgagagaatgtaatgagtaactgatttttcttcctgagtcgcccttgccaaatatgttactgtattaattaatctaatattgagtgattatttgtaaaattatgaatatgggaaatccatctatctacagcctaagttacacataagtttcagaaagtctgattagactaaagagatatttcttctgggacagccgccttcttggtaattttgaagttctttttacaagttccttcctcagtttcagttctttccagtgttttgtagctcactgtcactcactgaatagagaaacgtgtgccctatacttcctgtgacaatcattttgctgacagaatgatggatgtttaaaatattgcacaaagtactttaaagaaaggtctgttaggaccagaagcagagacaccacttttcaaaggacttcttggtttcagcataacctaagacagggaattgggagccatcatatgtcacagtgttcagaattcaagcatatttaagggcattttctttgattctcaaagttcagcattcattttgaattgagaagcctatacatttagctgacaaagtgcttatagaatttcttaacaactgaaccattcaaaaggattttttttgtttaaaactggatttcaatgtaagcaaatgaagaaaaaaatatagatttcatttccatagcttcttatccctgtattgaggtaataaattgttttactgacaatttttcctttttctacactaaaacaatatgtgatatatttcccctcttgaagaggcaattcattaaactctcaaattttctatagaatcaagatagaacctttagatactccaactcaccaaaatgtaaaaaaactaacaaaaatatttggtcttcaataatgctaaatatctacatttttagaatttatcaacatttaactagataattgggcatgtcttaattatgcatgtacttatccatactaataaaattgacaatgctagtgcatacttattggtttagtcctattatcaggatataatcatctgtgaggaggatattttaaatactgtaaatgataacagttaatgatatacacatttagactgagttgcacactggcagggagaccaaaaacattacttccatacttgtgtcatgattcttttttttttgagagagtctcactctgtcgccaggctggagtacagtggcatgatctcggctcactgcaacctctgcctcccgggttcaagcaattctcctgcctcagccacccaagtagctgggactacaggtgcgtgccaccacgcccagctaaattttgtatttttagtggagacggggtttcaccatgttggccaggatggtctcaatctcctgaccctgcgatctgcccacctcagcctcccaaagtgctgggattacaggcgtaagccaccgggcctggcctgttttatgattcttaatagttacttggtttaaatcacatttgatactatccttctgaaaagtctgagacagatctacaaactacagtcaaaattatagattaagaggaatgaatgcacctatttggctttaagttgaagatgaattatttctcatgctcattttcttgcggcagttatcttagaaagacccccaaaggctttgtgattgtaagcactgtcatgatcacagaatgcaagcttctggtaccatgatcctcaacttagagaggaagaaaccaagacagagagcttaactcacttctctcagggaaaattaggagttgagcacaggacaggaaatgggctttgccacttttagctccaggcttttctaaccagacttgatttcctcatgttctagaaagatcactaatggtcaagtggaacaagcactacacgactaacccctattggggtttttaacttaagggaggctaatttttaatttaaactgctcgagatatgagttctgcaaaaggtggtccgcatccttggccctctggacattatcactaaattgcttgtgcctgttaacaagaatactgaccagaatgctcttcatgtagcttatacagttggttcacttcatgcggttcttgacatgtttatttctacccttaatgcaatgaaatgtttcattaataaaaaaccactttatataaaattgctctagaagtcatatgtcattggatgtcctgttgtttatggagtttccctggaaagatgttccttgacagatgcagccctgagtcacacacttgggccatgtctgatttcagcttcgctgtagtggacagttacaatcagcctgacaagtttcactccaagcagtcccacattctgcttttctgtcttaagtctttctcaagagccctcaaagcaccataggagtatcagggagttaataacccaaggcaaccctcaactaaatggggcaggagtcagtcagctgatagatgtttcaatcctcagaggaccagttctcaggcttattccacatgggtcctcaattagggttgcccacagtggtaactactttctatcagtgtttctttattccctgtcttaatcgcccagcccttcaatgctg

SEQ ID NO: 14097 - DNA, 1131 bp, Homo sapiens
agtagaagctgtcactattggctctgtagatttggctttacccttaactttcgctttttgacaacaaaaatatctcctgatgttgattcagcatttatttttactactttgaaagcagttggggctgaattttgtattaaaaaagtgatgatttagtagcactggctggagctatatactgtgcaggaagattctgtgcaaacctctgcatagttctgccaatgcaccgccatgctggcctgtagcatcccttattattccatagctgtgtctttttgagcacagaaaaacagaaaacaccaccaccaacagacaaaccaaacctcgtgtgatttgatatgattggcaatatctctaaaatcaatgtgagattagaatgaaatcccaatactcatttgtccagtgatccaaaccaaaaagtgcattcatagatggtgaaagggaaaaccagtgctactacgtaaaaataaaagaaaaagaaaaaatctttaatacatctcagatgtcaatatttattctggatattttaaaaggcttttctttatagtgttttttacagctgtttatatcaactcagctgctacttcaatggttttccctttcactctctatttatctttttgattgattaatataaatgtttttactctaaaaagtgaaaggtaaaagcagacctatagcagctgagtcagtactgacaactacaaaacaaatgttcctgcagggggctggaggaacttcttatacttaatagacagatggaaagataagacttggctcgtttctttttctttctttttttaatttggtctcatgtcaagtttgatgttatgaaatgattatccagaagttttttttttttaagtgaaagcagacaaaagagaaaatcttaatttaagcttttaaagcatatatacaaattattttctttgctcaaggatagaaatggtttatgccaggctaggagtagaaaacatttattttaatcatatgattaattcaaattggaaatgttcttgttaaatttatagctcaaaagacaggtggagaataaattgtttcagctttattaatactgttcttgtggaataaagtattagaattgaaaggaacatgagagatcgtctagaa

SEQ ID NO: 14098 - DNA, 1173 bp, Homo sapiens
tctactaaaaaaaaataaaaaattagccaggcgtggtggcacatgcctgtaatcccagctacttgggaggctgaggcaggagaatctcttgtatccgggaggcagaggttgcagtgagctgagattgcaccactgcactccagcctggcgacagagcaagactgcatctcaaagaaaaaaaaaaaaaagagtcacatagatttcttttactgtaacaacataacatccatgaggactgtgtatgcaatatacacagttccctgagccaacacaacctgttgaggatgttgtcacagagaatctggagcagagtggatctgaagtgagcttaaattggacagagctggactatgaggaagtgactggtgacacaaatgagtccactcctggctcctttaaactactgtgaatgttctggtcttttcaggaatggcgttcccatactagccggctgattgtgataaacaaacgtcaaacatgaccattcgtcattccgcatagtggagatgagctctggtctgcagcaggaggttgttaaatttgacatattcaaaatgaattgcacggcctggctgctcttgaactctggcttgctgggagtagcctatgatggaaggaaattccactctgtggtggtgttttggggaggttgcatggtggggagaggaaaacataaagctgggataagaacagtgctttcctaagaaaaaaggaggctacttttgaacgaatgcatctatgatgccagatctagtgggaggcttctcttcttttgaaagatgattctgtgccccaccccattcctatcccacatttgcctcaatttcatttccttagatttcacattatagagatataaataactctggaattcaagtggaacattctagagagacagacattctagttaaaacaggaacaatctttcaataaaattagtatcacctttgaaatgcaatgatactttgaggatgcttcagactttgttggtgtttggaatgattactactgctggtagaaaataatgccactgtgaattcagaattctgtgtgtgtggggaggggggcatgctccctttctctcttctttctgtgcctaaaaataacctgcaaatcttgttcaaattcttttgcaaggaaatttataaattgtctgtgtattctataattatt

SEQ ID NO: 14099 - DNA, 1200 bp, Homo sapiens
tctctacaataagaaaactcctttcttcctagtgttgttgataaaattaaatgaagtggtatgtaaaagtggccctgcacagttatagacagcatggagtggtacaaatacatctggctttgggccagatgttctggcatttgaatctagaccctgctacctctctttgggaggtcagcttgctcaccaagctcctgcgtctgcaaagcaagagtcatgacatctagttggcagagttattatgaagggtaaagacaatatttgttttcaagctcctccctctgtgctctgtgctgagtaggcactcagcagtcagcgttgtcatcagtattatggtcaatgttgtcagaaatcttgtcttcgtcaggaatgtaaggtgaatccagtaaaggatcttcagatggtcttgagaccccagagatttcaggagtgatggtaataacatcttggaagcatcactgcagatatttcagtgacatcattgctaatcccacttccgccatttcccccctctcttgtagttgagaatgaaaatcattgcgattttgtgaaacttcgagagatgctgatccgcgtgaacatggaggacttgcgagagcagactcacacccgccactatgaattgtaccgacgctgtaagcttgaagagatggggttcaaggacactgaccctgacagcaaacccttcaggtatgaaggcatctagcaatcaggtgtctcccagacagtggcgagagtggcatggtggtacatcacagaaatgcttgctggattgagatggtgatgatggaaggatctggtgggtgaagattaatacatatgttgtcaggcattgtgataattgctttatttgcattatctcaactaacttacctagttgatgtcattattatccacattttacagatgaggaaacaaaggcactgaaagtgtaaacaaactgcccaaggtcctccaagtagtaaacaatggtgtggtgttgagctcttgccatctgggtcctgagcccaggtttctgccagttctcttgcagaggtgcagagcctggtcgatatatttacaaaggtgcggctgctgattacagtttgccccattcatttttgccaaacacctttaacttccggaggctcttcctttgtcaagcacttttactattagctttcagtggttcggtaaaattctaacaacaaagaatcagga

SEQ ID NO: 14100 - DNA, 1067 bp, Homo sapiens
taaattacatacaaatggaaactaaccatatgtctttaattcagtattaaattttgctttggcttgtcatgtagagtagccttctcaaatttttggttttaatttctgtcaattccataatcattgcatgagcattcaccatcactgaatgctggtgctgtcgctcctaattttcctttctttttaatttattattatttctaacttttttgttttgttttttaacttgcagtgcaagcttcacataaagcctggcaagccaaggatgttcccgcattcacctgcttttgcagtaatatcgtatctctgccatgtgtgttctttagttttattttattttattttatttttttacccttcctcaaacaccagtaactattattaactcgttttgctgaatgttgttgggtggtagaaaatgatagaacaagggaataaccgcgaatgctctgtgcagctggactctgtttccggaaagtaaatgatttgctttttatgcctgttctgaatggcagcacgaagcaggcctgttacttgtatgtcgctttggacagaggaaagtggggtaaaatgctacctgtacgtctgacatgaaaacttctcaccgcctcagcagctgaactaaaaacctgaatagccatgacaagagtttgcattttcttgatgattcatctccatgagtgcacaatccctgaactcactgtcttttctccacacttgtcctaagccaaggtagatttgtacgtagacagactggtgagcaagcattatattttatttttacccttgcatgacattttcattttaatcaataacattatttggcctgagcttgtgggtctgttcagactgtctcctctcatggtttgaaactgcatctgaatgcctgccttcaatcctggccaagttggagtagactggtatgagaaaactatgattagttcacatttactggtgcatccttgatcctctcacagatagaggtcttaaaggttggatcatgtaacattgcttagtagaagaatcttcttctaaggatgatgggctttctacagcctgcttaccac

SEQ ID NO: 14101 - DNA, 1888 bp, Homo sapiens
agccaaatagtagctggcatgttgattcaaaccatgggctgaatttgctcataggctgtgcatcagacaaaagcttgaatatttgtgttgtatgcttgttccaaccaccgcttgtgtgagcatttttgtggcttgtacagaaagtacacttttaaattgtctcttgcatcactaaaatttttttaaaatgagcataacaacgaaaggcatccagctgactttttgattccaagattattgattggattgacttttttgcattaaatttttcccagcaaaataaatcatatggcgagtcagggaataaaaagtcaaaagaaacaaatagaagcttttttttttaaaaaatgtattgcttctgaacttttttctgccactgctccctagccctgtttagtttgttattgctgcttttcttttttctttctgtatctatgcctttttttcacagtagtccttggctctgcacggaataaatgataccctcaaatctaattggatgtgctttcgcctttgcatgtaagtacggtagtaagaaacctttgagatctttctgacttttcaaaattagagaaagcaaatgggatggatagattttttttttcttttcaaggggggcaggaaggtaatggtttgagtagcctttgtttaaaaaaaagactaaatatatttaaaaggccacatttatatttttttcacaagaaccacataataaattccacttcttgacctgaatttggaaatccgaaattactaatccaggccaggtgtggtggctcatgcctgtaatcccagcactttgagaggccgaggtgggcagatcacttgaggcctggagttcaagaccaccttggcgaacacggtgaaaccccgtctctacaaaaaatacaaaaattagccaggcgtggtggcacgtgcctgtagtcccagctacttgggaggctaagtcaggagaattgcttgaacttgggagatggaggttgcagtgagccaagattgcaccactgcattccaacctgggtgatgaagtgagactctccaaaaaaaaaaaagaaattattaatccctgcctgtgctctacatagcctcatgggcatcattggatagctcagagggcccttgattctggcaaggcaaataaagccagaatgagaaattaccatcttctactagagaaaaccaagagaaaaatttttatgctaggatgcctttatgaccacttaattttttaatcttagtttaatggtctctccctggtgctaactgctgacagtggccacctcttttttggggattgaggggcctacataactagctggccttaccccatatcttttgttcaaacataataccatctttttgcttcttctgaactttagatctccataacacatgtactgtagaatgtgatggaaaagcattgatgagaatttattggcagttcagattgtgttttcccaacttaggctctttattaattggttaaggttttctccaaaaagggcatttcaacaatgggaattatttaatgtaacagtgggcacagattacttatcttccttctctgctttgtgactcaccagcagtaacacacacaatccacatcttgtgcacctcaaatgaacagacttggtttccttgctttcttgacatttccatgactgtttcacatacaaactattgggtgaggtttttcagctgttaccgacccacgtcctgctgtctctgtgtggtcctacaaaaactgtccattcccacccctttgctttgccatttgcaagagtctggaattgtcaggtctcagcttcgaaaagtcctggttccactgacaggacacattctttagtgggaattaagacctacaaagtctagtttgtatgtaggtatg

SEQ ID NO: 14102 - DNA, 2236 bp, Homo sapiens
tcaagttccaaagataattatattagaaatacagatttggacctaatttctaagatgatgttgatggatgggtagctggataaataaatgagttggaggtagatgtggggagagaaaagactcagcggggacggaaagcacagggaggaaaaatggccaccagagataacagagcagcctatgttaattaatgatcaactgtgtgtggctttttttttttcctggcccagatggatagctcccagttgatccattgtcgggagcttgtggcacatcacctttctactctgcagtcttccctgcctctgaattccgtttatgtctaccgtcccctcaagcacaccctggtgacctgtgacaaaggagtgttcagattacatccctcctctgtcccaggcccagacttctccaaggacaacagcaagccagaagtgccagtcagaggtacagcagccttttaccatcatctcccagctgccagtgggtgcaagcagacctctactaaacgcaaagtagaggaaatggaagtggatgacttctatgatggaatcaaacggctctataatgaagataatgtctcagaaaatgtgggttctgtgtgtggcactgatttatcaagacaagagggacatgcttccccttgtccacctttgcagcctgtttctgtcatgtagtttcaacaagtgctacctttgagtgtaaactaaggtagactactttgggaatgagaacatgcaaaatcaggaaaggctgtagaaggaaatataccttaacaggctgatttggagtgagccagaaaaaaaaaataaaactctcattatttgtgtggctaattataattcagcgttatttaagcacataaagaccaaaaaaaaaaaaaagaaatccaaaagatccaaactttttttaaacttaaaaaatctctttgtagtatgtcagttgcactttttttctgccataatgtaacgtagcttgccccgtcaaaaattcaattaaaattcatggccagcaatcctgttccccctcagcatcctgatttaattttcctgttgcttttgcttgcttctccatttaatagttactgaactttatgcatgttgatctatattgattttcactgcagttgaatgaacaaattatttcagtgtgacagccatgactcaagttccaattagtctgaaaagggtactttggaattgtcccatattaatcagagatggcaaaagaaaaagttctcatattaccaggttgattttgtgtctcatttcaaattttaatttaaaattatggttttcatttttgtttaccttaaagtgatgcttaaaagtggcatgtaattaggacacttaggtttgttgaaagcattttcgacatttgtataaaagaatttgtgataaatatatccaggtgctcaccaaagaaacatgtattaacaacttaaattagatttttctaactgatagttttcactcatttataatcagtaggagagactgtctagatgttggggcagctctatgatttaagtctgtaacatgttataactgaatttagtaccctagttttgttaagctattaggattttctaatagaacttactccccctgcctccccagccttatgtttcttttaatgacttctggatcctgagctccctttgcagtctgaaaaaggtattgcagtcagaactgtgtactgatgataaaagcctctggtagcaataaaaagttgtccttaacttttgtttttgtgacttttttctggttgtgaagaggtacaggttcctgattggctaggcactgctatttcaactagagaaaacaatagaaagaccaagaatacacttactgaaaataaaacatgaagaggatctgaatgtgatcgagggatataggttttagacataagaatttttctttcgtgatattttttcactggtgcactgtgaatcctccaaatagtaaatttacatcttaatgtgactgcttgtgagagtaggctcagacccctatctttaaaatgtcatttttagccattttgtaatgttcagatttagcagaacaagagtattttcaggtcatcatctgatttgtaaaaaattcttgtggtagggttgacttacctgttttatgaccttaaaatccaattaaatgggaagcatttactcacatgtcagtaaagggagtgggagggaagatagcaaaggattggcttcacagatagacattttaaaaat

SEQ ID NO: 14103 - DNA, 1312 bp, Homo sapiens
acccccgtctctactaaaaatacaaaaaaaaattagctgggcgtggtggcgggcgttgtagtagcagctacttgggaggctgaggcaggagaatggcatgaacccaggaggcggagcttgcactgagctgacatcgtgccactgcactgcagcctgggcgacaggccaagactccgtctcaaaaaaaaaaaaaaaaaaaaagttagctctagacacacttgatcttgcaagtgtactttccttcctttcattactgctctaaagctttttaataaactttctttcctgttcttaaagttagctctgatctaaaaagtaatgagtggcagtcacattaattgaattccatagtattttgtgtatacctgtctcatctgcatatctaggtttttaaaacagttacaaaaagttaaattgtttttgaaaaatcactaaagttgctttttccctcttcaaaattttaggctcatccaaaatacttgagttgtattgcaatcagctgttttttcctagctgccaagactgttgaggaagatgaggtaataaatcctttcaagataatgtttcttccgtgaaaatttctctccacatttattaacttgcttcgtttgctaaaacaaaaatcataaatgagtttcttttctgtccttttctccctgtccctgttcccctttgctttggatagagaattccagtactaaaggtattggcaagagacagtttctgtggatgttcctcatctgaaattttgagaatggagagaattattctggataagttgaattgggatcttcacacagccacaccattggattttcttcatattgtaaatatacctgaagtcttttagtttcttatttgagtgtgtagttttcagtaaattaaaaaatagattgcctactcatttattttgtactggaaataggaaaaagaaaacttgatatccaaggaaaaattataaattagtatatatgtcatatcactgaagcttaattcgcagacttagaaattgaataggttaggctgggcgcggtggctcacgcctgtaatcccagcactttgagaggctgaggcaggcggatcacttgaggtcaggaatttgagaccagcctggccaacatggtgaaaccctgtctctactaaaaatacaaaaattagccgggcatggtggcaggcgcctgtaatcgcagctactcaggatgctgaggcaggcaggagaattgcttgaatccaggaggcggatgttgcagtgagttgagatcatgctactgcactccagcctgggcaacagagtgagactctgtctcaaaaa

SEQ ID NO: 14104 - DNA, 1230 bp, Homo sapiens
atatgagttgtggagaggagagtctcagcagctctcctcccagtgatcaagagtgcaccttctttttcaacttcaaagtggcacaaacactgtgctttccatcttagaaatctgattgttctgtcagaatttatatttacaggtttcaaagcaataaatgggggaataggtagtttcctggtttagcccccatctagtcaggaattaatatactggaatacctaccttctatttgttattcagatcagatctggcctattttcatatttatcctaagccatcaaatggggtagtgcctcttaaaccattaacagtactttagacattggcactttatttttctcgtagatctttagctactttggggaggagggaaggtgctgataccttcaatttgttacttttcaagatttttaaaaataactagtgtagcttatcttaaacattttataaaaccttcagatgtctttaagcagattggaagtatgcaagtgcttccttagcagggacagtggataatccttaatggtttatcatagatttcaccctccccccttctcagaagagtgagtatgctcttaaatgtcaaacacatttttgttgttttgttttttaaatgatcagtgtctatttgatgtgatgcagatcttataaatttgggaattataatattgacatttctgtgatttttatatatgtaatgtcttaattgagatttctgttaaggcagaaataattaggctagggctcttagttttcattcctattgcccaagtattgtcaaactatggtattattttaatgttactttaaaaatccataatctgctagttttgcatgtacttatatgaaaacagtgcagtaagttgaaaactcagtatctatggaattgataaatgttgatctggtgtagtatattttatcgcattttcttatattaaaaaatgtctgcatgattacattttatttcctttgtaatttacatttcagaatagtgtattgctatatgggtgccaagattgaatatgaagaacccgagtgtttgtagtattatagttttaagcaaatctgtgtggtgatacagccataagaatggggcttatataaactctgtacatgtaagattttgtacagagaatttttaactttataaattgtatatgaacatgtaaatcttttaaaatgtacataaaatactgtatttttttaccttgtgtgtgatagtctagt

SEQ ID NO: 14105 - DNA, 1087 bp, Homo sapiens
caggcatcagtatccacctcatagctttacacattttgatggggaatattgcagcatcctcaggcctgacatctgggaaaggctcagatccacctactgctccttgctcgttgattttgttttaaaatattgtgcctggtgtcaacttttaagcaacagcactgcctaaaagcaagcagagaacagaatcccagcaccattctataggcaactttttagaattcagatatagtaaatctgttccagatttatgatgttttatgtaaaaaaaattttgtataataacatagctgaatatttttgtttcatttctttgatgtaaggcgtgtgaacattcgtttgaatatcacatgttgaagtcaggtatggcacaatgggttctgagaccagcttttcctcccctcccatttgccttgttccaagctctttcttttcaaattacttttctgatattcataggcaggtatttaattttactaattagcatcctgtgtgaatgtattaaagaagccactgtgttttagtgtagttggcaaaaatataaaagctgtttcttatttgcccctatttttttggtgtcttaaagttatatattaaatcacagagaagcaagggagaaagttgaaagatatctaaggctcatatcacttgattctatggtagattatattagaattgaggatgtggcacattaaaactggaacatgggcaaatatagtgttccattttaaaattctaagtttatattgttaaatgggtgaaaatttaagtttatatttgcatttccaagcgtttctaaaaatcactaatgccatctatacttttagtatgaaacagcagactatagaaagcacagggaagaataggctaaatacattctttgaagaaccagaggcatataaccacatcattatgtcattcctaatacatggctagattttctaatgataaaattgactgtgtcccaatgcttatttgattctaagcttttttattctgtttctgagatattttaatagctttgcaaaatatgctgaccagtttttggaaaataatggtttttatagcaagcaaagactttatggca

SEQ ID NO: 14106 - DNA, 1273 bp, Homo sapiens
ataaaataaaattagctgggtgtgataacatgtgcctgtagtcccagctactggggagtctgaggagggaggaccacttcatcctaggatttcaagcttgcaatgagctatgattgtaccactgtcctccagcctaggtgacagagtgagaccttgtctaaaaacaacaacaacaaaaaagatattgataaggaaatagaaacttcaaaaatggcacagtgcaagagttatttgctttgttaagcaagataaacacagacacattttctcaggaagggagctcataatggttaagaccagatgggaaggatagttatttattaagatgagtatgtagtaagacacaaaaaaacatgttttcccttccgtaacttttgggaataaatgccaatataagacagatttatatgagaatgtgtaaaatggaataagttattgatatttactctgaactctaaattaagcctcatataggcttaattttgtgttttttcaattttaggaactctgccagcatctgtgtctctgcctgtgattgattttgcaaactattgttgagatgattagtgatttgtattttgggtgagatttcattgagttagcagtctgattcattatgaagcactctggtgcttgtaggatttttagtctgaatcctaaatgaaataacattaattgtgccaaactacagactgagataaaatgaccttacacttagggtgataagagagaaactgtaatttaacactataggacttacatctttacatacgctatagaggcatcgttttttgtaagctactttagatgaccagtatttacagaagcttagttctagcttttaccagtttgccctgatttggccagcttgttttttcagggggagttatgctactttattttcctagtgctacatataaaacttgagatttggggttaacaatagtatatttgtatgtatttcatatgtagttttaaaatatacctttcattgaaatagcatgttacgtagatttatttgcagttttggaaactctaaatttaaatttttctgtgcaaagcagacctagcgttacatataatattgcttataaattaaaaaactaaaatacaaaaaccccctaaaatacattaaatattttttatttttaatgttttttaaaattttactttaagttctgggatacatgtacagaacatgcaggtttgttacataggtatgtatgtcccatagtggtttgttgcacctatcaacccgtcatctaggttttaa

SEQ ID NO: 14107 - DNA, 1348 bp, Homo sapiens
ataggattcattttacttagcaccagcttaatttccttaggaagggctcatgtccattagaaaatggagtcatcttatgtgcttaattattttcagttaattgtcaagtttaagtgcctaatcaaggcaagtgttgtttcagcctatgcttaatgcaagctaggatagtgattttaaataatcactaaaatcactagatttaaataatcactaaaatgatttgtgagaaactggcacttcagatattatatcctttagctataggttcttctctccctaagaacattagatattttagttttccagaacaaaagctttaaacttctgcagtaagttgagagaagggttgagaagaggaaaagaacttctcattttctatcagataagaatcacattagaaactaagtacaagattagacaacaaattatgtggtcaaataatatagtcattagccacctaaacattttaattccagatattatttaattccatataataactgaattcttgtgagtggattacaggtttttgatcccaaaattccagagctttcaactctctgaatttgtagtcctgaatatcccagtggtgggggttcccagcattgtgggtgctacttgcaaggccatagaatctagatggccctgtcttgaccctgaaatgaaccttaagccttagaacaaagtcatgcagatgccccatttgataataatcttattcacctgtgctctggtcctcggtttctgcatgtgttagcattgcattgataactcagaatcttgataaacacttaatatttgggcctgaagcattaaactttctttttattgtatatacttaaaaaatagaactcactgccctatcatacattgtagccctcttattctttggtctttcatatgcattagttaaatcccttaaagtagacattcataaaaacttacattgtttattggagtataaaatattacccaagtttcttcatgagttgacatgagctgttttaaatactggtgtattttcagaacagtaaaattactgaatatcagaaaaaatgttaattgatgatgaagcttattcccaaaatgccttttgtgcatatgatacttggaaagtcactaatgtgcctcagttaatacatcagtaaaatgttgtgtttcttttccagtgtagtgtttttggaatataaattccccatgctagtatagtatctcagcaaagagaatttccccccaggaggctcagtaaaggaataccgtgtcttacccatcgttatgatggaaggctgctttgaaaatggctgttttaccttataaggttaaaattttgatccatatgttaagtgat

SEQ ID NO: 14108 - DNA, 1202 bp, Homo sapiens
gcgttatttaaaacaaaggcgaccacaatgaactcctctctccccaccccctaacccctgcgcacgcacacgcacaatgaagcgaaacctcattggctgggatcagtgacgcacttctgaaagccgcagtttggcaccatcttttccatctcctgctccttccgccttcccgccatccgccctccacacgattcagcccggtggtgttagccccctggactcgattcctgaggcaaacagtgccccttaaggtcggcgacagcctcttctgggttcactgcagtccaaccggttccctaccctctgccattatgaacatccgcaacgctcagccagacgacctgatgaatatgcaacactgcaacctcctttgccttcctgagaactaccagatgaaatactatttatatcatggcctttcctggccccagctttcttacatcgctgaggatgaggacgggaagattgtgggctatgttctggccaaaatggaggaggaaccagatgatgtcccgcatggccatatcacctcactggccgtgaagcgttcacaccggcgcctcggcctggcccagaagctgatggaccaggcctccagggccatgatagagaactttaacgccaaatacgtgtctctgcacgtcaggaagagtaaccggccagccttgcacctttattctaacaccctcaactttcagattagtgaggtggaacctaaatactatgcagatggggaagatgcttatgctatgaagcgggatctctcgcagatggcagatgagctgagacgacaaatggacctgaagaagggcgggtatgtggtcctgggctccagggagaaccaggagacccagggcagcacactttctgattctgaagaggcctgtcagcaaaagaacccggctaccgaagaaagtggcagtgacagcaaagaacctaaggagtctgtggagagcaccaacgtccaggacagctcagaaagctcggattccacctcctagagcatgcttaaggtattctgtcttccctgacccagtacccccttctcctaaatccctgcatcctgccttggcctgcccaattccatcctgtcttaccccattctggccctgcgagattttacggtaaaaaccacctggtgaccttagggagaagttagagtgagttgagggagactcattacacgctattggaagttaaat

SEQ ID NO: 14109 - DNA, 1168 bp, Homo sapiens
gaaaaaccgcaaaaaccagggcactgtaaattggtctgttgatgacattgtcaaaggcacaaatagcaacaatatggaaagtcagctccaagctactcaagctgccatgaaactactttctagagaaaaacagccccccataggcaacataatctgggctggtttgattccaaaatttgtgtccttcttgggcagaactgattgtagtcccattcagtttgaatctgcttgggcactcgctaacattgcttctgggacatcagaataaaccaaggctgtggtagatggaggtgccatcccagcattcatttctctgttagcatctccccatgctcacatcagtgaacaagctgtatgggctctaggaaacattgcaggtgatggtttagttttccgagacttggttattaagtatggtgcagttgacccactcttggctcttcttgcagttcccgatatgtcatctttagtatgtggttacttatgtcatcttacctggacactttcaatcctctgctgctacaagaatcctgcaccccagttagatgctgttgagcaaattctttctaccttagtttggctcctgcatcatgatgatccagaagtattagcagatagctgttgggctatttcctaccttactgatggtccaaataaacgaactgacatgttcttgaaaataggagttttgccccaacttgtgaagcttctaggagcttctgaattgccaactgtgactcctgcactaagacccatagggaatattgtcactggtacagatgaagagactcaggttgtgatcgatgcaggagctcttgctgtctttcccaacctgctcatcaactccaaaactaactttcagaaggaaggtacatggacaatgtcaaacatcacagctgaccctcaggatgagatacagcaagttgtgaatcatggattagtcccgttcctcacaatgttctctctaaggcagattttaaagacacaaaaggaagctgtatggggccatgaccaactataccagtggtggaacagttgaacaggctgtatacctcattcattgtggcctaataaaaccattgatgaatctcttaacttcaaaagataccaaggttattctggttatcctggatgccatttcgaacatctttcaggctgctgagaaact

SEQ ID NO: 14110 - DNA, 1691 bp, Homo sapiens
cacctggctaacttttgtatttttagtagagacggggtttcaccatatgaccagcctggtctcaaactcctgagctcaggtgatccgtccacctcagcctcccaaagtgctgggattacaggtgtgagcaattgcacccggcctaatttttgaaattttttgtagagatggggtcttactgtgttgctcaggctggtctccaactcctgtgctcaagtgatctgcctgcctcggcctcctgaagtgctgggattacaggcgtgagccactgtgcccagcctaagatacctacttttgatagggttgagaagggtatatcctttctttaatactagccatattcaaactgttactaggcatagttaggagtcgcctgaaaatttccatgggtaaaatgattctagcaagataaatattcagttgtgcaaatggagtccgcttgtcctgttagttggtaacagttgcttttaatctggtaaattgggtaagggttgattataagctggttggcatttcaaagaggcttgtaggcatctatatcagaatcacttagaattgtttgggagtgttgcctgggattctgtatttcacatacaccatgtgattttttttttttttttttttttttttgagacggagtctcactctgttgcccacactggagtgcagtggcacgatctcagctcactgcaatctctgcctcccgggttcaagtgattctcctgcctcagcctcccaagtagttgggattacaggctcctaccaccatgcctggctaatttttgtatttttagtagagacagggtttcaccatgttggccaggctggtcttgaactcctgacctcaggtgatccgcctgcctcggcctccctgtgtgctgggattacaggcgtgagtcaccgcccctggcctccaagtgatcttaattgcatactaatgtgttaaggactttaatgtgttaactctttaagatagagttaaacacactgtttcctaagggtttgtttttacatcttctgtaaaaacaaaggtatatgttttactaaaccagcattttagttgtggaccctaagtctaccttgaaaaaaaaaatgatatgatttttaacattctaatgagtacaagatgacagtgaacaacagtaatgtaccaagtcagggaaagtaggtggtgggggtggctacaggctgggaacatggtgagttgcttggtattgttttaaaattctctacagccaatacactccccttattgtctgtatcttgcctctgccctgatcttagccatccattgcattattatgaattggtaatcaacaactctgatagaaattgacttgctattttctctaattgggctggttatatattgccctattgtccttagcgccttttcgattctcaagaaggttgcataattccagcagccttccatgtaaatggcagtagtatagagtagctgagataaagaatagtctccaggggactgactatataatataggaagttgaagcagtagggtagttcctaaatgttaataaatttcccccagtaagccctgtaaaggcagggaattggagcggggggtggggggtagggggcaggtgttctcccaagggcaaggagaaaggaccttacaaaattattgtattaaagtctgaaatgctttataggatttagagcctaagtag

SEQ ID NO: 14111 - DNA, 1284 bp, Homo sapiens
gtaattgcaagaagttcttgagctgaattcctgttgtgacaacttcctataattacagtagataactttttcttttagtcgtatataacttttctataacttgtgatggacaagagatatgcttatccaataaaataagcttaaatattagatgctcttgggtcaaaatgtccttttaccaaattgacctttttatgagttctttgggtaaatactttaaagctttttatattttaaagaatacttgtaaaagcatatcacatcttaaaccagtggtgcacatgtggatttacagctcatggactctactgttcagctttaatttataaaacatatcacacatttaatgttatacagtatttacatatagtggaacatagggataactcagttttatgtaaatttttgttaagtgttgtagcctgcccagagtgacttctattttttcttctttgtctccaggtggtgaagcagtattttccaatttgaagattcatttgaaggtggctcctgccacctgctaatagcagttcaaactaaattttttgtatcaagtccctgaatggaagtatgacgttgggtccctctgaagtttaattctgagttctcattaaaagaaatttgctttcattgttttatttcttaattgctatgcttcagaatcaatttgtgttttatgccctttcccccagtattgtagagcaagtcttgtgttaaaagcccagtgtgacagtgtcatgatgtagtagtgtcttactggttttttaataaatccttttgtataaaaatgtattggctcttttatcatcagaataggaaaaattgtcatggattcaagttattaaaagcataagtttggaagacaggcttgccgaaattgaggacatgattaaaattgcagtgaagtttgaaatgtttttagcaaaatctaatttttgccataatgtgtcctccctgtccaaattgggaatgacttaatgtcaatttgtttgttggttgttttaataatacttccttatgtagccattaagatttatatgaatattttcccaaatgcccagtttttgcttaatatgtattgtgctttttagaacaaatctggataaatgtgcaaaagtacccctttgcacagatagttaatgttttatgcttccattaaataaaaaggacttaaaatctgttaattataatagaaatgcggctagttcagagagatttttagagctgtggtggacttcatagatgaattcaagtgttgagggaggattaaagaaatatataccg

SEQ ID NO: 14112 - DNA, 2075 bp, Homo sapiens
tcactttctgcattttaaaggcttaaatactttattgctggttaactgaggttctactgtaaacgaatcatctaagttaattagtggattgtacttcaatggataattttcactaaattgtttatattgcacattacttttgtcttaaggactcttagcacatcaaaaaaattggctcacaacttaattgtgagatgtagaattttccattttatgtgctaagagttttgttaatgagagaactgttaaaatagaaaaggagcttcagcatagacaccaatgctggttgctgagatcagtggggaactgcatagcattttaacaagtttaatgaacatttggaagagaaatttgaagctaagattctggtttttttgctgttaactttttaatctaaggaaaacttttatgtacagtatttttactttgggtatatgtttatcttttagcaagttgaaagacttaatttgctgcttgctcactattttgtaattatttgggagcagcagtaataagccagctttttggaataggatgttcctgatgtgtggttatgtaggaagaatgatgttttaatatactgcccagtaaactggtgcagtttggaaaaggtgtgttattgatgtggataatatttaaggcaattttttttaagcattttaatactgctttttgtctttacaggaaaatgtttataggaggccttagctgggacactacaaagaaagatctgaaggactacttttccaaatttggtgaagttgtagactgcactctgaagttagatcctatcacagggcgatcaaggggttttggctttgtgctatttaaagaatcggagagtgtagataaggtagtgtgttacgtgttctgatcagttaataatataaaatattaacatatggatagtttgatacaatgagtttgcctatttgtggttccccattttgatagtataggaaggaagaatagttcttgccccaatacgttttatgaagatagaggtaggttcaggaattatttcctgaataatttgtgttccaggctctgctaaattttgaaattaactttaaagatactatagacttaaagatgcctagttaaaaggatgtgttttagcaattcacagaagtccatattttgaaattttgttaggcaagcaacttttaactgaatcattattttgatcctgggctaaagggaagtagcagttatgtttgtatatagtgctaaagggaagtagcagtcatgtttgtatatattgaaggtaatggttatctagtaattggttaaatttgtgtatgtcctaccattcttacctttagatttaaacagtatatgttagttgatgttacatcaccaccatgacttgacagtttaatcttgagcaagtcaacatatgcttggcattatctgtatttatagttatttttaagtaagttaatagtctctgaacttcagttaagatatatattttttaaatgaaaacttcaatttccttaggtcatggatcaaaaagaacataaattgaatgggaaggtgattgatcctaaaagggccaaagccatgaaaacaaaagagccggttaaaaaaatttttgttggtggcctttctccagatacacctgaagagaaaataagggagtactttggtggttttggtgaggtatgttataaatgttttgacccagtttatgtcaaaattagtgtgaatgtgattgtcccattatggactcagagtcacttggcttttcaaagctgttagggtagattatgtgatctgttttggaataaggatattgtaaatacttcattagcaggtctttgaaggttggataatgtgtttttctcattgagcacctactctatgcagagtattgctggggtagagtatacaaagatgaaatagacaaacattcttaaatacagacaattaagaggaagaaatctagattagaaggagacttttgttgaaaataggaaaggaattaagaatagggtgtagtgccttatcagttgaaatgcatgtgtaagtgcaaatttaatgagactaatcattatagactcattagtgag

SEQ ID NO: 14113 - DNA, 1130 bp, Homo sapiens
aacaaaatgttttctgtttgggcatcctgaggaagttgtattagctgttaatgctctgtgagtttagaaaaagtcttgatagtaaatctagtttttgacacagtgcatgaactaagtagttaaatatttacatattcagaaaggaatagtggaaaaggtatcttggttatgacaaagtcattacaaatgtgactaagtcattacaaatgtgactgagtcattacagtggaccctctgggtgcattgaaaagaatccgttttatatccaggtttcagaggacctggaataataaaaagctttggattttgcattcagtgtagttggattttgggaccttggcctcagtgttatttactgggattggcatacgtgttcacaggcagagtagttgatctcacacaacgggtgatctcacaaaactggtaagtttcttatgctcatgagccctccctttttttttttaatttggtgcctgcaactttcttaacaatgattctacttcctgggctatcacattataatgctcttggcctcttttttgctgctgttttgctattcttaaacttaggccaagtaccaatgttggctgttagaagggattctgttcattcaacatgcaactttagggaatggaagtaagttcatttttaagttgtgttgtcagtaggtgcggtgtctagggtagtgaatcctgtaagttcaaatttatgattaggtgacgagttgacattgagattgtccttttccctgatcaaaaaatgaataaagcctttttaaacaaaatccaaacttttaatcaagtcttgatatgtatgactgagaaaaaatacactacatctagagatgattgagatgttttgcaaagaattgaagggggagtgagaattggtttttcttgcaggggctttgaactctagatttgggctttgaactctagatttaattcagatttcagggtctatcagttcaccaactgatgcaaatttgaacagatactctaaggctaagtgtcctaggttggatgaactgaagctactatcaagatctcgttcccaaggattaatttagaacaaagtaattggacaagtttattggggaggggatagaaatgaattctaaagtacctata

SEQ ID NO: 14114 - DNA, 1205 bp, Homo sapiens
tcattttggtcttctgtttagtgttgtatttcaattgtggagcctcattttaagtgttcattcttttaagatttaatgcttgctttttctttttatagctaatagtgaaatctacaaaccaaaacaagaacttttaaatctgggatataaattaaagatcatatgcacagatcaatttatgttcttgtaataaacttattagaaattggtgtttgtgatagcattttacttgggttactagagatgcttctagtagaccttaatctagcatagttgaacctctgaatatgggaaggttgtattcccagattctttcctgaatagatttgaatttaatgtcatttgggaactccagggtgagtttattgactacccaaactgtattttaccaataaatatgcatatgatctttaattattgaagaaaataaagtgaggacttaaaacaattcatgaaagtggacctttaaaagcttgtcagagttgcacaaatctaactggtattttgtttttgtttttaggaggagatgttaaagtaacccatcttgcaggacgacattgaagattggtcttctgttgatctaagatgattattttgtaaaagactttctagtgtacaagacaccattgtgtccaactgtatatagctgccaattagttttctttgtttttactttgtcctttgctatctgtgttatgactcaatgtggatttgtttatacacattttatttgtatcatttcatgttaaacctcaaataaatgcttccttatgtgattgcttttctgcgtcaggtactacatagctctgtaaaaaatgtaatttaaaataagcaataattaaggcacagttgattttgtagagtattggtccatacagagaaactgtggtcctttataaatagccagccagcgtcaccctcttctccaatttgtaggtgtattttatgctcttaaggcttcatcttctccctgtaactgagatttctaccacacctttgaacaatgttctttcccttctggttatctgaagactgtcctgaaaggaagacataagtgttgtgattagtagaagctttctagtagaccatatttcttctggattgtaataaaattgttagtagctccttttactttgttcctgtctctggaaagccatttttgaattgctgattactttggctttaatcagtggtcacctagaaaa

SEQ ID NO: 14115 - DNA, 1146 bp, Homo sapiens
tttgcatttttcgtagagacagggtttcaccatgttggccaggctggtcttgaactcctgacctctgctgatctgcccgtctcagcctcccaaactgctgggattacagacgtgagccaccatgcccagccataactgcatttttataagtaatttatactagacttagctaacattgataaatctattccaaatgtgcctttagggtttttttgttcaaatgttgttcccatttattgtttttctaatttaattaataaaaattagttgtacagttagataatagttttgtaaaatcatttattgtatacaatttttcattcccattcatttaacaaatgcatatttactgagcatttagagtgattttgtttctctatgctattcattggttatgaagcttaatccatgcctctgaaaatattatttagctgctcacagcctcatatacagattgccttgggtataatcttattttattttcctcttacttacagatcttttgggaaccaggcttgaaaatgaaggagatagcctcctgcagactcaagcatgtctctgctatatttgtgcagggaatgtagagaaattagttgcatgttggactaaagctcaagatggaagccaccctttgtcacttcaggtagtatctttgaaacaaaaggcacttaatttttagtgttgtctttcaccctacttatcatcaagttataatctataagttcattttttctatacattcaagaacttcttttgctggataattatatgcatttattgctatctttgaagaagcaaagtttgagatgataggataggaaaatggggttgcagctgttgtaaaatcatggttgtgatttgtgagtttattgggggaaataggtggcaggaggattgaaaacagctctagggtttacctctttttctgtgtgctcctctgtctgcttccagtggctctgcctgccatgagcaaagaaagaagcaatgtgggtaaaggaataggaggcatccccaatgccagtagagaatctttatggttaaaggaaaatgaaagtgagaggtaaatggaatcccatgtagcagaggtccccaacccccaggccataaaccagtacccttctgtggcctcttaggaacctggactca

SEQ ID NO: 14116 - DNA, 1176 bp, Homo sapiens
gcactttaaaaaatcttagtattctttttcctggctaaagatactttctacaaaaaaatattcaatttaactatacttgttgaccacattaattcaggtgttttggttacaaagtggccataccattttctgagttttgttgtttgttttttgttggcctaggtgttatatgaacttcccaccaacacacagtggtgcttcgatattcagtggtgtccccgaaatcctgctgtcttatcagctgcttcgtttgatgggcgtatcagtgtttattctatcatgggaggtagcacagatggtttaagacagaaacaagttgacaaggtaataggaagtgttaaagttttctattataatgcctgaaaaaagtatgtgttgtgtaatattttgaaatgacttcactgattaacaatgctggttaattggacaattgtgatcaaaaatttttttggatatgactggaaaaaaatgaaactttgtgtatggtcggatgcttatgttattattatcttttttagctttcatcatcttttgggaatcttgatccctttggcacaggacagccccttcctccgttacaaattccacagcagactgctcagcatagtatagtgctgcctctgaagaagccgcccaagtggattcgaaggcctgttggtgcttctttttcagtaggtggattttgtttttatggtccataggcacaaaggactttttataccaaagtgttattatagagtcactctgatggaagcaatcagggtttaagttgggatttgagatgtacttgtgggtatttcatcattcaaaatggtttctctgaaaaattggaacctactcttttttttcccttttttaaaaatcatggtaaaatatacataaaattgatcattttgttcatttttaaatatacagttcaatggcattaagtacatttacattgttgttgtgtagccaacactttatattcctcccctcctccatttttttgtttgtttgtttgtttttttgagacagtctcactctgttgtacaggctggagtgcagtggcacaaccttggctcactgcaacctccgcctccttggttcaagcgattctcctgcctcagcctcctgggtagctgggattacaagcacgtgccaccacacctggctggtttttgtatttttagtaga

SEQ ID NO: 14117 - DNA, 1048 bp, Homo sapiens
aggactcaaaagtttgcagatacaggcattcacttgccattttcttaaggtagagttgaaagtactgctgccagttcatcatctgaaatgagggctgttttctttcctgtttaattggattgcaactatttgcctttcctaaagatgaaatagtgtgcttcctacattattctgacaacattcctttaattgttaatttcagatgaatttctgaaaactgcttttatcagaacagatttacttaaatgaaggcaatagccgcaaggggtcactgctctagatatttacttctgcataggaaataagtaatcctttatagatggaatttttttttcttagttgtatttttgtatctttacatttgtttataacttatctatactttttttgttgttgtgattattttactgttgacatggaagttctcaatctgatcatttggttatatcattgcttcttctagtaacttcatatccagtgattaaaccttttcactgctgttcacataatgaaccgttgtgattattgaatacttaaatgaggatatgtaagctgtattaaagatagtgttatttgcaaaggcattgactattgcacaaaaaattttaaaagaaaatatctcttttcaggaattgtactctcagagatgttgagaaaagatacatgggtcttggaagataattactcaaaatatgcagggaaggtagtatatctttctattttaaatgtattaagtattcctggaactatagcagtgagttggaaatggaggattgtccaagtaaaaaacatttattaaggctttaatgaaatctacctattttatggtatataatctcattaattgtccacttggaaagaataataacagatatttatttattggccagttactatgggccacaaattatgctgagctttttttaatttcatttcattttattttattttttgagatggggtctcactctgtcacccaggctggagtgcagtggcgcaatctcagcttattgcaacctctgtcttccaggcccaagcaatcttccca

SEQ ID NO: 14118 - DNA, 3220 bp, Homo sapiens
ttgaacttacagagcgtacattcatgatttaggaggattttagttaaagaaattctagtcttcgtgtagactattatcttttagttaaccacataaccttgcctaggtaataagtaacgtgttttatgttaaatttcctgaacaatattcttacaatatgtgaataaaaccaaatttaactttttaaagccctttttaggatgtgcttgtgctcactgtgtaaattgtgatgctcatcctgctggtgaattgtgaaagtgtcagtagagatttccagatgaaagaatgttatccacttttgttgttatttaacaccaccatcatctttctctttcaaaaatcatttcagattgccatttacatttgtaactaaggaagtagctgaagccacatgtaattgcctccttgcccaggcagagcaggcagacaagaagggaaaatcaaaggcagcagcggaacggatgatacttgaggaattcggacgatgtttgatgagtgtcatcaactctgcaggaaaggcaaaaagtgacccttgtgccatgaattgctaactcttgcacaaaagactgataaatggaactgtacagaaaatttaaggtgcagggacacttgattttctggaagaaaaacaattactgtattttaattcagtccttgttttaaaagacctgaaattataatactgaaggagaagaaattttaaatgaggaaattagtacattttaaatcttagttaaatctgcttatgccccttctaaattgaatttttctttattatatagattttttaatttgcttgggtttcttaagaattagatgttctctttctgatacctttgacaaaaaatgtttataaattcatataatttataatgtatggtgttgtatgactttgttaatagaaaagccaaagcagcagtggttagcacccattctttgggacttgatctagaatatctgcagacagaatgttacataaacaaattcttatgaaacacattcaaatgacattttgtatttagaaaaggactatcttttaaagaaaaagcagccttttagggccgattctggaataatatcctgttgtcactttgggaatgtcagaaggggaaacaatccccaggcacactaaaaattttttaaagttatttaaaaaaacatataaaatattaaaggacagtaaatctcagaggatgggcaatgtgtttctataataaggaaaggctaacagatgctctgggctgtctccattttctttcaaagaggtggtatgtatttgaagtaataaattgtcaaagtgattactgggtactattaaaatgataggtggatataaatggaagtaaacattatgtagtgataatatagaacctcacatagtaatcaagtataaaatttggcatgggtggagaaacaaagaatagggaagctgcaaaagatgaatttagagaagttttcatctatacaatcaattatttttacagacttttttttttttttttttgagacggagtctcgctgtgtagcccaggctggagtgcaatggtgagatctcagctcactgcaacgcctctgcctcccaggttcaagcgattctcctgcctcagcctcccgtgtagctgggactacaggtgcatgccaccatgcccggctcattttttgtatttttagtagagacggggtttcaccgtgttagccaggatggtctcgatctcctgacctcgtgattcgcccgcctcggcctcccaaagtgctgggattacaggcataagccgccgtgccaggccctttttatagacttttgaactaagaggtttcaaaccaaatcgcaactcttacttgatttacagaaatgggcctcctaacaaaattttcaaaattgtggtgggatttctttttataagggaagtttaatatggcattattttcagccagtgatttggaaggtctgttttcctataattactaaaataacctaaatcattttcagtattcaaaaactctatgaatttaagagcctgttgtgacaggactcttgattttatgacaagaaaaaaccatgttggaattcaggcattttgttaggtaccttaatcatcagtaattagtatatgattatttcatttcctacaaggactctatagttgtatgtattaagtgtgtatatatgttcatatgaacatgcaagatataggcaatagaaattaagtaatccaaaagaggattccgttattcactaaagtatcttccttttaaatttggatttataaaatcatagtgcagtaactttaaatgtagatagttcaaacattcttagcacctcaatctagtatgtttaattaaaatttgtataaatgtaaattagtgtaagagggtaaaataataatcaagttatttttcaaaagattgcaataagtttttggtctaaacttaaactttgttcattttgtacatactctgtgttaattctaattgcacctttgtgatgtgtatttatatacagtgtgcagaaaatgttcgtgaaattttgattacaattgtagattatgtatgatggcattgcttacgaatgttttgcttgtaaaaaaatttcaaggtgcaatcaaatgctactagtttttctgattttcaaaaatctatctatctaaaatattaagccttttccttcctgtgtagtacttactaaataactttttgtattcaggcatttgcatcaaattgctgaacaagatgaatagccacattaattcaatgattttaaaagactatttggggagggttgggtatataattttttagctctatttacatcccaaagtagaaagattaaatttatatttactagagctattcaaagaatacacttttctatattgtaaaaacaggacagcaaagtaaatcatacagaaaataaacatttatactattctgtaaaaaaggttttgcattttttctttagtataataacaccactttattaaccatttaatatgcaaaaaaccttttaaattatctgaagtaaatttgacattacttctgaaaacacacaactaaaaaattctatcattttgctcagttattactaacataaattgctttgaaatgagaatatgtcttctctttttttccccactgtttcttttaagagcagaaactcagccgggcatggtggctcacgcctgtaattccagcactttgggaggtcaaggcgggtgaatca

SEQ ID NO: 14119 - DNA, 1154 bp, Homo sapiens
taggacgtagctcattggagatttgaatgtattttacaatatgttaatatttaaatctttatttccttgtgtgaatcagcagttttcaagtctgtcaatgagaggaaaaaaatctgggtagaaataagatcagatacatcaaagattacaaattttattagagggcgttggaaaggagtttcatgtgattatgtgacttagtgttgcctgagtgcaagatacttgtggattgagacgagagtaagaatgtttgcttctagttttgtgttcccatatgacttatattatagattcttgcaggttgaggatgtgttaacatgatttaacccagataagcttcaggaatattcttcattcaattatatatcaatttaaaaattgtcattttgccatttgcattttttttgaatttttttcttacatcttttgaaacctagtaacttgttcatttttcaacttttattacagtgcctgatcaactttctagcgggagaacgatcatggaggtggtgccagctgaggtgaatagtttgcttccagaggaaataatggacactggtataactttagtggatgatgatagtattgaggctgttattgtttcatccccaattcccatggagacagaactggaagaaattgtcaacataaattctactggtgactctacagccacgcccatttccacggaaccaatcacagtgtacagtaaccacactaaccaagttgcagtgaataccacaattactaaagcagattctaataccacagtgaaaccagcttttccaagtggccttcaaaaacttggtgctcagactcctgtgactatatcagccaatcagattattttaaacaaagtatcacagacatctgatcttaaacttggcaatcagacccttaaaccagatggacagaagttaattttaacaactttgggcaagtctggttcaccaattgttttagcactaccccatagccaactaccccaggctcagaaagttacaactcaggcccagtcaggagatgctaagttaccaccgcagcaaattaaagtagttaccattggagggaggccagaggtgaaacctgtcattggtgtctcagcattgaccccaggaagtcaactgattaatactacaactcagccctctgtg

SEQ ID NO: 14120 - DNA, 1407 bp, Homo sapiens
atagagtctcactctctcacccaggctaggagggtgcagtagggtgatcatggcttattgcagccttgacctcttggcctcaagcaatcctcccacctcagcctcttgagtagctgggactacaggcatgtgccttcgtgcctagctaatttttcattttttatatttgtattttttgtatttgctgttttctcctccgtgttaacatgtttatttgttatgacccaaagtccagactaggtattaatacaactttgtattcctctcttgcagatttacactctagacatccacagacctgaggattgttggaataaatttatctccaaccgaacactgggactaatagtttttttagggattgtccttgggaatttgtggaaagaaaagaagacagacaaaacaaagaagggtatagagaataaaatagaaaattaatgaatgaaatttatctaggaatttttaaaacattttttacaaaatataattagatttgaatacaaaatctgatacaatatgttaaagaattaagaacctgaagatgaagatttagagcatatttacctggattttacttatttgctagcaaaattcccccttgtcacagaaaccagggactcttcaggatttgagatggccttgagtattttagttgatacattcttctgcccattataattctcacctgaagttatggggattgcacgggttttggcactttagaaaaagcctgatgtgggtcttacataaatgaatgtctgtataagaaaatggactcttttttttagggaaaaataaaagcaactatgggaagttgggccttactgttctttattgtgacctttagtcactgccaaaaactgtaatttaggaaaccaattctgtttttttatgttttaggagaatttaaataaccaaatagaagtatttagctattatagccacatgtaccactgtttaccaaccctgacttttatttgggagatttggtctctgtgtgcagtcacagtgaccagaacagacaagtgggcagtcaccagagactaccttgattttctgtctatatcttttttatcttatcccattatagtttataggatagtgatatttaaatgtttactgttttttcctttacctgccctcaccttcacaatgttctcaacacagtaaccagagtaattctcttaaaacctgagtaaggtcatgtcattcctctccccagaaccctccaggatctccctaggtcactcagtacaaaacgaaagtcctaccacctgccaggccctccatgacttggcttcatgtctgacttctcacactcacacctgtagccccactggcctcactcttccttaaacaggctgggcagactcctaccccagggcctttgcatttactgttcacttt

SEQ ID NO: 14121 - DNA, 1207 bp, Homo sapiens
gtaatcccagcactttgggaggctgaggtgggcagatcacctgaggccaggagttcaggaccagcctggccaatatggtgaaaccccgtttctactacaaatacaaaaaaattatccgggtgtggcggtgcatgcctgtaattccagttactaaggaggctgaggcaagataatcgattgagcctgggtggcggaggttgcagtgaggcgagagagcaccactgtactccagcctgggtgacacagggagactccatctcaaaaaaaaaaattgcaaactttaaatattgacattttttatgaataagaaagctttttattttacaggtctttgtgggaagaaacagaaagaaatcacaaaagcaattaagagagctcaaataatgggtaagaaagaatacctcaacaactgaattgagctagctgaaattttgctcattatgttttgtcaagaactttaattatctctttacagggtttatgccagttacatacaaggatcctgcatatctcaaggaccctaaagtttgtaacatcagatatcgggaataaattctatcacgttaccactaataaacttattttacagtaagtggttgtatgatgccaatactgactcaaaccaacctttggatagaaaagtgtttgaggagtgaggtaaagaatgacacttccccttcataccaatgtccattaagcagattgcttatttaaaatgttaacactcatcacattttatctatgttgaataaaagtggttctgtgtgattgtcatttatatctgatccccaaatagctcatacaataatccattcaatagaatggaattaaaactgttcagaatgattttccaactagcaaatataagtatgcctggttaagatatcttccctttgtagaaatgttacattgggatggatagtggtgctgtcacagaaggacaaaatattcctagacgagtctaccctcaaaccagtagtgtcttttacatgaagagatgatttacacctaatagacattgaatatgatagacatacatgtatatatgtatcagttctgagttccactggcctatcccaaatacactggattaccaggcttgtactgtattcaaaatgatagatttgctaaatttcatgcaaaggactctaaactaggggagagattactgtttgtgttgtgttatagttgtgtaataattaaggct

SEQ ID NO: 14122 - DNA, 1173 bp, Homo sapiens
ttcaattgacttacattgctcttgtgttttgtgtttgtgcattctttctccctctctgctgtaacccttgacactaacattgcacattaaagtgagctattatcaagagctattttaattctgtaaagattcctactctacacttaaaggaatggtttgttttaaattggaggtatgtgcttcacttatccctattaaaataacacgaacttgtcttctttgccttttatcattaggggcccaaatcccagcaaagtgctacagcagttgttggtgcttcaacctgaacagcagttaaatatatataaaaccctgaagactcatctcattgagaaaggaatcctacaacccaccttgaaggtataactggatccagagagggaaggactgacaagaaggaattattcagaaaaacactgacagatgttttataaattgtacagaaaaatagttaaaaatgcaataggttgaagttttggagatatgtttctctctgaaattactgtgaatatttaacaaacacttacttgatctatgttatgaaataagtagcaaattgccagcaaaatgtcttgtaccttttctaaagtgtattttctgatgtgaacttccttccccttacttgctaggtttcataatttaaaagactggtatttaaaagagtcaaacactataaaatgagtaagttgacgatgttttaagattgcacctggcagtgtgcctttttgcacaaatatttacttttgcacttggagctgcttttaattttagcaaaatgttttatgcaaggcacaataggaagtcagttctcctgcacttcctcctcatgtagtctggagtactttctaaagggcttagttggatttaaaaaaaaaaaaaaaagattgtctacttttcaaagaagtaaccatttgccaggggaaaacattctgcttttaggtagtttcaaaattcaggggagggagcctgaaatttttgccatgattggtttgttagaaagagcaggcatcagactacttctgataaaattgtttggaaggtcacgacctcgcaaaaacttttcaagagcaacaaggaagaattctgctgtgaagaacacagtgtacggatcctccgcatattatctcaacagaggacagtagctcaggaggcagcttcaaacggtgacctgtg

SEQ ID NO: 14123 - DNA, 1152 bp, Homo sapiens
tgggttccactgatgcagtcagccagcacctcctcacatgcacacatgattagacataggtgcactcggtaccaagagtccattttatggtccagcatatactccattgattcatcatcactgcatgtgttcagccagtgtatctcacactatccatacaaatctaaaattgatactggaaatgttattataggaggcagtgatcgcatttaaaatcaggccacctacaagtttaattttcaacatctcatgtttttatttgtcccattacagcctcaaatgttggtcataaaaaaaatttaggctaccaaagtttaaagaataaaatgaaaattttataagaacttacattaaaaactcagtagtttgcatgagtaagaactccttgagatacacagatccccccacatttgtatttaaaataattggtgaggcattgaaatccagaattataagaaagcattactgaatatgtgtgttataaaatcaatattattataaacaaaataggaagctagaaatatttgggatcacagtaatagcttttctcaaatatacttttagaattgaatgtacattatcctatatgtaaaaaagcaaattattaattttaatggagctctcgattgacctttttagcatacttttatagcatgtatattaaaatagaatatattttagcaaaagattgccataaaaccctgacttggctcattttgatatttgcactgtgaagagggcttaaattccaatgtagcaatgtggtggcagacaaatgaaaaactaggaagttctttcacagtaatgcctagttgttccaaatttgctatatttggaggtgctctactggtacttcctgcttgactctctgacctgtgggatgcacattcttcctcagcgctttttccttgttgtggtgacgtacattcactatctgagagtgaaagaccacacacacccctctttttaaaattattgtatctcttccttttcactttggtttgaacaaagatagtgtcaccttgttccgtgaaaaagaaaaagcataaacagtgtatatttagggtatatgggtgatagcttatgatgtgtgtcaatcagttctctgaatcttttactgaaactgagacaggaaaataaaactgaaacaaa

SEQ ID NO: 14124 - DNA, 1119 bp, Homo sapiens
attttaatatttagttatttaatttgttctactagttggatacagaacacacaaatccagggggattaaagctggaaggggctaagagattagtttacagagaaaaggcttggtggtgggatttttttaaatgtgtgttatgtacatatatatatatatataatatatattaaaaatgaaacaattaatctagattttaacattttcagaaacttagtgataacattatgaacaattctaaaagccctgtgatttgaaaaatatagaatcattaatggcccaagataggccttcacaccttcacaggtgcgaaaggaaaggccttcacaccctcacagaggcatcatgcaaaggacagcggctttggcttttccaattttccatctttaggccctggtgagaggcacacttatgcactaaaatgcacatatatgcacatgcattcaaaaataggcatttggtacaatggtgatcttgtacctgatgggctgaaaccagcttaagaacaaatttgttcttcctgatatgataactaggtctccaagagaaaatagaaaggctgctttagtgccttacgcttactaaatttaaatctttatttacctgggtttgagcctacagtctatttatgattacatatcaaaattgattaaaacacttccatttctaaaagttcaaatatacttgttaataaaaggattatcggcattaatactttaatttaaagaaaagttgtgttctgttttcctttctgtgtcttactccccccacactctccctcccccatcaccatcttcaattctaataaataatgctgatgttcaacagttgcagaaattgtgctattatgtaactgtgggccttgcccctgtctggccctctagatgatttgtagcagtgttattctacactttttaaaagaagcgtcctccttttgtccatgaatcatgtttaccccatacccagtggcagaggtgttctttaaagacttgaatatatgaatgtgtgtgtgtagttacttaaaggttattcctctttgtaataggaaactatatgggatgaacacttttaaactttccgacacaacttccattactaactttctaacagaacttccat

SEQ ID NO: 14125 - DNA, 1077 bp, Homo sapiens
acagctttccttttagtccttgttcagccacacaacacaaaccagtatggcctttggcattttactgcaagctttccattcgattattaatgtttccggtgcccatgatcaagcatggagaagacctataattaattgacttttcctttcctttaggtgcagtcgctttcaatctgaaatcaaacgcttgaaaatctcatccccggtgcgtgtttgtcagaactgttattataacttacagcatgagagaggttcagaagatgggcctcgaaattgttgaagattcaacaagctgagtggagaccatggtctgtagaccccttcccgattctcctgtcccagcttggaaggcattgaaaacagtctccgtttacacatctcttcataccacgtgtttgaagtgttaaaattcaaagggatcattgaataaaacgggtgtagagtacaggaatggggcagacgcgattcaggtgaacagcacaagaagaatatgaggtggttcctaggagcaacactttcgacctccagttctccctgatgacagtagctgtctccaagagaaaaatcctcacttattaactctcttttcttgcatctcatttttatagagctactcatccttatttggaaaaaccaacaacaaaaaaggcttttagaaaatggttgtaaatctgacttctttgcaagtaactatgtatattgtaaatagatataaaaggccttttttctaaataaggacttaactgcctgtaacatgaaacttcaaactaaaccactaactcaatgaactacttatggtttgtctgacatccctcacttaccaattaattataaatatgtttttttaaatccccaaagacattatctgtggtctttttttcctttcaagctcagcctgtgtgcctgatgtcatttctttcaagttgcccacagtatctccacttaaactaggctagtaaccaaaataatgtggaccttctttaggaaacagtgtgggagaataggagtccagccgtaagataaactggaaatatttgggcgtcttgtacctggctacgcaccacctcagtgttgttc

SEQ ID NO: 14126 - DNA, 1535 bp, Homo sapiens
tagctgggactagaggcgcctgccaccacgcccagctaatttttttctgttttttagtagagacggggtttcaccatgttagccaggatggtcttgatctcctgacctcgtgatccgcctgcctcggcctcccaaagtgctgggattacaggcgtgagccaccgtggctggccaggatctgcatttagaataatccttagatatggttatagacagactcaggtcatgtggatgcataattttgtataatgcatttctcttgtttaaacacagcctaaaatttgggtaattatctttgttatccatctttccctgtagctatccaaatcaacattttagttttcttctaatataaaaattacatccttactataattttataaaattataattataaaattataattactttttttattctgttactaaagactttagaaataaattgagcagaataagaaatatctatttattgtgtagcttaatctgcagggaattcatgactctaaaagtgttagcaaattaacttcttttttttttttttttttttttctgagacagagtctcgctctgttgcccaggctggagtgcagtggcgcgatcttggctcactgcaagccctgcctcctgggatcatgccattctcctgcctcagcctcccgagtagctgggactacaggtacccgccaccaaggccggctaattttttgtattttttagtagagacggggtttcactgtgttagccaggatggtctcgatctcctgaccttgtgatccacccgccttggcctcccaaagtgctgggattacaggcatgagccaccgcgcccggccgcagattaacttcttgaacattgtagaaatttatagtggaaaagttaatatataattttatttgtgaacttctgttttttcttaatgtttttctctctgatcatttcagcctattgctgtggaagttttctctggagatggacggaattacctccttgcttttcagaaaggaatcagaaacaaagtctatcaaaggtcttgtttattcggaacactttgtatactattatgggaagatatgggagggggaatcttttctcagttttgctggtttttaaaaatctagatcaatgagccaacatctttgaagaaaataatttatattatttttgccaccctcttgaaacaattattcttctgacttttaaaatggtgcaattctattgtgacataccatttttccttctggtaacttatagtagagatcatcaaaaactacttttatcactaagtcctgtgtctctaaatacaaaggatgatgaaactgtagctttaaaaataaaactttagtttctttttttcttcttctttttttttttttttgagacggagtctcgttctgtcgcccaggctagagtacagtggcatgatctcagctcactgcaaactccgcctcccgggttcacgccattctcctgcctcagcctcccgagtagctggaactgcaggcacccgccaccatccccggcttattttttg

SEQ ID NO: 14127 - DNA, 1129 bp, Homo sapiens
gccgggtgcggtggctcacgcctgtaatcctaacacttgggaggctgaggcaggtggatcacctgaggtcaggagtttgagaccagcctagccaacatggtgaaaccctgtctctactaaaaatacaaaagttaactgggcgtggtggtgggcgcctgttatcccagttacttgggaggctgtggcaggagaatcacttgaacctgcaaggcagaggttgcaatgaggcgagatcacaccattgcactccagcctggacaacaagagcgaaactccgtctcaaaaaaaaaaaaaattaaaaaggtatgcttcatgtgaaaagaattgtcatctttctcactaagaatgacctgactgtgtggatttctttgttgattttagcatgctttggatcttcaacttgccgtggcaaatattttacaatccctggtgcacacagaaaggaaccagcaagtcatgtgtgaagctggtcttcatgcacgactgctgcagaggtgcagtgctgcattggctgatgaggaccactcactgcacccgcccctgcagcggatgtttgaacgattagcctctcaggctctggaacccatggtgttgaggtaagttctctttcatactcaaatagtccacaattagtaatgtcagtttctagagtccttatgattccagaattcctgccttaatggacatatattcagttatctatgggcaaaatataacaaaaatggacaaaatactcaaaatatggcacttagaaacaaataaatctagttattagtaatcatttagtgtttctgtccatcagttatttctttcatttgaatctagcaagctctcactttcctttaaaaatgaagtcatgcgtttactttatatttaataacttttcatatgtaagaagtttttaaagaaatactttttaaccttttaattttgaaataatagattcaccataagttgtgaatatagatccaagagttttcctgtgctctttgcccattttcctccagtagttacaccttacataactatactacagtatccaaaccaagaaattgatattggtatgatgtattcatgtgcacatacaattatctgttattgtatcatgtgtagattcatgtaatcacca

SEQ ID NO: 14128 - DNA, 1191 bp, Homo sapiens
ctttgaagctagtactatattagtttatgtttgcctgaaaattttgtggtgatagactttagatcaaattaaattctgtttcaggaataatattcaatcttaaatgcctttttaaaattgtggaatatacactacctaaaaatgaccattttaacaatatttaagtgtacaattcagcagcattatatatgttcaggatgttgggtaaccatcaccactatctatttccggaagtttttcatcatctgaaacagaagctctgtacccattaggtaataattcccattcttctctctcctggctcctagccacctctattctgttttctgtctctatgaatttgcctgttctagatattttatattaagtatgatcatacaatattggtcattttgagtctggcttttttcacttagtataatcttttcaaggttcatgtatgttgttgcgtgtatcagaatttcatttctattatggaagaataatctattgtatgtgtataccacattctatttattttttcatctgtttacacacacctgagtcattaacacctttcactattgtgaaaattgctgataagaacattggcatacaaaattctgtttgagtcactgttttcaactcttttgaaaacagaattgctgggttgtatggtaactctttgtttaactttttgaggaaccactaaacttgctttccacagtggctgcaccattttgcatttttctagcaatacatgagggttccaatttctctacatacttactagcacttgttattttccatttttttggaaagtagccatcataataggtgttaaatggtgtctcattgtggttttgatgtgcattttcctaatgactaaattatattgagcatttttacacatgcttactgacaagatacagttgacccttgagcaactcagggcttagggatgccagtgcccctccagtcgaaaatttatgtataacttttgactctcccaaaatgtaactactaataacctatttttttttgttttgttttgttttgtcttgttttgtttttgagacggagtctcacactgttgcccgggctgaagtgcaatggcgctatctcggaccactgcaacctccaagttcaagcgattctcctgcctcagcttcttgagtagctgggattataggcacctgccaccacgcccag

SEQ ID NO: 14129 - DNA, 1180 bp, Homo sapiens
aaccaactcagaagacatagataggccagggagatatagctaatcatctagctaagtctggaattcaggtttctgtggcatttcaatgtacacagtttaatttcaaaatttagtttttatacatatgtgcatatacatttaaacttaatcctctgacaatgtaactgacttactctaaattggaggcaaggaaagcatgaagtaaaaatatgtaaaatgtcagggtcaaaatgggaactttaaattgtggtcttaattgtgacctgtgtaaaacttgattcctgagaattatactatattacatattgtagttagaatgtactgaaatcattttgtagcatttgttcttggctgagtttatattaaaatgaaagattgtaaatctagattgattttataatattttagatttctgatactttaagatgtctgtagattacatttatattaaaaaatgggttgaggaaatcattggtactctaacttgctgttgccagttttctggccgcctgctatttttgcttctgctcccttatctcaacaattgcctgtttttggtcaagactggtaaaaccaagtaatgggcatccaaatacatataaaatacacatgaaacaatatgaaaatggcaaataagtcaggaggaaaatgggtaaaatatatgaataggcatttcatacgagagaaaatatgagatagccaagaaacatgaagaaatactcagcatcattaattgacaaggaagtgcgaactaagaccacaattagatgccattctatacccagcattaaaaagttggcattactacacgttggagaggctgtagatgtggtagttctgctactaccttttggtagtgaagttataaattgccaaacacactttagggaaagtaaaaattggcatcatcatgaaaagttaaatttaagattactccctaactcttaggcatgtacttaagagaaactcggacacatgtggaacatgacacatgtcagaactttcataacataaatgttcataatagcaaaacaaaacttggaggggaaaataagctattgacaagagaacggataattaaattgtgatatatttgtacaatgcagtattattctgcagtgaaaatgaatgaactacaactatatgcaacaacgttgggtgagttttagaaacgtaatat

SEQ ID NO: 14130 - DNA, 1210 bp, Homo sapiens
ttacttaatagatgtttttattttaaaactatggttcaaagctctttaagaatctaccttttttacagaaagaaagagatctcttttttcagcattttattgataattgaaacaataacatctttagacgtgtaagaatgcattaaagaaacaaaatgataaataagactactggcaagatttaaaataacaataatatatataatataagtatgtaccaactggaaaaattatatttatggtattacaaaaaaattaaattacatattcattaatgcattcaataactctgataaagtactggactatatactaggtagtgagagtctaccaatgaaaagacacagtccttatcctcagggagctcacacgctagttggagttagatttaccatgaaacaattgcagtatataatacatgtcacaataaagatttcatgggattttcaaagaaagggtccggacccccattgaagagaaggctttgcagaagaggtgatgatagatctaaaactttaagaataagcaaacatttacctactaaataattaggggaagaagcctcagagcagaagtcacagatttgggaaagagtatgaaatattgggaaatcaagaatagtgtgctaaatagacagaaaagtactcttagggagagtggtggccataattctggacagtgggatggggctgagagggaggggctttatgcaacatggcagagttttgatttaatactggagaaaacgttcaagcaaggtattgaggaaaaccaactgtcaagtcaaaatgatctttctggtggcagaaagaatgaattggacagtttgggagagtgtaaattagtttcctattgctgctgtaacaaactatcacaaactatgtggcttaaaaaaaacacaaacgtattttctttcagttctgcaggtcagagccctaaaatcaaagtggggtcaggattatgttctgtctggaagctctagggcagaattgaagctggctccttccagcttctagatgccagcattccttgacttgtggccccttctgctatcctcaaagccagcagcgtaacatcttccaatcactcccgatgtctctgaccttcatgcttgcttcttatgaggacccacatgaataatccagaataaggattaagagtcttaatcacatctgcaaattccctttttccattcacaggttccagagat

SEQ ID NO: 14131 - DNA, 1318 bp, Homo sapiens
tgagttatacctttagaagttaaagtagttcactatacattccattactgccccaaatcatttcttggatagtgaatattcttccaaactggatagttgtctgcttttttaaaaccaaataattcacatttgatgaatataaaataataccactcaaaaatgtcagttcagtatattgcttttattagataagagacgatgaactatgaaaagttatgcaaacatagtatctctttcctcttccactatgaccatcatcaccatcccatttcacctctgatcttccatttggagcatttaggaaattgccaccactttcattgtcaatagtggattacatttccatttattttctaaaaattgtgtgcatacatgatagattcttatcattccaggaagaagctctacttctgatgtactagacatacaaaagcctccactctctcatcagacctttcttaacaaagggcttagtaaatctatgggatttctgtccatcaaagatacacaagatgagaattatttcaaggacattttatcagataattctggacgtgaagattctgaaaatacattctccccttaccagttcaaaactagtggcccagaaaaaaaacccatccctggcattgatgtgctttctaagaagaagatctgggcttcatccatggacttgctttgtacagctgacagagacttctcttcaggagagactgccacatatcgtcgttgtcaccctgaggcagtaacagtgcggacttcaactactcctagaaaaaaggaggcaagatactcagatggaagtatagccttggatatctttggccctcagaaaatggatccaatatatcacactcgagaattgcccacctcctcagcaatatcaagtgctttggaccgaatccgagagagacaaaagaaacttcaggttctgagggaagccatgaatgtagaaggttagtaattctgtgcatgtttgagaaagaattgaagtattttaaatatttttttgaaataaagaagggttattaaattattccacaagtcttattttcactgccaaatttttgtaccctggttagtctcttacttctctgtcaatttctgttctcccttccatcaaaaccctaattgaaatactctgcttccacaaagtcatccctaataaaaatgcccagtcacgttatagtctctcgatatttgggatagtatatttttagattgtaagcttctcaaaggcaggaggcatattttctacttctttttgcttaaattctccaccataccgtctaccatgcactatctcatgggaggcttc

SEQ ID NO: 14132 - DNA, 1141 bp, Homo sapiens
aatgctagtcttctacagttagtaatatgtatccatggtagtcttctcaacaggggaattgagttaaaatggcacattaaattctacatgtcgtacattaagttcggagttttttccttaatagtattatataacgtggtttgttaaatggtagttttccttagttttttttcattctcaaattctccttttttttcagacagcaaaaggtgatgagctgtctagtcgaatacagaacatgttgggaaactacgaagaagtgaaggagttccttagtactaagtctcacactcatcgcctggatgcttctgaaaataggttgggaaagccgaaatatcctttaattcctgacaaagggagcagcattccatccagctccttccacactagtgtccaccaccagtccattcacactcctgcgtctggaccactttctgttggcaacattagccacaatccaaagatggcgcagccaagaactgaaccaatgccaagtctccatgccaaaagctgcggcccaccggacagccagcacctgacccaggatcgccttggtcaggaggggttcggctctagtcatcacaagaaaggtgaccgaagagctgacggagaccactgtgcttcggtgacagattcggctccagagagggagctttctcccttaatctctttgccttccccagttccccctttgtcacctatacattccaaccagcaaactcttccccggacgcaaggaagcagcaaggttcatggcagcagcaataacagtaaaggctattgcccagccaaatctcccaaggacctagcagtgaaagtccatgataaagagacccctcaagacagtttggtggcccctgcccagccgccttctcagacatttccacctccctccctcccctcaaaaagtgttgcaatgcagcagaagcccacggcttatgtccggcccatggatggtcaagatcaggcccctagtgaatcccctgaactgaaaccactgccggaggactatcgacagcagacctttgaaaaaacagacttgaaagtgcctgccaaagccaagctcaccaaactgaagatgccttctcagtcagttgaggtgtgtggaatttcttatcttggggaattccaattcgaagac

SEQ ID NO: 14133 - DNA, 1076 bp, Homo sapiens
cttgattgtctaggggaagttaactccctgagaggatgtagagatttggggtggttgattagacttttgaaaaactcatcaccacatgccttcactccagagtgttctcagctagatttgatttggttgaggaggaactgtggccctccgtaagttattgccatagtgtatgcattaaaccaagtccattttgaatgacctaaaatgaagtaacacaatcagaaatcccatgtgcccataagcacagatttttctttttcattgaaactttaaaggttattattggaaacattactttgagtgcagtgtttttaaaagccaattcttttttatcccttttagaagtagaatttgcacacttactacaattgaggagtgtcatctctataactttttctccgcctttgtcccattctgcccctgtacatgtttcctaccaagcatgtttcacattttcctattagtggaggagggagaaccatatttatttataatgaagacatctaagatccctatgatgaatgcaggaactctcttggtagtttgtaaatacacaaagggatgtgtcgagggatgggagcgatgcttatctctcacagtgtgagtggtctgtgtgaggctgttccttcagtttcttctccagactgttctttggttgtcactaagtcagaggtctggtccctcatgtttaggtgaaagccagagaatgacagctgtagtcatatctgagcataagaccttgatgtgtgattcctgatgaccggtttcatttattcatgttataaagcaaagccctggtcctttttaaactactagttttaaaaacctgtgttaaatgaacagtaattgcctggtaggtttggtgtgtgtgtagcattgtgtgtccatctgttatatgtaaaggacaaggcaccagaatcaggctttatttcgatattgaagatgttatttaacatctttcttttttccttactcccttagccatcccctccccttttgtcctatcattccctagaacaagccacctgtcaattgtgaagggttgtgttctttatggcaggttctatgcagattgt

SEQ ID NO: 14134 - DNA, 2110 bp, Homo sapiens
gtaaatcttgcctttggcactacaaggtgtgtgtgtgtgtgtgtgtgtgtgtgtgtgtctttagtaggaaatggaagaacactgttttattttttaaagtgtttaatgtttctgtcctttctgtgaattattgaatttaagagccctgctaaataatgaaaaaacactttactaaaatttatcaaattatactgggttcggattgtgaaaacattggccacctagtagcagtggtgaggagtgggagggcccagcaagcatttatcagaaatagaatcacaataggaggagaatttgactgtctgatattatgatttgattacaatactgaatgggaaaagtatctaatattttgtaacaaaaagaccttcatattatctgttttgaccaaaatatgtagctatttcccttacacagattggaccgcacttatctcccttgtcctgtatcctttaatttcaggtctcaggatgtttagaaagctaaaaccccctacccctttctggctgaaaacttgccttatttggtatcttacacattaatgttactagcatcaggagcttactgttttattatgattcatcttcagtaatttttagaagcaagaagaaagccattgtgtcctctacaattaacaaaacttatctctgatatacaaagggatataaatatatacacttaaatagagaaaaagaggttgattgaattgtgcctttgagtgaacccagtttttaaataccgctgtgtttgtttcgccatggcttcagggatgctacatggctcttgcaccttttactcctctgctttatgaagtttgagttgtatttgtgcatcttaaagtaggttgaggcttgaggctgggctttcgggtttttttgttttttgttttgttttgttttgttttgttttcttgtacttaaacctgcttgcttcctaccacagattctttattttcccaaacactacaaaaaaacttttaaaactttgccatttcatctgtttacactctttgccactgattagcagtatttaaatcttgcaagaatattttgtgctttctttagaaacacaagagtatagatttttctcactgaaaagtgagagttacgcattgcagccatgaagggatgctaggatcaattatggcagtaccttttttcccctcctgttcttgagccagttgtctcttttgttttgggtcccacttaggattaatggatgtaaggtattttcctgtgcctttattttgtgtcattctattggaaggaggtgtaacggcagaatagcatcgtgttgggggttttccttcaaacactgcaagtgatattgccaccatgtgaacctcaaatatgcaatccagttgtgttggtttctcggtgacttggagtgttcatctcttcatgaattgtgagcactgaccatgttcttcagttcttaattatggtgagttgacaaataccaactactgcttttctttaggtggctataaatttcttactgtcaggaggaaatgacattatattctgttccactgaacgtcagagatcagcaggcactgtactgggtagagaagtgcctatacttctctacctaagagggcaggagggaaaccctacagctccttgtgagcctatatattagtatatcggcctggagaggacaagggaataagaccactcatagtgaggctggccaagctgcactggtcggaccaggcagtggctgacctaaggaagacaacttgctttgcttaaaagtagattttttaagcaatgcttaacacaggcagcattcacctttgttcaggccatcgacatgtattgttaaaattactgcatatccccctcagatatcaagtatacactgttcatgttggggttgtgtgtgtgtatgtgtgtatgtacgcacgcatgtgtcccaaatcttgttttaattttttttttctgaatgtgatcatgttttggatgatacctgagcagggttgccttttttttatttattaccattatatattatattatattatattatatattttttgctttcttataactttggaggaaagtcaaatcttggtattattaaaattgttttaaaaaggagtaaattt

SEQ ID NO: 14135 - DNA, 1176 bp, Homo sapiens
tggaaagtatgtttttgggtctttgaattaggttctttttttttttgctttttttttgagatggagttttcactcctgttgcccaggttggagtgcaatggcgcgatgtctcactgcaacctctgccttctgggttcaagtgattctcttgcctcagcctcccaagtagctgggattacaggcatatgccactaattttgtatttttagtagagacggcatttcaccatgttggtcaggctggtcttgaacccctaacctcaggtgatccacctacctcggcctcacaaagtgctgggattacaggcgtaagccactgcacccggcctaggttctttaattaatatatttttggtatttatgtaaaatgtttttctttttctcccccagaaactcgttttcatcttcttggtttcatcttaataccaacgtcatgtctggttctaatggttccaaagaaaattctcacaataaggctcggacgtctccttacccaggttcaaaagttgaacgaagccaggttcctaatgagaaagtgggctggcttgttgagtggcaagactataagcctgtggaatacactgcagtctctgtcttggctggacccaggtgggcagatcctcagatcaggtgagcaaataagacagcgttagctgggaataagacttttagagaaggtaatggttttatttgtaaagtatctttttgacacctgaaaataatttcaatctatgcttagctgtgttataactcagtttccacatttgcttgaattcttgccaaagataaacagttcatatttgtttattcttttgggggttttatgaggatacttccaaatagttaaatctgttttgatttgaaataacaaatagcatcagctatgtgttatgaaataacagctggtactgttatatttgttttgaaataacagctgatggtatttgttttcatgtgttctatttgggttatcaatagaatatcctttgtggttattttccaacatagctagacttgtgaaaatatttttcggaaaattctccaggttactaagaacaggatgatgataaaccagtgtgaaaaaatagaaaagggttggataaaggggagtgagagggggagaatgagagagaaggggctctcactaaattcatagaagtgccgcattgattaacat

SEQ ID NO: 14136 - DNA, 3168 bp, Homo sapiens
gcccaaagtaatttatagatttgatgctattcccatcaaactaccactgacattcttcacagaattagaaaagaattactttaaatttcatttggaatcaaagaaggtcatgtatagccaagacaatcctaaccaaaaagaacaaagctggagacatcatgctacctgacttcaaactatactacaataatgcagtaaccaaaacagtgtggtactggcaccaaaacagacaaagaccaatagaatggagcagagacatcagaaataatgccacacatctacaaccatctgatcttcaacaaacctgacaaaaacaagcaacagggaaaagatctcctattcaataaatgatgctgggaaaactggctaggcatatgcagaaaactgaaactggaccccttccttacaccttatacaaaaattaactcaagatggattaaagatgctctcaagtcactccagcacagcgttggtgctgcctgggtatcagaaagcaagctcacattgctctccagtacgtgtaagccttttcttttcaagatgcctgaggaagtgcaccatggagaggaggaggtggagacttttgcctttcaggcagaaattgcccaactcatatccctcatcatcaataccttctattccaacgaggagattttccttcaggagttgatctctaatgcttctgatgccttggacaagattcgctatgagagcctgacagacccttcaaagttggacagtggtaaagagctgaaaattgacatcatccccaaccctcaggaacgtaccctggctttggtagacacaggcattggcatgaccaaagctgatctcataaataatttgagaaccattgccaagtctggtactaaagcatgcatggaggctcttcaggctggtgcagacatctccatgattgggcagtttggtgttggcttttttctgcctacctggtggcagagaaactggttgtgatcacaaagcacaacgatgatgaacagtatgcttgggagtcttctgctggaggttccttcactgtgcatgctgatcatggtgagcccattggcaggggtaccaaagtgatcctccatcttaaagaagatcagacagagtacttagaagagaggcgggtcaaagaagtagtgaagaagcattctcagttcataggctatcccatcaccctttatttggagaaggaacaagacaaggaaattagtgatgatgaggcagaagaagagaaaggtgagaaagaagaggaagataaagatgacgaagaaaagcccaagatcaaagatgtgggttcagatgaggaggatgacagcagtaaggataagaagaagaaaactaagaagatcaaagagaaatacattgactaggaagaactaaacaagaccaagcctatttggaccagaaaccatgatgacatcacccaagaggagtatggagaattctataagagcctcaccagtgactgggaagaccacttggcagtcaagcacttttctgtagaaggtcagttggaattcagggcattgctattcagtcctcgtcgggctccctttgacctttttgagaacaagaagaaaaagaacaacatcaaactgtatgtccgccgtgtgttcatcatggacagctgtgatgagttgataccagagtatctcaattttatccatggtgtggttgactctgaggatctgcccctgaacatctcccgagaaatgctccagcagagcaaaatcttgaaagtcattcgcaaaaacattgttaagaagtgccttgagctcttctctgagctggcagaagacaaggagattataagaaattctatgaggcattttctaaaaatctcaagcttggaatccacgaagactccactaaccgccaccgcctgtctgagctgctgcgctgtcacacctcccagtctggagatgagatgacatctctgtcgtagtatgtttctcacatgaaggagacacagaagtccacctattacatcactggtgagagcaaagagcaggtggccaactctgcttttgtggagcgagtgcggaaacagggcttcgaggtggtatatatgactgagcccattgacgagtactgtgtgcagcagctcaaggagtttgatgggaaaagcctggtctcagttaccaaggagggtctggagctacctgaggatgaggaggagaagaagaagatggaagaaagcaaggaaaagtttgagaacctctgcaagctcatgaaagaaatcttagataagaaggttgagaaggtgacaatctccaatagacttgtgtcttcaccctgctgcattgtgaccagcacctacggctggacagccaatatggagcagatcatgaaagcccaggcacttcgggacaactccaccatgggctatatgatggccaaaaagcacctggagatcaaccccgaccaccccatcatggagacgctgcggcagaaggctgaggccgacaagaatgataaggcagttaaggacctggtggtgctgctgtttgaaaccgccctgctatcttcgggcttttcccttgaggatccccagacccactccaaccacatctaccacatgatcaagctaggtctaggtactgatgaagatgaagtggcagcagaggaacccagtgatgcagttcctgatgagatcccccctcttgagggtgatgaggatgcgtctcgcatggaagaagtcgattaggagttcatagttggaaaacttgtgcccttgtatagtgtccccatggctcccactgcagcctcgagtgcccctgtcccacctggctgctggtgtctagtgtttttttccctctcctgtccttgtgttgaaggcaggaaaccaagggtgtcaagccccattccctctctactcttgacagcaggattggatgttgtgtattgtggtttattttattttcttcattttgttctgaaattaaagaatgtaaaataaagaatatgccgtttttatacaaaaaaaaaaaaaaaaagatggattaaagacttaaatgtaaaacccaaaaccataaaaaccctagaagaaaacctaggcaataccattcaggacataggcatgggcaaggatttcatgtctaaaacaccaaaagcaatggcaacaaaagccaaaattgacaaatgtatctaattaaactgaag

SEQ ID NO: 14137 - DNA, 1194 bp, Homo sapiens
tagtgccatttgtctaagtaacaagctactgcatactcgaaatcacaaagctaagcttgagtagtaaaggacagaggcaagttttctgaactccttgcaggcttgaacaatagccttctggctcttcaataagtacaatcatacaggcaagagtggttgcagatattacctttatgttacttaaaccgaaagaaacaaaaatccattctatttaattttacattaatgtttttccctactttctccctttttcatgggatccctaagtgctcttcctggatgctgaatgcccatcccgtaaatgaaaaagctagttaatgatattgtacataagtaatgttttaactgtagattgtgtgtgtgcgtttttgtttttttttgttttaaccacaaaaccagagggggaagtgtgggagcaggtgggctgggcagtggcagaaaacctcatgacacaatctctccgcctccctgtgttggtggaggatgtctgcagcagcatttaaattctgggagggcttggttgtcagcagcagcaggaggaggcagagcacagcatcgtcgggaccagactcgtctcaggccagttgcagccttctcagccaaacgccgaccaaggtacagcttcagtttgctactgggttgtgcattcagctgaatttcatggggaagtccaaattctaaggaaaaatatttttaattgtaatgctgttaaacagacttaaattttctagcctttttaataagcagattagatacattgcaggtctcctggaacaaaggtgtctagatattttgaatgccaatcaaatttaaaacttaaaaatacttccactgggtcctcaaaagaacggaaaccaccgatgctaatcagaaaatagtaaaattaaattcccctttggaataattatacctatataattttcagtgggtgactgtgcaggaatttaaaagaaaagggatcttttatgctaattaaaccaattacaatgctattttttaaatgatgtatctcacttttaaggggaagaaaaccctttctgaatatgccactgctaaatttagctgttaaaatattcaccaagatacctgtatgacactgtgtaggcttattattacaaatagaaaagctgttggctattttcaatgttttcctttgaatttcaaatttttagaacatcttacttaaataacaaa

SEQ ID NO: 14138 - DNA, 1322 bp, Homo sapiens
gttcatataattattcttcatttgtgccgtgattcagtaccctgatgctacagacgaggacatcacctcacacatggaaagcgaggagttgaatggtgcatacaaggccatccccgttgcccaggacctgaacgcgccttctgattgggacagccgtgggaaggacagttatgaaacgagtcagctggatgaccagagtgctgaaacccacagccacaagcagtccagattatataagcggaaagccaatgatgagagcaatgagcattccgatgtgattgatagtcaggaactttccaaagtcagccgtgaattccacagccatgaatttcacagccatgaagatatgctggttgtagaccccaaaagtaaggaagaagataaacacctgaaatttcgtatttctcatgaattagatagtgcatcttctgaggtcaattaaaaggagaaaaaatacaatttctcactttgcatttagtcaaaagaaaaaatgctttatagcaaaatgaaagagaacatgaaatgcttctttctcagtttattggttgaatgtgtatctatttgagtctggaaataactaatgtgtttgataattagtttagtttgtggcttcatggaaactccctgtaaactaaaagcttcagggttatgtctatgttcattctatagaagaaatgcaaactatcactgtattttaatatttgttattctctcatgaatagaaatttatgtagaagcaaacaaaatacttttacccacttaaaaagagaatataacattttatgtcactataatcttttgttttttaagttagtgtatattttgttgtgattatctttttgtggtgtgaataaatcttttatcttgaatgtaataagaatttggtggtgtcaattgcttatttgttttcccacggttgtccagcaattaataaaacataaccttttttactgcctatataatgtttttaaaggtttattttggtttcaattgatacataataagtgtacatatttatggggtacggtgtgatgttttgttacatatatacattgtataattatcaaagggtaattatcatatccatcacctgaaacacttgtcatttatttgtgctgagaacattcaatcctcttttctagctattttgaagtatacaatacattattattgactatagccaagctactttgcaatagaatactagaatttattcctcctagctaactgtaactttgtacccattgactaacctcccctcatccaccttcccactctcccagccgctggtaatcactattctactctctacttctatgagg

SEQ ID NO: 14139 - DNA, 1843 bp, Homo sapiens
ggaaatgggagttctaatgtccacgtatgatatgtgtgtttcagtatgtgtgtttctaataagtgaggaagtggctgtcctgaattgctgtaacaagcacactatttatatgccctgaccaccataggatgctagtctttgtgaccgattgctaatcttctgcactttaatttattttatataaactttacccatggttcaaagatttttttttctttttctcatataagaaatctaggtgtaaatattgagtacagaaaaaaaatcttcatgatgtgtattgagcggtacgcccagttgccaccatgactgagtcttctcagttgacaatgaagtagccttttaaagctagaaaactgtcaaagggcttctgagtttcatttccagtcacaaaaatcagtattgttatttttttccaagagtgtgaaggaaaatggggcattcctttccactctggcatagttcatgagcttaatacatagctttcttttaagaaaggagccttttttttcaactagcttcctggggtaaacttttctaaaagataaaatggaaaggaactccaaactatgatagaatctgtgtgaatggttaagatgaatgttaaatactatgcttttttgtaagttgatcgtatctgatgtctgtgggactaactgtatcacttaatttttaccttattttggctctaatttgaataagctgagtaaaaccaccaaagatcagttataggataaaatggcatctctaaccataacacaggagaattggaaggagccctaagttgtcactcagtttaatttcttttaatggttagtttagcctaaagatttatctgcatattctttttcccatgtggctctactcatttgcaactgaatttaatgttataactcatctagtgagaccaacttactaaatttttagtatgcactgaaagtttttatccaacaattatgttcattttaagcaaaattttaagaaagttttgaaattcataaagcatttggttttaaactattttaagaatatagtactcggtcaggtatgacggctcacgcctgtaatcccagcactttgggaggccgaaacaggcgaatcacttgagcccaggagttcaagaccaacatgggcaatgtggcgaaactccatctctacaaaaaatgcaaaaataaaaaatatagtactcaagtattcttgatcctgtgtttcaaaactagaatttgtaatgcaaatggagctcagtctaataaaaaagaggttttggtattaaaagttcatacattagacagtatcagccaaaatttgagttagcaacactgttttctttacgagagggtctcacccaaatttatggggagaaatctatttctcaaaaaaaaaaatcttcttttacagaaatgttgagtaaggtgacattttgagcgctaataagcaaaagagcatgcagtgctgttgaataaccctcacttggagaaccaagagaatcctgtcgtttaatgctatattttaatttcacaagttgttcatttaactggtagaatgtcagtccaatctccaatgagaacatgagcaaatagacctttccaggttgaaagtgaaacatactgggtttctgtaagtttttcctcatggcttcatctctatctttactttctcttgaatatgctacacaaagttctttattactacatactaaagtttgcattccagggatattgactgtacatatttatgtatatgtaccatgttgttacatgtaaacaaacttcaatttgaagtgcagctattatgtggtatccatgtgtatcgaccatgtgccatatatcaattatggtcacta

SEQ ID NO: 14140 - DNA, 1137 bp, Homo sapiens
cccagttttgtgtttgaaacccagggccctggtgatgtaggcacctgcgggaatctcctggtctgcgggttgtgaataccatgggaaaagtacagtatgtgggccggaatacaccatccctcgtggcacagtccctcacggcttctcttggctaggggagggacttcccccaccccttgtgcttcctgggtgaggcatagcctcacccaaggaggtgctttgtatcaggcttagttactgaccagctgtgacctgaacctaagtttactcatctgataaaagagatacctactttttctaccaggtatccacttatttgctgttcagaataaatgaacttaatgagataaagtgtctcttacaggactggcacacgttaggagctcaccaaatgataatgactggttgttatcattgacaattataatatttgtgatttaggttggaactcagtttatccgtggtgtgtctggaggagaaagaaaaaggactagtataggaatggagcttatcactgatccttccatcttgttcttggatgagcctacaactggcttagactcaagcacagcaaatgctgtccttttgctcctgaaaaggtaaatgctctggaaacattattctttagttaatatcttatcactactatgtcccagatattcttggggcagggggttcagaaatgatcaaagtaatttcttcctcttctgttggagtgaaagtcagttaacaaatgaaaagcattatcaagaaaaacaaagcaggtaagaatgtagggaaggatgtctgtgatgagggtgtaggggggttgggcctgttttgctgctgtctctttagcttctttactcaacaccaacagacacacacatacacattttttctccctctctctgctctataacactgaacattttgtagttttctgagtagacctttttatttcacacctttttcatcttattcttccaccttcagtactttttctttttcttcttagcttcctcctgttgggccttttttactctacttatatcatcttcagactgggttgtgagtctcccattttgcttatgaggaatccttagcatcttctatttcatattgtactgaaattgttgacctactggcctgatcctc

SEQ ID NO: 14141 - DNA, 1194 bp, Homo sapiens
gaagttgatttttctctagtgtttattccagtagtaaattaacagggatggtttgggggttgaccaaagtaatgaaggaatatttggataagagagggggatcttttctgactagtatgaaaaaaaattaaggaataacttgtgaataaggtgaaaaagagaatatgagagaaactactaaaatgggaataattatagattgtaagagaatttttctaagataaaaggttgaattggctattgttgcttttagaattaaagaagactattctgggattaactccgtaccaaaaattggataaatggtggtatttgttgaaaatcaggctcttcaagcattttattttcccacaactcattttgttctttttttttccacctcagatatgaagcatcaacaaacgaattgattaatgaagagttgggaatagcttatccaatcattgatgggatccctaatatgataccacaggcagctaggatgacacgtcaaagtaagaagcaagaagaagtggagcagcgctagttcataatttaaaaaaattaaaaaaacgcaacagccaacttttcttaataccatataccttttaaaacacagtggcaggtaataagtggaagagaagaatgtttctgtctcttcctacgttgactgttcttattccactggtttctttagcaggactgttctactcagcctctgtggaagaaaacttcccacagggctgcactagcacagccagcctttgcttttacagcctgctcttgcctattaccataccagtgtatgtattcttccacctttggacttggatgggtattaaactcttcaggcataattgatgcaactagagtcaatatgctgtatatattaatgatagctcttgggcatcgatctctgaaagctcaaatggatggaatttagtttgcgggaaagaggctttgctttgcgcatatcaggcttaggactgtgggaggcttaagttgcagatgcttcttttattgtactcttgttctgcccttgttttttgaaggctctgacttataactgctgtatcagaagaaacattttgacagtgtcttggttggagatgaacatccctaattgacatgtgatgactatttcttattccattcatctaagagtcattgaaattttgttttgcttgtttgtttagcttcaaggtctttggtaaa

SEQ ID NO: 14142 - DNA, 1297 bp, Homo sapiens
ctgtttcctcagagcctgtataatagaaggtaatgggaataagcacttgtttcactattttttaatttatgtctcagatatgcagcaaaatagaagtaatttttcagttattaatttgccaagataatttctgtgttcgggaagtaacagcttggcttctcttttttggttttattctgtgtttctctttggagtttagatagggcacttcttagatggttggtggtagaaaaatattcaagaacattattgggacaagaggttttctttcaggagctttgatattcttttttttcccctaacatgggaaacttaagttcttcttcattttgagatgtgacatcctgtttttctaaagcaaatgtacattttccaaagcttcagctgacaaagagctgctattaatgaaatccttgagtagatggttactttattattgatgcttaaataaccatttatttgtaattattaaaggcttccccctcccttcttttctttgagcagtggtgttgttcagatattatcttctgcagcctgttggaatggaagttttcttgaaaaaaagtaagtgacttagagccttaaaaaaccctcacgtgtacctgtagtctcaagctatttggaaggctgacacaggaggattgcttgagtttaggagtttggggctttaggatgctgtgatcatgcctgtgaatagccactgaattccagcctggacaacatagtgaggccccatctttttaaaaaaagtttcttaaaaccccacatgtgatgcaaatacttactcagcaaaggctgtgaaagacttttcttctctttgatggtggttggccttaatttaatgagtaagctgatgctttgcgcaaaaattggaaagcctaataatggtaatgagaggatttcaggaagagcaatgctgattcatacctggatggcagaaaagcagattaccgagagagactgtatctcagaaataattggtagaatcatcagtaagattttcagagtattctaagatgtgtcataattctaaattcttaattcctcagataattttcttgatttctttggtttgctttcccacagttttaaaatttttattattttttatttttttctctcaaaaggagtgaatttcagggagtaattctaaggaggcttcaggggctccttggatttaggtccagcccagctcaccagagaattatatttgaggttgaactccccagtagtaaatagaatgtttatttgcttagccttatcccttctgcaaatatctccctcaggaacctgatgc

SEQ ID NO: 14143 - DNA, 1185 bp, Homo sapiens
ctggcacaaaaatactcaaaaaatatgtgttgaagaaatgaattttataaaggtgcttactatcactgctattttactgctgattgatttgtcatagagtctggatcataacaacaaattcaagtacatttgatttttcaggatgattcataatctctgagttaactctttagaggagagaagatactcaattttgcttacttttatattaaattatgctaatctgcatgaaatcaatttactttacaaacactgagtgcccactgtgtgccagccatagtgctgggtatagagggtgaataacttctatccttagaagctttgggattagttgagaagggtcaatgtatggaataattgcaatagaatccagtgtatgtgatagaagttgtagcccaggtgccacggtactagggtaagaggctacaacacttttatcagacactaaagaatgcaagttggaggaaacattttaggcaccagatgagttgggactctgcagtttgacacatgatagagaatgttgggtacttgtggagtgggtactggtgtacggatgaagggagactatagtagcatcagagtggaggttatcaaggccttgaacggcgcttggagtagaacatgattggtttctattttagaaagattactttgggggtcctgtggaaatagaccgtgtgcagggatacccattaggaggcttttgaggtagctcaggtaaaggatgttaacagccagaatgaaggcagtgggaaacagagttggttatataaccaaataggagctagtgtctgattatatatggatggtatgagagagttatatattgataataatgctgaggtttctaattcaaacactaataggaaacagagtctataaagcaggttcaagggaaagttccattttgaatatattgattttgatatgtctttgtgatacccaggtgattgtgtttagagcagaaaatttatatatctcaataaagaagtcttatatgaatattttttaattagttatgtgagcctcaatcactattaaatttgaggtcgcttacagcaagaatcaacaagaaagaagtggtgaaatgaaaaacaagagcaaggaaaacgtaatttcttagaggagctatataagttagaataaaatgcagactcttgaggatttgagcataatttgcac

SEQ ID NO: 14144 - DNA, 1166 bp, Homo sapiens
aatatgcagaaactgagtttggaagaacatattaagaccaggggaagacattctgttggttttagtagttcacgaaataagaagataacaagatctttgacagaggattttgaaagggaaaaagagcactcaactaacaagaatgtctttataaattgtctaagttctggcaaaagtgaaggggatgattctggtttcacagaagaccaaactcgtcgttctgttaagcagtcaacaaggaagctactccctaaatctttttcatctcactataaattttctaagccagttctacagagccaatccatttcattggtacaacagtctgaattctcattggaagttacacagtaccaagagagagaacctgtattagtaagagcttcgccatcctgttctgtggatgtaacagaacgggcaggaagctctttacaatctcctttgctttctgctgatcttaccacagctcagacaccttcagaatttttagccttgactgaagattctgtgtctgaaatggatgcattttctaaaagtggaagcatggcatcccactgtgacaactttggccacaatgattctacctctcagatgtccctcaattctgctgctgttacaaagacaacaacagaacttacgggaactgttccctgtgcaattatgtctcctgggaaatataggttagagggtcaatgtagcactgaatctaattcattaccggaaacctctgctgctaatcagaaggaagtgttattacaaattgctgaactacctgctacaagtgtgagccactcagagagtaacctaccagcagatagtgaaagagaagaaaatatagggttacaaaatggtgaaacaatgctggggacaaactccccaaggaaacttggattttatgagcaacataaagcaatagcggaacatgtaaaagggatccatcctatttcagattcaaagataatacctacttctggtgatcatcatatttttaacaaaacatcacatggatatgaagcaaatcctgccaaaggtatgctgattttttttgtataacaaatgatatgaattaattttcattatactttattcagttttcttattccatctcatgaatggaaaccacatttttcttgtttttcactttcgaaatggtttcctattcataa

SEQ ID NO: 14145 - DNA, 1298 bp, Homo sapiens
ttttattcggtgctagagatgcatgtccagtggaaagaaatttttctacttctcccttcctgtggaggcccaggtgcataaggaaggggcaagagcacaatgtatgtgaaaaaccttatttctaaagagaagtgagttcagactaaacaagtggcttcatcaacaaggaaaattttttagccttgtcactacataataggatgggtctagagaaacaagagataaactcaatctcttaagaatcctgttgaaaaaattgggtgatttttttcaaagaaaatatggtaagaaaatatttgctggtgctaaaatacctacaaaattttaactttaaaatatggtgtagctaagaacttaacagcatttgtttttatattagaatcactcggtttgaatcggagctctactacctattagctctgttgcctttgagcaaatcatttaaattcacttaccctcagtttgcttactcataaaatgataataataaaaaaattccatgagtctagtgagaataaaaatgaaacaaccatgaaatatactctataaagcactgagcatggtgcctccatataatgatcactaatatgtaatagctactattatgaaatcaacacagagatttatagaaatcacttgaacagaaaaaggcttcaaaagactggaaatgtaaaaaattcgtctctttgaactaactagtcataattctgggatttctaaaatacaaaaaaaaaaggaggaaataatattatccctatagcttaaaaatattgtggtgggtgtttttatattatgtgagcctcaatttacagaaaactaagcattgtttgaaaaggaaagagaaacattactttttatgagttagtttccatggttgctttgttaatgtgtttgccctagtaaaaatacttttaattcacttttaatttaatatagaaatacttttacttattcacaaaaaagattgcaataggagaaaattttcaggcaatgataaatcttctttctctcctttggacagaatttacaggtccagataatttttgtaatgattaaaagtgtatttcttatgaataaaaatttctattttttgctattaatttgcctatccatttttttctaagcaaatttacatctgcgctaggaagaaaattataatgattattctatccttttgaaaaggcaatggttacactgaatcacctgagttccatctctgggcaacagggacaaatggtcacttgcagtgcaaagatcaagtactgagagtgtgaggtcagctggtttacacaacacct

SEQ ID NO: 14146 - DNA, 1099 bp, Homo sapiens
ggaatatctgagacatcatacagatacgcagctgccatttgtgttctcaggacctttgttagaaaacagagatttatatttaattcattttaaaaacaagttatcacctgcttttgaaacaattgtttaacttcaaattctacttaagtatttttaaagtgtatcaaatttaacaataaattgtcgttgaattcttctgtattcaataggaataggtaaatgttttaagtttttatttgaagtctatctttatatttatgtatttctaatttagttactgtttttgtcttttatatacagatatgcaatatgtatcacaaagtgaggttccaaatggaaaagaagtttcttcaagaagtcaaaattaccctaaaaatgcaactaaaacaaaactaaaacagaaattttcaatgaaagcacaaaatggctttaacaagaaacgtaaaaaaaatgtttttaatccaaagagagttgttgaagactctgaatatgattcaggttctgatgtcggtagttcactagatgaggactatagtagtggtgaagaagtgatggaggatggctataaaggtaaaattcttcacttccttcaagatgcttcaattggtgaacttactttgattcctcagtgttctcagaaaaaggctcagaagataacagaactccggccctttaatagttgggaggctctggtaaggctttattctttttttccccttgtatgtgtgtgtgtatttaattcacagtaccggttatagtcaagttgtcttcagcccaggtaagcatagatgggtggccttatcctgtgtaaagtcaaacattactttcattgtaagccaatagtatttcaaatagtgtcatatgacctaattttgaatgaattaaggggtgattttcctgaaaaaacccaagctgattggctgggaatactgtcactcattcctttgcatagaaacttcgttcatttcactgcagaagaagaaattagagcttacatttaggaaggagttgtttgctagcctgttctgatctgttactgctgagacaccatgcagaaagcaagaatgtggcagaaattttactacaactacttgaagag

SEQ ID NO: 14147 - DNA, 1240 bp, Homo sapiens
gtaatctcatcagcatctttgactttgatggtcacctgtgtggcatctttttctccagcttacatctcttccctaagatacagatctttatttaactaaccactggctctttctcgaaaatttggtagctgccccaaatttaatatatccagaaacagacttcctttgccatcttggtaaattttaatctcaatagatggtaccactaatctgttagcattgaagccagaagtctgggagtcaggcttaactcttcattcatctccccacacttaatgggttctacctcctgaagatcgtgaatcttatcagtttctccgtgtccaacacagaccactattgtctctcaactcaaagccttcttaatagttttttgctctcaagccttcttcacattactctcatagagttctttctaaacaggaactctctaaaacccttcaatagctttttaatgcccataagttcagtttagaacgcattaaaatgattcatacccttactgccttcctgttcagacttgtctgttgcttctctaggttctgacatgtgaatttatctttccattaaaacagttcttttattatttctggcttcttactccataaggaattactaggtcttagattttattagtctttttgtgatgagtgcccatgaacttttgttgtttcccttgtttataccagaggttatgcttgaaattgttacttgtgtttcccaatgttcgtagaccacaaggacagggctgtgtctatctcccagataattcaacagttacagtaatttctgttaaaaaaaaaaaaaaaaaagaaagaaaagaaatggtagttggttacagaaaaaaaaaagtgtattttgaacttttaaggtcttaaattattttatttagggaggtactagttatacagtgaaaagggcatggaatttttctcttacccagctttgtgatgttggaaattgaaccttagttttttcatctagatttggtaggctagtcttggtagttgttacgaggatttaatgagttactgaataaaaggtatctaatagttactagcacataaatggcacctaatgtatgttcattccttatttcctgattaatttgttgggtttctctcacatttcaatgtattacacacacatactacaatcagcatgagattggtttatggcctataatttttggttgcatttaaaaataaaagtattttagctaaaagttctaatagaacct

SEQ ID NO: 14148 - DNA, 1155 bp, Homo sapiens
ataaatgcgtgcttcagaattatacataccactgatattaggagtgattgacacacattcagaaagtatttattaaacctacctggccaaagtagcaaattatgtttgtgtttttttgtcctaatacttttaagttctttaatgtgctaaaaatcaaatcaacacaattcaattttctattatagatactagcttagtattaatattatcatagttaatattctaatcatttatggaattaatttggaggtactatattatgaccaaatatggaaatgcttgattcttactgccagaagaaatagaatagagaataaagtttgagaagatctgaaaaatcatttatgtcttgggttcattttttttaagtaggtgtacatagcatctaacagttaaaaggtaagattagacctaggcattttagtttttatgtgcattgtaataactaatagaaaactgatagaaatatagatgtgtaatatttggtaactctctctttaccagtttgtcactcaagccctatcagaaggttggtttgaattggctggcattggtacataaacatggacttaatggcattttggcagatgaaatggtaagtgtactttatttctaagatttgttgttgaaagtgtcattaaaaggtattcttgctgtcatttaaaacatgaaacttttttttgctactgtagttaactactgccacctcagtaccttatattttatctcatctttgtttttgatagagttagttctaccctcctcactcctccccaagatgaagatagatttattgtctttctgattatcagattagtaaatacatgttgcaaacataaaaatacaaattaaaaaatcgaaatcaaagtcacctgtaattctaccacttaaacaagaactagtttggtgtcttcttttctagatactaccttctgcagatgttgtgtatgtacatgtgtacgtacatacatatatgtgctttttctacagctgcctttaaaattgtaacttagatccctgtccttgtcagtaaacaaatccacatatatatcagcaacatcatttcagctattttatttttattagcggtctctccgggtctctgttctttctcaaatcacattgccttaaagctgagttcacaaagtttgttat

SEQ ID NO: 14149 - DNA, 2248 bp, Homo sapiens
tgtgaaataagaactgtgaactctcaattgatgaggaaatatcaacttggtgcactcaaggacatttacattatgatgaccatggggtttatgaacatttataactttttataatttccatattacatttctcatagtatggacaactttttgccactaactgaattctccaaatactcacacgtgaaatttcaaaaaagaagccacaaatatgtagttctgaagatgttgaataatcattttacaaagcagttttctgaatggggattagttggtgattgtttgtaacaaatatgctaatgctttagaaatgtcagtatttttgtaattatttctacctccaaatatatatatattgtctttcactggataatgtgtgtagatttttacatgtgccttatttgacaatgcttatgtcttgtttttgcttgtctcatttgaagttcttttttattatgttaaagaatgcagctgtatagattatatagctttcattttattgctatttgaagcagatgttcaccaatgtcagcaagaactcaacctgaatttaaaggtggcattccatatactaacatcccccaggtcctctcaagtacttctgctgaaacaaatttatttggctaggcactaagttgttttccagtgaatagtaactaaagaagcccctaccttgctccatggattaattccttctgttcattttccaactgcactaattgtgcatattactctgcctaatcttgtgcatgttttcattgatttccctctcccggcttttgcttctcttgaaactgttgcccagtcacttctgctccaattctcttcctctctaaatagtagtttattactgccacatctccatgcatcagcaaaatgttggtgacatttttctagcctggcagaacagattacttaaagctatttcatttcaaagcagactgaatgtgacttcatctaaaggcagcattaggtactgcatggaaataggtcattaacttgaaactcttatcaaaatatattttaccagtttccagaatttccagtacaggaccgcctgaagagagagccattgttcaattccaattcagtgtgagtgacaaagtgaaatttagaagtgaagttgtctatttgatatttaactctttattaaatctttctttaaatttctgcctgtcagtctatattgctgtttttattatacatcagtttctttgtataacttgtgagttccatgtgttttgtttttattatgtaaatatcattataaataaacttatttataaatcaaagatttgttaatttttggaaatcatgcttttcaaagcatcctaacttgctaagatgctaggtagtacgaccctctggatttggaaggcaaataaaactcttacagtgattatttagatattaaagactgagaactcacggcttaaccccagtcttgatggtatattgaacagactgaatatattttaccattacagggctaaaaggagtcttcatgtgttaatactacctccttgtacatcactatacccaaatcagttattcaaattgttaggaattttaccttttaaaatctcataatggatatctcatgttttctgtattaatgtattttcaatgataggctgtttctttttttgttgttattgttgttgttgttatatccatacttttatctctaatgaaatgtagttgggttcttcctgtaatgcgctattatgtcttgggcttaataaaaatatttgtgatcataagttgtattttcacaccctttttaatagtttctaacccttcctcctcctacccttaaaatcatataatattgggcacaaatgagattatcttatgtgcttaatattgcctgtttgccagtaaattggaacttactacttaggatgtattctcattggttccttcattggactgatgtcagtaaatactgtaacccattatcactacagagcaaatgaagcgagagttggagtaatatcttgaccaactgaagcattttttaaatgcaagctacacaaagaagacatgccttatgcatttttataactgtttgggacccccatagagttttaactttatgccagtagatacttactttgaaacattactgtagttcctaacagttggcattatcgtgtagtggagagacggggtatgaggagatttggtttccatttgtgtgaccttacgtgtgatacttcacagtccataaatttaaggaattcgg

SEQ ID NO: 14150 - DNA, 1187 bp, Homo sapiens
tttgttttgtttttttgtgaaacagagtctcgctctgttgcccaggctggagtgcagtggtgcgatcttggctcactgcaacctccacatcccaggttcaagcgattctcctgcgtcagcctccccagtagctgggactacaggcacgtgccaccattcccagctaattttttgtatttttagcagagacggagtttcactgtgttagccaggatggtctcaatctcctgacctcatgatccgcccacctcagcctcccaaagtgctgggattacaggcgtgagccaccgtgccccgcctattttagatagatcttttaaaaacttgagaccgaatatacttgcaaagcaaactgtttatataaaaggaatattgaagattaatcatataaattataaataatttagtagaagatattttatccttttaatataactttacaatttttaattttttttttctccttaaccctagcccaccaagaaaacacattgtggagcgctatacagagttttatcatgtacccactcacagtgatgccagcaagaagagactgattgaggatactgaagactggcgtccaaggactggaacaactcagtctcgctctttccgaatccttgcccagatcactgggactgaacattgtaagtgaacttctaggtatcctaatggatgaatgtttttttgccccagagagtggcattgagactgattggtagttgtcagaaaacaaccccgagacagtttgcttttaaattatgctgtgcataacatgggtaatataaataagaccccaggccgggcacagtggctcacgcctgtaatcccagcgctttgggaggccgaggcaggcagatcatgaggtcatgagttcgagaccagactagccaacatggtgaaaccccgcctttactaaaaatacaaaaattatctgggcatcgtggaagccacctgtaatcccagctacttgggagcctgaggcaggagaatcatttgaaccggggaggcagagattgcagtgagctgagatcacgccactgtactccagcctgggtgatggaggggctctgtctcaaaaataaataaataaataaataaataaaacaccagcccaggagagtaacattgaaaagtatagatgtaatagtagttgtactaactatagtttatggccaataacaggc

SEQ ID NO: 14151 - DNA, 1923 bp, Homo sapiens
ttgtcatataatgtacactgtcacatctttacagtcttgtatgttatagaatacaaaataagttgatggttttgtttggtgtgagctttttgtttgtttgtttagttttgccttcataggttatatgccaagatagtatttgataagtcaatgacatttggatgttttcttcaaagaattttatttgacccagatttcttataaagttatcttacattaaggatgtcattttcatcagaccttctttctacatattattcatgaagcataatgttgcatttctccaaattttatgcctgaaagggtagtgttgcttcctaaggtatcatgttgtctttgtgctttgtccatctcttccgtggcgaagctttatatctgttcctaaaacagttaatcctgtgaaataaatattgaacataatccagaagaatctctctgtttcccttggggaatgccatatttaattcaccagcagtaatcctttaataactggcagagcactttattcttctggtgagctccctgaatatttatttttctgattataaattttctatattagtagcattttttaattattacttcttcactatagagcatttacttttagtctctagatgtatattttggaatgctgtacttggcataacatagattaaaatcataatgcatgactaaaaactccttggatttatttcccattttaaaatttttagcggtaagttcagatttataatctttctctagacttccatggtctgaatgttgcctgctgaagtagcaacctaaaaagtatcccctgcttatgcttgtccagttggccctccatgtccataggcttcgcatctgtgattcagcccactgtgggtcaaaaatatttggggaaaaaaatggatggttgcgcctttgctgaacatgtacaaacttttttttgtcattaaacaatatagtataacaactatttacaaagcatttacattgtattagctattataggtaatctagagatgatttaaagtgtatggtaggatgtgcataggttatatgcaaatactacaccattttctataagggacttgaacatcatggactttagtatcctagggggttcttggaacccatcacccataggggcaccataggacaactatagtaccgtgtttatttcctattaattcaggttccgtttagagtctaaaactaaaacctaatcatttagtcacagtgtaaaaacaaatggaaataacagctcaaatcttcaaaatattactatagcattatgtttaaaataatctacaacaaaaatgtaccattttcaagcagtactacattaggagcccttttatagaaaataatttcttctttacccccgttccagtgtgaatctagtattctgttaacatttgtgtggcatttggagtttgtcatccccattgaagggagagccttctcagacatgaagcaagggaaacatactgaatagttttacacaaatttgatctggcttccatttgtccccctcatttcccaaatgtttaaatgtattggatttggattctcaatgtataagttgccttatctgttaatgtctatcttctgtctctttaattttgtatatctgctgttttgcttttggatacattttctaattagaagtcacatgataaatataatcagtatagtaataataccataatgtgcacatactcaataaataaatgactgcattgttgtaaatgagctctcctttttgttgttgttggttggcgagtggtttccatcaagtcatcatgggaaaataatcaagttccatattcacaggttaggataggatgtaataattctcagaagaacccttctagtatgatatttgcttatcaaaatgtctcagaaacaaaatatttgaaaatactgtcacattta

SEQ ID NO: 14152 - DNA, 2266 bp, Homo sapiens
gcctctctcacagagcagagacttactgtggaaagctgagaactgcccgatacacggcatcatcccatctctaatttcccctctgtcctccatccagcggcttcttccgcttcattctctaccataccacttgtgcatgcatgtgatgttctaataccaattgaagaaccgctgtaggtacctccctaataagatttctaaacctatagttagtgtgatcatgactttgtcaaaggcaagtctccacccataaccgttctcttgtattcctgttgcttgagctacattaagtagaatgtgcatgttgtagtcctatgatgatgtaaacttggtactacataatgacttgctccacacatgcagtaaactacataatgatgtactggtaaactagaaacaaagaatgcagcaggatctgtctagcttattaaagatgaaactgaattggaaaaatagctccattttttggtgcttgggaagcacagtgaccaaaaaagttgtatggctgcttattcattagtctttcctactgatgtcaaatccatggtacctagagttaaataaaattccaatgctcttactctttaacttctggtttctcctttttcctttttagactattgaaactgccacaaacttggcaagactttctgaggtttctgattccatatttaattgactattatcaatagcctgatattgaaaaacatttgtagttttcagtgtgaaactaaggggttgaagaatcactattacaatccctattacagagcatttcgggttttgcttgtattttagattctgatacatacgctgtttcactcaggaactacttctaccagttaatcagcattatccagcacttgtctttaaaattcatttggcgcttgtttgttttcaactgaggaaattgagtatagttcattgaagaatggaatttttttttttttttttttttttgctgtttttcatcattcagctagaaagtgagaagttttatcttccatagtccttttaaatcttatgttagaactagcaggacgtaggtggaaagatgaagaaataagcttgtctagactaaagaaaggaaagcaggttataaaagccatagtagccagtccagttcattctgcagatggccccataccaatcgctgttagagtttgccacctccactttcccactgagaactgcagcaattttaaaggatatgagaaagccaagactcaagagatgagaagacccccttggcgaaatatagtgtactcttcactgccactgccaccaccaaatgggtttttagagctttgaaacacaatctttgtaaattaatcaaaacctccctgtgacccacctgccttctccccatacccaaatttgaccactactggcctaaaaggcaagatgggcttcgatatagaaggactgcaagacagtagaaagggctgccacggaggtgacagtagctccttcctctccaacatgtgatgctacacatctctgtggataatctaagttggacttttgactctaaaacagctataatccaagaaagttaaattctaatggaggtaaagaatcttgactgattgttccctttgatgtccaaataagggaactattgtgagtacgtatgctacacttactataagaatgatactgtttgttgtctttctcctgggctggatagtggactatattttattacaggctttgaaagacatctgtaatgttgcatatctgttcatattaataacttaataaatagtatatgaagctataatggcatcatttggtttgtttgtatattttgtctctatttccagctcctagaataaggcttgctattgatgttcaacaaatatttgttgactgaatgaatgaatcctgcatccatgaagtttccagactgcctgaactaattccagaaagatagactgactgactgatagaaagtttgagatttgatagtttgtctgactttagggaaaaaattttaacaaaagcatcctaaaatcgtaaatgtgagagaagttaccatctaggccagctgccagccatcaatttgctaatatgctaggaactcccatctccagcaaaataaagtgcaattcaaagtactcatcattgtacggaaagaccagaaggctgtgcccttatcacaggggctaccaaattagatggtacactgatgtgccattgcagtggatgggagagtctacagactgtactctcgcttatctcctgctactaaatcttagtccta

SEQ ID NO: 14153 - DNA, 1256 bp, Homo sapiens
ccacatatgaattacatcttaaatttcaaaaatcaatgatttaaaaaaatgggacacagtggccagggaaacaagttacaagtgtcactgtttcactcacattttcttcctttctcagatatttgggatatgcctggcccagaatttggttagcgatatcgaagctgtcagggcgagctggtagaccccctgcaaccgctgctgcaagacactggacagacccagctttcgggaccctcccgcgtgccgaactgatcttcgagctgcatggacctaatcacagatgcagcctgcagtctcgcctaatggagctgccattaggggagtgtaaaactgggaaatgctgctcactgacagaattaaaaaaaaaaataaccagtatgaaagtcgttgcgccgtgaatctctactgtagccatgaatttatggacagttagatgcttaccaaaaaagaaaaaaagggagggtaggggacccagatgtacttgaatgtgcagaaaatacattcttgtcctcatcttccgtaattggagggctgggagaggcagctttgctcttcaccacaccttggacggaccaccttctttctgttccatggcctgaaggagtgcatctcctcaaagactcagcccctcacctgggagggcagtggtttgtgggcatccctccatgtacattttaggaaacacttgcaactctcatctgaagaagaaaacaactcatctttgggttcagattttgtgatggtattcagcaagtcacttgggcgagcacacttggtctatcctggaaagtctccttataagagaagttgtgtatttcatgtgcaccgagcaagggcattggaagacgtcatgaggctgtattttagcaggactgatcgtttttctaagtagacctgagctttgtttatcagtgaaattcaaggagaaaatgaggttaatgaagaggtatcagttaaatatccccttcttctcaccctgccaaaattagcagttggatttttggaaactctggaatattctgggtcattttgttttgtatgtttgttgtttttcgtcttccaaaggtgaaagctatgatacagttccacttaaattttagtgttttcttactcagctcaagcattaatttttgattaagtcttaatctgcatgacctgtgaatctgaatccatcatctccctttcctgccagcttttctacaaacattgaaatatgttatttggtcagcacttatttcctaggttcacagcct

SEQ ID NO: 14154 - DNA, 1163 bp, Homo sapiens
acattgcaaaggaaagcttgctcagagtagacctgcacctggacacgagaggctggagactgtattcaggacagtgctcgtggggagcttccttcactgctccactcttgtgtcctgtgttacaggggctgctggctgttgccactgtttttcagagaatgggctgcctgtacacacctgacttgggtgatcatgtctacccaggaggaccagcaaaaagggacaagcagtgatgccatctggttttacctccagcattccgagcactgccctggccctctcccccagccagtggtcggggttgggtgcgccccactctggctgcacaatagagtaacgcaggagctttaaaaactcccaacacccagagctcacccccagcaaatccgacctaaatagtcaggcatggggcttggacagcagtatgtgtatatattttaaggtttcttagttgaatttaaatgttacagtggggattgaaaatcttggtctagtggtggtagctgttgggttttttttcttttcattttttttgcatccattcctgttactaccctctagaccactgtgatttcttagtctaatcctgacttgctacctgaaaccctctaaatgtaagtctcgtgcaagagagtgagaggtaaagtttggtttttatgataagagataccttgctcagtaagcagaaataagtgccatgtgttagtaactacagttttgttttgttttgtttcctgtgggagcgacagaaaagagtttacagggtgtggtggggaaaagaagaaacgaacatctctctgagggcgagtataaggttgtggacttagtgggaaaagtcctcaacttcaagtcagagagaactgtcgaggagagagactgatgaagaagacacagtgaggtttttagtggttaaaaacacagcactgcgtttacatagtctatttcccccctaacagtggcaacatgttgtggattttctttttttttctttttcctggagagaagcatgctgcctctgaacagtggagaggaggaaaatcatcagcatcctcattggggtcaggtgacctgggcctcgttcttccgctgccacctgccagggttgggattgtcacagaagactgttcctctccgtggtgactgattgcggagagataaggggg

SEQ ID NO: 14155 - DNA, 1562 bp, Homo sapiens
ggaatatgacacaaaggtggaataaacattaattttgtgcattctttggtaattttttttgttttttgtaactacaaagctttgctacaaatttatgcatttcattcaaatcagtgatctatgtttgtgtgatttcctaaacataattgtggattataaaaaatgtaacatcataattacattcctaactagaattagtatgtctgtttttgtatctttatgctgtattttaacactttgtattacttaggttattttgctttggttaaaaatggctcaagtagaaaagcagtcccattcatattaagacagtgtacaaaactgtaaataaaatgtgtacagtgaattgtcttttagacaactagatttgtccttttatttctccatctttatagaaggaatttgtacttcttattgcaaggcagtctctatattatgtcttcttttgtggtgtcttccatgtgaacagcataagtttggagcactagtttgattattatgtttattacaatttttaataaattgaataggtagtatcatatatatggaattaaattgatgtggctatctttgtttttttataaagtaaggcacagtcattcagtcttaggtaaataatgtactctcttaatatgttaatactcatgagaattgggatctgatgcatcaccatttgattggtagcaacagtggttgtaaaacttggttgctgaattgagttgtttctatgttaagtgtcaaaatgatagtgtagggaaagtacaggtggtggggacatatgcattaagaatcttgttagtgttgcaatctaaatagaatggaataaacaggtgttaagacatatttatagtggtaaattgttgtagtatggtattctgtaaacttgaaaacttgatctactctttgtaggtatcatttgaaagcaaacttgaaaatgttttgtacatagtacatacttgtatagtcctgtgagatgaagtatggctatcagaccaaaggataagccaaactgtaggtagcagaatggaaattattattttgagaggaaaatttgtctttgaatggtgattatgacttaatcattttaaaactgataaacttgacaaaaaccctgtatgaaataaacatgaaattaatagcactgatttcattgtaaaattttaaagcagtttaaagggtaccacaggttatcacagtactctcaatgccacaaacacctcttgttcagtattctagaaatactgaatcagaattctgtgtttattataatctcagcatactgtacataatatctgctagttaaacttgggtaattggttaaggtgacttactgtctatgtcaatatgtatagttttgagtacttcaagagtttacttaaaagtgatgatgttactggtatgttggcagtgggtgggactgaagtagtgtatctattataaattgatctattttcttaattctaagatgaagtccaattttaagcatcagcttttaggtgcaaaggaggaattaacacattaaatgtatacagttctaaatttttgaaataactgatgtgtag

SEQ ID NO: 14156 - DNA, 2062 bp, Homo sapiens
gacggaaagcggtctgctcagtttgagcacaccctcctggtcacagacactggctgtgaaatcctaacccggcgacttgacagtgcacggcctcacttcatgtctcaattttaatttctcccaagatggcacatctcagtaccttcttactgtgctatgcattttattgagagtacagaaaggaagaggaacctttttttaatcacttgttttgttttgactatagataagaaaggactacagcatttgatgtgtgtcctcaagaacttgtcttgggtctgaaaaagctgagaagaataaaggaaacattgctcaactcttcagccccctccccctgcacacctgttttctcatttgccctttgagcacttttacttaaacttgcttgtagttgcttttatcactgccgcaaaacagccatcaagagccatctgctttccaggtgaacattggaaatgagaatctttgaaacttagcaatatgtgttgcaccagattttttaaattatatatatggaaatatatatgtatacattttaagttctgtatacataattaccaaacactatgtgacctggagtttgtgttgtttctgctctgacaggtttatatgttcttacaaatggatccatagtttgcagtgatttaattcctggttgggatttggcctcccctctcccccatgctaattatttacccttgtaattgtgcatagggaagcactcacccaatgagactttctccaatgtggactctgtgtgtcagtgaatgaatgtagtaaaattcactttggaaggttatcaggcttttaaaaatctagtttatggcaaaaatagccattttccaagtggtggctgactgttgcagggaatgagaatttcataatacactgctatttcagacctctgtttggtcagaaatggaaaagaaaaagccccctttcttcccttttctgttttacttcaagggcataccttggaggtgctcagagaagcgtgaagtttgcactatggtggaggatggggaaagagttctaaagtgtctccagctgtgaacccaggaggtcaagtgggctattaaaatctaacgttgagtaaatgtgatagtgatgagaaaggaattttgtgtactgtaaccttgcagtagagatgcagctgtccttcgtgtgtggaaacacacctctcctttacatagttgggaacctcattagaaatgacctcagctgccccatatctacgttcctttcagcagttgtccaagtaggagtgtatccagtgaagacatatcaaatcacaaagtcattgtcattagagtgtacttgattactgggcatccttgtaatataatttcataccactgacacattatacttgtaagagaacatctttcccagagtgcctcagaccttattgctttaaaatataataatgttttcattacttttattatttgaatgatttagtaaagttgactgaatctggtatagactttgggagtatgtgtgtgaagtttttatcaaactgtaatatttgtgaatggaatgccttgcaatatgaatgttaatataatgtgtaaagggagattaaaaagtttgaatgattatcctaccatgtagtcattaactttgctgcatttctttgggatttcagagggaaatggtgggaatggggaggctgtttgataatctaaaataaattcatgaccatttgagtagaaatgttttttcaggtgtaatggctgtacataaactcagtagagtgccagcagcatttgagatgcaaccatatttttgagagcttttaagacagaatgctgaatattaggggagcattttatgtactgattgtggaattaacaatgtgggcttattcagtgtctgtcattagaatataagctgaaggaagaaagatcttggtgtgatagttttttggttaaaagataaaacaccacactggtgataatgcttttcttagtttgggagattttaaaacaatatggactctagtctaattgcatatatctaattacaaatgttcattggatttaggtgacaaaacacctag

SEQ ID NO: 14157 - DNA, 1191 bp, Homo sapiens
gcaaggtgctaaattactaatgaatatatttgaaattgtagtttacaacactttcttaatatttactggtcattatttttaaaacatttctttttcctgtgggttttaagaaacctaattccaacttgcctttttcctttttttttctttagagtcactcaagggaaaggattaatgccagatggtaccagcagatttacttgcaaaggaaagacaattttgcattacatgggaaccagcacattttctgaatacacagttgtggctgatatctctgttgctaaaatagatcctttagcacctttggataaagtctgccttctaggttgtggcatttcaaccggttatggtgctgctgtgaacactgccaaggtaagagactgacttgggttttttgcttctgccttctaatttaattcagtgaaactttcctggaatagtgaaattggccaatctgtatgaaacccagtgattctcttgactctggtagaatgagtactttataaactttctttactcctagttggagcctggctctgtttgtgccgtctttggtctgggaggagtcggattggcagttatcatgggctgtaaagtggctggtgcttcccggatcattggtgtggacatcaataaagataaatttgcaagggccaaagagtttggagccactgaatgtattaaccctcaggattttagtaaacccatccaggaagtgctcattgagatgaccgatggaggagtggactattcctttgaatgtattggtaatgtgaaggtcatggtgagtatgggcttcattcctttttagtttatggaactgctttttttgaagtgcagttttagattaaaaattgttttgttttggcaaaggaaaagtctcttaataagaatttttctagtgaaagaaggggaaaatatctatttgaactacaatgggaaatgatacaagaacagctcagggaaggatgagaaaagatgtttctttgcctttcaatgcctgctaagtgcatgtctcatgaaatgaaaagacagaataaagcagttgtgcagagcatgatctttggaatcaaatacacatccacttactaactcagtgaccctgaacaaacagcttctctcaacctcagtttcctcatctgtaaaatgcaggtacaggttgaacatctatccctaatccaaaaatccaaa

SEQ ID NO: 14158 - DNA, 1243 bp, Homo sapiens
aaagcaggataaggaaaatcacactgaatctacagtgaactctctgccacactaatgttacctggtttccttttagtttaaggaaaaattaggagaaagtgaggtgctatatagaatattgaaattggaagaacattttattttctcttatttctgttgtgatttttaaaaacttttttttggacctaaataataataaaaaaaaaagccctttaaactttgtaaggaaatattttttgattttgcgtaagaagatttaaatgtgtatgtgattttttttgtttttgtttttaaagcctcagtagtttctagataattttactgtattagtatattttcattttctttcattttatattctttagaatgtgccttctgacctttcagttttttaattttatagtcacatcaacatctttatgatctattgcctatatatctgtgagggcacatattcataaatatactgtcaatctatcagcatttgtgtatggtaggttaccctctatttgcagcttttatgtttaaattagttacttgaaagaatgtagtaattttaggaagaagtatcagtttgatagacttaataattcatttcttttggactatggagcgcatatctgttccttctttatgatgcctttttatggttctgaagtaattactgaagagttgagaatctctttaatgcattttcttaattcttacaatggtgataagttacttcaattataaaattgaattttgcagactaaattattttataaggctgttgctattgaaagatcaattttgtctttacctgcatttaaaatggaacagctcttagcagctgtggtttttttttccatattttttttaaatttgttggctcttaagatgaataaagtttataggtgcatctgcctcctcttctctaagaatatgcatactaatgtttgtttctataaatcaaatacacatgtgataatatgcatgtaaatacataactatcctcatcatgtatggctctcagttcttaattgatgataacatgattgaattgccatatatctgtattacttgtgtgaatggttgtgttgaacacgctaagaacaatttgaattttattaagtacaaaaatccttaacgtttgtatgggaacattggcaagaaagaatagtgtgaaagggaactgttttagtttcctatcagtaattgtacatgcagttaaatgtttaaggtaaaatgattggtctctgtc

SEQ ID NO: 14159 - DNA, 1191 bp, Homo sapiens
caaagaagttcctttacaaataagtaataagaaaaatgagtactaaaatacagctttgtgccttttaaccctatgccaactcctaaacatataagtagattacagtatacttatctgatcagagcatgatctgtttggccacatgcaagtgtgagcagaaatagagcagcacgtagaatagtaacttaaagcaagtcatcctttaaaaattctgagctaaaatctatttaccattgagtaattgaattaatcccataggaataagctccttgtaagtaaatccatgatatgaattagaaaaaaaaaacagctggaaattgaagtttttgatgcctgtatactggatatgaaactatttgatttctagtcttctgtgtttagcagttgtaatattttaatgattttgcttcatactcggttaatggaacataaacatatctttgatacttctttgtgagtgagagaatgctagatagggtggctttgttctttgtttaagttttttttcctgaatgtagttaatttatggcatctgttgaataaaactgctaaaatgacctcttaaaaatgttctgttgtatccccttttccaggtgaatcaatagaaatgcctgattgaattagtaggttaaactaaacaacatactgtcataggaaaactggagagcttaaccaacttgctcttagaaatgttaccttaaaaaaaaaaaaaaagcagtgcttaagagaaaatacaattttaattattttgttgagcctgcagagtaagtttttaaaaatataagttcatagcattttaattaactttgaaagttcatatgcatcagaaaatttatgaaaatttgaatgaaaaaaatttcatctatttatttttctaattttaatggcaaatttacactattatggctgataattctgtgaacttaccttcttgttgactgattctttttcccttaatcccagctttaaggagataggtgaagttattgtacaaagttaagtgataccataaagtatatattataaagtcatacatggcttttggacagtattatatttcagttgcagtgctgcattccattaaatttcataaaatgctagggaaaatgtgtttgataaaattttctgcagtgagaaatgacagactgagtgcctgacaatttaagccacatatgaagtatgcaagtaaag

SEQ ID NO: 14160 - DNA, 2311 bp, Homo sapiens
ggtccgattagccttttctctgccttgcttgcttgagcttcagcggaattcgaaatggtaaacttcgcagagacgctcgatgactccgcgggtttttgccggcgagagaaaaacccgttacacagagggatgggggtgaagtggcgacggttgggaacgcgcggagacaggatttagaagagtggggggaggtgttttgtcggctgctagcggagcagcctcggatctcgcggcgggcggcgacggttgggtggcgcgcgcagcgccgctgggggccggcgggcggaggcgcgcggccgtggcgagcgcgcggcggggggcgaacgggcggggtcgcccctgcggcgcgccgcgggccggagaccccggcagggtgcggggacgcgctcgcggcgggacgcgccgcggtgggggatgggcgcgccgccttggtaattctatattctccgttcctcctccgctcgcgggcgtgtgcgcgccgcaggctggcggtaaggctggaaaggactccggaaaggccaagacaaaggcggtttcccgctcgcagagagccggcttgcaggtcagtagttgttcgtgcagtctgggagtcatgatgtttttctttgcatttccttttttgttattcatcgctctcgatgggcgttttgtgtatgcgtgggtgatgcggtgtcgcgacttgggctgcccatacgataaatatgggggggaggaatcacgtgtttcgatgtcgggacgcgttgctgcgcccgtgccccttgctttggcgcgcatataatttccccatctctagttctcatttttgtgcatttatgtttgtgtatgcttaaaatttaagttcccagtgggccgtattcatcgacacctaaaatctaggacgaccagtcatggacgtgtgggcgcgactgccgctgtgtacagcgcagccatcctggagtacctcaccgcagaggtaaatgggtgaacgcctataatccggagaaggtttggggggcggggaggcggcaagagggaaggaggaaagtgatgcaagaaaactcccaggccctgaacgcggcgagaggcctaagagaacgctagagggagctggtgttcaacaaggatcctactgagcttgagttctctgctcttggaattaaaattgcgtgccccctgtatatcttgccagtcagatagtgaggaacgattccagttggtagatctgcgtttgtgagggttttattctgttctctgaatcttggccaaaggaaagttggaaggcaactgacagattctgccttttaggtacttgaactggcaggaaatgcatcaaaagacttaaaggtaaagcgtattacccctcgtcacttgcaacttgctattcgtggagatgaagaattggattctctcatcaaggctacaattgctggtggtggtatgttaacttctaacattttaaaaaatttcttcagaggaaggaattttttgctgcttttaattagtttttccaggagaggaaatttaagtatattttcaatgatggaagtatggttgtatcatgaaatttgatttatatgtataactcaatgaatttttacttcatacttgagctgcatgtttttaaagatacctttcaagttgaacagtatacactttcttggtttcaaatactgtgattttttaaaaaatcttaagtagaattaattcctgtcactctcctaggtgtcattccacacatccacaaatctctgattgggaagaaaggacaacagaagactgtctaaaggatgcctggattccttgttatctcaggactctaaatactctaacagctgtccagtgttggtgattccagtggactgtatctctgtgaaaaacacaattttgcctttttgtaattctatttgagcaagttggaagtttaattagctttccaaccaaccaaatttctgcattcgagtcttaaccatatttaagtgttactgtggcttcaaagaagctattgattctgaagtagtgggttttgattgagttgactgtttttaaaaaactgtttggattttaattgtgatgcagaagttatagtaacaaacatttggttttgtacagacattatttccactctggtggataagttcaataaaggtcatatcccaaactagttgtgtattaaatttgcttggttgtaataggaacttgttttgagtatctcatctagcagcaataactaagcacatttctttgtgactgaactgtcaaatctgtagatcaacaaagtgagatagcccaagtatatttttttaatgttatatgagctactaaagttttaatt

SEQ ID NO: 14161 - DNA, 1205 bp, Homo sapiens
ttaataaatactagtaaatctgtatggtgtttttcatttattactgataatttctttttctgttgttagaataccagaatatagaccattaaaaatggaaaaacatcagttttaaaaattgacattttcagaataaaagaacaaaaaataataatagtatgtttttatttaaggtcatgaaactaatttaaaactcaagagtgttaggaaggaggttttatatagaaatggaaatgcaaagagatattccttttttctacaaagctgatctgtggtatgaccataagctaattgaaaagaaagcatgtaaaattaaactcataagtgtttggtttccatgtggtcagtcataaggtattgagaccaaaacctgactcatgtatgaaggaactaaaggtggtcaggttcaaggccttccaactagagataaagcatttatttctattgcatatactcttgctgattttattttgtctcttagcattgtcactttgtgtgaagtagctacaatttttttttgaagaaaataattccaactttgcccagtggccaaaaattatactttaactcctgacagactatataaaaaaatgtgtgcctctggtcccaggaggaaccaaatggctcagtcagcacaattcatcattactactggcaaaaataactcagcatgcctgcgctgcttggtggtgagtcagtggcatcatattcatatactgacagcaatttttttctttttaggaattaccctctgtatcctgagccaaaacacagagcagtaagattaaattaggtatcagtgttttaaagagcaaaggctgatgttattttaaattattaattcattttaaaaggtcaagtagggtttaggtgctgaggtgatgacagaggtcaatttgatgatggtcttgatcttggggagcttatatcttatagaaaatatgagatgtacttaggtaatattttcagcacagaatgctgagttactggtaatattcagtgggagttcacagggaggaatgagaatgaatacttatgattgggagggtttgttttatttattcagcagtttgaatactactgtgttttaataggaatttttaacaaggagatttaattgtagctctgactgatccaatagtccagcagaaatttactgaacaatcagaataagtgagatatttaaatgaataagaaatcactaa

SEQ ID NO: 14162 - DNA, 1416 bp, Homo sapiens
gacagttttcaacttaagagtcttttgactttatgatgattttattgcgatgtaatgtcattgtaagtagaggaacatctgtacttacaatgaaaatgaaattgaatatattttaatgatccattttatataattgcaatgtatgcattatataatacatatatgcatgtatatttactttattattcagtttaatcaaaagtatatgtaatctctttatatttattgactcctgattgtctttttcaactgcttataattaaatgaaatgtctgtgtaagccacatagaaaagtgcttggcaaagagtaggcattcattaaatgtcaactattatcattagtttagtttttaaatgatacatagtgatacaaagtagtagatattagagagttcagcctggataacttacaaattgattgtatgtgtgtcttcataactaccttgagtggaaagagataaaaaaaaggtaataaattggatggcttggacaaggttgtatgttcagaacctgagctttaccagcagaaaaattgcagcatcatactgagcgatggtatcatttttttggtatcatttttgtatccttctatcccccaggctgaagtgcagtggcacgatctcagatcactgcaacttccacctcctgggttcaagctattctcctgcctgagcctcccgagtagctgagattacagacacacgccaccatgcctggctaattattttacttttgctagagacaggttttcgccgtgttggccaggctggtcttgaactcctgacctcaagtgatctgcccactttggcctcccaaagtgttggaatcacaagcataagccactgtgcctggccaagaggtggtatcttaatgtttagtattgccttacaatatagagaggcagcatggcttaggggccagaacacctaacaaatagctacagacttcaggtaacttattcagttttcatgatttttaaatatctccttagataaatagggataatactatcaagctgatagggctggttgtaaagattaaatgagataatgtaaagaataaagcacagtgccttgtcacatactaggcaccaaacaaattttaattctcttcctcctaaaacagagaagagaaaaatgataggagtgtaagagaagaggaaaattaaataagtggcattgtgtttacataacttttaaaaaacataaattgatctcttggagtttaagttatacttggatttgcaagctaataagaaaccctgaagtgaaggattcttcactatttcttttctgtgaattattaacgtaagttagaattgtctaatttttgatttttaagttagtctccttccataaagcttatttattttttgcttcaaaaatgtgttaatatttttcaccattccattcaata

SEQ ID NO: 14163 - DNA, 1188 bp, Homo sapiens
ttactgggcacaagtcgtttatgataacgaaattgtagtttaatctgtgaagagatgtgaatgtaactgagacacgcttaaatggaatatacagatgagctttatttttatatctggcatgcttggatccatgccgaccctccagctgctcgggcctgcccttaggggctatggaccgcatgactctatcagcggcactgccaccgccgccgcctccgtgctgcctgcgttccccgaccattgattgggcccggcaggcgcttcctgggggcttccctaccggctccagcccttgggattcgggagcgccctgctaggaagccagagccccgcaggggccgcggcgtccaggccgcctaacgcgcgcccctcgcccggcgccccgaagcggccccgaggggcgggagccgaggcgagcggcaaggccgggccgggggcgcacagcgcccctagaagtgcgggcttcccccacccccggcagcgaccctacctcccgcccccgctgcgtgcgcgcgtgtgtccgtctgtctgtatgctctctcgacgtcagtgggaatttccagccaggaagtgagagagtgagcgagacagaaagagagagaagtgcaccagcgagccggggcaggaagaggaggtttcgccaccggagcggcccggcgacgcgctgacagcttcccctgcccttcccgtcggtcgggccgccagccgccgcagccctcggcctgcacgcagccaccggccccgctcccggagcccagcgccgccgaggccgcagccgcccggccagtaaggcggcgccgccgcccggccaccgcgcgccctgcgcttccctccgcccgcgctgcggccatggcgcggcgctgactggcctggcccggccccgccgcgctcccgctcgccccgacccgcactcgggcccgcccgggctccggcctgccgccgcctcttccttctccagccggcaggcccgcgccgcttaggagggagagcccacccgcgccaggaggccgaacgcggactcgccacccgggtaagccaaactcgggcgagtgggggcccggcaggggacgcgtggcccaagtcctgccgcccagccctccgcaccccctccagccccactcggacttcctcattcctgcgctaaccgctgggctagaccgtgggaggaggttgacagtagctgagagg

SEQ ID NO: 14164 - DNA, 1223 bp, Homo sapiens
atctcagtaaatattctgtggtcacagctttatgttgtagaaattattttgccataatattagaaaaactattcaaattacacctaaaaatctaatttgttagttgttgttacaccatcatttttacctgtatgtttttccctcttcattgcagtgtcatagtacaatttttatagtccaagatatataggatgttgtattcaaatttttaaagaggtagagaggttgattatctaaaccaatattaacttgtaactctaaaatggattattttagtcttctagattttttgaaatctaaaacctttagtagatctagtacttgttgaagactatgggatgcgacataactcttaggtctaaagttaaatttctctgcacagtggaatgtccttttcatggcacagaaatgtggccaaaagaatgttggccttaaaacaacaaatacatgcatatcaaatctaattttctagttgatttaactttaatgtgttgcctgaaagaggaaaaatggctctattttacatgaattttcacatatttaaaggaaattaaatcctacaggaaaaataatagcaaatttgcagttgtttttagcagagttaataaaaagtgagagacttgaagtttaatgtaaacatgcttccaactcctctgtatttttcatgacatccaaatattgctctgttagaggactgtcttgatatgttctttcaccattttaacagggaatgtttttataagtgttacattgtcatacaggctgtatcttagtgtgaaaatatttctatttctaatcaattttatttccatatccaaaattaaattctagccatttggtgggggaatttttaaattatgattatgtttctaaaagtaatttaaaatgtccaggggtgaatttcatacagacaaaagatggtaatttaatacattgaccagtgactcccccttttttttcttgtgtatgcttcatttcagatgcattcatttttcaactcgcttccttgtaaatttcttgaataataacaggaagtaattatacccttgttttctccagttctctagccttatcctgatttatcataatattgaaaagataaaaataaattctctggccgggtgaggtggctcacgcctgtaatcccagcactttgggaggccaaggcaggtagatcacgagctcaggagttcaagaccagcctggccaagatggtgaaaccc

SEQ ID NO: 14165 - DNA, 1104 bp, Homo sapiens
gttttgcactaacttgtggtccccccaaattcatatgttgaagtcctaacctctggtatctcagaatgtaatcatatttggagaaggtctttaaggggtgattaagataaaatgaggcagttagtgtgggccctattccaatacaactagtgtccttttaagaaggggacatttggacaatggagagagacaccagggatgcctagcacagaaaaagaccatgtgaggacacagtgcaaacagaggagatcggcttcaggaggaaccaaacctgctgatagcttgatcttggacttcactgtgagaaaatacatttccattgtttaaaccacttagtttgtgatactttgttatggctgccatagcaaacttatatacacatatgtaacatttttaaagaaaatgtttttcataatgtttaaatttcaccataatcagaatatatcttctttttctccttgaaattgcaggagcaatgttcctttagttgggactgggggccttcctttcctacccagggaatctggaaagatgttagaattgaagcctataatatttgtcacctgaactacttcacattttccccaatatatggtaagctgaaagatgtgatttttttttctttttgagtcttcttgttataaaaattgggtttataattgaaatacagaggtatgtttttcagagatttagaatttttaaaaactttgtggtacaatcaatttataaaagtaaaaaataggtacaaactgattttacatgaaaattgacaatataaagcagatatgtaggtaggtatcttttagcatattttacagaaaaaggaaaaaataaaatggaagagcagcgccaagttttcctgagataagtattctttcttgaaagaactgggcctgctggctgtgctcctttttgctgcctctgtagtcacttttagtgtcaaattcttgctttgctcacaccgttagactggctttctgtctctgtacattttcttcataacccagagcactactctgagggccctgacacaagggccctgacacaacagccttgtgaagagttaaaaataaactggaaggtaaacagggcaaaagaaagatt

SEQ ID NO: 14166 - DNA, 3023 bp, Homo sapiens
acatctttatttacaggtacaacagaatatctcgggaatggactcagaagtatgccatgtgatgctaccttaaagtcagaataacctgcattatagctggaataaactttaaattactgttccttttttgattttcttatccggctgctcccctatcagacctcatcttttttaattttattttttgtttacctccctccattcattcacatgctcatctgagaagacttaagttcttccagctttggacaataactgcttttagaaactgtaaagtagttacaagagaacagttgcccaagactcagaatttttaaaaaaaaaaatggagcatgtgtattatgtggccaatgtcttcactctaacttggttatgagactaaaaccattcctcactgctctaacatgctgaagaaatcatctgagggggagggagatggatgctcagttgtcacatcaaaggatacagcattattctagcagcatccattcttgtttaagccttccactgttagagatttgaggttacatgatatgctttatgctcataactgatgtggctggagaattggtattgaatttatagcatcagcagaacagaaaatgtgatgtattttatgcatgtcaataaaggaatgacctgttcttgttctacagagaatggaaattggaagtcaaacaccctttgtattccaaaatagggtctcaaacattttgtaattttcatttaaattgttaggaggcttggagctattagttaatctatcttccaatacactgtttaatatagcactgaataaatgatgcaagttgtcaatggatgagtgatcaactaatagctctgctagtaattgatttatttttcttcaataaagttgcataaaccaatgagttagctgcctggattaatcagtatgggaaacaatcttttgtaaatgcaaagctgttttttgtatatactgttgggatttgcttcattgtttgacatcaaatgatgatgtaaagttcgaaagagtgaatattttgccatgttcagttaaagtgcacagtctgttacaggttgacacattgcttgacctgatttatgcagaattaataagctatttggatagtgtagctttaatgtgctgcacatgatactggcagccctagagttcatagatggacttttgggacccagcagttttgaaatgtgtttatggagtttaagaaatttattttccaggtgcagcccctgtctaactgaaatttctcttcaccttgtacacttgacagctgaaaaaaaacaacatgggagtaataatgggtcaaaatttgcaaaataaagtactgttttggtgtgggagttgtcatgaggctgtgttgaagtgacttatctatgtgggatattgagtatccattgaaatggatttgttcagccatttacattaatgagcatttaaatgcaacagatatcatttcaggtgacttaacatgaatgaataaaagtcaatgctattggattgttttttgtttgacaagtgctatctgtgccactgatttaacttctgtagtaacaagggcattaccattcttcacctttcctaattctgatcccatagttttacatttttcctgtttattttgattttgttcactgctttatttcttaaagttctagcacatctgtgactcctccacttccacatttttgcactgcttacacttacgtgcaatcttattccttgtctgcacacacatgtggaaagctagaaataaatgttaaaacttactttttataaacattttaatatgtagtttggacatgatttattgacttaaggttcttctctaaactggaagtgaaatgcatgccttctgaagatgttctggctttgttaattctgtaatcatttcattggggaaaaaaccagctacgcagtttttccaatgagtgaattttttcattttgtgttttgcttaaaacggctccttcagggtagatgtcatactgcataacttttttggattcaaattatgaatgagaaattagttaacattctgctccacaaggtaagaaaaactgctctttggctctattttcaaaattacttctgagatgcatatagtctcaaaataacagctttagtaggcatatcacttcttgaaagccaaacatgagtgtaagacacttttatgaaacacggtggatccctaactggctttcaaattgacctttatagccttagacaacccttaggtatttacggagatgacttctttgattgtcataacaattagtggatgtgtccagttctctgtatctttgacttgatgctttatacatcatttcatttgttgcttctaagggaataagccatagaggcttctccaggtttaaaagaacagtaaagtacctggaaaaccaacatttttgaatgtatggacactggacatgagatatgtacaatgaaatcttaaaagaatctaagaatttgccctctttgccccactccacccagtaatttgacattactagtgccatgtataggacccaactgagtattagaatcagttttgactatgtctttgtatttcctaaatcttttaatgcataaaccgaattagggtccagttggcctgttaatggtaaatttacattttaaatgactcagtttgtttttcctgggcgagtttgcaatgtgataatcagattttttaaaactgattaatttgctttcttgtgtgggtgtactcacattttaaagtatgaaccacagttaactagtggtctcaggggtagtgaaacactcacttttttttttgtttgtttttttttgtttgttgaaatggcttagttgaagtatacttaaggtactgatcatgctgtgttagtaatttgggcggggaggggggtaactcagccatgttttgtgttggcataacaaaactgttaatgattgttgattacacttttaagtgaatttgtcttttatgaggaacccagtgcaagtcactaaatattgtctaatagtgacatctgca

SEQ ID NO: 14167 - DNA, 1128 bp, Homo sapiens
aatttcaaattgaagaattccaaataaaactttattacctctcagtttaactatggtttgtctaatagttcattttaggacaaaatggggagtaaacttctccaactctgaggtgaaatacaccatcttcatgaccaaacacggtgaatcacgttgccatttttcattcttcacatctctcctgtcttaacctcctttccacttccagctgtgcttggtttttgtgtatttttgtaataggatgaatgttgttttcattttctttctcagaggtgcaaaatgcaggagcagagagtgtggattctcagccaggtccttggcacgcctcctcaggcaaggatgtgcctgagtgcaaaactcagtagactcctctttgtcacttctctggagatccagcattccttatttggaaatgactttgtttatgtgtctatccctggtaatgatgttgtagtgcagcttaatttcaattcagtctttactttgccactagagttgaaagataagggaacaggaaatgaatgcattgtggtaatttagaatggtgatagcaataccttcttcttgcatatggtaatacttttaaaagttgaattgttttatttatttgtatattttgtaaagaataaagttattgaaagaaatgtaaagttatctacatgacttagcatattccaaagcataatacatacattaatataaaacatcattttattaacaaaattgtaaatgtttttaataccttacacattcaataaatgtttagtagttctgaatcaccgctcttctatataatgttaatggtttcttggtgaggtagtctctcttgttgactcagtattttgctatgaaaatatacacaagttttctggatctggatttaaattcttaaaggatagcagaggctatgtcctcttaactttccagttctaatattccttttactgtaataaccacagaagttctttctcacatttctggtaacctacctatcccaatccctatacaaactctctaaattggttggtttattatagactttgtttttcattgcccctcactcccagcctggaggaacctatagatcatttattctacctcttcattgtagacataaggaaacagtac

SEQ ID NO: 14168 - DNA, 1147 bp, Homo sapiens
ttctttctccccctcctcctcttccacaggttcctcagcttccttcagaaggaaaaagcactctgaatggtggagttttagaagaacaccaccactaccccaaccaaagtaacacaacacttttaagggaagtgaaaatagagggtaaacctgaggcaccaccttcccagagtcctaatccatctacacatgtatgcagcccttctccgatgctttctgaaaggcctcagaataattgtgtgaacaggaatgacatacagactgcagggacaatgactgttccattgtgttctgagaaaacaagaccaatgtcagaacacctcaagcataacccaccaatttttggtagcagtggagagctacaggacaactgccagcagttgatgagaaacaaagagcaagagattctgaagggtcgagacaaggagcaaacacgagatcttgtgcccccaacacagcactatctgaaaccaggatggattgaattgaaggcccctcgttttcaccaagcggaatcccatctaaaacgtaatgaggcatcactgccatcaattcttcagtatcaacccaatctctccaatcaaatgacctccaaacaatacactggaaattccaacatgcctggggggctcccaaggcaagcttacacccagaaaacaacacagctggagcacaagtcacaaatgtaccaagttgaaatgaatcaagggcagtcccaaggtacagtggaccaacatctccagttccaaaaaccctcacaccaggtgcacttctccaaaacagaccatttaccaaaagctcatgtgcagtcactgtgtggcactagatttcattttcaacaaagagcagattcccaaactgaaaaacttatgtccccagtgttgaaacagcacttgaatcaacaggcttcagagactgagccattttcaaactcacaccttttgcaacataagcctcataaacaggcagcacaaacacaaccatcccagagttcacatctccctcaaaaccagcaacagcagcaaaaattacaaataaagaataaagaggaaatactccagacttttcctcacccccaaagcaacaatgatcagcaaagagaaggatcattctttggccagactaaagtggaagaatgttttcatgg

SEQ ID NO: 14169 - DNA, 1209 bp, Homo sapiens
ccaaataatgtgatcccaaagcaagatcttcttcacaggtgctttcaagaacaggagcagaagtcacaacaagcttcagttctacagggatataaaaatagaaaccaagatatgtctggtcaacaagctgcgcaacttgctcagcaaaggtacttgatacataaccatgcaaatgtttttcctgtgcctgaccagggaggaagtcacactcagacccctccccagaaggacactcaaaagcatgctgctctaaggtggcatctcttacagaagcaagaacagcagcaaacacagcaaccccaaactgagtcttgccatagtcagatgcacaggccaattaaggtggaacctggatgcaagccacatgcctgtatgcacacagcaccaccagaaaacaaaacatggaaaaaggtaactaagcaagagaatccacctgcaagctgtgataatgtgcagcaaaagagcatcattgagaccatggagcagcatctgaagcagtttcacgccaagtcgttatttgaccataaggctcttactctcaaatcacagaagcaagtaaaagttgaaatgtcagggccagtcacagttttgactagacaaaccactgctgcagaacttgatagccacaccccagctttagagcagcaaacaacttcttcagaaaagacaccaaccaaaagaacagctgcttctgttctcaataattttatagagtcaccttccaaattactagatactcctataaaaaatttattggatacacctgtcaagactcaatatgatttcccatcttgcagatgtgtaggtaagtgccagaaatgtactgagacacatggcgtttatccagaattagcaaatttatcttcagatatgggattttccttctttttttaaatcttgagtctggcagcaatttgtaaaggctcataaaaatctgaagcttacattttttgtcaagttaccgatgcttgtgtcttgtgaaagagaacttcacttacatgcagtttttccaaaagaattaaataatcgtgcatgtttatttttccctctcttcagatcctgtaaaatttgaatgtatctgttttagatcaattcgcctatttagctctttgtatattatctcctggagagacagctaggcagcaaaaaaacaatctattaaaatgagaaaataacgaccataggcagtctaatgtacgaactttaaat

SEQ ID NO: 14170 - DNA, 1208 bp, Homo sapiens
aaaagaacattacctgtattttttatcatgtgttatctcttaagaagaggcagattagttctaaaatcaacaaattgtatttaattgaaataatttagtgatgaggaagaggtccattctagtgcctgctaaatgtataatccttcttagaatgtgaagttgtccttaaacttttaaataccttcagttaatctttatattgtcatttatgaaaaccttgaactaagacttatgtatctttcatctagctctggttttaatgcaggtagcatttaattgtccccactgtactgggtatagtctgctaaacattaaggagtagttttgcatctctccttgttctgatactagggtcaaagcccactttttatagatgggcagcaaaaggcacattggacatgctgataaatgttgccctaattgtgatctaaacatgataaaatatacatacataagtgcccttatctgctgcaagtgacccttgttttgttttggttggggtggggggtgtttgggatggaatggtgatccacgcaggtggttcgcagaagcagcagtgaagagaagctactgtgtttggtgcgggagcgagctggccacacctgtgaggctgcagtgattgtgattctcatcctggtgtgggaaggaatcccgctgtctctggctgacaaactctactcggagcttaccgagacgctgaggaaatacggcacgctcaccaatcgccggtgtgccttgaatgaagagtaagtgaagcccagggcctctcccctctttgcggccactgataggaaagcccaatctttggttgaaaggaagagagttcagcgtgcacttttacatttataaaatgggcatcaaaatgcctgtttggcagtcatgcgataagaagttgtatttgctaatgtgaataacttgagatgatttcattatctgaattgtacagtttagccattaattaggagcagtcagagtgtctgtaaccacatggcctcagttataccataaacttgaaattgtttatgtgctcacatgctacaagtgacggctcctgtgtgcctggccactatattagtatgtattgactccacttccatgttgcagtatctgaaacagaaagtaagtctaatgagaaactttgggattcccaggtcaaataccttccatatgtatgtagcaaaaacaaaatacaaagcctagaagttctg

SEQ ID NO: 14171 - DNA, 3225 bp, Homo sapiens
gtgagaaagaggaagagtgtgaaaagtatggcccagactatgtgcctcagaaatcccatggcaaaaaagtgaaacgggagcctgctgagccacatgaaacttcagagcccacttacctgcgtttcatcaagtctcttgccgaaaggaccatgtccgtgaccacagactccacagtaactacatctccatatgccttcactcgggtcacagggccttacaacagatatatatgatatcacccccttttgttggttacctcacttgaaaagaccacaaccaacctgtcagtagtatagttctcatgacgtgggcagtggggaaaggtcacagtattcatgacaaatgtggtgggaaaaacctcagctcaccagcaacaaaagaggttatcttaccatagcacttaattttcactggctcccaagtggtcacagatggcatctaggaaaagaccaaagcattctatgcaaaaagaaggtggggaagaaagtgttccgcaatttacatttttaaacactggttctattattggacgagatgatatgtaaatgtgatcccccccccccgcttacaactctacacatctgtgaccacttttaataatatcaagtttgcatagtcatggaacacaaatcaaacaagtactgtagtattacagtgacaggaatcttaaaataccatctggtgctgaatatatgatgtactgaaatactggaattatggctttttgaaatgcagtttttactgtaatcttaacttttatttatcaaaatagctacaggaaacatgaatagcaggaaaacactgaatttgtttggatgttctaagaaatggtgctaagaaaatggtgtctttaatagctaaaaatttaatgcctttatatcatcaagatgctatcagtgtactccagtgcccttgaataataggggtaccttttcattcaagtttttatcataattacctattcttacacaagcttagtttttaaaatgtggacattttaaaggcctctggattttgctcatccagtgaagtccttgtaggacaataaacgtatatatgtacatatatacacaaacatgtatatgtgcacacacatgtatatgtataaatattttaaatggtgttttagaagcactttgtctacctaagctttgacaacttgaacaatgctaaggtactgagatgtttaaaaaacaagtttactttcattttagaatgcaaagttgatttttttaaggaaacaaagaaagcttttaaaatatttttgcttttagccatgcatctgctgatgagcaattgtgtccatttttaacacagccagttaaatccaccatggggcttactggattcaagggaatacgttagtccacaaaacatgttttctggtgctcatctcacatgctatactgtaaaacagttttatacaaaattgtatgacaagttcattgctcaaaaatgtacagttttaagaattttctattaactgcaggtaataattagctgcatgctgcagactcaacaaagctagttcactgaagcctatgctattttatggatcataggctcttcagagaactgaatggcagtctgcctttgtgttgataattatgtacattgtgacgttgtcatttcttagcttaagtgtcctctttaacaagaggattgagcagactgatgcctgcataagatgaataaacagggttagttccatgtgaatctgtcagttaaaaagaaacaaaaacaggcagctggtttgctgtggtggttttaaatcattaatttgtataaagaagtgaaagagttgtatagtaaattaaattgtaaacaaaacttttttaatgcaatgctttagtattttagtactgtaaaaaaattaaatatatacatatatatatatatatatatatatatatatatgagtttgaagcagaattcacatcatgatggtgctactcagcctgctacaaatatatcataatgtgagctaagaattcattaaatgtttgagtgatgttcctacttgtcatatacctcaacactagtttggcaataggatattgaactgagagtgaaagcattgtgtaccatcatttttttccaagtccttttttttattgttaaaaaaaaaagcataccttttttcaatacttgatttcttagcaagtataacttgaacttcaacctttttgttctaaaaattcagggatatttcagctcatgctctccctatgccaacatgtcacctgtgtttatgtaaaattgttgtaggttaataaatatattctttgtcagggatttaacccttttattttgaatcccttctattttacttgtacatgtgctgatgtaactaaaactaattttgtaaatctgttggctctttttattgtaaagaaaagcattttaaaagtttgaggaatcttttgactgtttcaagcaggaaaaaaaaattacatgaaaatagaatgcactgagttgataaagggaaaaattgtaaggcaggagtttggcaagtggctgttggccagagacttacttgtaactctctaaatgaagtttttttgatcctgtaatcactgaaggtacatactccatgtggacttcccttaaacaggcaaacacctacaggtatggtgtgcaacagattgtacaattacattttggcctaaatacatttttgcttactagtatttaaaataaattcttaatcagaggaggcctttgggttttattggtcaaatctttgtaagctggcttttgtctttttaaaaaatttcttgaatttgtggttgtgtccaatttgcaaacatttccaaaaatgtttgctttgcttacaaaccacatgattttaatgttttttgtataccataatatctagccccaaacatttgattactacatgtgcattggtgattttgatcatccattcttaatatttgatttctgtgtcacctactgtcatttgttaaactgctggccaacaagaacaggaagtatagtttggggggttggggagagtttacataaggaagagaagaaattgagtggcatattgtaaatatcagatctataattgtaaatataaaacctgcctcagttagaatgaatggaaagcagatctacaatttgctaatataggaatatcaggttgactatatagccatacttgaaaatgcttctgagtggtgtcaactttacttgaatgaatttttcatcttgattgac

SEQ ID NO: 14172 - DNA, 1225 bp, Homo sapiens
cataagagatatgaggaaattgttaaggaagtcagcacttacattaagaaaattggccacaacaccgacacagtagcatttgtgccagtttctggttggaatggtgacaacacgctggagccaagtgctaacatgccttggttcaagggatggaaagtcacccgtaaggatggcaatgccagtggaaccacgctgcttgaggctcttgactgcatcctaccaccaactcgtccaactgacaagcccttgtgcctgcctctccaggatgtctacaaaattggtggtattggtactgttcctgttggctgagtggagactggtgttctcaaacctggtatggtggtcacctttgctccagtcaacgttgcaacagaagtaaaatctgttgaaatgcaccatgaagctttgagtgaagttcttcctggggacaatgtgggcttcaatgtcaagaatgtgtctgtcaaggatgttcgtcgtggcaacgttgctggtgacagcaaaaaggacccaccaatggaagcagctggcttcactgctcaggtgattatcctgaaccatccaggccaaataagtgctggctatgcccctgtattggattgccacacggctcacattgcatgcaagtttgctgagctgaaggaaaagactgatcgccattctggtaaaaagctggaagatggccctaaattcttgaagtctggtgatgctgccattgttgatatggttcctggcaagcccgtgtatgttgagagcttctcagactatccacctttgggtcgctttgctgttcatgatatcagacagacagttgcggtgggtgtcatcaaagcagtggacaagaaggctgctggagctggcaaggtcaccaagtctgcccagaaagctcagaaggctaaataaatattatccctactacctgccaccccactgttaatcagtggtggaagaatggtctcagaactgtttgtttcaattggccattgaagtttagtagtaaaagactggttaatgataacaatgcatcataaaaccttcagaaggaaaggagaatgttttgtggaccactttggttttctttctttgcatgtggcagttttaagttattagtttttaaaatcagtactttttactggaaacaacttgaccaaaaatttgtcacagaattttgagacccattaaaaaagtttaatgaaaaaataaaataaaataaaaaattaaaagttag

SEQ ID NO: 14173 - DNA, 1100 bp, Homo sapiens
tgtaatatttcctctaatgctagttaattgcacagggtggaatttttttcttttggaagtcatttagtcagtcttcagaaacaaaccttatagcattattatctactgcaaatttttactgatttctagaacaggcttttgaaacattcatcttttattttagcttctaaatgattatattctaagaccataatcacttcaatttatactttaggtgacccaatgaaagaagaaaatgaaagccataaagaaaagtcttacagaagaagaatacctgtacctggacttttctcaccaaacagaaggatgcatctttcctcttcatacatctgtaactttatttctgttatcttactgtgactgtaaaatctttaaaatttgcttagttgtcaccaaagaggtgagtagagatagttcactactaagagatgacctgatccaggatgttgaaatacagattatttcaaggcaggagctcccaccaatagtccaaaattgctgtttgcctgcagtagtagaacgatcagacaatttttgtagagcaggacttgctgttgtattgagacacataatccagaaatcctatgaagcagaccccttaaagaaggaacttttggaacttctgggctttaaaaagacttgcttgaaagcctgtgctgaagtaagtataatgtcttttttctgttatttgaagctacacagtgataacataattacctgaccatttaatattttaacttcctattaggaataaaagtttatttattttaaaaaaccccagtaaccaatgaaataaagtagccctttgatatagtttgaatatttatcccctccaaatttcatgttgaaatgtgatccccaatgttgttggaggtgggacctggtaggaggtgtttgggtcgtgggggcagatgcctcgtaaatggcttggtgctctcactggggtaatgagtgagttcttgctctattagttcatgagagatctagctgttgaaaagcgcctggtacctcttccttgctctctcttgcaccctctctccccatgtgacatgcctgcactccctttgccttctaccatgactaaaagcttcctgaggtcc

SEQ ID NO: 14174 - DNA, 1106 bp, Homo sapiens
gttaatttagaactgtcactgtttcaagttacactttaaaaccacagcttttaccatcataacatggctctggtaatatgtaggaagctttataaaagttttggttgattcagaaaaaggatcctgttgcagagtgagaggaagcatagggggaaactccattggaacagattttcacacaacgttttaaattgatataagtttaggcagttgtagttcataacttatgttgctcatgttgtgctgtgtcaggatgggataggaagcaagtcccatgcttagaggcatgggatgtgttggaacgggatttacacacactggaggagcagggcaagttggaattctaagatccatgaacccccaactgtatttcctccctgcatattttaccaatatattaaaaaacaatgtaacttttaaaaggcatcattcctgaggtttgtcttaatttctgattaagtaatcagaatattttctgctatttttgccaggaatcacaaagatgattaaagggttggaaaaaaagatctatgatggaaaattaaaggaactgggattattgagcctggagaagagaagactgaggggcaaaccattgatggttttcaagtatatgaagggttggcacagagagggtggcgaccagctgttctccatatgcactaagaatagaacaagaggaaactggcttagactagagtataagggagcatttcttggcaggggccattgttagaatacttcataaaaaaagaagtgtgaaaatctcagtatctctctctctttctaaaaaattagataaaaatttgtctatttaagatggttaaagatgttcttacccaaggaaaagtaacaaattatagaatttcccaaaagatgttttgatcctactagtagtatgcagtgaaaatctttagaactaaataatttggacaaggcttaatttaggcatttccctcttgacctcctaatggagagggattgaaaggggaagagcccaccaaatgctgagctcactgaaatatctctcccttatggcaatcctagcagtattaaagaaaaaaggaaactatttattccaaatgagagtatgatggacagatatt

SEQ ID NO: 14175 - DNA, 1151 bp, Homo sapiens
atatgattaatattttcttaattgttgattttttcttttaatatttatctttcctaattgacgttttcttcttgaaaattgtacctaagtgaatacacagtagaaggatccagtatacagaaatataaaaggaatgaaatcagcaactctttactttggaacacagatgtaatactcattagcatagttacggttattgttattcttatctcttagtgtacctgaagctttctttgaaagctttcaaccttaaatgtggctaaatagcctgttttctgcatttaagaacaaactatatttcctcttctaagtagattcaggaattagtctacttaacatttctgctatttgtttggcttgttgctctccataggaaaactatttttctaagatatttatctattacagtagaaaatgtttttcctttcagactgctttttcatagtggcctatagtataaatttattcctttcacagtgtaatttatcacttttatttttcctataggattttctgccgtctcttggcaaaaatggcaaataatgatgctgttctgaagagactggagcagaagggtgcagaggcagatcaaatcattgaatatcttaagcagcaagtttctctacttaaggagaaagcaagtaagaaaatttaaaattttttgaggagatacttaaaatgaattcatacattgatggagaaaaaataatgtttaccgctttaagttatttaagttttacttagaagtttctgttatatgtagaaaaatatcaaacctgaatttctaccttcaggacttcagttggctttggttttgtttgtttaaatgtattttattttcagtagtcaatgtcagaatagaaatttcaaaatcttttgctgtcactagtagaaataaatgctttcctacgttttgtaagctaatggcttacaaaaacctgtatttactctccagaaactttatcaatttttttctaattttaacataccactttgtttctttttttatagtgtttctcgagattttaaaattatttttcttaaaaattcttactctctttttattaaaaagatgaagagattggacatagtcattgctcatatgatataatatatgttgtaaaccaaattttgtcttctgtaggtggcca

SEQ ID NO: 14176 - DNA, 1224 bp, Homo sapiens
ccacactgataatcctggctgtgatatgctataattttgcaagatgttacctttgggaggaaactggataaagggtacaatggtgactggctatattatttcttacaatttcatgtgactctacaatggtctcaataaaaatttcaaaactaatttttttctggttctaaaaattggtaatattcaatagtggttttttgttcagtgacaaatttgaaatgagatttatattcacaagtactatgttcagtatttttttttcattaagtttgtctaatatgaacagaaggaacaaatgctttttaaaaatctaagtttctaaaattatgaaataattttctttttttcctctcctttagccatgaagactttgaatttatttcaggaacacgaatgcgcaaacttgctcgagaaggccagaaaccacctgaaggtttcatggctcccaaggcttggaccgtgctgacagaatactacaaatccttggagaaagcttaggctgttaacccagtcactccacctttgacacattactagtaacaagaggggaccacatagtctctgttggcatttctttgtggtgtctgtctggacatgcttcctaaaaacagaccattttccttaacttgcatcagttttggtctgccttatgagttctgttttgaacaagtgtaacacactgatggttttaatgtatcttttccacttattatagttatattcctacaatacaattttaaaattgtctttttatattatatttatgcttctgtgtcatgattttttcaagctgttatattagttgtaaccagtagtattcacattaaatcttgctttttttccccttaaaaaaagaaaaaaattaccaaacaataaacttggctagaccttgttttgaggattttacaagacctttgtagcgattagattttttttctacattgaaaatagaaactgcttcctttcttctttccagtcagctattggtctttccagctgttataatctaaagtattcttatgatctgtgtaagctctgaatgaacttctttactcaataaaattaattttttggcttcttatttatgtgatctattttatattgctttgtttccgtataccctttcctccttgtgaaaaagtttctgatggaagagggaaaacgcaggcatcttttattactggaatccaatacttagtttctaatactgtattacagtgaaat

SEQ ID NO: 14177 - DNA, 1150 bp, Homo sapiens
cgctggaacctgagaagttgctgagtagccgaggagtggctccaaggagcctggaaagcagtcctcctttgaggaccattcaaggtggagtgtgacgttttgtcgattcttgaaagggaattgggaggaaagaggaggaataaagggatgggtgtagggctgtgtgtacagcattttatgtgttttctgatttatcttcacaactttgagacaaactgtcacccccagttcacagatgatgaaacagattcagagtgacagaaggaccaagagagtattcaagattgaacccaaatctgtctctcccaaagccatgctcttccaggtcacacctgtgccttgatctgtctttatgtcaggatctgtgcagtggggcatctgggtttgaatgtttttttaagtactatgattgttggataaattgtcatatgagatagaaataaggccatgctgcaaattttgaaaatgtacagcttgataaatgggggcaaacatgatccagggtaagaaggggcaatttggtgacttcacaaaagataccatttaatgaaaatttactagttttttgtttttctgtctcccaaaacaggacactcctgggtttattgtgaaccgcctcctggttccatacctcatggaagcaatcaggctgtatgaacgaggtatccttctgacccaggccaggagcagcagacctcagctcctggcgccactgtctggaattctcagtgtctctaggaggggtcgggccgtgcacaatggaggaagcagtgtctgttttctagctttgtgagctcagctgcaccctgagccctggtacctttttcactgttttcccagggcctcctggcttccctgtgggcctctgagaaaggtttctggaactcccaccacccccactacagtcccagccagagcaattgcatggccggcccagattgatatcctggatctctgcttttgattaaaaggtttactgcttttaaaaataatcataatgtaaaaatcactaggctaggagatcttgaaagttccttaaggttctaaaacttgtgactgacaggtgattagaaatatgtgacaaggccgatatgtggtaaggacagtttttagtagtctgtccttactgagtgatgtcatgatgtacttt

SEQ ID NO: 14178 - DNA, 1197 bp, Homo sapiens
aaaaatttttcccattttaatatttaggacaaaaatgtgatgttaaatttattttgcaagaatttgcattttttcctttctgatctcatcattgaaaacccctaaagaaatgaatgccccctgatctagctacataaataggaagtcaccagataaataaggtaaaaagggaaataaggaccagggcatagagcacatctgctataacttcccctatcactctagcacaaatactaattaaatccattagggacaaaccatagagttggctgtcatggcgattctgtggatagagtcctgtcctcaaggaactacatttagtggagaaaagtaacgtacataaataatacaagaaaatgaacataaatgaggaaggaggaagtgctcagcgggggattgatagaaaagcagccagtatccaggctccctcttggcgatgaaaggagcttaaaagctattccgtggtcacagatgatggcggattatccactccagtctgtggcccaatgagaaggctgagtgacttctgttaaaaaacccagcccagaagtgtggttaaatattcgggcttagagaagtactgcagagcctggaggaagaggacacctttaggcaaggtgagaaaagaaaggaatgactgaactctcatgatacagagctgtgaagggagaagcagtcagagactacatggatttggttcagggctttcatttatctgaagatgtcaaagaacttttgtgttacgggctttcggaaattctggcagaaggccaggtgcagtggcttatgtctgtaatcccagcactttgggagactgaggcaggcagatcacctaaggtcagaagttcgagaccagcctggccaatatggcaaaaccccgtctctactaaaaatacaaaaaaattatccaggtgtggtggcacacgcctgtaatcccagctactcgggaggctgaggcaggagaatcgcttgaacccaggaggcagaggttgcagtgagctcagatcgtgccactgcactccacttcatgtaaaaaaaaaaaaaaactctgggagaagaaaatgaggaaggaggccatattattatccagcttctagagagagagtaacaaaagcaaaatggttagctttgaatttatagcaagtcattagtggaacaagaactgcagaggagaaggcgcaacttcccttttgtgcc

SEQ ID NO: 14179 - DNA, 1282 bp, Homo sapiens
ctgaggctcagtaatttatttgtatattggggtgaggggggcaaaatatgaaataaggaccataataaagaatcacgcaattatatttttggattgttatttgatatatcataaaatttgttttggcattttgaaatactatgataataagagaatataaaaacaattcttttcactttttgtgcttataattatatttctgcaggggctatctgatgggttagagtgcctttgagaagaaatcagtggatactggatttgctcctgtcaatgaagttttaaaggctgtaccaatcctctaatatgaaatgtggaaaagaatgaagagcagcagtaaaagaaatatctagtgaaaaaacaggaagcgtattgaagcttggactagaatttcttcttggtattaaagagacaagtttatcacagaattttttttcctgctggcctattgctataccaatgatgttgagtggcattttctttttagtttttcattaaaatatattccatatctacaactataatatcaaataaagtgattattttttacaaccctcttaacattttttggagatgacatttctgattttcagaaattaacataaaatccagaagcaagattccgtaagctgagaactctggacagttgatcagctttacctatggtgctttgcctttaactagagtgtgtgatggtagattatttcagatatgtatgtaaaactgtttcctgaacaataagatgtatgaacggagcagaaataaatactttttctaattaataccttttatatttgttttttaactgacagtgttaagtttttggtctattaatcattcattcccacccatcttatgactttctttagctacttttggtagcctaagatttcaaaatatggttggcaggatgccttgagagttagcatctttatatccttgtaaatattcaagcacaggctgcatatctatgtcagagttgtcaatgtgaatgtgctagatgagcacatgtagaaacatctctggggccgggcgtggtggctcacacctgtaatcccagcactttgggaggccgaggcgggcggatcatgaggtcaggagatcgagaccatcctggccaacacggtgaaaccctgtctctactaaaaatacgaacaaacaaaaacatctctggaccaatctggtcttaatttcttctatccaggccttttggttctccctggctggccatgggcttcacttctctgatggctcaattcattctttcctaagatcttcaagttta

SEQ ID NO: 14180 - DNA, 1154 bp, Homo sapiens
agcctatattagaaatgattttagaaggagaattagaggaatagggaagatcttaaataagaattgtcaaagtaagggtctttgccttcataatcatttaatgtacacttccttggttttatgtgaatatttgttttaatcctttattttacctttattttaaatctaggatgagttatataataaccctcatttgcttaattttgtaaattaaatgtttagtcagattatgtctgacttcaagtcacatgtgagaaaatgtaaataaggttaggtgtcaatacaagtgaaatgtatagtctcccttttatataacgtccactagtttttttgaattaatattttagaaactctgcctatgcttgaaccttgactccccagttatccttttgattcaaaatcataaacatctttgacttaaaaaagtaactttagcttgaggtgaagatactattgttaacttgattttttatgattttctcctttttaggtctttcaatgcacacttttcacggtaacttctttgtccgttctactgatttgttatcccttgccaacatcaatcctgatgctggatttgcggtgcagttgtcaattgaagaaagtttaacagatacttccttagtatgttttcaaacagccctattatatacatcaagcaaaggtaatgttaacagaaatgaaatatagtctgcagcagtaattcctccctcctttcacatggcctttagtggagtggggaaaaagaatgaatacacagtgggaagtaatggaatttgtattagttaatcaaacatatgttgttattttctttctttttttaactctcacttttgcatctttaaatagcacacttttttaatttatggaagacttgtattcttagaatcttgtttcaaaacagttcatgctaaatccagctatgccattctttgtattatttcttgccccaaaaagtaaaaaactgcttagcaattaaggccttcatttgttacttgacagttaagttttctggtattttactctataggatataatttagaatgagtgatatagcgtatgttcatactctgcagatttggagagtgtttaattttcttttaaaaatgttcattgtaaaacttggtttttacatctcaaaatcctgttggtga

SEQ ID NO: 14181 - DNA, 1896 bp, Homo sapiens
aatgccagctactcaggaggctgaggtggaaggattactttagcccaggatgtggagactgcagtaagctatgactgcaccatgacactccactctgggtgtcagagtgagaccctgtctcaaaaaaaaaaaaaaaaaaaaattgggttaaacagttgaatgcaaacaaaaaataagatgcatgagactaaaactggaaatctgtagatatatatgtgtgtatgtaaatatgctacaggttgtgagagtttggtgatttcatctagcatacatttcagtgctcacgagggatatgcttgttgctgtgctgtaatgtgtaacataggtgaaaagagcaatgcagttgcccaacagtaatcccattttcttgttttgcagcatgtgaaacaacagtggagctcttgtttgacagtgttatacatttaggttgtaaaccatatctggacagccaacgagccgcatgcaggtgtcattatgaagaaaaaactgatctttaaaggagatgccgacagctagtgacagatgaagatggaagaacatacctttgacaaataactaatgtttttacaacataaaactgtcttatttttgtgaaaggattattttgagaccttaaaataatttatatcttgatgttaaaacctcaaagcaaaaaaagtgagggagatagtgaggggagggcacgcttgtcttctcaggtatcttccccagcattgctcccttacttagtatgccaaatgtcttgaccaatatcaaaaacaagtgcttgtttagcggagaattttgaaaagaggaatatataactcaattttcacaaccacatttaccaaaaaaagagatcaaatataaaattcatcataatgtctgttcaacattatcttatttggaaaatggggaaattatcacttacaagtatttgtttactatgaaattttaaatacacatttatgcctagaaggaacggactttttttttctattttaattacacataatatgtaattaaagtacaacataatatgttgtttctctgtagcccgttgagcatatgagtaagtcacatttctattaggactacttacaaggacaaggtttccatttttccagttgtaaaattggaaccatcagctgataacctcgtagggagcaaccccaggatagctaagtgttatgtaatatgcctagaaggtgatgtgaatgcgattcagaagcatagccactcccattttatgagctactcacatgacaaatgtcatcttttgctataacctttgccaagttagagaaaagatggatttaatgagataaatgaaaagatatttaacctaatatatcaaggcactatttgctgttatgctttgttatttatttcccagcacttgttccttattgtagattttttaaagactgtaaccttttactaactgtggtcttactaaaatttgtgcttgatactgcttttcaaaaagcctttaattagagccaaaaggatggaaaaggcaagatataaatgccttttatagatctcttatttacattgaaaattattaccatatgtttagagcaaatccaagaaaacttcaacagcttctgaagatgtctatgaatgttgaaaacttttcaatctcttggaatgctcagttatgttcctagaccggtctttgctgactactggttgttaacctttccctagcctgggacctcaagccatatatatcctttgggtgacccatggccaaagttattaagatgaactgactttcaaagtcagagaaggacagcatagggagaggcggttatttgtaagtcattacaggtagaacagggcagaaggaaaagtatgttctggagaaagggccatgttcctaactttggagatatgtcattgccgggaacc

SEQ ID NO: 14182 - DNA, 5483 bp, Homo sapiens
tctctaagatgaaagatttttactctagaaactgtgcgagcacaacacacacaatcctttctaactttatggacactaaactggagccaatagaaaagacaaaaatgaaagagacacagggtgtatatctagaacgataatgcttttgcagaaactaaagcctttttaagaaatgccagctgctgtagaccccatgagaaaagatgtcttaatcatccttatgaaaacagatgtaaacaactatatttcaactaacttcatcttcactgcatagcctcaggctagtgagtttgccaaaaccaaagggggtgaatacttccccaagattcttcctgggaggatggaaacagtgcagcccaggtcccatgggggcagctccatcccagagcatttctgatagttgaactgtaatttctactcttaagtgagatatgaagcattatccttttgttcagttgccccgggcttttgaacagaagagtaaatacagaattgaaaaagataaacactcaaccaaacaatgtgaaaacgggttctgtagtatttgtaaaaaggcccggcccaggaccactgtgagctggaaaagggagaaaggcagtgggaaaagaggtgagccgaagatcaattcgacagacagatggtgtgtatgcccctccctgtttgacttcacacacactcataactttccaaatgaaaccccacagtatagcgcatattttcgatatttttgtgaattccaaaaggaaatcacagggctgttcgaaatattgggggaacactgtgtttctgcatcatctgcatttgctccccaagcaatgtagaggtgtttaaagggccctctgctggctgagtggcaatactacaacaaacttcaaggcaagtttggctgaaaacagttgacaacaaagggcccccatacacttatccctcaaattttaagtgatatgaaatacttgtcatgtctttggccaaatcagaagatattcatcctgcttcaagtcagcttcagaaatgttttaaaagggactttagctctggaactcaaaatcaatttattaagagccatattctttaaaaaaaaaaagctggataatattctctgtaatatttcagtcctttacaagccaaatacatgtgtcaatgtttctagtatttcaaagaagcaattatgtaaagttgttcaatgtgacataatagtattataattggttaagtagcttaatgattaggcaaactagatgaaaagattaggggcttccacactgcatagattacacgcacatagccacgcatacacacacagacacacagatgtggggtacactgaacttcaaagcccaaatgaatagaaacacattttctggctagcagaaaaaaacaaaacaaaactgttgtttctctttcttgctttgagagtgtacagtaaaagggattttttcgaattatttttatattattttagctttaattgtgctgtcgttcatgaaacagagctgctctgcttttctgtcagagatggcaagggctttttcagcatctcgtttatgtgtggaatttaaaaagaataaagttttattccattctgtgtgaatggtttgagcagtgaacaaagaatccatgcaaaccaagtcatgactggaagaaatggggagtgggggacagtgcaggggaggaaagctgttacatctatgttaaatgattgtgagcagtctataatgtcttgatgttggttcataggtgagacacaactgatggaggaatgtattataaattatgcaaaatctgacatgagctgaaaagacaggtccttttataagagctaatagatgcttaggatgcaaatgttattttgagcttcgcaaatacatgataccgtgcaataagccttttttccttataacagaaaatgagaataattaaaatgaggagaaggccacataacagttgacttgaatttaattgaaggacccattggaggctcatctggttgatttaattatttaattgagtgatttattgcagatctcttaatgcaggttagaaacggaagtgagcataaaccttaaaaagactctaaatgatgcttccaaagcactttcattttggtattaggttcatgtttgtttgtctttacttgtaaaataatttggaatttttgtttacagggtgaatgtcttaatagttttaaaattagctaaatatatctaaaggcatttccaatgtttatcatgggaggaaaaaagccacattttttttaaaacaaaacaaaacaaaacaaaattttggtaatataggttcaatacactgtttttaacatctcagcttagccgctttaatcatatcaagatatgaggctggatcactggcccatgacaaatctgaaacctaccagagaattgactgctgcatagataatcctgctgccagttaacattccagaaaaacttgggcaggcaagtttttatagctgccccactatgctgcaatagagtatctttctattgaagattttccactgcatcccgatcctactatggtgaaagcattgttcttgggctaaaaaaaaatcctttatttcatacacacatgatttcatacactaggtctgagcatcaagccaagtccatgagtttgcaatgaagttctagtgagaaatgctctattcataaagcagggggtttacgtggaccttctagtgttgcttatgggaaaagagtaactaccatattacatctaacgcaaggccaaagtaccaaattaaaaccatggattgaggtggttattcgaagtcacttactcccatccttctaattatgctccactacaaaagtaaggggagaagagggaatactttacatgtacattgctagagggaaaagaaaggcttgattatatcccctcgcttctccacctctctgctcatgtaaagaaactgatgagaaaagagactaatatgtctagactgagttagaaacttcatatgagtgggttttgtagaattgatgggaaagacagtgggaacctagaagaacagaaagagacccacagaatgtctttctttttttttttttttttttttttgaggtggattcttgctgttgttgcccaggctggagtgcagtggcgcgatctagactcactgcaacctccgcctcccaggttccagcaattctcctgcctcagcctcccaaatagctgaggttacaggcgcccgccaccacacccagctaatttttgtatttttagtagagacagggtttcaccatgttggccaggctggtctcgagctcctgacctcaggggatccacccgccttggtctcccaaagtgctgggattataggcgtgagccaccgtgcctggcccagaatgtttttttaaatcagatgtagcatcttcataaggtaaagcctgtcacatcagagtaacaaagctcctggagtacagtgatgctagagtagaatgttccagaagtctggccatagccccagcttctgaattacctgggagagacaagatgctcaggttactattttttctttattctgatagtacagcctctactcagagaccacggtgtgtgtcacacaaccgaggcagctagggcatattctgagggcttttttttttttttggtttccttaatgattctttaacagagtaactggattggccaaggtctgattcaagaggctgtgaggagagtagagaacaaatagactttgcctctcagagttcagagctttaagttgtataagcatggtccatgtccacctcttgtagacacttattccttaaaagtttccatcatgaaaaataatatcatgtcaaaattttataagcacccagaatgtcccagtagtcaaatgtagtgtctttctccagtctctgttttcgataataaataccttgctctcaatttaggatgatcgtaaagcctatgttcatgctgtgagtcattgtctcccacagcttttgaaacatcgttctttgtcttttctatacaacacctgattctttgtgcctcagactcattgctatcaggaagagactttgccaagatccaccaccacatttggccagtagtgtatacacattaaagtgagagctgatgaaatcacaatgctctattttgttccgacaatcagtatgaaggggtaggtcccagtttgccaatgagcaacagcctctgtatgctggtgtccaagacttacacaaaacaagtgtcagtgcagtcacagcattttcttgaatgctgttgtgacagactccagttataaacatctgcgagccatatggcacaactcatagctaaagaggccggtacagggcacatgcacagagctttgaagaacatacacaaacctgttgaatcaagttactttcctcatcctcagagactttgacaattcagagctcacagatggcagggggaattctcaggcttcccttcctcctgattgacactttttaaaggaagtgatgtggaagttgttctagaagttagatggacagtgggagcacattcgtgagtggggcttgggagagctcaaaagtggcactttgattttaggctgggcaggcagaagtctcacagtaaaatatatttcactagacgtccaaaccaacactgcattgtagtaacctcttctgaagtaactggttaaattaataactggtcccataagtcagggtcaagccacatttataacccattcgggccggccatgaagggttctgactcgacattggtatttaaatgctgttactttcccaatgcttagtagcacttgagactttatttccatcgacaaaaactaagaaggccacagaagtagcctaacagtcctccctggtcatactcgtttcaaacaggtctgcctgtctagacatattcaggcaggaggttgcttgctgctatcttgaaaaccactggaagattcagcttcttggggacctcagagcccatattcatatggaagcccacccatataagcctcacagagcaaatcacagcaatgttgaagttgttattttcaagtgcttatttcacgacattaaaaaaaatattttttcctggtgtattaaaattaaaaataaaatcataacttttgatttaaaatcaaactgtgtttctgttttctcttactctgggcaatttaaatgggacatctaggacactgagggttcctcaaatactcagaaatgccatttccacacttgacacccataggcttggggcacagagatgagtcactaaaactcctcgctttctagtagagcccaaagatgctgtagccctcaactactactgactaaatgtccataagatgtccagcccttcagtaatgcctttcattgatagattgatagagcatcttacaattcatatgctttctacctctgttggttcaccagagcaatttttttggggggtgggggggatagagtcttgctctgtcccccaggctggagtgcagcagc

SEQ ID NO: 14183 - DNA, 1283 bp, Homo sapiens
caagcccaacgcaccccggagctaggcaaggggccggcagcccgggggatggcttgaccggggagggtcgggccgcagggtctcccgggagccgggggattccgcccgccgcgtgcgcgagcgcgcgtgccccgcgccctcccgcctgccctcttcaactggaaaccagaaacgccggcgcgcctgtggcctgggcgggttggtgcagtaggagctggtgccacggggccgcagctgcgaaaagggggtttcaacttcctgtcctccagccccctggagtcgccggccagtgtcgggaggcccggccgccgcttccttctcctcccgcccggccggagcgcgcccactcccagcttcccgcgggctggtccgggccccaatggccatttgcggcggctgccgggcggagcccgcctcctgggccgcgcgcaccggcggggcaggcctgcttggggtgagctgcggcgtggctggtggcggcggtgggctaggggcccaagggccgcgtctggcccgagccggagcctaagaggcggggacgcgggccgctcggaaggactggaagtgcagcagccacacaggcacagggctggtgccctcccgggccgctgaggccagggggtgcaggggtgggtccggaaggaggttggacactaagggtcgagaccgcagatagacctcggcgtttcggggcagccgaggcccctcgagccccaccgcccggggtccttctctggatgcacttcctcctcccgcttagggggtggtgctggaggcggggagggggcggtggccggagccggcgggcgccggaaccgcgctgctggctagccccgggcccgggtcttctccgcacatgtttgtcatatcctccagccggcctgttcgggcccacagtcctcccgcattagcctgtgtggtcagtgtggtcagcatttgcttctgtgccgaatctctgacttgctgcgtcctggtttaacctgctcttccggagtccgctttccctcgctttgctggctgaccccattcactgtacgcccgccattcctagcccactgcagtcgatactgcctcttatttacttgttgctttttctctgaggccacttcctaggcctgcttcaggtaccatttcccgcctcttctctccattcactcagtactgagccagacaggtctcagccctcgtgggactgaaaatgacaaaaatgtgccaacgtatctactcctgttaggttctgaccactgtttcctcctagttctttatctgtacctttcttctgg

SEQ ID NO: 14184 - DNA, 1158 bp, Homo sapiens
ttgctgcacccaatagaacttcatggcatctttctatgtcctcccggatcgaatgcagggccttctcggcgtctcttcagagggtgcctgcatttggttgcccacgagtctccccgacagcttcaccccgctgtgtgtgggctcgggggatggaggtggggagccgaagggagaaagaggacaccaaagtggacagaggtggagaccctgcaagccatccccagagctaagaaatgggctttgcctgtcagagcctaaggttgcagactacggatcactttgttagaaaataaataatatcaagcaaagtagagtaaaatagaacccttcttctgtgggtgctaggcctcgggcgatgttcattcacaggacactcctgacgtcagtttctccagctacctcttgaaatccgtgacatcgaaggagacgttcttatctgatgaggcggtgtcttgtttatctgtttctccgaacacgagagaaaaaaaagatgaatctcttgcgaatgctgagctgcagctctgggctacagcttcccggcgcgaagttccccgtcccggatcctccttcctctgggtggccgggccatcttgtcaaccgccatgcgccaggggatggatgtttggacaggtgaccaggaccttttggacccatgaattccgtgggtaccacgcagcccatcccttagaacgacccgaggtgcagccgctccacctgaacgtgcccccggggcggcttttcctaggacttcattggccgtctaaaccgggttttgggtacaacctcgccctaccgctttccattgactgaaacagctgctttatcttaatgttcagtttttggccaatgacatggggaaagggcggtggtggtaagacttactgcctgtctccctttaccctgacggtattttcagaggcactaggagaagcgggaacccggagggccacctacgcacctccggggtcgccctcttggcccgggcactagaagtttgcacgtccctccggccaaaaaaaaaaggaatctaatctgcagctgccgccgcacccccacttcccgcccgcatccctagcccgaagtctcaggcagggcatcgcagcccacacgctcgagctgcaccgaccgcccgcggggtccagctggggcgaagcaggg

SEQ ID NO: 14185 - DNA, 1146 bp, Homo sapiens
tgttctattttgtataatcaaagcaaaccaactttaccactcagaaattaaggatattaaatttctgatatttattgggataaatagatgaacctctaaatatttcttcattttaattagagatagctagattttgcattctgccttttgaaagccttttggaatttattaatcatacttcaaaaaatattttaactcctcagaaatatttagaaaggcctaactttattttcaaaatacttgacagataattcgttctacaaacattgtgtattacattaaagaatcattgaaaacacagtttctgtattgaattagagtaaaaaataagctcaattacacatatgtcctctaattgtacaagttaataaatggctgcatacttcgtaccagagttttagcaggttccaaatccatgcttattacaaccaagaagagatgccacaaaggtcgcaggaaatatttttccatgcagactgttggaaggcatgttaatatgaagcccagagattgtgaaagtatgatactccaatatacagcttgagcccaggagcgcctgttagttgtggcaggctgcagtcgtgcacaagtgcttacagctgcagtgacatggtgctaagcatgttttaagactagtcccagttgagcagcatcttatccaaccagaaacaatcccacaatccagctctttttaagtgatcatccttgtatcataacagattaaggttgcagctactttggattatgtttaatctaacctttatccattcacatcttcacctgaaacttacaaggaccaagagtcaattgccgggacataattcacaatgacactgatctttccttcctcgctctaattatctggattaagaataacacttttgagtaattattttcacattggataaacattaagctttcctggatttatctgagctttttcctaacatgaaatagatccaaccaggcttataagaacctaactgacagcagtgacagcttaatcaaggcatccctaaacaactaaaacaataaggaagtgtttattttccattgttaagaatattcaggaatcagaaacttaacaaattttgtggccaaaaaccccctagacaaccaattacaacgctctaactttttttcttt

SEQ ID NO: 14186 - DNA, 1766 bp, Homo sapiens
agtttttaaatatagctttattatctgttctgagatttttgaaaactctgttcaaatcataggaatgaatagaatgcttccaatgagagaacgttccaaaacagaggaagacattctacgggcagcacttaagtatagcaacaagaagactggaagtaatcctacatcagcctctgatgattccaatgggctggagtgggaaaatgattttgttagtgccgaaatggatgataatggaaattccgagtattctggatttgtaaatcctgtattagaactgtctgattctggcataaggcattctgacacagatcaacagactcgatagggtaaaattgtgtgaccttgtttatcagttatgaccaaatgttaaaaaccaactagaatgtataagtgattgtgcttagcctttttgtaagggagatgtgtaagaaaccatgttgtaaatgcttattttattacaaaggagtagggatgataggatctgaattgatacagaattaagtgcaatttcatcatctgccttctgcttttcaagaccaatttaatggtcctgtcatgttactgattaaatttactttgtcttgtctttatagcatttctgtttactatggtagatttccactttcaatttttaaaattaattttactttgaatgatttatgaagcctatttcattgtctaactatgaaaatattaagacttttttgttaattctcagccgatgtgaaggaagcatgaggagggatcgtcagattcagatttagaatagtgttcccgtttccagcattatttatttctatgacttctttggattttattatctaatagtaagtacagttgatgtgggtagatgactctaagaaatgctgaagtatcggcattacatgtgtttatttacatgtcctagtatgataatgttgattcaatctgaacaaaagataatataaaaataacccttcagagtttggacatttcaagttggtaataataaaaaataatatttaagaagatatatatatatatatatttagttttttccacttcattttacatgccactatattgactttaattgatatacagtattaagtttttaggtgccattatttttaaaaaattctatatttccaatgaacgatgttagattttacacagaacatattctctgcatgatttcagaaaagaaaatctaaaaaggtaatacgggtatttcaaataaaatcctttctggtatgaaaggctccattgattttattaagccttcctttaccttgtagtacaaggtgctttaatgggatagaactaagcatatcaatatctataactgcattttgtgctagacaattactgttcttttctctaaaatgtatatgtcaatttacaaggccagggatagaaaacactccataattgctttccttgattttgctgaggatttggtatgattttagtaagcaaactgttttttggtttttccttaatgtttttaattttttttcctcttgcaacaatgacggtgcatgttcttataaatataggaaggtccagatataaatagtaacctaaagttcttgctgtgcttaaaaaaaaaaatcatgtggccctttcaatatttgaactgctaagcaatgacatctgtagttttatctccttttttatgtcatagaaattaatatgatactttaaatatgtaaatataatacattaggtaatgctattatttatatctgtcttaacataatttaagttgtagctgtgtcttg

SEQ ID NO: 14187 - DNA, 1137 bp, Homo sapiens
ttagagaggcttacaaatgtttgccattctcataagtgttttgaacttgatctttgtgacttgtgcttttttagcttctctcttgaatcagagtatcattgtcttcctccaaggagttagaatttcccagtttaaaacaaaaagggaaatgtcctaggttttctttgtgcttctcatttttcctttgttgattcaattcctgtgatttttgttctcttccctgaagtgctttacagtgcatggaatctccatcattgttattttaacgatagtaattcacagtcctcagaagcctatttttaaagcagaagcaaaaaagaaaaacaaaataacaaaaacaacccttcctcttttctctcatctcacctctctgtgttgattactaatcatcttagatattattgctagtggatgtatggtagatgggttgaagcttttctgataattattacacaatttaaaacaacatatatatttaaaataaatatatacagtaaatatattgagccatgttaacctgccaatgagatctgtgaaaaaataatggcctcatttttctctttttaatttcttttacccttttgtgaagcagctatacgtggcatacatgtatttaaagaaaaaaaaatagatgtagagtgttttttttacacttttaacttagcatgtggtgttgaagtattactgtagatcaagtttgtcttccgcactaagatgtgaggaaattgtgatttgttctctccaccacaaatgaattacacatttattatcttctatcattttgaaacactgcagtttaccatgggacactgtatatatttcttgccataatggtaaaggactgattgatatatttaagagttaataaatttgtgatttctgctgacagtgcgtccatctttatttcttcagaagaggtactgtatgtatgcctgcatagtgctggccagtgtcaagggcagtgtgtcctactctggtctcatttagtacataacaatttgcacttggtgagaatggcaagttaattgttctctgtgagcaaaacaatggtctcttctgggaaaatgttgctgagaacaatatagttaacaactaagactcctaaaagcttctctaaactgtaccctccaatccagc

SEQ ID NO: 14188 - DNA, 1113 bp, Homo sapiens
ccaaatatattctgcagtgatagcagtagcacattgacagaaaatgtagtattttcctcttacacaactgtaaaaattaaagtccttttacattcaacataaaaagtttgatttccccactaataattgaagatgtaatttttagaggagatctacacttgtcatttttaaaagctattgtgacaccagcgttttctcagaagatctaaattttcattggataatttaattgctcctaagcaaagtaatgctggatccccagagaaagatgtatgtgtgtgtgtgacttcaggctcaagaataaaatgagggaagaaagaaatatatttataactgtgaacaattggaagcttggaaacagaatccaacttgaacagtatgagaatggttatattaatttcatactctgaaacctgattggagctccactgaagcagctctttgtttgctaaggtggcatagcaacagcagacacgtctgttttctcattgcaccatcacggacatggtccagcctgtgtgtgaccatcggagactagcgatcatcattcctgtcagtcatcaccatgtctttcacgttcatcttcagtggctctttatcttcatgtctacatctctatgtagacatgctgcatctagagacattggctaccaaggggtttaaggcatctctgtttctattttctgcatacccacagataaacaacaaagccaacgtggtaaccagccccaaagaaaatattcctaccccagcgctggtatacctggactctttgtaacccttcttaagttctttacatttttttttttttgtggtttctctcatttgctttcactatatagatacatatatataaatattttatttcgttgggtgttgggttttgtttttttttttttttgctttctatgatatgaccaagttcatttcttttggttttttttggttaagttagttgtcaagcagtgtgttctaacatgagattatctcatttcgttgttgaacattgtactgatagctgtggtctctgtagttggaattactgcatgctgcattcaaaatacagcgctttggttgctcttagctcttctgatgatgatagttctagattat

SEQ ID NO: 14189 - DNA, 1163 bp, Homo sapiens
cctttccccatcccacttcagccacactgggcttcatgctgatcctcaaacactccatttgggcccttgctttaggaccagtgcactagcttttccttccatctgaaatggtcttctccagttgtcccgatggcaccttctcttacctcctcaggttaccttcttaaaagtttgtgggctccctggactaccctagttaaaatttgtccgcacctttatcagcgacacaccccatcccacttttgtgcatcttttcttcataactcttcacaccatctatattctgtatattttacttattttatgtgttgtctcttcctccctgcacaaaaccatttgctgtgcaaggtagggattattttctaatgactggaataaagtctggcacataataggtactcactatgcattgagggaggggagggaggaaaaaggaaaggaaaagaggaaggagggaagggaaggggaagaaaggagtttctaactcttttgtctgtgcctgcccagcacacgttagatgtcaagagtacaatgttacctgctgccgttcgttgctctgagtcccgtctttcagaagaaggaatattcttactggctaatggtctacacatgttcctgtggttgggagtaagcagcccaccagaactgatccaaggaatatttaatgtgccatcttttgcacatatcaacacagatatggtaagtattattttcattgcttttgtggtaatatgaaaaatataaattcgtaaatgtttttatttatgtgcagtcaaatattacagaaagaaaaataataaggcatatatttctgtatatgaaagaaataatttcatgttttgatcaatatcaattagctggtataaagttatttgtatagagtactttcaaacaactaaaatatgtgactttaatagaaaatgctaacacttccagatcattaactatgtgccagtctctgtactctaaatacttaaatataccatttcagttaattgtcataacaaatcagtgagatggatatggtctcaacattttacagaggaatcagttgaggcttggagacaagttccttcaggtagtaaagtggcagagatgggaactgaattcagttcttatgctctggactcatccctggtgctgaactgcatactcagaagaat

SEQ ID NO: 14190 - DNA, 1176 bp, Homo sapiens
ggagttttaccatgttagacaaactcttcccttggcggcagaggcctgaggcatgaagcacaggtgtggggttctcaaaatatgccttcacctaaaacctctgacagtgtagcagtgaggggaatgtctgtgggaaggataaggctatggatatagggacccaactagtggttacacggcaacacacaagttgcctcatctaagtctgtaaagtaagggctgcagtatcagctccattaggattgatggagtatcaaataaaattaaacacacaattatttcacacagcacggacctggcacagactgggtgctcagcaggtggccactgcactgatgatgaccacagtgtgtttcttcagcccagttcacttaacgggaaaatgtctatttttccattttgaaaattcaataagaattcaatagaaatttaaaatttaaaccaaaaacattttgtaatttttattttttctttttttttgcatcttttttccagatacttttccagccccaaacaaatgtctatgactcattggccaaggactgcgtggctcacggctgctctgtgacactcttcctctttcctagtcagtatgtggacgtggcctcgctggggctggttcctcagctcactggaggaaccctttacaaatacaacaatttccaggtaaatgccagcaatttgttcaccttggtcttctactcccattttaattttgttgtttagattataggtttaaaaagctgtgttccctggtgggtagatgacacatataaattcaagagcagatggaaaacaaagtataccgttggtcctttttataaggagagttctgcatcttggcttcaaccaacctcggatcaaaaatactcagaaccaaatattgcattatactgaatatgtacagacttttttcttgtcattatcccctataggataacaattatttacataacgttcacattgtattgggtattacaagtaacataggcagggcacagtggcccaatgcctgtaatcccagtgctttgagaggttgaggtgggaagatcacgtgagggcgggagttcaaaatcagcctgggctacatagcaagaccctgtctctacaaaaaatttaaaaataagtaacctacaggtgatttaagggacacgtaaaatgtgtgtaggttatatg

SEQ ID NO: 14191 - DNA, 1156 bp, Homo sapiens
gcaaatggataatttaaaaataaactttttggaaattcagtctattgaagactatattcaatatgttctgtatattatgcacactaatacattatcatggcttttacctcactttcatatttgactctttgttggttgaaatgattgcaataaatattgataatataaaaatgactctaagccaggtgcagtggttcatgcctgtaatcccagcacttttggtggctaaggtaggaggaaagcttgagcccaagaatttgagacaagcctggtcaacaaagttagaccccatctctacaaaaaatttaaaaattaactgggcatagtggtgcacacctgtagtcccagttacttgggaggctgaggcaagagatggcttgagcccaggagattgaggctgcagtgaacccccttcacaccactgcactccagcctgggcatcagagcaagaccctgtctcaaagagataaaaaacaactctatttttaatgaatccgattaaccttgtggtcaaaatacagaatataattacagtgtttcgatttctctgctttttgtctctgctcatggtagctttagtcttatctgtgtctgacagcagttatgtttggagccattttatattttaatctaataacaattcacatcctatgaaattaggagggaagacctgtagacttaaaggcaggctaaatctgtcatcaacatttcataaaaccagtgttgtcagtaccagctgggggctggagtggatggaatgggagggaagagtagagaaagcaacatttcagagtttggcagaaggcaattttcatattattaatggttttaagaatattaaaaactgcacccttggtgtcgtttggacacactattccagtctggacacacttcctgtttctccattttttttttttcctcttcttacaccctctccatttttttttccttttattcctccttgtttctcttatgaagaaagaagtgagggaagggagaagagaaagaggaacataattattaggattctttcttgttctctttttaactccacactactagattttgctcataattttcacccctacacaattagaacagaaagatattttgtatctcttatgttcttcatcaataacaattgtttttagtagag

SEQ ID NO: 14192 - DNA, 1237 bp, Homo sapiens
tgggatgccaaggaggaagtattgcttgagcccaggagtttgagaccagcctgagcaatatcacgagaccccaactctacaaaaaaaaaaaaaaaaaaaaatgaacttggcgtggtggtgtgtgcctgtagtctcagttacttgggaggctgaggtgggaggatcactggagcccaggatgttgaggctacagtggtccattatcttgccattgtattgcagcctcagtgacagagcaagaccctgtccttaaaaaaaagaaaaaatcccagttgtataaaatagcgtttgttctattttctgaatgaagatttcaatttgtggcaaaaaacccaaacatgtgtttctaagggtgtcctcttgctttatgtcaggaaaacaaacatctctgtcatgtactttgcagaagtcagagagttgagaaatgtggtatttaagtgggctggtctcctttctcacacaggttcaggcatggctcctccaagccagggaccccctggccctctgtcagccacatcattgcagactcctccacgacctccacagccttccattttgcagcctggatctcaagttcttccaccaccacccaccacactcaatggtcctggtgcctcacctttgcctctaccaatgtacagaccagatgggctctctgggcctcctcctccaaatgcccagtaccagcccccacctcttccaggccagaccttgggtgctggatatcctccgcagcagggtaaggcggacagggtgcaggggaaggctttgtgttacccaggggaacccttaactgaaaatcagctttgttcctatgttactaggtatctgtcacttacttttaagaaatggtagtttttgaagagttttggcaagagcaaagaaatggggaaccacactcatacttgactccttgctttttttaataagatgaaaaatacaacatgcttgactgaacagcataatatcgtcaacaagtcttacatgctggatttgggatgatagtcatttctctttaaattttttccaagcagccaactctggtccccagatggcaggcgcacaactgtcttacccaggaggcttccctggaggtcctgcacagatggctggtccgccacagccccagaagaagctggatcctgactctatccctagcccagtaagtactcttctcactctcacagtctcactcacaaaggagcattaatttttctcagcaactcatcagtttgtt

SEQ ID NO: 14193 - DNA, 1138 bp, Homo sapiens
ccaagtagcgccaccactcctggctaattttttattttattttgttttattttttgtagagaagggggtctcactatgttgcccaggctggtcttgaattcctgggctcaaattgtcctcccacctcagcctcccaaagtgctaggataataggcatgagccgctgctcctggctgtattgttttcttgattttcattctgttgatgattaactttagtatagataaggctctggttggctcagtttcccaaattgatttccagaactggttttatgctcacattaggattttttttttctgtcttggcatgttcagcatgtgagcataaatataagatgatgctacatgatcatattgagttcatgtcaagcttaattaaagatttagtatataatatcagtcattttcctaggcctactagacaggcttaatttaattttacaagctattaacattattgtacgccatttgcttgagacgctgtgatattgtttgacatcctgttttcctctctcagatttccaggccctccacctgtcaacaatgtggcatcctcacatgcaccataccaaccctctgcacaatcttcttatccaggtcctatatccacttcatctgtcacccagctgggcagccagctcagtgctatgcaaatcaacagctatggtaatagttttattattagtgtttattgactgccttgtgtcctggtcatttttaatgagagaggttttcttcatttttaaaatagatgtaactagggcatactgtgttgaagtagtatttggacatttttaataataaagcatctatcttatgtatggctatagttaattgttttcttgatcatgctgccacttatttcaaggtaattgaaggaccctcagaataccttccattcaatgattgaacaataagaaaagacaaaaaatgctgatttcacaaataaacattagaatagtgaaattattttaagaaataaataaggataatttaaaccttgtattgtttatgatggggcccccaaatcagaaatatagtactcattgtttcacagtgcattttaattatgtgtttagatcatggaaagagtggaagctcagatgttgtgaggcagaaaagagaagataggagag

SEQ ID NO: 14194 - DNA, 1069 bp, Homo sapiens
tgtgctgaaatgtgaccatggaaaccaaaagcacaaaatcataggaacactatgagagactatctgtgagatgcttcaggcttccattaaaaaagtggttgcgagttattattcaggtctcatgcttgagaatttgcccaggattattgaagtgatttactgagtttcagagagctatggttaggccctttttaggggataatgatatattgtataatacaaagatttctcatgtacctgatatctgtacttttcctcaaaccatcataaacatgtaataacagtgtttatatttttaatagctttacgtaactaaaactgtcttggtaacatgtttcttgtttctctgttgcagacttcttttgtagaattatcctatggaatgatattttcataatgagtcaacaaggttacgtggctacacctccgtattctcagcctcagcctggaataggcctttctccacctcattatgggcactatggggatccgtcgcacacagcatctccaacaggtacagtgtgttattttgacttgtatgtgattattcagttctcaggctcagagacataagatgttctgaaagaggagatttgaaagcattgaatgatcattatataatgaaatggcttgagattacaggatcatttggaaaaggctctcatagcagaactctacatcactagtttggttattgcatgcaatacaagtttggtttttaaatatagactaaaacaaacacttcctgttttatttttactgtgagtcttgttcttgctgttaattagtggtgtaaggctattgtaaacattgaataaaaaaagaattaaatttataaatgaattaaattcacatatccttatctaggattggccctagataaatctgtacatcatgtgaggataattctttgtacaattctttgtacaaatggaccatgtataaatcaatgagtaactctcagggctcactggaactagcttagatatctgggatccaggctgtgctaggtagaatgtatatagtgcagaatcagcaaggggtgaggactccctttagtgaggcttga

SEQ ID NO: 14195 - DNA, 1268 bp, Homo sapiens
ttcgggagtagcaacatccccatgtacgtttttacctaggcagttcatcagtaaaggtatttgtcaagtggctttcttgtagccgggaagaaagtgcatgttaaaaacaacaacaccgggctggtttttactttgtaagtttgagcaaagtggtagctataccaaacctgggagtggctgaatgtctttctatttagcagtgaaagatgataggaaaccagccagatggtcctgattttagggtgagatagagaggtaagctccagatctcatataggttgcctttatttctgagctgtttctcacaggacggtgagctaaacgctgggtgcttttccatgcagagattcctgtttggggctgggatcagccatcctacttcacaaacaaggaatatgcggaagaaggagtatacacaacgctaacaaccccaatatcaatggaaaccccacttcccacacttttcctttgggacatctcccccaccccccactcctcccgcgttacacgttgccaggctgctttgggcgttccttcctctgtagtgcattgcacgggtacgtcatcaaatgtgcgtgtacacgtgccagattcgcctttaaacggtaatctcccctaggtccagatcgtgtactttcccgtatgtaacggtagtgcagtacctgaactattagttatttaagtaatacgtaatgaatgaagagctgaaactgcaacctgttgatggaagaatgaatgaacgcgctcccctccttcctgcggggctgcgccgagaaaatacggttctgatttagccacgacgttaaaggctttgacctgtagggggaggggaaagaaaagacgggaaaaagaaaaccaaaaaacaaaaaaccggaaaaagggaaaaagcgaaaagggggaggtcgctcggccgctcgcaggctcagcccggtggccccgccccgcggcggccggtggctgtgcgcgtgcgcaggcgggagcgcggcggctggtccaagcccggcgctgggggcgcgcagccgagaaagggtttgacgtggcagttcccagcccagctgcaactccgagcgtgagtccaggctaaggggacgccggccggggaagaggcgcggcgggagaagcgaccgcagcgggagcccggccaccgagggctgccggcactaggcgcagagccgccagcgctcggaagcccgcggggtgcgggagcgggaacaggtaaagcctcccacccgcggacgccttcatgcgggacagccctgcccaggcac

SEQ ID NO: 14196 - DNA, 1192 bp, Homo sapiens
atcagaaagtatggattaattattatttagtttaactaccaatggtccttttgaacatataccaattttatgaaattcttttgaaactcacagccttaactgagtcaaattcatttatatgaaacaaaaaaattaaacagaacaaggtgtcaatgaatcagttaaataattcccctttaaagagtagtacagtgatagagcaaattgattaacataaaatatttttaacaaattcttaaaatgaggagatttaatttggtctcaagtattaaaaggaatatgcagcaaatatgctactggcaaatgtttatttttgagtatcggaagtgctctgggctcagtgccctctccacaggaggggaggccacagtccactgctgtcctgcacgacccatgcttggatctgccctgctgtgcctggagccacttcttgaagtagcacagggcatatgcggtggccaggatctgagtgtgtgagaagtgatagcacaggactggttctgctacttcatgtttttctgacatggaggcttcctttatttgtaggtgagcgtccctatcaatgtccttactgtgaaaaaggattcagtaaaaatgatggactgaagatgcacattcgtactcacaccagggtaagattatattctgtttcattaatattgatcatgaaaaccatacttattttaaaagaaatatatttaactttatattacaaaataaaggcaatacactggaagttgtatatctatatttatgacagatatttcaggataattttttttaaagataaaacaatgaaagaaaagaagaaaaaaaacacaaattgaaacctcaaaaaggtttttattctttgaatcaggactcaattttcaggagttataaatgatgaacttcaagataaatagattttaaaattttaatactacaatatttaaaggtttttcttgcagaatattcaccagtaataggaacattttttaatagagtctgcaagtttgtcagcatttggccattaagtaatactgatgagcaagtatatttgcaagaaagacattgcagataaattaccaggacaggtggaaaataaggaagtgtagctcagtgcttcacagggcatgcctagtgctgtggcttattcttcccagggtgccctttgttcctttgctgtcaacactctcactggactattgtc

SEQ ID NO: 14197 - DNA, 1209 bp, Homo sapiens
aaaacctgttatcttttaggtatgctttatttgatacatattatatattttttatttaggtgtcaatgttatatggatattgcataaatacgaattttacataccagtgtaaatatctggttcctgccgagcattggaagctctgcctccatgaggcctttgtggccctgggggaaggcagctctgttctttgtctccatctctgtcaggtcactttctgtatttggggccctgaccctgatttaaactgtcacatatcagcatggttttcatctggaaataggagtccttccttgaatgtaaaccttttctttatatctaagctactttaaaaattcaaaatacgtctgtaagagaacaagctcatatttcatttaggagtagacacatttatgtgtctattatgtggatggtagatgttttttagttgtttgaccatcctttagttttcttaccgtaagaagtaatataaggtaagggtgttttctcttttatcctttacctttatatagatatgagattgtctccactcatttttttaatagaaaaacgaccctataattgcgagatttgtaataagtctttcaagaggcttgatcaagtgggtgctcacaaagtaatacacagcgaagacaaaccttacaaatgcaaactttgtggaaagggatttgcccacagaaatgtttacaagaatcataagaaggtaaaacttattaatattattattattttttatgaatttgctgctgtgattttcaatttttatttttgataaagcttttgtacatctggggcctactgtatataatgcaacaactagagaagatcactcacctgggccataacccctcacagcctccttcctgtcttccattctcttttgaaactgtccttataagcagagtgcctagtttttcttaacaccgctattagattaattttatggggtttactaattgtgaagtctttattctcttccttctttccataaactttgatgtttttatttacgttagctttttgaaattctcttcatccttgggatccttgtagtatgctctgctaggtcttctgccaatttctctgaacatttttgacttcctttcccctcaggaggttattctggatcctttgcctgtgaacctcttctgtgttctctctccttaagaaatgtcaactacatccatgacttctgctatcaacaccata

SEQ ID NO: 14198 - DNA, 1211 bp, Homo sapiens
actcctgggctcaagcaatcctcttgccttggcctcccaaagtgctgggattacaaatgtgagccactgcatctggctcatgtgaaacttctattgtgaactaaatgcttttcagaatcctgtaacttctgatcttttactgtaattaatgttgcactctctactatgtacatttaagtttaaaatattgttggctactgtaaagggaatattattaactgcatgctacatatttccaagtctaaatttgtgcataacagaagagttactatatattaggtgtaattttttacagagtataaatttaatatgtactaaataggacagctgtattacatttttaaggactgtgagtattatgtctcaaaagatattttttactacataacttatgtccactgcattttcagtgtatataggttagtgtgaacaaattagggctgaattgtaatatatagtttgggtattgcagtggcagctgttcacatgtttacacttttgcttgagagctgtgtaatttactaggctttgacagttgatttaactgtctatttaaccttttgcagattcatgagatatttgattgtcaagaatgtatgaagaaatttatttcagctaatcagctaaaacgtcatatgatcacccactcaggtaaactatatactttttttgtttatagtgatatcattacaaaaaaattacattgtcactttttataaactctaagagtggtaatcaggggccttagctatgaattctgctttggacctttagtagtcatgtgattctgaacaagttatttaattctttagtcctcagtttatttacagagcaaaggtgcttagagtaaatgatattgaagatcttcagaatcaccatgtaatttgtcacttactcctccttgagcctcagtttctttattcttcatttgtgaaatgggatactggtgcctacctttcaaattagctgcaaagattaaatgagatcatttaggtactgtgctagcatagtgtctgacatttagtagatattcaaaaattataattcttgcatttttagatacttttatattctagctaagttactaatacatgttagtaagaaatctataaatacattttgagtatgtaagtttttaaagcggtagtttcatttaagcaagtcttatgaatagctctgttttactaatgcagattaaaaaaataagctct

SEQ ID NO: 14199 - DNA, 1099 bp, Homo sapiens
atatgggaccgtgtagcataattcactctactagcttaatcagcactgtttttatgaccttggtcttttttcacatgtatgtgagattctccttggtaattcaatatagtttgcatcagttggatttttctccttgtgaaggtaaaaatgagctaaaaatgaccaatttcaggaatagcttttgttttctaatttaacattttgatctgaaaagttaacattataggatgaattaaataaggaatttgactttgtattaatttggtgaaatacaagtgattttgaaaataatgtatttctctctagtaacacttgctattatttttttgtggccaaatactattaatatttatagtgataataagaatttattcatatggtatcattaagcacaattaattaattaatttaaaatgagagcaaaactgagcatttcttggctctgaatttttgtctcatgaatatgtttccttgtgaatgtgcagatcgccttggctgtaaagaggactatgcttgtcctcaatgtgaatcgagttttaccagtgaggatattcttgctgagcatctccagacattgcaccagaaacccacagaggagaaagaatttaagtgcaagaactgtgggaagaaattcccagttaagcaggctttgcaaagacagtgcgtatattaaagaaatatctttaaaattataagctaacacagtttattccattcagcttaactcatagtttttaacctgtgtgtgtgtgtgtgcacgcgcgcacgcgcatgttttgtgtgtgaatgagagattaagcattttacattggtattgtcattaactcatcttttcttagtatagtatgttgattattaaaatattcaaattatggattttaacacataaacactgtttatggtaattagtttttgtccatttattaatttgccattatgtatcaagcttactggtttaatctgaaattcagatatgcctactttagttactcctttgaggtaacagacttttagttgtctacgttttatattccttctggaatctgtttaaaaaaaagtttaagaaatggggagttcaaagtataaagaattcctggac

SEQ ID NO: 14200 - DNA, 1217 bp, Homo sapiens
gtattttttctatttcgggaccaggtttcagtaaattctttcaggggacgaacttatttgcacttcctctggtttgtgttagaacttgaaaggctttttttttttttaagttttgtgttagtgttaataataacgaaatcattgatatctcattgctctctgtctgcatgtgtgaatgacactgttgcatgacaactacatttataggccaccacaaagtgttgcttgcataaggccagttagtgatgcaaaattcactttaaaaattgaacataatttcatttgacatgtgtaaatgtcactttttgtcatatgtatttgtattttatttgccaggtaactgaatattgtcacctgcctttttcagcacccagatcaactagaaataaaaaaaagtaataacttttcatgcacacatagtactccattaatgtatcttaaaattatttcttaattactatcagaaacaaatgaatggttcagcatttaaaaaaatttgtttcaggaaggagaaaacattttctatttggcagttgaagatatagaaacagacacggagcttctgattggctacctggatagtgacatggaggctgaggaggaagaacagcaaattatgacagtcatcaaagaaggggaagttgaaaattctagaagacaatcaacagcgggcagaaaaggtattgcatctttaattggtgatctgggagaagaaaagttgtagaaaaaagtgtagtttaaactgtggttgaattatagttgccttgtaatatggcattctcaaataaagttagtttttgtcaaaattattctcgagggtatcctgtggtggactcatctttgttacagcaggaaaagtattttgggagtgggtgatggatgtaccctataggactgcctaggccgcaggcagggctgcattgctagggcagctcccggctctcactgctctcactggcgcattggggtaatgagtagtgaggatttttatagtcttgccatagctctgccactaatcagtcttgtaacgttgggcaagttgctgactttctgagactttactttctcatctgcatataggaaaaggtgagagtggaggtgaggtacacaagagagcctgctggatccgaaggggattgattcctcttgtttgggatcttttgggaacctgcagcttcttggcatctctttctgttctgatcacagaagcctggagg

SEQ ID NO: 14201 - DNA, 1163 bp, Homo sapiens
tactttattttattttactttgagagatagagtcttgctctgtttcccaggctggagtgcagtggcgtgatctcggttcacagcaacttctgcctcccgggttcaagtgattctcctgcctcagcttcccaaatagctgggactataggcatgtgccaccacaccagctaattttcgtattttttaatagagatggggttttactatatattggccaggctggtctcaaactcctaccctcaggtgatctgcccaccttgtcctcctgaagtgctgggattacaggtgtgagccaccttcctggcatgtttcctactttagctaacctttttgtgtaactactgtaggaagcctgtgcaaatcaaacaggttttcgaactgaggtggtttttactacacgatgagactgttgacttcatcattggccccaggtatgcagaagatgatcctaagtcagatagtaaccaaatacacttcatttccaagaaaattcaaataaaagaagatggtatttggaagactaagtcttgacagtaacataatacactttggcagcaaaaattagggagatgctgaaacatggtactaggaggaattttcagtcttttttattccttagatttaaaaaatgttcaatttattacctcagggttcagtatcaaattaaaatagataaatggagactttaataatagccagctgtctggagttgttttgatttggtgtctctgggaagaggaatgatggattagattacttttggatgtctctttcagatgatatgtcagcaaggcgaactctgtgtttagggtagtgagataaaagtcgtgtgcacaggtaatctaccagctttggtggagtgttgaagactagactggtgcaatgaggaaatggccagccacttgaaagctggagaaaacaggcaggccccagagagcaaagactctctaagaacttaaaagttgtttgggtaagcatatttggaataaaatgggcagtgattctgttaatgaacaaagaaagttatttcaaatatgaatatgtaggtaatgtagtatattgctggttgtgatagtgttgttctgagaataaagataaatcagcacataaatttgtgtgtattaaaagtgatacatttcagaatagttttagtataaaatcaa

SEQ ID NO: 14202 - DNA, 1181 bp, Homo sapiens
tccatgtgccatgcactgctaagtgttttccatgtgtcttaccatttaaacctctgagcctttgtatgagacaaggtatattattcctgtgttacagaagaggaagcagctcaaattttctggggaagattgagtaacttgtccaggttggaatgatgattttaattaagctatcctctgtcagttctttgtttgccatttgagcaatttatatacttgtagagagtctttagtttgtcgtagtaatcttgaatagtgcaaattttctcttatgtctcatttgataatagtatatctattgagtaatcaaggctcattgatctctggaagtgttaaatactacagaaaacagtctaattgtcaaatgtgatagcaatgataataaaaaattagaatattgattatgttcctttatcagaagtaattttgtttgaataacatgtcattattctttctacctccttaatgtagagattgtttgtggaagtttttctttccacctgactatcaagttctgaaagtttctgaaattgcacagcctgggagaccaagacagatccttgcttttgaattacgaatgaatattattgcagatgctacaattgatttgctgtttaccaaaaatagggtaattattataataatatagtagaaaatagtatttaaaattttgacattatttttcagagttttttcctggtgactagtcccatacttggattaatttatatgagctgttttcccttgaaataattttatgtattttactatcatcataattttgttaaatgtcaaataatgggaagaaattaatagtaatagaccttcatgctatattctggctcattttctcctttatatctggctaaattgttttagtgtatttttggtaaaaatttgaacttttgttcttaggaacttgtaatacttacttaacatcaataatttcttctgtaataataactgaaaagtaaagatgggagaataattataattaatgttttatatgaattaatttttttcttttggtaggaaacaaatgctgtacatgtaaatgtaggagctggctcatatttagaaattaatattccaatgacagttgaagaaaatggtaagctgcaactgttacttttctttttaaataattagggaaataattataaataataaagtttgttaat

SEQ ID NO: 14203 - DNA, 1128 bp, Homo sapiens
taatcccagctactctggaggctgaggcacaagaattgcttgaagctgggaggcggaggttgcagtgaggcgagatgtgtcactgcactccagcttgggcaatagagtgagactccgtctcaaaacaaaaaaaaaaaaaaaaaaatgccaaactgcagaaatactaatgttactttgtgtgacagtacgcatcacactctatcttccttcacactgagcctgtcacttaacagatgaggcttaaggagaaattagggatgtcggttgttaccccattggtttatctggagtgcagtatcaacactgtagcctgatttgttgttctgaaagttttttgaccacatcttgacttaatatttcaaggagctagatgtagccatggatattgaccttcagccacagcaatattaaagtctcaaagggaccttctgttcagctcagtaggaaaatgttttaattactcactagcgtgtgtaacttcatttctaatgctgttcacacagtgtcacattttaagccttaattacttttacctaacatttgttttgcagttccacatcaatgccagctacccccgaatatggaacatgccgcagacatggcagtgtgaattagaggtttataaagccacttaccacttcatctttgcacagaaaaacttctttacaggtaattttctaatagatataaatacagtgagatttatcacagtgaacttgtttacatttgataagttttacttttaaattacatagggatatgatatgattcatattttcttcaacatttcattttgggctgaaaatgttaaagagaaaatttaaatatagacattttgcattcttttctaacctaaacaaggaaaatataaaccccaaattgagcttagaaggaaatgaaagaactcaatttaggctgctgctttgtatcagtctagttggagggtaggatggagatgatgaatcaatttctctctcttcccaaattaggcatcagcatggcttcattattttgttttaataattataatacacaacagtatacgcaaatagctaaatgttatttttatacttggagcccttatttaatcttttctgttggcatggataattgagttggtgctgtcac

SEQ ID NO: 14204 - DNA, 1098 bp, Homo sapiens
aattttttgaaactttgcatctttgaaaactggatctttggtcagtagaattatgccatataggatataaaaactgtaaattctttattcagcgaaaaatatctacttagaattatatttgcttttttatatattcttgagtaatagctcaaaaaggaaggttgaaatgtgtataacactttttttaggtttagtaatatataatatagtaactactataaataatagtagttgtatatgcctacaattatttacctgataattcagtgatacattacttttatagattagggcaaagacttggtgagaaaaaaatagtctttatgaaattttatacagatattgtagagtacagcattaagacacttattcaccatttataataaatgcttttttttatttttataggaggaagacagtctggtgctgttttatataacagttttggaattatgggtaaagctagtgacacagaaaggggtggagtgctgacatccaataattcttctgattctccaaccggcagtggctataatactgatgtctctgatgataatcttccatgtgaccggacaagcccttcctcagacttaaatggaaattctgtttcagatgaacaggttagtgactttctaatagtaataataatggtgctttagaaaaataacaaagaaaactacatatgcaattcaaaattagtttctggagtgtatttgcctgtctttccctattttggatttatgatatctgcttaaatgttagtcaaagtgtgttggtgaatatactactagaatataatttccaaagtatatcatagatatatttatatccatcatagtcctagcattatgccttgctcaaattagatacctaataaatatttgttgaattaataaattaacaaaatttaagagaaatccacctatagggtgtggaggattttagcaggcagaagtcattttgttattggtagtattttatgtcagttctaaatatttttgtcagtgtttgcttatttcagttaagagttctgaatggcaccttatattcaactcactttttatttttattatggtagaattacatgggtggtgatga

SEQ ID NO: 14205 - DNA, 1198 bp, Homo sapiens
gctgtgaaaagtagctccctaacgagaacaggtacgtcctctagatttgataattacatgtttatatttacgggggaattgagatgaaacaggacttaagtttagttagatatatactttggtagtacaactaatctctcataccttatctttgagaaaaaattttaggaatccattgttctgtttgtaacttttcggagtcttcatgcccttagtttgcatttttaaattgcagctctgacgaatgtcaatgtaggcatttggtgtggggtactgtctagaccagcaacatagaatttcccctgttataataaaaataagctatttattaatgcattaatatccaaataccaacattatgcagtgagaattcaaaaccatctgcaaacatacattttaacttgattcttcaaatataggtatataaattacatttttttgctccttagtatataaataatattatactcagaaacattttattttcaggaaatacagtagccactgatatgttatctgaacatcccttgctatctgagccatcatctgtgagtttctataattggatgtcaaatgctgtgggtaatcgaggaagtgtgttacaagaatctcctgttacaaaatcaggacacaatagtcttcccacaggtattgagttatcacattattttgcttaactgtcttaaggggaacatataccaaaatcttatttttcaggggatgggttaaaaatcaaacaagtactgtttggttgaaattggtccatttatatttttaaatgcctttgataatattgtaattgagagagtagtaagcagtcactcagtgttcttgttgaaaggcaaatatgtcaaatgtgagattgtatataaagagtttaaagcttccttttaatgtggctggtttaagtggtaaatgaaaaaatgcaaagtgtaattacaacatcatatacttgatattacaaaagatagttttaatttatctagatccctctgagacctaataactatcattctaaacctttagttacttaacaaatatttaattaaatctaaaacagtatgtatgtataaggatagataaggatgacatgtgttctgaaaagttaatttcatttttcactaataaatcatgtctgtaaaataacctaaaagtatgcattattttttttcttttcaatttaatcagtcttgaaatg

SEQ ID NO: 14206 - DNA, 1148 bp, Homo sapiens
cttaactctaaattccaatactctacggcaataccatcaaatgacagtaaaagttgtgttatcacttcagtgaaatcatttcttaacataagaagactgattttgacttactagttttagaataagattaagtaagaagacttaaaggcccacctttgaactcataaaaagcctggcctagtgaaaaagcatattttactggtttgcttgcttaaaattatttaagactcatattttaccttggagatgattttgcctataaattaataaagatgtatgtttctggaaaaatggaagaaaaaccgtgtcctttttttatttcacgtttttaggcaaggccatgtgaatcttcctccacttgagttcaaaccagcattaatgttgggaacctttagcatcagtgctgttgtaatggaaaagtccgtgtgcacccctcagaactctaccagtgccctttcttttcatgatctcagcaagcggtattataacacctttcactgcaactttactatttcctgtcagtcaataagccagcatgtagatatggctttggttcgtcttattcatcagtttagcacaatgatagatgacatcaaagcaactcagactgatattaaacttagcagatatacagccggatctgcttccccaacacctaccttcaaaaccagaaaacatcgggactttcgttcatctgactttagccgcagttctagaggaagtcttaatggtggcaatagagtaaataatgcaaagaacaaacggaccaacaatgagaataacaaaaaggaatctcgaaacaagaattcattaggaagatctgaaagaagaacatcaaaagtgtctaggaaaggttcaaaagatgtggtggatcacatgactattcatatggatgactctgattcaattacagtgtcagaacaaagtgagccttcagctgagtgctggcagaatatgtataaattgcttaacttctattcacttatctccgatccaacaggaatattggaaaagtcttcagaaacatttggaccagcaggtaacagacatttttatgttttaaaaatttccatttacaataacaataataccaaagaagcagaagactgttcatcatgttttcttaatgtcgtaagtggataattgaa

SEQ ID NO: 14207 - DNA, 1091 bp, Homo sapiens
tttaaaagaagtaacagctctacagatgaagttaagcaccatgtctgttttcatttgttattccatcccagtatctaacatataataggcatttcacaaataagttagagggaatgaacagacctggattttcttcttccttgtgccattatgtggttgcctgctttctgttttattttttcatttgttatttaaaaaatggtgactatatgtcctcttagatctttcctaattctaatgctacagttttctgggtgtaatttttattaagcaacaggattttgcagcttttgagttttacttaacatatagatttacagtgttgattttaattttctttctgccctgtcttaattatcaaaagctgtgctgttttggctgaattataaggccgcctatgacaactggaatgaacaacgaatggctttacataaggatattcatatggctacaaaggaagtagtagatatgctacctggtatccagcaaacatcagcccaggcctttgggactctttttctccagctcactgtcaatgatctgggaatttgcctacctatcacaaatactgcacaggtacaaaaagtcaagtcatattccaggattaagagccaggcatttctacataaccatttctaagtatttagaatataacagtacatttttcagtgtaacagtttataactgtttagtaggtagcaagtaagattgaattccttcaaccattactcatctcaatgtattaaatcttaatctcatgggacttttctctgaagcactcttatatgcttcagaatagtgataagattgataccccccagataactcttaatttttaccttcataaaaagaagcttagtttcagaatcattttattgttttcttttttaacaaggaagtcattggtatggacttgtttataagatggaaataaaaggacatttaagaatactgtttaatgaacttaacctgtaatagaatagggaattccaaaatgcttttatactgtaatatttaatggtaatgaaacttcaaagcagtgtgcacataaaccaggaattttctctttgcaacttaagaccaattttcag

SEQ ID NO: 14208 - DNA, 1143 bp, Homo sapiens
ttaacaatagcatatagagatctatattttactgttacaatttaccttaataacttgtaaccagttgttgaattaatttatcttttaggattctgttcggtaagacagtgttaagaaaaacttcaggttgaggatgggtggcattggtatgtttgtgtttcaggaactgaaatatagtagttttttaatagcataatgggcactgcctaggaaggccataaacaccacaggtgggtggcatagtgagatcatctccccacaactaaaagagaggcttgagatagaaatgtagatagccctttgtatgttaagtaagaaaaaaaatgcacatggcaagtacattgcacttaagcaatttaatttttaaaaggcatctttctaagctgctctttaatgaacatatctaggcttgaccgtttctagatttctattcctatgaatcctgtgaggatttctaagtttaaaaaattgtcaccttttgtcttatttcttctttaatatattttgcagtctaatcatactggagaccttgacactggttctgctttggtattaaccattgaaagtactctcatcactgcatgctcttcagagtctctggttagcaaagggcatttcaaaaacttttgtatccgttttgctgatggatttgagacatcatgggatgactggaaaccagaaattcatggggatttagtgatgaatgcctgtgagtatcttttatttctatatacagtttagaacttaaaaaataaaacattaagtctccatttgtgaaattaaaagatgcttagatatagcaaatgtttttagactttgagaaagaagggctatttctagttacaggtaacaaaccatattcgtgaaaaactacagcattgagtagttttggtaagtaaaccaaccaggcattctttttggtactataacatttgaatgtttacacagtccctgatttttcctgtaattgatccatgtttgaccagataaagcatttttgacctgtcggaatcttgaaaaaaaatgataaatgtgcaatatccaactcaccataaaacacagaacaggttgtaaatagccaggaccaggaacgccagccttaattaatattgacgtgaataaatccacatgttcaaatttgta

SEQ ID NO: 14209 - DNA, 1370 bp, Homo sapiens
taggaactactagaaccaagatcccaactgtcaccaagactctttgtagctcttgtctttgcttctttgctcccctcttggctacttgtttttcttcttcttctaacttgtaacctctttcttatacatggcaagaaacacagtggagtctcgtttctccaccctcagtcattagagaacgaccaacctttcctcaagtccaggcaaaatatcttatttttccaactttgaccttcacctggaccaattaacctaattaattctgtctaatgagctaaggtcatggcaattcctactgtagctataggatggtggatcaacttggggtcagggagtgaacctgtagttcatagggaaaaagaaaataggtgctatacagaggaaacagtagatgcacactgtacacatagagaaatcaatcctgtagtctgatgtttctgacaagtttagcagtgaaagacattagttattatatgtggccattattactttgtaaagttatttcaatttctatacccaggacttaacaaaaatgcaacttctttatttaaacagaaagcagtagtgctggaacctggacactcaacgtattgtggaaaatgtgtgggattgatgttcacatggatcctaacattggcaaaaggcttaatgctctgggcaatactcttacaacactgacaggagaggaagacatagatgacattgctgacttaaattcagtgaacatagctgacctgtcagatgaggatgaagttgatactatgtctcccactatccatactgtaagtaaactcactgttagaatttttcaggattggcttttaccctgagacagggatattttttgttcagtgttatttagtatattatagttgctatttgtggaggaagagaagggaatggtggttcactgtgtctacatttcataatactgtcttttaatcgagttctgtgctacatgttgactgtcatccaacttgtgctttaacctataggtaaaataataatattaaaactgaaatgagtagggagtggggcagggtggggaatgggaagaaattgctaacaggtatgaggtttctgagtgatgaaaatattcccaactaagattttaatgatggttgtacaactttgtgaatatactaaatgggtgagttttatggtacgtgagttatatctcaataaagatgttcaagatgaatttcaaagcaaagtgcatatacaaaatgaaatgatacattttaaaaatacgtattttcatctatactatacactctgtagtttcaagttattttgtggcaaaaagaaacttattctttgatttcattctggtattgatttttaaaaattattttcaatatcttttaact

SEQ ID NO: 14210 - DNA, 1165 bp, Homo sapiens
tttcttctaagagtttaacagtttcaggtgttaagtctttaatccattttgagttgatttttttgtatggtataacataagggttcaatttcattttttttgatgtggatatccagtttttccggcaccatttgttaaagatcacatggcattatttttctttccttgttgttctgtctttaataaaatctggaaagtaacatttaaatgttataatttgagaaaatgaaatattttccaacatacacagtatattttatatactgatattcagactccttaaaagtggtgattatgtctgtgtcctcatcacctagcaaatagcctggcatataatagttattcagtacatagtagctgaataaagtgtggctccattaaactcactcatgtgaatttacaaaatagtaaaatttatttacagactgttgctcacataacatgttggaaaatagtttgttaaaaagaactctcattttactacaatgtaatgatcaattgttctttctgtagacatacgtctcgtaaaaaagcaacaggctttgctgctgttcatcagctatttacagaacgctggccaacaacaccagtcaatagaagtcttagtggcacagctacagagagaaatattgactttgaacttgatatacgggttgaaattgatagtggaaaatgtgtactccacccaaccacccttctacaagaacatgatgatataagtttgagaaggtaagaaattgattggaaaaggatacatgaaactttatctattagaaatactattcatatatcactgaattataacaaacttctccatcccaaaatgcagatttgaagtgtaaatgtaattatagttataatggtcaagtgtatatttcttatacagtttcttataaacaagtgcataatattttctggcaactagaaatggatgtctgacttagatttttgcaagttttttaattaaaatagttatatctttggaattcttttaacacacatgaatttctcagtgtctgtccctgtattatacatatttcagttttaaagaacaacacaatgctcagaagtatcttggttattgagagtttgataagttcataaagaaataagaaagactgggagacagttacacagacctcagtagactgaaattgtgttcagg

SEQ ID NO: 14211 - DNA, 1159 bp, Homo sapiens
aaaccattgaattacacagcttaaattaatgaatggtatggtgtgtgaattatatctcaaagctgttaaaaaaaaaaacaaaaaagggagcggggagggatagcattaggagatatacctaatgctaaatgacgagttaatgggtgcagcacaccagcatggcacatgtatacatatgtaactaacctgcacattgtgcacatgtaccctaaaacttaaaagtataataataataaaataaaaaataaaaaataaacctactacagccattctttaggaaacctacaactatcaatttcagtgccataggcttgctatcaagtcaatgatctcagcattttttatcattaatgttgacactgttaatctctaagaattatcaataattggtacttatggcttattttaaaatattatttttaagaaatgcaattaaatgaggctttggccaggtcatagataaaatgagaaatgaaaccaattctgttctaattcttatggtgatttaacataaatgtatcatactaatctaaattttccttatagccatctttccacctcggattttatctactcgaccaggacaaaaaagtccaattattatacatgacgacaattcctctgataaagatagagaagatagcatcacttatactactgtggactggagagattttatgtgcaatacatggcatctagaacctactcttaggtaagtaatgagtatatacatttacccatatgctaagggattactatgagcaaaaagttatgaataatgtaagttacatatgattatcaaaaaatatattcagaagttagtctcctgtaatgtctatagcttctgtgtgctgtctttgctgcttctttctgtatttgtttctaggtaaggcgaatgaagtacaaatgttgagaatagctcagcactgatgagttgtccaatgggtgacattactaaaatatgagaataattgtccttccactgttgccactagtttttcaccttctcaccaagatgttattttcagggtttgaggtagctactgtaaactgttttgttacttagtatggcaagatgcagcagaagtcatatttaattgttaaggaactattttaatttcttgctgtatatatgtcataacactgtaataaaacctgc

SEQ ID NO: 14212 - DNA, 1125 bp, Homo sapiens
tagggaaaaaatggttctcccttcaaatatgtttagcacatagcactcagtaaattttagcctttttctcccattatgccacatgcttatgaaatctactaaaattaaccagatgtccttttatatgtttaagataactgtataacaggcctaaaatattcaggatgaaatatagtaaacactattgctgtgtttaggttgtcaaagagatttataatcatacatatattattttttgaatgctattattatggtgaatccaggaattatgggctcatttatacaaatgtacctactgaaaatattttgtcttgagtatattatagaggcttagtgatgttcttttcctaccattagaaccatgctttagggcattacactccttaataataactgtaatttttattttagattaatttcttggactggaagaaagattgatccagtaggtgttgattatattcttcaaaaattgggctttcatcatgctaggactactattcctaaatggcttcaaagaggagtcatggatccactggacaaggttctgtcagttcttatcaaaaagctcggtactgcactacaggatgaaaaggaaaagaaaggcaaagacaaagaagaacactaaaaaagtaatttgatctgtgaacaaattatgattgtgtctgttttattacactggagtgtttttttagtataataatttgaaatataactttaaaataattctaaatttgtggctataattaaaagtttgtaagttaacctgttctagttccatcattctgtgtacagtgaagtattgcatgataatgtaaattttgtgaaaaactagattaaaatatataactgcttgttatggtttataattatataatgtgcaatacaattcctgcatctttaaaatgtctgcagaataactgtgaatttttttgttattggattggccgtaacttttagaaaaaaatcttgttgatgataatgtgattttggggaggtcattaattgctttttcttttttaaatgtagacttatataaatacctgtttgtatatagcttgagtaattgtgatatgattgtataccactaaaatattgttaactattataataaagtcacagtaa

SEQ ID NO: 14213 - DNA, 1306 bp, Homo sapiens
ggataaggaacagctacagtcgctgttaaatgtgcctgaaaagcaatttgcaatctttgcattaggtaagtaccgtttccttccgtagacattttaggaaagataaggtgagaaatgttgacttttgcaaggaactgaacatttatttatttgaacttgctttccagctaaggttactggttgcatttcaaaacaccggtagcattcccactgctaaaactaatgctcttaaagtaaatgctaccgctaaaagaaaaagcagggtccctttcacctttccttaaccgaacagtagacgtttaaagtctgaaacgatcgaatttgtgaaacacagagccgttaatgcctttatgcgaagaggggctagcactcggtgtgtggaccaaatgcgtgtttgtttaggcattgttggcgaccgaatcccgagtgaagcattggtttaaaacctgaatttcccgtctctgtgtattgattcctaacgcgcagaggcgttgcttgaacgttgtttgaactcctaggcattccagggggcaaaagcacctcggcaaaaacgtgcaggactgcatgttactttggttcgcggctgacacgccgactgtgcgccggcctgtcaatcaccgggagcagcaacagggagcacatggcaacgggctgcgggcgagctggccagcggcccgcccggggtcccagcccttcgaagaaagggacattcacgagcttctatctctaattctctgtcgcaggcatttcggccgtggaaccccaggctcggaggactgggtgtgagcgctgcccgggagaggctgacctgccgggaccggagtgcccggggacgctgtgcccccacttgcccaacgtgcggaatcggctaagcgcgtcggcctgcgcggggcacaagggacgacgcccgcctttctctctccgagaaggatccccaaacctcactctcttcactcctccccgctaaaaaaaaaaaaaaaaagaaaagggtaaaaaaatccccctccccctcccggccgcggcagcctctgcctggcaggcgcgtgctccgaggtttcgccggggtactgcgcggctccgtgacccacccgccgacggcggttcgggccccgacccgggcgctgcggagtctcgaacgcccgtgacgtggatttttcgctcgtcaggaagccgccatcccttccttcgttccttgcgaggagcgactagaacccgagttctctgagcacaccgtgccgtcagctggcccgtcacgcactcgactccgccactcccctacttgtttttctgagacttgggaagcctt

SEQ ID NO: 14214 - DNA, 1143 bp, Homo sapiens
tgttgatggactaggaaatacaaaaatactgtttcattatagttttgccgagtggcttctggatgtgaaacactgtactcagaagtatttatgtaatgcagcagaaggacacagaatgttggctatgagttatacctgtcaagccaagaatttaacaccattggaagcacaagaatttgcattgcacttaattaactcaaacttacaattagagacagcggagttagctctgtggatgatatggaatggtacacctgtcagagattccctttctactttgatacccaaggaacaagaagtgctacagctgttggttaaagctggggctcatgtcaacagtgaagacgatcgcacatcatgcatagttcgacaagccttagaaagagaggattccattcggacattattagataatggagcttcagtaaatcagtgtgattcaaatgggagaacattattggctaatgctgcatatagtggcagtcttgatgtagtcaatttacttgtctctaggggagcagatttagagatagaagatgctcatggacatacaccactcactctagcggctagacagggacataccaaggtggttaattgtttgattgggtgtggagcaaatattaatcatactgatcaagatggttggacagcattaagatctgctgcttggggtggccatactgaggtagtttctgcactactttatgctggcgtaaaagtggattgtgcagatgctgatagccgaacagctttgagagcagcagcatggggaggacacgaggatattgtactgaatttgctacaacatggcgctgaagtgaacaaagctgataatgaaggtagaactgctttgatagcagcagcatacatgggacatagagagattgtggaacacctactggaccatggagcagaagtaaatcatgaggatgttgatggcaggactgcactctctgtagctgcactttgtgtgcctgcaagtaaagggcacgcatcagttgttagccttttaattgatcgaggtgctgaagtagatcattgtgataaagatggcatgactccactgctggtagctgcctatgaaggacatgttgatgtggttgacttgcttctagaagggggagcagatgtagatcacac

SEQ ID NO: 14215 - DNA, 1172 bp, Homo sapiens
agtatgaaatttagagattatgggtcaaaggaagacaaaatactgttttaaatatatattttttcaatttattacagaattatctgttcatttagaacacatttattaagcacctactatgaaccaggcactgctggttttaaaacacacaaagaagattgcatattgtctcttccctggggaaaaaagcttataattttctatcttccactgtggaagacagatctataaactgctaatataatataatatacatactaataatataggcctgtgaacaaagtgttccctagaaaagtcaagggacactttatccatgaagtctcctttaggatatggtatttaagttttgaggaagagtagaaattttcctgcagataagaagaatgtcattgcaggcactgaagtatttggatcagccaattcagattactctgtgaaaacattttaaagtaacactggtaataccagttaatactaacaatacctattaatttacagaaaaagaaaggactaaatagtggagaccattcagattctgcaaagtcagtgtcttctcttaaccctgttaaagaacatggtgtgttgtttgaatgttcacctggaaactggactgatcagaaaaaagcaccaccagttatggcttactgggtagtagggtaagtgagaaaaaaaagtatttgaaagtaaagtgttagaaaagtgaaagaaaagtggtaaaggagattaacattttaaaatgtaagcatggaattttttatctagctatactattttaatatatttcattttatttgctaagtatctcctttaaatccctcccaagtatttttctattgaaaattatcttacaaaattaaatttcagtaatacactgaaagaataattccagtttttctcttcttccctttttcccctgcttccttcatttttccccctctctcctttctttccctcttaccatcctctcccttttcttcccttcccctctctctggcccctgccacaggaccatgcccagtcaggaccctgcccacctttgtttccatctcctgtctccttcctcttccatccactgtgcaccagctgcacgagcaccaatcaaatcttgtttctgttgttccttctgcatgggatattctatcccttgacctttgcacttctggatcctt

SEQ ID NO: 14216 - DNA, 1104 bp, Homo sapiens
accctgtctcaaaaaaaaaaatcacattcaagtatatttcacatgcattttatataattcatgaatttcaggaaagctgcatgtaaatctttttttaaagctaaatcatgttaaagacactgaaaaagttaactaaaattctatggtgacttcttttataaaatactaatttttggccgggcacggtggtggctcacgcctgtaatcccagcactttgggaggccgaggcaggtggatcatgaggtcaggaattcgagaccagcctgaccaacatggtgaaaccccatctctactaaaaatacaaaaattagctgggcgtggtggtgtgcacctgtaatcctagctacctaggaggctgaggcaggagaatcgcttgaacccaggaagcagaggttgcagtgagccaagatcacaccaccgcacttctgcctgtggaacagaatgagactccgtctcaaaaaaaaaaaaaaaaatactaacttttatcttagaaatatagatcattatgcattgggttttttcaaagggggaacactttagtgaacaatagtttacttgacctttagttggaaaagaaaactaatggtggagaattttctttggctgggagaatttggtagattgagagaaaggaagaacatcaatactgcatttttacttgacatttaccctgtagatcctcctagaggttcgatgcccccaagacattccaacactgagctgtttcttctccaggtcttaagctttgaatacaagctataccagcacatctaaaatcggtctctacatttttccatcttaaatatgagctgtccagcttagtcaaaactaactgcaaaacactgggtgtaccatttgagtcatttggtcttaaaagaaacactattatcactgtgtcacagtttgagagattttcacttaagcatttaagttgcaaaccactacatatttgtcccattagtgactagtgggccttaattttggcattcaaattagggtaaaaaaccttggttcttgaaatgctacagaaaatagcttgaggccaggcacagttgctcacacctgtaactccagcactttggaaggctgaggcaggcagatca

SEQ ID NO: 14217 - DNA, 2463 bp, Homo sapiens
aaaatgttctttcaaagtcatgtcttaaactgcttatttgttagaaaattatgagctcttattgttttgttttttgtaactagaattcttttgttcaaaaaatgctattacaatcagagtgacgttattttgtgtcgacttgtgtttttagttatttactaaattgcttcattctatgtatattgtagctcatttaagaaaaactactgaatatgacagcatcagcccaaaccgggacttccagggccatccagatttgcagaaggacacatcaaaaaatgcctggactgatacaaaagtcaaaaagaactctgatgcttctgataatgcacattctgtaaaacagcaaaataccatgaaatatatgactgcacttcacagtaaacctgagataatccaacaagaatgtgtttttggctcagatcctctttctgaacagagcaagactaggggtatggagccaccatggggttatcagaatcgtacattaagaagcattacatctccgttggttgctcacaggttaaaaccaatcagacagaaaaccaaaaaggctgtggtatgtctgttatcttcttaagttactaaataacattttacttgagaatacaattcttgagaacatattttttagtcctctgtaatgtccttttactttggggtgtatacatgatcaactttattaaagagaaaagagactgggtgtttatggaaaaacagctcttatttccctctatcttcttaattatagtgacatgatactggtaagttttgaattttaaattattaatttaaagtagatttgaatgaaaaacattttaaaataatactggctatatgctggttaaagattattttgttcacaattccaatcagtgagctaatattatcctttgcttctatttttattgtttgtaaatttaatcccatctcaaattttaaaaaactggaaaatataacttttatttttttagcttctggaactaaagaaaaggcatatacacatttaagtttagagtttaaaaattattgtatgtgaattgagaatggtgtgtgtttttttaattctatctttatcctgttgtttgttcccattttacttcccatttcatccttgcctttgtttggcttgctattatcttttcaaagtccttattctccactctaccttctgtttgctttctgctcattgattatcacttcacacttcattatacattcttaactttgcaccatatggttcacagttgtgctcaaatatacctctgatctggactgttgtagtgaagcagctttgattttgacttcaatatttgtttctgccatggttaagtactcctaagtattatgtatgtcagagctgttctagtaaacaaaagaattattactgattttgggttttttttttttttaggtgagcatacttgattcagaggaggtgtgtgtggagcttgtaaaggagtatgcatctcaagaatatgtgaaagaagttcttcagatatctagtgatggaaatacggtaatgtgtagttactttattaccttgcaacttcaaattatcgtttaagcacgtttagcattctaattcattttacaatgatgtaagtttttttaaaatcagtttgccagtatgatagtgtctctggaattcaaaaattgaaatagcatattaaacatatttaaataaattggtgcagtgttaaaaataattatatctagtaagaaaatctaaacttttggtttaagttaaaaagcaaaaaaattacttttacagaatatttaacatttttctataaaataatatttaatgttacatttaaacactttgtatacgttttagcaagatatagtactggaacttaatggcatgtaattagaattttaaaaaaatcttttggcagatcactatttattatccaaatggtggtagaggttttcctcttgctgatagaccaccctcacctactgacaacatcagtaggtacagctttgacaatttaccaggtatgtgaatttaccagggaataaattttgatagtagatttatatgtatatacgtataaactctatatatagatataataaattataaatagcttcagtcaaactttaggtcatatcatattcttgtactttgtttctggtgagagttgtatgcctttaatgcaatgtttattattaatattctgtgttataatggtactatattctatttaaaaactaactctagaacattagtcatatgtctcacaaatgtaatttgtatacttgtttagaatgtggctatagttatgttaaaaaaaattcaacattgtgcttgcttcagagcacatatactaaagttggaatgttacagagaacatggcccctgtgactcacaaatttgtgaagcattctgcatttaaaaaataattcaccatgtatgtggcttttgagctttgaaatcagtgctgctacataaat

SEQ ID NO: 14218 - DNA, 2524 bp, Homo sapiens
ggccttcagaactgcaattcttactccctttcacagactgtccggagtctttgggtttgattcacctgctgcgaaaaacattcaacaaattgtgtacaagataaattaatctcactatgaagatttgaataactagacattatttatgctgccaaactcatttgttgcagttgtttgtaatgtctagtggggcttcatcatcctgaaaagaaggagacagggatttttttaaagagcaagaaagtcacaatattacttctttccttccttttttccttctttcctttcttctttctctttctttctttttaaaatatattgaagacaaccagatatgtatttgctactcaagtgtacagatctcctcaagaaacatcaagggactcctgtgtcacatactgtgtttttattttaacatgggtgagggaggcgacctgatcaggggaggtgggggtacacatcaatttgagttgttcaggctactgaaacattaaaatgtgaattcccaaacttttctttttggctttgtcagggaaaagaaaaatatctttataaagaaatctttggaaattaggagaaggaatttcaggtgggtttaagtcagagctagttccccaacagaaagatcatttgaaaccagtttttatcccttctctttccttccctttccctaaatcaaatcaatattaattgtgccttatttcacttaacatagacttgaattatttttagggaaagcccctataatgaattcagaaatcactacaagcagcattaagactgaagttggaatattctgttgaccataaaaccttgatatcattctgtgtatatagaatgtaaaaggaatattacagtgttaactgccatatatgtaatatacacaaactcaattagcattgtaatggccaaatgcattcccccatgcttttctgttttcaaaaaaattgaaaaacaaatcaactcttatccccaacagctgcctaattttaggagtctgaccctccacatctcactggtgtgggtgcatggggctgtggagtgggtgtcagtatggatgtgtctgaatgtgtgaggccttggaagggactctttctgcagatactgtaaatacaagtaccattttaataaagcatgtacaataaaccaaaataagcttgagttggactttatatacagaactgtaagccagtgcattatgatacagttgtaagattgtgcatttgattcaagataaggaaaaatcttggaaatgaaaagcaggcactggttaaccaagttgtacacattgtaccacattcagcataactttaggaagaaattccactttgtggaacattctccagaaatccaagattattcaggtaagaattggtatattaaatgtacatctttttactttctattttgatgccaactgattatactagacaattagcactccaggtggttattgaacacaaaacagtaaaagaatattgcactgatagatactaaattattattttattaggttgaaaaagcccttactaaaagcccctcatatatcaattactttatttcattatgactacttaggttccgggctggggacaagttcacttaaaaaggcaatgttatttaacaggtcaccagttaagacttctgctttgtagatacatgcagaagccatcaaacaagggggagcttttaactgcaacaataagctaaagtatgtaaaatactacattctattcagtcttggagtgttttgtagaaagttatcttcagccaaatctttgctgaagactggttgtggagtgttggtaaatgctttgtgtttttatgtaaaatattttctaaacaaaaaatgttaaaagtacatgtcctctgtagtaaactgatatctatatatatgaatcattcaagcctaaagtctagtaataaactgtacttgtgaatagagaaaccctaaatattcatgcagaaaaaattatgcggtctgttaagaaaaatgagtaatttgtgttttggacttgaaataaacagtgttctgtagataattcctcaacttcagttgaatgtttctcattctcaggtagtttttcaggcagtatttgaatgaggggaccagacagtgctggtattgttcctttgttcctgttccccgctcccccctccacacagacagacacatgcacacacacacacacacactcctgcttagccctattttcgaaacttgcctgataattagaattgcttaaggtacagattcttagccttcaatccagacgtaccacccgctaagccagaatctttaagagaatgggcctcagaatttatttgtaaggaatacctcaggtaattctgatcaggaacacttaggaaacactggtttttcaagttaatattgaccatctttgttaggcacttgaaatggccttactcaggtaattttggtctgattcccttcatctggttttgtgtcattcagaagacttcacaaaattctaatgtatgattttagaaaacagcaaatttt

SEQ ID NO: 14219 - DNA, 1170 bp, Homo sapiens
caggaggcagagattgcagtgggctgagatcacaccattgcactccaacctgggcaatagagcgagactccatctccaaaaaaaaaaaaaaaaaaaaaaaggcagggtgcggtggctcatgtctgtaatcccagcactttgggaggccgaggtgggcggatcacaaggtcaggagttcaagaccagcctgaccaacatggtgaaaccttgtctctactaaaaatacaaaaattagctgggcgtggtggtgtgcacctgtagtcccagctactcacgaggctgaggcagaagaatcacttgaatcttgcggggcagaagttgcagtgagtcgagattgcaccactgcactccagcctgggagacagagcaaaactctgtttaaaaaaaaaaaaaaaaaaaaaaatggaataaaggacaggtctagttttgtttaaacaggccccaggaataaagacctgtttttaactgtaggctgcttttaaattaagttcagttttgagaattgaattcattcagattaaccgtagagacctcaaggttactagattcctaaaagctactcacctccagaagacccaaatcgggtaagcctggaagttgacaaagcaacaaaagtggatcctgactctagaaatccaaagcagctcttgaccctctagacaacttcagtttcctccaggactcacatggaagcaagccaagtagttattacatatctaattcagtgtttgagtgaaatatgagagtgttgtattgggttaaagggcataggaaatccttttcgtcacatcacgatggctcttcattttatattctttgaataaggaagattccagaagttaccttctcaacacaaatcacaatggcttccacgatgggcagtgatgcttgagaaatgtcatgttgcttaacactcagactttttgaactatgcatcaatgtatttgtgtaaaatacgactgtaagggcccttcatgcaaagatgtctgcaaacattttcattttcttgtaaataattactggaaagggaaaaaagcaattagaaagaaggacttcagcatcctaagttcttgtgccccgtccaaatctgctttctaaagtctctatgggaaaaccagaaatatcattttaatggcctgggggggttcttgcattataagtatacagagc

SEQ ID NO: 14220 - DNA, 1184 bp, Homo sapiens
ttatatgcactagaggggacaagagcaagaagagaacaaggcactgagtttcagagtgactaaggtatagaaattcagaggaaaagcagaggcagaggagcgattaacaacaacaacaaaaaagcagcacaagatttgacaaagaggcaaggggaacaggagtggagatggggaatgagataagaaagctgcacatccagggagagatatggggagaaatgcagtgcttagtagatggcaataagtagagttctgctttgaaaaaagaaatcaaagggcaaaaaagaaaaaaaaatagagaacatatggggaaataactagaaagcagctgaaagggttgcacctggaaggaagaaaaaaataagtaacatgtattcataacaatgtttgagagagggaagaaagattttcttcctcttcaagattcccatcccctctaaaaatacagtcactaagatgcagccatctttgtggtattcattcctccaatcccatttcccccttctctgacatttattttcattcaagtcagttgccagtcactcttactagaaactcgccaaatcatatttcaagaatttgtaaaagacaacgttctcggcaagggggtcttagaggttggctttttcttttggtcatgtggcatcaggttatccctgacagccacacagcagcaggcaagatgaaacttagtttacaggttggagctaagggctcagattacttcctcatgtgacccagttggctttgctttcttctgtggcagcaaactgaatctcgagccccagccagctgtcacaaagctgccaatggtcaaaggatgtccaggctcttaatatagcctgaggagccatgcaaggcacaacttagcccagagagggccaggattagaacctcttgtcctagctcaatgcactttcactacagagaccagatatgagcagttgaaacatgactgtgtaagatttgggaaaaggggtctcatttactaggagatgactatttgggtaactttttttttcttctttcttgccttctacaggactaataaagttttcttgttttttctccctgccctctctttccttttctccacattctggtttggaagctatgatatttcatttctttcagtcatttccattgattaaaaaaatactatggaacttctcaaacacactcaa

SEQ ID NO: 14221 - DNA, 1157 bp, Homo sapiens
tgttaccgcactccagcctgggtgacagagcaagattccatctcagaaaaaaaaaaaaggagatgagtccctggtggttctgggttttggcttgaagttgttacatggttagtggagttatatttctagagcacccttgagtgcagtatctcccttcagagatttccaggtacatgttttcagcagcccttttggtgaactgagagacatttttcagaggcggacaacaagattttttgttgtttttgttgacgttgttgtggacactatggactgagggagtgagagggcagtgttccctcagcactgccaccccccatgcctgagtgaggtaaaaggcgtgtcaggcaaagtttttctgtaataggtcaggcttgttctatgttgatacagtgaccttgttacatggcagctccatggttacattgcagctgccagcactctgaataagaatgcaaatatcaaatgtcagtgtccctttctcttcctttccaggtgtttaggacagacctgatcactgccatgaagttgcatgactcctaccagctgaatccggatgagtactatgtgttggcagatccctggagacaggaatgggagaaaggggtccaggtgcctgtgagcccggggaccatccctcagcctgtggccaggtagagatgccctgaggacagaagcctctccacccacccttgctcttcttccctgacagcaggcatctgagaagagacaatttctgtgggaagagacagtttctgagttagcattaaaatatcatgaggcctcaagtggaaatagaaattcaggagcaacatacttcaggcatacagggtagtggttttgagggccatgagcctccaaacttaacattacagccaccactgtggggaggtgctgctttcttatgagaggaaggcaaattccaagacatcctgggaagtgatgggctaggggaggaaaatttgggtgttcacacgtctgcatcctcttttcctgccctccgtattcgctctggagagtggctctcctggagagaagcatctggctttgttgggaactagcgcgggcagctgctctgcctactgcggttgcctctgcctttggaggaggacaggtgttaggagacctgtcagttagggtttgtggagaggggagtt

SEQ ID NO: 14222 - DNA, 1231 bp, Homo sapiens
gtgaggtgtgagggttggcgggtttctccctctggttctcagagtctgctgcgcctgccctgcctgtgtggtgccctggttctaatggcctccagcagggatgggcaggtctggttaagggaaagtgatttaatgactaactcttgaaatgtatgggtcagtgtgttttggtgttggctgcaggccagagtggtcagaggtggtgggcagggcacagcagggtcccgggaagcagattttgaaggcttctacagtgttttcatttgtatctattgcctgttagcaggctttaacaacttctagttaaggttttattagcagtgacattcaggttttcagcctctggtgatgacctggggctctaagggttggaagaggaagacatttggggccttgtggcacacttcattgtctgtggctgaaagggtaacctggctgccttgtttttttattatccagggttgtgtctgaagagaaatccctcatgttcatcaggcccaagaagtacatcgtgtcatcaggctctgagcctcccgagttgggctatgtggacatccggacgctggctgacagcgtgtgtcgctatgacctcaatgacatggatgctgcatggctggaactgaccaatgaagaatttaaggagatgggtgagagaccatgtattctattattttattaaccaatgatgaatagagacattttaggcaggtaggtgagtagcagaaagctccttattgccagttgcaggcagctccatcatagctttagtcagtgagaatcgcagccctgccttagatctcagcctgtttggctgtgtcagatgtgctgagatggtttcagagtggaagcaaggctcctcggctcaggcaccagggattcccatccccgctctgatctaactccctcattcacttaccttaaggaagctgaagtccagggaaacgaagtgacaaaagggcatggcccacagttacctgctctagtgtttttttcctgtgatgccattcggattccttctttagccgtggtttgctgcttctctaaatgaacactcttccaggcatgctccccatttccaagcacatcatgtgtgttttaacttgagcgattttccttatgtcatgctgcaaacctggagttctttttccctccgtttatctctgtcctggctttccttcagtgaagcctgacattagctgtgtgcccagcccttctccacctcttttctgca

SEQ ID NO: 14223 - DNA, 1239 bp, Homo sapiens
acagtttcctggaagactctcccctttgaagattgtttcttagaaggatctgataagcatttaataaaaaattttggggccctcagagatggatgcatcgatgggttgattgattgatagattgagacacggtcttatgtcactcagcctggatcacagtggcacagtcatggctcactatagccccaacctcctgggctcaagcagttctcccaccgcaggctcttgagtagttgggactacaggtgtgtgccaccacgtctggctaattttcatattttttgtagagatggggttccactatattgcccaggctgaccttgagctcttgggctcagatgtgagccaccacgcctggccagtgattggatttatttattgtacaattatttattcattatacattatttttaagtataaataaaccagtactattttgtaatatttattaatatggatttattaaaatgggttttgtggcatttttaacttcaggaatgcctgaactagatgaatacaccatggagagggtcctagaggaatttgagcagcgatgctacgacaatatgaatcatgccatagagactgaggaaggcctggggatcgaatatgatgaagatgttgtctgtgatgtctgccagtctcctgatggtgaggacggcaatgagatggtgttctgtgacaaatgcaacatctgtgtgcaccaggtatgtggggcagggaggccagaaagaagaaacctggggcatgagcctgtctgctgtgggagtgtatgcctggagtccaggattcttcctccgaatggggtctgtgtttctacgatttaaagaaatgtgccctatagactttatttttccctagtaggttcttacagtgattgaaatatatcctctgcttttgcagccagaaggatagcaccctctgtggaaatcgtctttcttcacagtgttttattcttatccataaaagtcaagtttacttaaaaagaatgtatgagccccctctgtcctactgtaacacttaaatttaggtattaagaacactgagaaaacaaacctttgaaaaggtggttagtgtgctgtattagtttcttacagctgccctgtggaacagacaaattactacagactgtgtgtgcttaaaacaacaaaaatgtattgtcttgtggttctggaaactaaaagtccagaattgaggtggtggcagtgctgtgcttcctctgaaacatgcaggagagcc

SEQ ID NO: 14224 - DNA, 2682 bp, Homo sapiens
ccgatgtggaaatgagtgactcagagagtgaggcatcagaaaagaaatgtatacacaccagcagcactatcagcagaaggacagacattatcaggagaagcatcttggcttcttgatgcaacagagatgatgcggaagccctttgggctcgtcattgggtttgctagaggagagctctgatgtgggggagaagcagaaacccattaatcctgagctacacaaacacatttacttgcaattcagattaatttttttccagagtcatttttaaatcatttttgtgagaagtttgtgttatttgcaacttgttgaggaaacagaagagtagattgtaaccataagacactgctaagactagaacccgaactgaacactaaaataaaaatgaaatgttttaaagaaggcaaggcttaaataagcctcatgaatttttatagccctctgcattcttcccaaagcacaaactcatggttacctgaatatagggaaccagatatggttcttgagaaaccctcatggtaccattcacagcccataaagtttattttctaggactgtggtagatcttgaaatcatatttatatttggccctcaaggctatttttgttgcattatagcatataggcagcagctctgaagcttcagtaacactaagaaatttatgtgtaaatatagcagtcagggaagagaattttaaaaaaggtcattattgaagaagctgaggggacagggtagagctgctgcaatatggagatttagggtaatatggcaaggtcctgctgcttgaagcctgtgagtgggttgtggatatgggactggtggagagtgagactgttaggaaagttgtatctatgaataagggcagttgaagtagaatttttaccagtccacttgaccttcttcttccctaaccactggctcttgagccagcttgggatttccctggccattgccaatacctggccatctggcttccaatagtacagtggctactcaagttcaagcgaagaacttccagactctggtgactgttacttcccagagccaaccactagtgcatatgttagggaatctgggcttccaacatgaatggattccttaagaaaaaggaaaaaaaaaaaaaaaagaaaaaaagaaaaaaaaaagaaaaaagaaaaaaagagaaaaaagcgaaataggttatattttaaaaacaatagaaaggcaataagttgcgataagctcttactattgaccaaggttatacaggaaagagactgaagtgtacccttgaataggttttctgtagtcagagttctaaactctaatttgtaacttggactttctaattgcaaatggcaataactattaagttatcagcaataataaatttagcattaaatttgagtacaatgttttgtttttgcactccccatagtgcgtatgtattaagacagtggatagtgtttaggtcctgttaattttctttggaattcaatgtggttgtgaatcaaacttaaggaaggaacgtttaaatagcaatgagatacagaattatgggcctttggaacaagcccgacttcccctaaattctccttagtttgttaataccagtattcagattcctgattcatttatacatctgtttccatatggcagggacattatgatacttaatgaataatgctttgaggagttctgcagttaactttcaagtcttccagatgattgtcaacaacaaaaaaggcttattgaatcccatcttgctatgcaagttttatcagatgatcaaatagtagatctgatacatccccattgtatgtacgacattttcaaaccaagtcttaacttttcaaggacattttagtagctaattcaggggagggggaagaatgatgcaggtttttagattgactgactatttttgagttatggggctcattttgaaagactgctgtccagatcagcttgttgctgcagataatagaaggttcttatgaatccaagttgtatattcacttgtaggataatttaaaaattagattttttttgcatatgagcaaaaaccttttgctggatacaggagaaggttggactttatctacagttatcttttgattacagcaacagctctgggtgagagtagaatttatagagggataatttgtcaagccatagaaagaaaatctaaattaatctagtaagtgtatgacctctcaccattttaagaggtatcagattcatttgcactattaggaatgctagttttgtgcaaaaataatgccttacctgttttttccccacatttaggttgaaaagctttcaaatgttccaagttatgctgaaccaaaaaaaacaaaacaaaaacaaaacaaaaaatattaaaaaaaacccacacaaaaacaaaacacacaaaaataaaaagcccacactttttattcctgcttcgaaatgcaaatggatagagcacggtttctctgacagtataatgatagctttgtgagttagtttcatgtcatgctgggaactctctatgaggtggccataagcagcaaccagcccaaacacccacttgcgttctattagtatggaaccatttgcatttgttttttttaagctttatctttccttgtgcatcctgaccaagaaatatctttgattatgattaatgtattatgtcaaaatgtaggctagttaaacttt

SEQ ID NO: 14225 - DNA, 1185 bp, Homo sapiens
accatttcatcattgctttatttcacttttgtaaattacaaaagttaaacagtatttgtgtactcactgaccatttgtattttcatacttataagttaatgtctcatgatcataatttattttcctgttggggtgttttttatttacatggatttttagatttctttgcatattatgactacattttagacttttccccctgatatttcactgtctttatagttttgaaggttattccaaaattgaatgttaagctggaaagttttagtattctactgaaatggctttgatgtcatgcttcaaaatattttgaacactttaaatacatatattcacacaaatatatatacacccacacaatttatctgtattgtgtttatgactttcagattttcatattctcaatgcttctaactaaaattttggttcataaaaagtatcttatataaaacctatagtaaatattttaaaaatgtgcttttccatttttaataacatgtattttggtaaatacttgattcagagagccaatgaattagagttggcatatgagtttcacatagattcttatactaggtaagtatttaccaaaacatgtatcagaagcagaaagttgttaaaaaggtttaccagacaacaagactggaaagtgtattaagtgtgcctggccttgacatcttgttctggataatctagtctacatcttaatttaggaaagctaatctgtaaaactgttcaaatatttgaacaatatttgataatgcttacataatctttcaagataatatcaggaaacagagttctttcatgtatgtaagtagttaataggacataacatcagatgtctagatgaattatagctatggcttaattacacaataatctgccttcttagtagaaattgcttatttccagcatttgctgtaaaaaaaaaaaagacagtcagtttacaaaaatatacaatcctatggatttaatttatttaaattttgttcattctaattttttttggtgcgtgataatagcaagttatcttagttgaaaatagagattcattcattaaagaatattaaatcttttgtgcccaagtgccttaataaataagtagaatcttaacttttctgataagcattccagtaaaagctaatgtacatagatatgccttgagccactgtttctactttc

SEQ ID NO: 14226 - DNA, 2249 bp, Homo sapiens
tgaagcactcaaatgggaagaaaggaaatgtctcatcctggaagaaatcctggcctaccagcctgatatattgtgcctccaagaggtggaccactattttgacaccttccagccactcctcagtagactaggctatcaaggcacgtttttccccaaaccctggtcaccttgtctagatgtagaacacaacaatggaccagatggttgtgccttattttttcttcaaaaccgattcaagctagtcaacagtgccaatattaggctgacagccatgacattgaaaaccaaccaggtggccattgcacagaccctggagtgcaaggagtcaggccgacagttctgcatcgctgttacccatctaaaagcacgcactggctgggagcggtttcgatcagctcaaggctgtgacctccttcagaacctgcaaaacatcacccaaggagccaagattccccttattgtgtgtggggacttcaatgcagagccaacagaagaggtctacaaacactttgcttcctccagcctcaacctgaacagcgcctacaagctgctgagtgctgatgggcagtcagaacccccatacactacctggaagatccggacctcaggggagtgcaggcacaccctggattacatctggtattctaaacatgctctaaatgtaaggtcagctctcgatctgctcactgaagaacagattggacccaacaggttaccttccttcaattatccttcagaccacctgtctctagtgtgtgacttcagctttactgaggaatctgatggactttcataaatacttgcttttgtctttttaatcacaggagtctatttttttttttttttttttttttttgagacagagtctcgctctgttgcctaggctggagtacagtggcctgatctcggctcactgcaagatccgcctcccgggttcatggcattctcctgcctcagcctccagagcaactgggacaacaggcgcccgtcaccacgcccagctaattttttgtatttttagtagagacggggtttcaccgtgttagccaggatggtctcgatctcctgaccttgaatcacaagagtcttaacagggaatgtttcaggaaacaaataggataagacaatgccagaggaaggatagaaacatgggaagtttctatcatttcattttctgcgtttccagcatgcccttggaaaagactccctttagtccctttttcaattaaaacctatggtgaaaaaggcgtttgcactccaattttggcttgtgttgttttcttttccttaatattacattttgatcatttaagggcattaaattggcttgttttggtcaggtgtggtggctgctcatgcctgtaataccaacacattgggacgccaaggtgggagaatcacttgaacccaggagttcgagtccagcctgggcaacatggcacgagaccccatctctatttctaaaataataataaattcggttattttgaagctttttcaatttgaggatgctataaaaacttagacttgttgcttgaatcttccataatagtatgtaggagcaatttctctaaacagcattttaagttatttatttgtgggtttttaaaatgtcaacaaaatgcatggcagtatttattttttatatcttcatataaaattaagtaaattatagcattatgaacattttagaaccatgcaagagaagttatagagaaagtaatttatggtgattttcataaagctttaaaatattttcatttgggctataacaaaatgagtacaaaggaactatttagcctggaggggcttttgttatttaaatgtcagatttctttgatacattcttcaaaaataatccttgtcctgcctctatgttccattattgtgtttcttttttttttttttggagacagagtctcactctgttgcccaggctggagtgcagtggtgtagtctcggctcactgcaagctctgcctcccaggttcacaccattctcctgcctcagcctcccaagtagctgggactacaggcgcctgccaccacgcccggctaattttttgtatttttagtagagacggggtttcaccatgttagtcaggatggtctcagtctcgatctcctgacctggtgatctgcccgccttggcctcccaaagtgctgggattacaggcgtgagccacagcgcccggccttattgtgtttcttgaagagattccaattagttttcaattatttaaccaatta

SEQ ID NO: 14227 - DNA, 1164 bp, Homo sapiens
ttttttttttttttttttttgctgccagactgatttggctttgctgggtctgctaacccactccatactcatccagacactttcagtcttccaggattttgttgttcttacctcttcttgtttgttgctctcacctcttgtccttgtgggtttaggtataaaagagtcttttactgttgttttagtcagctttcataattaagtgaaattatatgcatgtttttaatctgccaacttaatcctaaagcacagattatttaaaatgtttaatctatgtcttacctcttgagacttgaaaggattattaaagttagcccttttcatctcttgttttggcttttacattcatatttataatatttgaaactcattatgtggactgctcgagactgtattagttcaaggatttataagtgaattcagaatttgtaaatacaaaggttgattgttctttaaatttgctcttataggaaagtgaaaaggtttctgaatatccagcagtgattgtggagccagttccaagtgccagattagagcagggctatgcagcccaggttctggtttatgatgatgagacttatatgatgcaagatgtggcagaagaacaagaagttgagaccgagaatgtggaaacaggtagacatctcataaaatgttcattatttataactttctcattttgtaagcttcaacaatactattgccagatgaaaaatatactgaaaaacctttttaatgctatttagtatagcttggaaaccagtgaaacatctatgtttaagggaatttgtgtagatataaaacttctattgtataattctatgaggtgtaacagtctcatatcatggactctatgcacaaaattacagcttcacataatgataaagttattttattattttttttctgagagtataaatcctagctgttatttatacaagtcaataggctagtattatgaggacagctttttaaattaaaaaaaatggtattctatcattgtctaattgattatgagtttctttgagttaatattgatggagcaataagatttcttttcattaatatcagaagcatcattgtagtgttctatcagtttcctctttgctttttgtcgtcttagagatcttagtatttcagtctatttctggtgagatagctata

SEQ ID NO: 14228 - DNA, 1352 bp, Homo sapiens
gaaagttataacttttttttttttttgaggtggaatctcactctgtcgccaggctggagtgcagtggcgccatcttggcttactgcaacctccacctcctgggttcaagtgattctcctgcctcagcctcccgagtagctgggactacaggcacgcttcaccatgcccagctaatttttgtatttttagtaaaggtggggtttcaccatgttggccagggtggtctcgatctcttgacctcgtgatccgcctgcctcggcctcccaaagtgctggaatatacaggcgtgagccaccgcacctggcacagttatatttatctcctagaatatgaatatcataatactacctatgtacaattgcttgttaagaacttaattcagtatgttcatgaacttgattactaactcttaagaagcagaatgttcattactgccctcttttgacacggggatgttaagcctgtcttctttttcttagttaagtgttaaaattagattgcacaataagttatgctttatttatgtccttcctgtaatttttaaaataacttttcaaattcttcctctttttaggctttctggttaatcatctttagaagactggatttctggatatctactccactccatctctattgacttttaaaacatgataatgcaaacctataacactggcaaccatcagtgaacctttaatttcattgattaatagcgtttgaagcttcctcagggaataacaatgacatcagcagtggttgacagtggaggtactattttggagctttccagcaatggagtagaaaatcaagaggttaggcattcaatgaattacatttctattttcttcatagaaatttgtgcatgaactaattttgaaattaataggaaacatatttgagagtaaaaatgtacaaagcatgaaattatacatgtacatgtcgtgtatccttatataatttaggtaatagaaggtcaaggaaggtattgcagggcttacgtgaattgttggaacatacatatattagaatgaacttggagggaggaaaggaatggaaagaacactatagtattagttgagagttaaatttaaatccctcataaaacccattgtcttggattatactgtaggtatatactatgcccaaatacctaaattagattcattctaagttagaattttgtatgtgctttacttattatctttgtttcttgattattttatatctaaatcggtgtggagatccattgtattttaatctcatttaaacacgaatttagataattagtaagtcagaaaatgaattcagattttgaaattttatgcgtgtaggattttgaatcattagcatat

SEQ ID NO: 14229 - DNA, 1183 bp, Homo sapiens
ttttggttgccaatgatagatttctgacatctttttcttgtatatttaatagtaatctcaaataatcattttaaaataaatttaggaaaataaaaaatgtaggaaatttatgtgtattttttaaatcactgatgagtttaacccgtatataacctaggttcacagaaataaagtatattttcaagataaagtttttatattttaatgaagtagatatgtaaggttatcccatggaattcccctgaagaatgaattactagattatctttctagtcaaatagcatgcattttgtatcttttatcttaaaaaaaaggagagtctctttccaataatagagtctggaaatctgtgtttacttggattgccaattttaaaaatgttttaaatctgcaagaaagtggaaagtatcttagtaatctccttgacatttttaattcttaaggcagtgtagcatttgtttttgagattatggttctgttgttatttatttttaatatttatttttttaaaatgttccttttcttctttgtttttgaaaatagaaaccttggctatgaaaggattaacattgaactgtttggggaaaaaggaagaagcttatgaattggttcgtagaggtttgagaaatgacttgaagagtcatgtgtgtatcctttttgagatatatttaaggtttgagtggggtgttttgagctaaggcagcaatttgagagtcaaagttttagatctctcttattgtgctattacagaggaaattattttttaaatagggtaacagcaactgccttcattcagggaacatttttatatacctaaccatgttttaacattctcttatttcacagataaatggaacttgcctttaaaaatatctgtgaaagcttttctcactcttaaaaagggggcattgctagggtctgaatatttgtgtggcactccgctaccccatttgttgaaaactaatcaccaatgtgatagtggtaggtggtgggtctcaaaaagaaaaaggatataaaataaggaatattagagcggcattataataccctggtttagagcacaagcttttggagtataggcttagagtgtgcctcacttaggttcaaaacccatttcagcttctttctgtgtgatcttagagctcagtttcttcatgtgtaaaatggggataatcatacccac

SEQ ID NO: 14230 - DNA, 1116 bp, Homo sapiens
aaaaattctaagattagcttggaggcttcattatgttcttaacaaatatttctttgcctccataaagctacacaatatggatgtttgaagtattttctattattgttcccatcattgtgttgtaaaatgcttggggttgtgggataaattaatgtgtgttttttttttttttttttgagacggcgtcttgctctgttgccaggctgcaacctctgcctcccgggttcaagtgattctcccgcctcagcctcctgagtagctgggaccacaggcgtgcaccaccatgcccagttaatttttgtatttttgatagagacggggtttcaccatgttggccaggatggtctcgatctcttgacctcgtgatccacccgccttagcctcccaaagtgctgggattacaggcgtgagccactgcgcctggcctaatatggagatcttttaaaggagcacttgctgttactaaaagcctaagaaaaagtgtttatttttttccttttaaaggaaacgaggtatcagttacttcagcttcgacctgcgcagagagcatcatggattggttatgctattgcttaccatttattagaagattatgaaatggcagcaaagattttagaagaatttaggaaaacacaacaggtaataactagaagccattttactaagtctgatcctaagtataactaaaaaaataatgtgcatagtctggcttacttttaattttgaaatagtttcaaacttatagaaaagttgcaggaatagcacaaagaactctacataggggttcattcatactaaactaattgttaatatttggtgcatttactttaaaatttgtgtatctatttatctattttaattttcttccttaaatgtttgagagtaattgcaagacatcatgctcctttacccctaaatgctttagtgtgtattttctaaaaataactgtatagttttcagttctctagatagtattatagggatagattataaaaattaggaaatttaacactgatagactgttatctaattaatccccagcccatattcagaatttactaattgtcctagttatagcctttctagcaatttgatttcattgcaggatccaattaa

SEQ ID NO: 14231 - DNA, 1574 bp, Homo sapiens
ctgctgaaatttatagagcaaattgtcataagcttttcccttatgctttggctttcatgcctcctggatatgaagaggatatgaagatcacagttaatggagatagttctgcagaagctgaagaactggccaatgaaatttgaacatcactaaacaagcaaatggaatgactttggaccatatctagtatataatatttttgtcacgcacctgctgcattgctctaacttacacagaatgagaggagtaaatgttcttgccttcaaatagtgttttacgttttttatcctgctgaaaaagtatatataaaatatctaacattacaggatagaggttcagtttcttaaaaaattaaagctgctaaaattgagtggttaaaaaagataccttatcctattcctccccacccacccatgtttttaaactaatttatataaaatctggaggctgttacagctaacaaagcaggtgtgtggcagaaatattactttaaatttgtcttgtgagattttactatatctcagacagcataaatgctgttttagcactggattctttcactgagcacaaagagttgttggggctttagcatctgactgattttgttacggggttgattctgaccataggaagtatgcaatgtgaatcactatttacagagaaacctacaacagatgcttgatgttgtagaaactgggacatatagataccaagcaaaattataagaaacctataaggtgttcaatacgcttgtgtttccaaaattcactgtacatgatcagtttggtgttcttgtaccacagtttttaactgaaggaaccagttgtaacagtctcaattttaactaaaacttgaagaactaaaacaacaatgcaaacctttcagcattgtttggccaaacttgttaaaactgtaatgcaagaaccaaatgcactgtgatgtggcaccaactaattagcaagcatgaatttttcacccaagagtgaaaaaaggaaaatctaccatggcttgaagttaaagagcagaactcctgactaccattctatgactgatcaaaagactaatagttaaaaacctcagcaggccttgttcacgatatgcagaaaaaaaagtgctgcagtttagatacctctggaatttttccacagtgtcacaggtttgtaatacttgaagccctacatttctaagaatatatttcttgctcagttgtttcaggcaagcccaagactttgtaatttttaaagggcccaagattttttttttttttttttttttcaaataacagaccagcttctttttcttgcagttacagatgtaatttcctttttgttgtcaaacataaggtaccaaatatgatgcaataaattgttttgaaaaacagttgtgtgaatatttcaactaatctgtgttgggcttctgtgaaatacacaggtggaaacagaggtgcaagccagaggcaatgtaatatgctgtaaggctagtgcagatgggagctttttagaaggggctaagtgctggtgtcagggaaattccataatgaagtagaatgctgctcctgcattaagatttcattg

SEQ ID NO: 14232 - DNA, 1510 bp, Homo sapiens
aaacctatacactgagaactagcctcaggcttaatattctcattgcatttgcaagatctgagcaaataagattaagtaaaacaaatcaattgtatatataattgacctttttgtggaacatgtagtttatagaaagtatactctaaagggaatttgccgaagaccttttactgattgaacagttgtgctacaatcaacttttcatagtacatgacctgcattccacatctcagtctaacagtttagtagtgatgtaaagagaagtacaaaccgaactccagtgctttgttatgttttattaactggccctgtctcaggaacatcttaacagatggcaaaaaaacaaaaactttttttcaactcctatgagtggcaactgaagttcttattgttgggaaagaacactagtcctacctctgccactaatgaggtgtttggaggaggtaccagccatataatagggggtgtatgtgtgaattttgtttaaactctactgtatattgaaatgaaattcatttatttgtcttgacaatgttcaaatgatgtagattgtcttagaatgaatattcataagtactcagaactcttaagatgcagatgccacccgtgaggagctaaattcctaatgtgtattgtattccaacccaattttactggaactattgaataaatcttttattttctttcaggtttacttgatagtggatacattggtgtcagaggaccttgactgggttcattttatgtccagacatcacccctgaaacactgtactgtactatcttgctctgagtagtatcaactggatcgtctcatatttgcctcattcatcctattaatttcaaatgatactgtgggggaaaaacagggttagaaaaacaagtggaaaaaatggagtgatgttgtaatctaaacaagtgccttatgtttattgctaagaactggtgttaccaacccttttgagaagaaagggtctcttgacctgtattaacataggaaagtaaagttctttttgtttttctttatattcagctactcttgtcatttctcgttgaaaaactaaaatctgactaggttagtttactcagctttaattagatagttgagtcatatattttcaacatttttctgtatcgtatttattatgcacaaaaataaagtgtgatctctaatagcatggctaaaggtaatgccaatattagtgaatagctttgctgtgggctttatcaggcccttgtttttcacagtgttgtttgtactccatggtgtattgctattagagctgtgaaatgaaagctgtgactttatgaagagatcaaaaaaagtgtggtccagattcaggtaggttgtggtaagttcagggaagtcttgtatgatttctaagaatatttcagttaccatgtatagtatttgggaaaagctgtaatgtaaaatattggactttgttgcaagataggtatatacttgtgtcagataattaaagccttaaattttgaaatgaatctttgag

SEQ ID NO: 14233 - DNA, 1225 bp, Homo sapiens
attatcccattcaaatggaatttttttcaacattggatagaaggaattgaagagttgtaagtagtgattagtctgctaatcagttcttcagatgagatattgaatggtaacactctgagcttaaaactcagcagtgtgtctgtgacctccacgcaaatcagaggaagcaatgcatccacgctgagcctcaccatgtcttcctcccaactctcttcatactctctgtgtcttccagctcttctttctctggccggctctctttcctcttctctctgcatatgtgagaacgcctgggcatcctgggtaacagcagccccagctgccctctcctgttccctgttccaagtcccctgcactgacctttcttgagtctctctggctctgtgcatgtctttgggactctgctcatctggcttttcctctgtgtgtgcctctctgtttgcttatgtctctggctctgtcttccccacccctcccctcacacacacacatactcccaaatgtaaggctctgtggcaggttggaatcggagtaaggcttgagattcactgagttctgtaggtagggaaagaagtcaagggagtggaggttctataaggaattaacagctgaggacggaagggtttgtttcccgtttgaacctaaacgcaagtggaaaagaatactcagaatgtatttttctactttacatctgctggggaaggaaatgtgtcaggaagccgctgcatctggtcatttcatcgcatcagaatcacagcagacgtggaagattccatgtggtggggaataaagaaataactttatgctctcctgaaaaacagcgggagcctatgtgtgtgtgcgacactgtaatctcaaggagattcactcagagctgtctcagtccaactcctgcatgaccagatcttcccttagcatcttttctgtgatgaaatattatcttgtgttagagttaggaataggaactaacctgtaggagcatgtccccaaatggacatttgaatggactaacaaaaacaactggaaagactgaatttccgacacaaaggaatgatgggatcaaaaagaaagcagtgaggagttcttgagtcttgtagtacctattcttattttaacttgcttcatccttgatctacctgagacactaagaaggaaattagttttccaagagctctttgaacctgtctaggactgtagttaaacctatttgccctatgggggttct

SEQ ID NO: 14234 - DNA, 1221 bp, Homo sapiens
gtttgcattaagttatggaagagttgtaatatatactttaagaaagaagagaagaaaactagtatctctaagcggtaactatggcaattttgcaatattttcagtagtgctagtaattttttcctccttgagtacacattaaatgtacataacatagcgcggtcaggcttgtggcacagtgcattgaattcaaaagtcaaacagcaaatttgaattctaacagaattcaaaaaaaaatttttttagtcagtactactaaggcagacacactgattactaggtacaaatcaaaccttgatgctaaaactcttcatcattgtaatttcaaagcacttacctgcttcaaaacattgtaaactaagactgaacacctgtatagtttaaaagcaacactatcaatagcatttcagccattttgccagccatgtgtaatcacaactgcagaaataaggagaaaacccctgtttttttagtttagctaattagatctgtaacatcactgggattgctctgaatgaatcctgagagttttgttttttataagcaccctcaccacatgccatagctttgtctcttttagacacctcgatgcagcggctggaaggactggagagcagctgttgtgctgatctgtagctgtcagctgtgattcctgtcacctgagtcagtttggtctggaaagcgaaggccttccaagctgtagcagatagtgagctccagctgatgagagaaggcttcagtggaagaagagtgaggacataggcagaaggaagtttgctatttcttgtcagttgcacattgctttatgaagactacaacaaaagtgcttaatcccaggctgctcatgactttcatttcaggtggcccttgggcacattgacagagttgcccttcccttctttgcaacaccaggcttcctagagcacccggttgcatgctttgcagctaggtggcagtggtttcagggagatccagttggatccctgcttgaaagcttaagccaatggttcacccatgagaggaagttgtcagtgcttccaggaagattgcccaccaaaggaactgaatagtttttagatttaaaggcaccaggatagggtcactcttactctgtagaaagagaccgttctatacactgtgacggatgggccagggcctctggacttgcattctgataggtgctttaatttaaatgtgcccaaagggagtgactgtcttcag

SEQ ID NO: 14235 - DNA, 1178 bp, Homo sapiens
gcagagatgtgtgtatagcttctcttccatggacaagtttcatctctggaggcgatcagggcagcctgtgtagaagactaagacttaggaattgggctgtgaatagctatccatgtccatttagcaaataccacttcgctattttaagagcaagaaggaaaatgccatttaaatagtgatttagacttacaggaaggacaaggcaaggataaaatctaccgaagattttaagaaaatctccaccctaaataaaaattgaaagcagtacaattttcatgtctactgtatgtgtattttcagaaagggacttttttatgcaaaggacacactgacatcaatgactaatgttaaaaaacaacaattggaaaggttgtgcaatgtggagattcttcctctatatttagaataaaactttgtgtttttactgtcaggatgtgagcttaattatagcatgttgcaaactttgcttttctaaagagagagagagagagagagagagagagtgtgtgtgtgtgtgtgtgtgtgtgtgtgtgtgtgtggcttactctgcctggagaaatttgggtgctatttttgttttccttttgaaacatcaagggttgatataaggtagttttagaagtgtagtatttcttgaccctcaatgaactgatgacctccctgaggccaggaaggatgttttattcagctgttttagcttttatattttataatcattatttacatgaataaaaccaaggatgtcacctgggctgtttggaaggatttcactttgatttttgtttaagcaatgcacaaattattcttctggagataaaatttttttctggcatgaaaacttgcatttagaaaaaaatctgtaattattcattatattattcccataattagcagttatacgtttggtatagttatttattgactattcaggagttacctttgtgcgtttgtacatacctgtgtgcttaacaaaaaaaaaattattgcactgagattattcacattgtcaggctcgttatacagactgaacagtatttggttctagctgtaagtccttcatatcaaccatgaaaatttgctcaagcccacattccctgaatctgagagaatcaccctagatggtttgtggaaataattaataaacttcatctcaccttcaaaaacggctattatgaaac

SEQ ID NO: 14236 - DNA, 1228 bp, Homo sapiens
gttaaaaacttctttttgcccaaaataactcattttgtattatctgaaaatatataatttctggtcatgtgtatgttaaaatagaaaattttgaggaaaaatggaaatagggtggaaaagtactcggtaaacagtagtaaccaaatattttcactccagatttgtgttttctctggcacagagtagatcttttgggaaatatatatgaaagtggattaagtttgactacccttatgttagccacatctggatgagaacagttacaaagagtttggtctctaagttgatttgtacccagtgggtcaacttctgcaaaattccgtaatggtgtattagtattagaatagtgaataaaatgggaaagttatacatgtatacttattatcttgctcagtattttatctcacttgttctagaattttctgtaaaccctgctactgggtttgaagagttttagtcatcctttaacaatttttaaaaatttagcttctagattccatttggtaaggaaatcaatattggaagtattgctaaaatcttataatatgaaaagagatccactaatgtagcttaaggttattagatttgggcttttaatcatggaataatcttatgtattggtgtaagagttgatgaatgactttagctgtgtgaatatataatagtcaaactgcaaacattttgcatcccttttgtgacctaatttacagacatttaaattgtgttgcagttctgctttgccgtttaataaaaagctatttcagaggttgtgtgtgttttgatatagttgcctaagtaaatggggtatttaggtatagtggtgtatccagggttattcaatgccacagaatagtgtatcttatttaagtacccagttactgattatttaggggaataatatttttattaatacaactataactggttatcaatataaatatcataggctattatacattaatttggaaaacaaaagcaaagcactcaaaggatccagtatctccagggaaaaaggaagttgtattttttagggtaggctaagctactttagcaagagacccagtgataaagaatataaatatagaagtttctctcccaaccagtggttccaaggtcagcattgcaggctagcagcccttgttcaaacagttattcagggactttggctgaggatggtgctgccattttaaatcatggctttcaagtcactctagttattcttctaatt

SEQ ID NO: 14237 - DNA, 1189 bp, Homo sapiens
cagttaaaagcaggcagattacacattagaggtagagaatgtgggatgatttgttcacaaaggaatggaatccagagggcataacagaaataagagacaggggaggctggtacggaagttcatcaggcaactgaaggcacagtttgcgcagcaaccaagaaaaggtgggatgtgaggcacgcaagatgtagaggtggggaaaggtttccaacagaattcaacatgaatttgctgtttgagtcaattgatccagtaccaagtctgtgagttcattttcctcttccttttagatttctcctttttctaaaaaagtaaaactgagggggccttcccctgctttccctccttctgcttccctattttccctcgcattcccttccttttctgcagatcctctgcttaggaatggggcattggcccccgcaggagtgggcggggaaggggcggagcgaacagaggtgggcggctcccgtcctatgacgtcagccgtaaggcgctgctgtcgtaaaaggacgtccggtccgtctcctagtgtccggaatcggctgtcagcctccctggctgttagtaccttctttcccggagtcctggtccacgagttggatttactgctgtcgcgggtgggcctcacgccattccctgtccctcggccccctgagtgagtccggtctcccggcgaaagtgagcgaggtttgcccggagcgcgcacgaggtagggtgtcccgcgggcgggtgacggttgcgggtccccgttgcgggtccccgagccgcctggcacctccgccgcttctcccctggacgcccctccgccccactgggtcctccagctccaggctggactcctaaagccgcagtgccccgtgcctgtttcctcatttggtgacacacgcagtgcatgcaagaagttggagtgttaccggaaaagggcttgaacccgtataaggctgagaagaagattcactcttttgagcgtgcagaacaaactggagggaaaaaaaaatgagatttaactttatcagaggattcagaggatatctctgaggacgcagaaagttaatccgcatgatcacctcgtgattattttctgaggttctttggccagggcagcacgccctctagattttgtcattttacatattggaatggtgccttagtggtctgggcgttacgttaccgaaataaccaccta

SEQ ID NO: 14238 - DNA, 1552 bp, Homo sapiens
gtggaccaactggtggagggggtggaggaggatttaatacagttggcagactcgtattttgatcctgagagagtccaaaatgcactggtcacgaaacgtctaatactatgactgttaaaatgtcagactataacaaatatctatcttttatttttcattagacccttatacttcaagagaacacactcagtgcttgtttttattttcttgacacatttattaacaaaatgcatcatggaaaaaaaaatctacctcttaaaattccatttgcttttatggttagacatgcttgaccaaaaatgttcagaagaaaatatgtacctggtccctaattaagctgcgttaaatttggtagaagcatttaaatggtctatcttcagttttactgaacaaaaaatgtaatttatttagcattctttataaaagaattgatgctagaggtaaaaaaaaatacttgtttttaaaaaatcctttacgtcttgtgtaattaccccattattaaattcaagtccttgaaaatcaactagagattataaagtctctaaagaaggcaataacaaaatttatcaagatatagtacttttcagtttttgtttagtgtcttcagcatcactgtgtctgtatttcaagtacaaatgtttttaaaaaggattctttatacatatgtgctgaattgattttaagaaagttgcatgatcctgtaggagcaacatttttacctaaaaaatgctaactttatagtatttctaattgttcaaggattttaaaattctatttcagggagtatatcttctgtggttttgaaggaggtgagttctgtatgtgccttgcagtactgtaattcaaaaataggaatctttggctgcaaaattttaatgaaatgttaggaagtaattttcgtgctaacattaaaattataactttttgaaaggtaatagattttccagaagtaaaatctgatggttctaaatcaatcaatgtgatagttcatttttaactcttagaagaattcagaggaaattaacccagctaagtaaaaaatctgtcttgattttgttacttattcctcagaatattaaacattgatcacatatttttagagttttacatttgggttttttgtttgtttgtttcagtcatatgtttggcactgttgtttctattttcgtagttttagataaaatgttaaaatgccaaaccctaccttcctacactttttcttttgccaggaaactggaaacatgtcagttctcctggttcttgattatacagtactcaagagttatcccagttatcccccttcctaaaggttttaacttatccacagttgtgcattgttctgaagattggtctcatatttattttgaaaacactttaaggaaacaatgttcttcgatgatttggggtttatctttttcccaagcttttatgacagtggttaaaaaacagaaatcctcatgtttattccattacctcccattcctaacctgtttccaatcaccaggaagattaggaaggcagattagattaaaaactgaaaattctttgcaga

SEQ ID NO: 14239 - DNA, 1100 bp, Homo sapiens
caacatctatttattgaatgcttgctgtaggccaggacttgttcttggtgctgggtattcagctgtgaacaagacaaagcttctgccttacatgaaacttacattgtagtaggtagagacagacattaagcaaatacataatatggtctctgtaggtgataactactgagattaacagcagttaaccatggtcacaagagaaaactgtggcttaaattgggtctgaagtcattctgagtcaactgtgtaatgcagtggccaaaaagcctaaattcatcttagactatttgaatcaaatggccatgttagagaggtcatgtttgctttcttattgtcaagctgagcctggtgtatagcatttactttttgaagagatattggcaagtggaaacttgttcaggggtatccccatgatagccttgtaaacagctgaagaaagccatcatatttgcatggagtgttccctaggccaaacctttctggttttgccaacagtttctcaaatggtatgatgtctatactctttaactgtcctggtcttcctccagataattaatttcctcttaaaatgatgctcccagaattcaactcatctttccagatgtggtttcaacttaggtaatgcttattagactatttcttcccttgatctggttatttaattttagtaacgcatctgaggattgaatttcctttaaaaacacacacacacacacacacacacacacacacacatctgtgttacttgactctcagtgttgagctaggctgtaaagccaggtctccagcacttctgttcgtacaatttatgtacataaatatgttacccagcatctctattaaaatgtcatctcatcgctgtctgtgcagtattctacattaagatcctttggaatattgtctttcatctaacttggtgttgtctacataattaacaagcatattctcaaacttcatctaggtgtttaatataattgtttaattaaaaaagaataatagcaccagacctttccttcagattatagcagctcaataattaatcctgttttagtatgacatttcaaataactgtgaacagccttaatatgtcatccatttta

SEQ ID NO: 14240 - DNA, 1259 bp, Homo sapiens
taactctgtgctcttgaaatgtctcctacttttaagtcagtttccttatctgtaaactgagactaatggcatttacctaattgggtcgttggagatcaagtaccttaattgatataaagtgcttagaacagtccctgggaggtggtattttgctccagtctgttatagggaggatcattttgttgttagagttcagtgaagaccgttttttaaaatcgtgtggaatgactataggcattataaagacaactgaagaagctcttgtttctgaacagtacttggccagtttctttaacaggagatggctttgcttttagaagcctgccccagagtcttccatctcttccactctccctgcacgtccgctctgtatggcttttgttattaatgtggagcagttgaagtcactgacttgggtgcaggccaggccagcattactgaggtcatatattactttcctagactctagtcatgaacaggatgttggaagtcagaggtacagagaagctgcctttttaggccgctcacatgaaaggtgtgtttgctttcctcaatcatttttatactaatagattggaatcttattcagtatcttggtagcatttttttcttttactctacaacctttatgccgccaggctgtcatttggcttattctttggttagacagactaatgctgttttgttatgcactttcttcattgttatttcattgttgaaacatctcttcctcggttaactaaatatttatttaaggcaggtagaatttctcagtgaagctgtatatttgtttaggtattatagatatattctaaaacatttagggattattcagtctatatatttttttctcttggaaatgaaataatactgtggagaaagtattcattgaaataacaagtgaaagtgtgtttccctcaggaatagtgtaaaaagaacttgcttttattttctgctttgcttttgtatttgggacttggggaaactatgcttttgttattttggaaaagcaatggaattttatcagacattttcctgaaactccctactttctctttttcctgaaatactaccttcaaagtcctgttttgctctgttaggaggttccatcattcaaaaagtgaaagagcttggttagttgaggttattttgttgatctgttggctttaaagaaagaagagactgtcagagaaagtctgagaaacaacacttggaggatcatatgaccaatagtgtgaaactgaggacgctgatttgtt

SEQ ID NO: 14241 - DNA, 1162 bp, Homo sapiens
cccgaagagggctgagctaaatctagggggtagattttgtgccaaggggtgagaggcaggacagagcagagtgtttgggaaactacaagtatttccaatgtggttggaaggcagaggggcaagaagtgacgctggagagatttaggggtggagatggggcgggagttgattggagggtcctgtgtaccctgccagagtttgggttttatcctgtaggcacagggggcagtcactgagcatagggaattggcttcagaatttggtacttttaagttaccccaaaatccagacttaactgttgacttcttgttaacaaattatttgttcaactcaaaattggagtgactattgcatataagaaatggctacaaaataagtttttacatagtccttctcaactatgcagacatcttgcaaatttcagcttcttcattacctgctcgtaatggaagtctagtcgttaaaatgattttttgtgtgaatttcttttaaaattactttgagtatttggttttgaaggtttctagaaagcctgtcctttttgtctgctcctgctctgcaggattggcaaggcagtgtacggctttctctggagctaccaaggcagcaaggataaaaataggacaaactttaagaatctcagatattttcagataacaaagactgatttatgtgggcccgttttgtgctctgacaaaacatagagacgcttttgtgctgtgattagcaagggtgctgatgtcagttctcttgtcgagcatcaagctttattctgtggctaaattgtgctttgtaccataatccagagaacctttgtatctgccttattaaagtgtgtagtttatgtaattgcttttgttttccagcttaatctgtgccagattcaatgagggtgactcattttgtgactgagacaaacattcacatttggaccatgttaaaaataaataaataaatggcaggtgctgcttggctaaattctgtgttttaatgctgtaatttcctgccgtaagggttcacgtcttgtataatgtctactcagcctctgtaatcactagcccaatatatctaatgcacctcaattcattgctactcatttcttgattatttattttagttcctaagggctttttgaattgtaacaatgtgatttcaacaggga

SEQ ID NO: 14242 - DNA, 1201 bp, Homo sapiens
atattcttcttggccttatatttaattccctatgcaattaatattttatatctgcatttttttaaaaaaaatagatgttatataagtgattctcgtatgtagcacctgttgcttttccactgaaagaattacggattttgtactgtgatttatattcactgccccaattcaagaaatattggagccttgctacaatgtgaaatgttatagtcatggactccttccaaccagatttctgaaaacaccagagggatggtataattctgtctcacctataacatggtcctgtgacatagatattaagaccacaagttgtagtgaggctacaattatattcgtctgtcttggctttgcaacataatttagaaagcacgtatagttgttttttaaccaagttacatacaatctcatgtactgatttgagacttataacaatttttggagggggcatagagaaaggagtgcccacagttgaggcatgaccccctccattcagacctctaactgttgcctgagtacacagatgtgccctgatttctggcccattggccatagtactgtgcctaatcaatgtaataggtttattttcccaatcctcaaactaaaaatgttcataacaagatgaattgtagactagtaacatttgatgcttttaaatatttgcttctttttaaacaaaaactaaaacccagaagtgaatttttaggtggatttttaaataaaaaagattgattgagtttggtgtgcaagctgttttataatgaaacaacaaaatgaaatctaaaatcctgaaatgtgcctaaactatcaaaacacacgatacagctaatgtgtaaagatgctaaattctgttacttggaggatgaatatatttaagatttaaaacacaataataaatacatgattaattcaaaaataaaaatctttacagctgcctatcaagggtctaaagcacttaatgaatgtttttagtctaacttatcattaactttttacaagtcaccatatttgaagatctgtagcactctgattttcagaaaatttttcattctgaataatttaaaaatggtgatgtattagaaaggcagtttgctttagaaaactaaatcacattgaacattgtattagagaattaaattaaaagtttcttacagagcagtattttccaaacatttttagcactagaatctttttagatgaa

SEQ ID NO: 14243 - DNA, 2093 bp, Homo sapiens
aaatggttaatttataaagtcatgaataaatgagtatctctggataatatttggtacttatgtaactgccttttaaaaactcaagtgtttcttactattttgggaagcttgcatttatttgatattgatctactactgttaattgtgcattagttttataacgtcattattaacattaacattttttattctgtaagtaaaataagtaggtaagattatttggaggctttatagtttgctttgaaagatttatatagcctgggggaaaagtctcatacctattactttgtagtagttgttattactaaagtgttataatgtgtctgcaactatatttcatgtttatattagtcttgtgaaaagtaatccttctgtctgtttgtagacacagaaacgtaaaatggatggcgcacctgatggtcgaggaagaaaaaagaagctgaaactatgaatatgtttttgtttcataatcactaactttaaaccagtagttctttaatttacgggtcttcataagatgtactgtacaatgctcaattgttatgtcatttaaagacatcaggttcatctgtttactgagctagaaacatagtatgtagtttcacttttttaaatgcaacagctgtgctgaaatttttttatcattaacacttgaagtaataaaataggcttcatttattactaagtgtttcatttgatttatttttctattgtagttccatttgtgaagattgtgactttttgtttattagctataatttctacacttgtaaggcttaaaaacaagttaaaaagaaaattgcaaataacatttgtccctttcagtcttcacctagttgtgtaattattttaattcactttgcctttgcagaaatttgggtattttctttgtagtgctattgagtctcatctggaaagattatataaattgcattctccttgcttatgtgggtagaatgggaaaagaaggcaagacaaagtatacttaaattctatgcatatttctgttatgctttctgttttttttagttgattctgaaatgaatatgccctattcttttgaaagaatggccttttagttgtatagccaaagacatttagtattttccggttccttaaggtattactgtaccattttgtaaaaggaatattattattattatttttaattatttggtaaatattttgtcatatgaccttctgaagcagccacaacttagataatgtcagaactaaggtgattttttttttttaattttgaaagcccagccaaaatgaggtgtgaatttgtcatactgttacattgaaattggtaacaaaatatatcccctcccatttggacttttagggtaaatgaaaattttattgtattttaaagtagtttctaagtgttagcaagactgactataattccagtttctgttttctatggacagacctgataaactggagaccctaaagcaggaatacccaaattatagtgtcaggattttagctgtaccagaggcctttatgtgctacacataatttgtataaaattttatatgtgcagattgggtacataaacagttctccatttttctaagggaatgcaataaatgtagcatcgtgaataaatataacttttataatccgtaaagtggtcttttctttccatttctttaattgttttctcaatttttattcactttttcctttaggacacatttcccttaattggatatctttcccttaaatttctattagtagttgttttcatctgcccacatgtaattgaagatttaaaaaaaaaattttgatacctgcagtattactaatactgcttaatttcttgaaatgtggaattgctgctgttaatgtcaagcaaaacgcagtatttatggcaaattgtaaagtaatttgaatttagtgctacctcaaaattaactttttaaatactatgttagattcttaacagttaaaggtctaatacatgcatgaggaatggttacttatgaaaggaaaaagaatttgtaagagttatcacctcagtttggaagaaattgaaaaaatgtaaggctgaagaaaacttacggaggtcacaaaagtgatgt

SEQ ID NO: 14244 - DNA, 2160 bp, Homo sapiens
atttaatagttttcctagaaataataacacatagcaaaattttatatatgtgaggcatcttatataaagggactttacttgagttggtgcaagtgagtcattctagcattagggatggggcagaggtagttatctttcctttgagcagtggacccaggaatatccagaaacagatggtatgtgcagaacaggttgtacaggcactgttttaagcacagctaagtaataccatgagtgaaagtctacttttacctatagtagaatcgtgttgctgatttttgtggcttctgttttcttttttaggatgtagaacaaaagaagagtggaaactactttttcttggatgattagactgactctgagaatattgataagccatttattaaaaggagtatttactagaattttttgtcatataaaacttgaatcaggattttatgccccacatactctggaacttgaagtataatatacttaatataacataaaaagccagttgggttctaaattgtagttgaaacacagaaaatgccacttttctgttcctgaagaggctcttttgtgcataatattctaaaatgaagacatttcaagctatacaaattacttccaagttttcatgatgtatgggaagattttcagtaggtgtattatattcacggtaccaaatgctgaccagtgttgctccattttttaaatcttgaaaagggtttctgtacttacctggtttgccaagtatgccagtgtaatgaaactgcccttattttaaaagccagtcaaagattccactgattgacatttgataaataaacatcaggattatgtttattgtttgttttcagtctttgcactatattaccagtatatggtttccgaggaagattatctactgcaaaacaccactgttggaaaaataggtatttttaaattgtttttaatcttttttggtgcttttaaacatgtttagcaaaaaccaattcagttccattccccgcaaaaaacccctaactttactctgaactttttttgtttttgcattccatgaggttctgtattcagtcattctctaggtaatgtcatttttgtacacatatatttatataatcactgattgagatttaggaaaaagcatttctaaagaatatttgcttcccttagaactacagactcgaaatctttaaagatggtgcctaagcatctatgtattttttttaagttccacagatttttctgttgggcagccaaggattataaaccacttccctaaaggcaacattaatgcaaaagtccccagatggcaatacaaagtatcccctggtaccacatatattcatttgtgagtttggatatagagcacattatctaaaccattttgtagttccaaaaacccatctaaatttcttgagttcctgaattttgaacaggattacctggagcctggagccactttaagttgtacttctgactaaactggaattatgagtgaggaagagtgtttactaaataaatgactggggcaagcaaaattgaggaggaaattagaaactgtttgacaaactttaagagctacttgaaataacagaagtcttgattaatatgcaaataatggctagaaagtatggtttaactggaccctattatgccttttaaaaataatttcagtaacccataaatacatgttgtaaaaaattcaaatatacagaatggaataaaaaaatgatctccctttattaccctcccaaaggttaccagcgtttgaatttaataatgtatattctttcatgcttttttctgtgcacttacctaagtgtgaatatgtaaagggtttgttttgtatacaaatgggattatactaaaataagtaatgcctatttttaaggataggttaaatttgtgaatgatcatttcaaatatattgaataaaataagcaaaagctattgttatttactgatcctggattgtcttaaagaaagtacttgtgatataagagcacagttctacttactgctaatgacagaatatgtattaaacgtattttcatgtaaatgaaatctttaaaatatgtatcttaaaattttacatagcaacagaaaggcctacaattgctaacacaagaaaaatacttataaaatcagtataaaatcaatgcagatgttagc

SEQ ID NO: 14245 - DNA, 3875 bp, Homo sapiens
tatgcaatgccttagtcataaactgggctcaaacaattctcagcctaaaacactgttgtcttttaaaatgcttccaacccaaaggcctttcatctcaatatctgtcaaacttgaataatgtcttctctttaatattcacataaggcagcctattaactgtgtcttagcaatgttgtatatagttcttttaatattcataaggtatatttttgaattttggtatttgttgagattgcatagaagaatagtaggaaatccaatgaaatggctgtttccaccaagaattcttagcactggtgtaaatatcatggtgcctactcgaaagaaatgtagatgctatgcattttgaaaataatctgcatcagttagaactgcagaagtttttttaatgccactttaacactaatgcactgacagattctaaatattttgtgagaagaaatgttaaaaatttttagcttgacaggtttctagagttgttttcttcctcccccccccccccgcaccattggttgtgtatcactttcactttacacttgcatgttctacttgtcagggctggaactattgtatagaagataatatgattgtgacttctagttcttttctagaggatgctgctagaaaatggttttgctttgtattttatagcttgttacccttaggtaggtaacatcttacattctgttttcttccagtctttgcagtattcactagaggttccctttgcatgttgcactctgttctcatttggagattgaactctgaattaacacagtattcattcatctgtgttattttgtaaaaataactgtagcttatattctttatttgtgcataccaatgtgaaaatccactcttttattatgttgagattatcttctgatcaggaagtttgagtgctatgcaaataacatagtagtaatttctctttgcatgccatgtgtaatatacctagccaaaaccagatgcggtgactttctttttttgtaaagcaaattacttaagaaaatacaattcacttgaatttgacaaactgaaacagatgggttttctgggttctctgataacctatgggaatgtttggatgccagttgggctagtgaatcgccactgtactgtaataatggttatttacctctgtgctgttttaattacctaacgtctgtgtaactgctgatttgagtagtgattagcatttagataatgtaacaggattttagagagcactttgaaagataacattttattatgatggtgctaggtaaaaaattgtaaagactgggatggttgtgtggaaaacttttcttgagagaacctattgaaaggaatttgttgtcaccttcttaactagaatagttgttgaaggtaccgcttaagccatttttttcttaacatcggtggctcagttaaggaatgagaagatagagggtcctccactttcagctcatgcttttttatgtaggactagcttacctgattttaatgaaaatcacattttgatacaaacaccagatttgaaagttcaatgtgtttgatctcaggagtccaaaataagttgttgcttctagtgtcctgcattttattgactggggtttgatctcagcttctgaaaatgtttaaaaattggaaggaaatactactcatatcttcattgtcactttgtcttacctcaattgagtaacagaatatagctcctgaaggaaacactgatttgctttctgtttcccatatctcacctctaggatatgatggaagaagtgcttgaaagagaattttagcagatggtacttttctcagtgacctctggaataaaagaactgacttttgatagttttaaaattaatctttgcatgaaggttggtttcgctttttttcctttaagtttgtttttaaatgtattagtccaggggattttgccttatgctgaggtcaaactaaggataagcaagcttttgtccttcattttaactgttatgtcatactgttatgttgacatatttctttataagagaatagaggcaaaagtatagaactgaggatcatttgtatttttgagttggaaattatgaaacttcaccatattatgatcatacatattttgaagaacagactgaccaaagctcacctgttttttgtgttaggtgctttggctgaacttgattccagcccccttttccctttggtgttgtgtatgtctcttcatttcctctcaaatcttcaactcttgccccatgtctccttggcagcaggatgctggcatctgtgtagtcctcatactgtttactgataacccacaaattcattttcatggcagacctaagctcagaccctgccttgtcctggcaagcataggttttcccagaccacaatgctgatatatcttatttaatgcagactgtattcttgcagcgtgttgtttcctttgtgactcaaggttgaattaaaatgcctgtgaactgcaaacttgcttatgattgacttggtgcaataaagttcctttctaaccatttctggtttagaaaacattcagccatcctagaaactagcaatatttatttttgcctctttcgttttaccttcatttttagatgaggtaaatgttttgtcttttacttaagggtactaagcaaggtccactctagtgtagctgaagagaatgcatatttggctacactatttctgtttactgtattttgcttcctactttatgtctaaatgctattgtttgtttaaaatcctaataatgtctcatttccaatatgttattttcagataactaaggttttgctactaatgtcagccatttactctcccactaattgggattattttttaaaagaggtctttctccccgaaatacaagttttagaaaatcttagaagaggggtgggtgcatgtcttaatgctgggaagcggcaactttggggttgaacttacttgaatggattaaaaattgcattgtgttacagagctagaaaattttatgtatgaaaaacgataatagccttacactgagtacaaataatactttaagagcatgtgaagatgtgatcatttgtgatgttacttgtaaaaaaaagtatatatacatatcttttgaagtgttaaaaggaaactagtactttatattctttatcatatcactttttgtaagtgttgaatatattcctgtttatttttctatgttctgttttgtagccttaagaagtgtttcaaacatatctgaatgtataaaataagagtaaatgccctacatggtgtgatgctgcattatatataaaactgtgtgcatatattaaattttgtctcttgattctgcttgtgattctttggttccagggttaaccaggtaatatagcatgtagatcttgagaatttttgtaaactccttaaaataaatgatttccatgacatgtttccagctagaagacaattctcatacatgcaactaaaagccatgtagaatttataatctatgggtactgtgtaattttccctagtttatataacgaaattgaggccaagttacttgcttagggttatgcaactagtaagtggtaggacttgtatttgagtctagttttaagtgattttatagctagtgctaccattttttttctgcaatgactaaatgggaatgtgcagaatatctaagaatatggattaaattgttttttaatggtttttacatttagcattcagtgatatttatgttggctaaaggtgaaagcaaattgagtgttttgaaaacaaagtatacttactttatactctgaaaactcaatttcttaaagcctgtttttctttataaaagttaccaaagaatattatcaagtcaatacttgtttacatacaatatgaactttctgtta

SEQ ID NO: 14246 - DNA, 1195 bp, Homo sapiens
tagcaatcttaaagcttcttaatgtttttaatctaagtctcttaagattgggcatgttgtatgacatccctaagtctcagtttccttatctgtagaatcagaataatgcttcactgtgctggaattaaacgtaaggatatataaagctgcacagtgtgtggaatgtagtagtaataattgctcagtgtgtgtgttttggcttttcctgttgtcctacttgtttcacagttgtgatacctttttgtgatggtgttagttttaaaaatggcactgtcttttgcgattattttaaactacttaactgcacttacagaaattttagctgtaccctaggtaactttctgataaaattatgttattgaccataaggtttagcagatatctagtcaggattttaaaagcctgagcaatagaaagttacaatgtgatggtctgttcctgtttttaaaaaactgcctgtagttaatgttggaaaatctgtctgtcattaattgcagctctcctttatgaattgctgtatgagaaggtatttaaaactgatgttagtaaaattgtgatggaactagacacgttggaagtagctgatgaagataacagtgaaatatcagattcagaggatgacagttgcaagtaagaatgaaatcctaaaatacctttcttagtgccatacaaggaaagttaagtaaatgtctttacatttcagtaaatgtctttctataacatatattgaggtattaatggtattcataaaatacagcagtctgctgaagtttctttatccctgtcactaattttacctaatttctattatgggactgtttgttttgaaagttggtgtttttggttgatgagaatttacgtctgcaatctagatgcatatttgtagaataaatttggtcctacctatatgtgtgtgtattgtaaaattttaaagttaacttgtcaattgttcacatacccagtaatgaaataaaatggccgtttggatttccttcactttcttttattgttttctttcttaggtagtgcctctttttagataatgaaagttccaagttggggttataagtatgtgaacacctggataatgcctctgtgtaggttgtgagtaaatatgtctgaacgtagaatctctgaggcttagctttctttttcacacaagacgtacaagatagtgtttaagaggttgggctct

SEQ ID NO: 14247 - DNA, 1193 bp, Homo sapiens
cacgattgagaactgacaaaggagccttgataatacttgacctctgtgaccaactgttggattcagaaatttaaacaaaaaaaaaaaaaaacacacacaccttggtaacatactgttgatatcaagaacctgtttagtttacattgtaacattctattgtaaaatcaactaaaattcagacttttagcaggactttgtgtacagttaaaggagagatggccaagccagggacaaattgtctattagaaaacggtcctaagagattctttggtgtttggcactttaaggtcatcgttgggcagaagtttagcattaatagttgttctgaaacgtgttttatcaggtttagagcccatgttgagtcttcttttcatgggttttcataatattttaaaactatttgtttagcgatggttttgttcgtttaagtaaaggttaatcttgatgatatacataataatctttctaaaattgtatgctgaccatacttgctgtcagaataatgctaggcatatgctttttgctaaatatgtatgtacagagtatttggaagttaagaattgattagactagtgaatttaggagtatttgaggtgggtggggggaagagggaaatgacaactgcaaatgtagactatactgtaaaaattcagtttgttgctttaaagaaacaaactgatacctgaattttgctgtgtttccattttttagagatttttatcatttttttctctctcggcattcttttttctcatactcttcaaaaagcagttctgcagctggttaattcatgtaactgtgagagcaaatgaataattcctgctattctgaaattgcctacatgtttcaataccagttatatggagtgcttgaatttaataagcagtttttacggagtttacagtacagaaataggctttaattttcaagtgaattttttgccaaacttagtaactctgttaaatatttggaggatttaaagaacatcccagtttgaattcatttcaaactttttaaatttttttgtactatgtttggttttattttccttctgttaatcttttgtattcacttatgctctcgtacattgagtacttttattccaaaactagtgggttttctctactggaaattttcaataaacctgtcattattgcttactttgattaaaaatttgtcatttcctttattca

SEQ ID NO: 14248 - DNA, 1204 bp, Homo sapiens
tgtcccactatgccaggctgcctctctcattctgtcacagtgctaaacatactgtgctggtttttcacaaggatataggcttctttccatttccccccattccctgaaaatagcagtttcttcatccaattacctctttaccagatccatttttctttttccttcttttccctttcaacttatctggactacttgggtatgtttttacctttgcctgtgtagcattttttacttttttcaggcttctgccaagtctgtctgacattctgttaaggctgttgccacctttcatttggttcttgggtggaagggaagagaaagcatgtcatcacctccatttgaatgtcttgagacttacttattgttcactttgggagtaaacctgatcttcttaattctccccagatgttagtaggcaggaagaggcggagggagagctcagtgaaggagaacactggtatggaaactcttcagagactccgtcagaagcatcctatggggaagtccaggagaactataagttgtctctggaggaccggatccaggagcagtccacgtccccggacacctccttgggaagcacgactcccagcagccacacgttggagctggtggcactggacagtgaggtcctgcgagactcactgcagtgtcaagatcacctttccccgggagtgtcttctttgtgtgacgatgacccaggctccaacaagcccctgagcagcaatttgaggcggctgctggaggctggttccctcaaactcgatgctgcagccacggctaatggcagagtggagtcccccgtaaacgttggctcgaacctctccttttccccgccttcccaccacgcccagcagctcagtgttctggccaggaagttggccgagaagcaggaacagaatgaccaatacactccaagtaaccgttttatatggaatcaaggtaagtggttgccaaactcaaccaccacctgcagcttgtctccggattcagccatcctaaaactgaaagctgcagccaatgccgttctgcaggacaaatctctcaccaggactgaggagaccatgcgatttgagtccttttcctccccttttagctcccagtctgccagttctaccttggccgctttgtccaagaaggtcagtgaaagaagtttgactcctggtcaggagcaccctccaccggccagctccttcctttccct

SEQ ID NO: 14249 - DNA, 1116 bp, Homo sapiens
cttctacaaacacggtacatgtttctccaaagcatgtcggtacctggagaaacaggttgcatctttctagagaataaagtttccttgatggcacagctgtttatagagtggaatgcagaagtcacttgaaatgttaagctaaaactcaaagaaagttggggcttcttagagggggcggcgactttaataccaagttcccctgcagtgttgttctttcttggcctttggggaaactggtggaaaagtttgcaaaacaggctttttccctgttccatgtttgactcacatgagaaaaatagcattctaatttacaattttgaaaatagttcttatttccatcactgacagatgttacctttatgattgttcagcctattcttccatttcatttatgcattggacaaataataattgactgcctgctctgtgttcagtaccaacctaaatgccgaggatgcagcagcaaccaaaataaagtcctccctcggagcttgtattctaaaaaacagtgaggtttgagggcagacctgaggaattaggggaattaagcatgtggctgtttcaggcagaggaagagcaattgcaaaggccctgaggcaggagcttattttcctagtaagggagagtgttaggagaggaggtcacaaggagatgattagggatgccttgaggttcaggtaagagttttgtattttatactgagaaacatgggaaaccattgtggaagtttgagaacttactttggctgctggttgagaataatggagcaaggttgggaagtgaggagaccagttggaaggctactgccatagtacaggtgggggatgacagcactgggtaccaggttagtagtagtggtggaaatggtgcaaagtggccagatttggtacctctgttgaaggtagaaccaacggaatccgagaatgaattggatgtggggtctgagagaaagagaagagtcaagggaggtggcatggttttgggtctaagtaattgaaaggatggaggagttgccattcctgctgagacgggcaggtagagggaggaacacgggcagttcctcggccatggaaggtctggctaagcactttatatgaagaatactgaaactgactt

SEQ ID NO: 14250 - DNA, 1981 bp, Homo sapiens
aaatgatgcatatattttatatattgtatggacatataattaaaacattttggaggaatcctcctttattgcatccttttctgttcatacagaatccttgcgtgaatatgttctacaaaggcatccagtttcagtctgaagctacaaaaaggggccacaggatcagaagttcagccactgattgagtcacctaaataaaaaacagaattggaaagccaagagtgccacttgcacataaggagtgggaattcgaactgaggtgctggagaaatcctaaagatgaacaagatttcagtgaggagaaagccctcctgtcagtggtccccctgcatctccttatgcaattagactttttaggtttccctgctccctttcaggagcattggcatcaacgttattctctcagtttatgaacacagtaggggaggggccattcctgtacatctctcacagtcagattaaagcaaagcctagagtttgtaaacataattcaggttctaattgccgagctgagattgggaaagaatttttcctaactctggtctagcaagtggctgtagggaggcctttctcaaaaatcagctgtatttgcctttgacattgtccaggagcagagcaccaggctttatgttgcttggcacaaggcagctcctctggttatgtgactcctgctgagaggattttcacaatttattaatgagctttccacaaccctgctttattctccaaacagttttacgctgtctctaggaacaacaaatatatctgggcactgtggttgaatgaataccagacaattgtgtgaatgttgtattggacttcctcttccctcccttcccaatctaaatagcattcctatttcaggagccgatggtgtgattcgaaacaactgcttggttgaaggatggggggcaggatcgagaaggagagagggaaggggcagtgctgattctggagaggtgtatgtagtgttttgtcttggtttattttaaagatcagagagtaattggaaacaattattttttaattaataacttgggaaaggtgaacagaagcatttcacagggttttaccgtgtgcacactgaaaataaaacactttatgctatgcttcaataatttatcacttcttgacaggggcttggaaaaggtccagtatgtaagtacaaatcaccaatttgctcttttataaatgagttcttttaaggagaaaatggatggctctccaagtggagcatacatgttctcatttgttttgtagaatatgtggggctgcaggttattgtgtcccttcattcacttatatcagccacctctaaaagcaattccattgtagtctcccactaatctgtagcgtcctgttttttctaacttcttccctgacctcgcctttgatatataagtctttattttccccttgccatctctctagtttaatagctctacagtggagtactgttttcaaccatggaactacttttaatcaagatcaactttgggaagtgctgccatttttatggtaataaaggactgtattatgcacttgaacccgctcaagttgtcccctgtgtataccttcacatagtagaaccatgaaacaaagtgtaaatgcttaaattgctttgttcttaactgtagtctcctagaggtcagtgaatgatttctagttgcattgtagcgaagacatttgttccaggttgaagaattttttacttgagaacatacattttccctgtctgtgtgcccccaaaccctgtctgccacactctttctcttgggctgtgacaaaacagaatgtttagcgagaaacaaaattgtgctcgattttcagactatctgacttcattttctgttttggtctttgagctattccttggctaatcttccaacaagtcgaattgattcttatttcaaaactgtttatcccaaaacagagctgttgacaagtacaaatacagatggcagacatgtggtatgatttt

SEQ ID NO: 14251 - DNA, 1421 bp, Homo sapiens
agaagttaaatcatattgctttcatgaataaatgaaaatataaaggtcatggatgcaaacaaatgttacatatacacattctgtctctccagatgaaaagaacatgcaaaaccatttaataaccaaaatatcaagtaaaattagttcccaacggggcagcagctttcaaatgagtgtccaatatttgcttctgctatagctgcaagaactgtaactggacccaagtagagaatgaagccacgtatagaactacgagaacacttttctgtgtttcccccatgccgtcctgtcacatcctcttacacgtcctctcttgatttgatagacaatattggcatcctgggtctcactgaggccgtgctatgtcctcagcagctgtttttgttgtttcgttattatgcccacaacaaaaaatcattccttagaaactcaccaagtttatctactgtgtaaatttatattattgttactaccaggtctcatcttttgtcaatgtcattgaataaatttcataagagttattctcagtgtgaattttaaggctaatgccagatcctgcaaaaatctatgctaaccaggctgtagtacacactgttataaagaattttacttgtgtctaaaactacagtaattttgcttaggtaattgtgcttacctatggagcacaggaaggctcttaggttttgttcctacaagtttctttgaattttggagtaaatggaagtgtctgtctgtctgtcatctatctgccctatcataaaaatctttctccctaacattaaaatactgatccccgcccccaacttatctacctctattgtctaacacctatagtaggtgtgatcatgggataaaattcaactgaaaatgctatgataacattttatcgtttgctttaaaaatgtgctttgttttcaaataatctttacatagtgaactttggtggcgttagtgatatgtttatgcctatttcttttttttacacaaattccttggcatattttttcataaagaacaaaaaataaaatcaaaatttatttttaattcatgcttattgggatttaattattcagagcttaaaatattttgttatgtttatacactgtaaagctatctgttttatgcatttgttttgtctaaatgtatttatgaaagaaatacattagattatatttatgtttactcatttttccacctggattttttttaatggttgttacaaaattagattttttaatgggtaataatgttggtattttcatgttttttcttagtattaaaatttttgtgggttttttaaaatttttccctattctgttaaaaattaacacacctctagctaatgttcagtgtttgtgctaaataccaaattttttcaaaaggattggttaagtcataaagtggattatttatgatgactg

SEQ ID NO: 14252 - DNA, 1135 bp, Homo sapiens
tgtatgggctttaggggtcacaaaacctggatctgtcccttctgataaaattctaattataaatgagtggatcaggcataaattttaaaattctgtaaaatgatggccggcatttcttcactccctagaaactttggaactgtttaaatttataataaatgcttaggtgtatatctatatctaaattatctattttttttaacttctgggaatcaagataaacatcgtaccaactaattatatgtttttgtaagtatagagattactttattccctctataatgttagtcatgttaaaaaggaaaaggaaaagaaaaaaattcctacaataatataatgtgccagtttgtatatttctgtgtactgatacaacaattataagtaggaatcaaatgaattcatttcagaaagtctcaatggatcgcctacattttgaattgcaatgcaattcatctttgtagcctttagcaacacctaatttagtgccccatatgtagtaggtcatcaaaaagtagtttttgaattgaaaataaaataagtatatgcagtgaactgaatcgcttttaaaactaaaaaggtatgttggcaagatctctctgatttgacaaaaataaaacatataacctaaatatagtggtttgcacattgatggcaagtagtttttatagagcagaactctctttttcagaaattgcataaccatgttttgcaagtacaattaatataatatcacaagcctattaccacattattacctgactagtgaatgcatggttaatttaggcaacctatgtgccttttctggaaattcacatactgtcaaaactatgggatttttttcttcattattattgtgattttgtttctctgcctttgatagggttgtagattgatccagagggattaaaactaacatatacctggttttaaacaaaagtgtatttgacccatagtactccttgttatatatttggatctgaaacatcttttggatagttttcttcccaatgggtattagattttcctcagactgctttctaagagacagaagctcagctctcttgcttgcttacccatattcttgcatacacacacgcacacacacacacacacacacacagagagagagagagag

SEQ ID NO: 14253 - DNA, 1104 bp, Homo sapiens
gatttttctttactgtttttctgttttttatttcattagtttctgctcatatctttattatttctttcctgtgcttgttctgtatttaatttgcccttctttttctaatttcttgtgcctttggaattatgccatctttcccttcttggtgttgagtgacattatatttgcactttgaaattggccgtggtgggagtatttacaccatgaaaatcagcacatattacaaattggtgttctctctttatcctaagagccagtcgttaaacggctactagcacgctacttgtaatggcaaaaacacagcttttaaaaattttctcaggggacctaacattagaaaaaactccaataaaaagttaagtcagaaaaggaaagaacttattagtttaaaatatgatttacagtatagattttaaaatctaaaactgtaaaggagattgtgcactgtttgatcctgaagacataaagaacaggataggtagacaccatctgtgatttcagtatagtcctttttgaggaaaagtgccttgatgagatgatctgcgaagtccattgcagttctgtgaatctatggtaagttatttcccagaagatggtaggaaagctattttattgctaatgaaaagctgatgagagagttattgctaagggattgatccattgccttcttaagaagctttgagattcccagacctaatggatggaaaagagcagaaataacagagttaagaaagctagagtctaaaattcgtaagaaacattagatgctttgacataggctgtcacttaggttttgtggatgcacttctaaacaaagtgttaggggaattcttggccaattcctctctcagtgtgctgagagcttagttcaatgtgttggtattaaatagagcttccattaattgatcagaaaagtgcttgttgtatttcactaggagatattggaaaagcccattttaaagttaatttctgtgctgccataactctttgataccattgatcttcttgtattgtagttattatgatgtctgtcttctagccctagactgtgagttggtactctatggtatttatttttgtgtttgcttaataaatttaggt

SEQ ID NO: 14254 - DNA, 1166 bp, Homo sapiens
acataggactgcttttatattattctggttttgtagttgggagaatagggattgagaggtgagatgacttgtccaaagtcccacaggtgggaagtcatggaatccttcttcaagacactttcatcccattatgcattatctcaggcaaaaacaacaaaactccataaatcagccatgtaagatctagatcttgtattggctcctcattaaagttggatggcttgacatttttctgagggatgactgtcagtgtactattagctaaaaacaaattattgagcacttgtactttatagagtactgaattaaaattctgaggagtggggagctctagggtgcaaggaagctcaaaccttgtatgttttcacagaggttggtaatgaactggggggaaattggcagaaacataaacaacaggtgagtgtaaatgtgcaagtcaggtaaggagagggcagagaagtctctagagcttgagtcaggctcacgggtcctggttggaaagttggctcttggaagtaataggttttcacattcttttccagtggttagggcatttttttgaaaagcctctcctgtgtggttaaggtactcaaactggctgaaagatacaagagaatgggtctagtagagaaggtgctgcttatagattttattctggggacctggtcaatggaacaggattacctgcactgggagcaggagagcaggctggctgaggaagcaattgcagtttggctgacaatttgactgaaaggttgcttccttatggtgagttggtggcagaattattgctttgctgtgccctatagacatgaatctaaatggaataaccaaatactgggtgatatgggtgggccaggtgcacaggccaagcctgtgtgtcctgcatcactggcagttgtagatttaaaagagaagactgccactgccctataggggattctccgtgttcatctcagtaactcctattccttgtaggatgagaaagtgaaagcaaagctgaggtcttcttgtacacctcaaacataaaagaacttctgtcctgaatttgttttggtaccatgaacccaaatactaccaggaagccaatcccacccaggaaaacagccacaaatatatcccattctaagaaatgttaaaaatggcatctggaactgtaagacacc

SEQ ID NO: 14255 - DNA, 1147 bp, Homo sapiens
aaacttgcaccccgctgccgcagcttcaacggagaaatcccttgccccaagcacacgtcagccctgcccgcggagtcatggcacagcaaaagagaggctctccatggagatatgctccagaagggtgggtggctgtgcctaaaggtttgttagaaaaggacagtcagtgaggcttgctggctgtggcgccttacgacgctctccccgacccctcgtcattcagaaggttccgcaggtctcgacagcggtgcgcttgtcagccccatccggcggccagcctcccttgccggatcgcccacgttgtcggcctggtccgagttcttcatttcaaagcatctgcacctgcgagcccgcggccagaggcgctgggggcgtttgtgcgcgtgtattctgaggcgcgtggtagtgatggcggcgctcagtgagactttcctgtcactggctactactactcccaaccctcctcaaagccgccggagcaacccccaggtctttactttacaatcggcaatttgacttgctctgctgcatgtctggagggaccaaggaaagtgtggagacgctccaaggattaggtgatcggagcttgaaaagaaaaaaagccaaacaaataaacaaaacccacccaccctaacaaatatgaggctgctggagagaatgaggaaagactggttcatggtcggaatagtgctggcgatcgctggagctaaactggagccgtccataggggtgaatgggggtaagtgctgcacctctgccggctccaccgcggctcccacttcagaactaatttgtgagtcttggaaaggtggggcaaccctcattgcaagcgcttgccaatttcagggggcactgaccagcctttggcccttttgctgattttctaatttaccaaccccagagggaacttgtaattaggaacgaggcaaaggaatttgagggcaggtagccttttccgtagacaaacaatgactatcctgagtgtcaagaagtgaggttacagagaatgaaacttactcctcttgccttcaaagtagcatcctatcccaagggaatctaggttgctaagagttccgtatctatcttggagtggacctcattatcgagtctactttcgagtcctccccgcccccacattaaaaaaaaa

SEQ ID NO: 14256 - DNA, 1326 bp, Homo sapiens
gagagtgagactgggaacttgatggctcagagagcatcttttcctcccattttagaaaatcagattttctcctgtgggaaaaaaaaattccatgcactctctctctgttaaagatcagctattcccttctgatcttggaaagaggttctgcactcctggaaccggtcacaggaacgcacagatcatggcaggatgcgctgggacggcccatcttggcaaggttcagtctgaatggcatggagaccgggagatagaggggttttagatttttaaaaggtaggttttaaaaataagttttatacataaacagttttggagaaaaattacagatcatataagcaagacagtggcactaaaatgtttaattcattaatctgtttgtttggcactgatgcaatgtatggcttttctcttgccccaaatcacaaacatatgtatctttggggaaactaacaatatgattgcactaaataaactactttgaatagaggccaaattaatcttttaaaaatgatgataatcatcaggtttactcagtgaaatcatattaattattttccaaaatctaaaagctgtagctggagaagcccatggccacgaggaagcagcaattaattagatcaacacttttctccagggttcaccatgcaggcaacattaccttgtctttcaaaagacacctgccttatgcaaggggaaacctgtgaaagctgcactcagagggaggagtttttcttacataatttgcaatttcaggaatttaatttataggcagatctttaaatacagtcaacttacggtgcacagtaatatgaaagccacactttgaaggtaataaatacacagcatgcagactgggagttgctagcaaacaaatggcttacttacaaaagcagcttttagttcagacttagtttttataaaatgggaattctgacttacttaaccaggtttgggatggagatggtctgcatcagctttttgtattaacaaagttactggctctttgtgtgtctccaggtaactttgcttgattaaacagcaaagccatattctaaattcactgttgaatgcctgtcccagtccaaattgtctgtctgctcttatttttgtaccatattgctcttaaaaatcttggtttggtacagttcataattcaccaaaagttcatataatttaaagaaacactaaattagtttaaaatgaagcaatttatatctttatgcaaaaacatatgtctgtctttgcaaaggactgtaagcagattacaataaatcctttactttaatcacctgttgttttggagcaaattcatttgaatgtctg

SEQ ID NO: 14257 - DNA, 1160 bp, Homo sapiens
tgagaagtcaccatgagtgaaccaagagccctcactacacaccatatctgttagcaccttgatctttgatgtcctcacctccagaactgtgagaaattgatttctgtttataagtcactctgttttttgtattttgttatagcgacttgaacggactaatacagtcttctttcgcctctaaagttcagtgatcttgggaaatgcttctaggggtgggaaagagaaatgattttggctctatctggctccatgtctttctttgaaagttggctgggtacttgatcagatgtagttacccagatttagatggagttcttaaaacacctcagtaacatacaggaggatcttttccatagaccatcctcgtgaaagggaaaattacaaacccaacagggggtgggaccacaattgtcttgtttatccttttatcccatgaaacaaatgcttctggcacgtggtgtttttttaattaattttacttttgtgccctatttaagatgttttaatagttgggtataggtggatgtagatgctttaaaaaacctttatttattaagatagccagttggacagttagccagatttacagaggtaacataagttcatgttaaaggcaaatattccttgcccctttgtgtttcaattttttaatatatttttcttcaagaaaaatgatgcagtatatttatgtcccaagaagttatcaatttcactagtatctgagattgagatgtctgacttgagttttctctttggacagctatcacaaccagattctttttattttttttttttttttttgagactgagtctcactctgtctgccaggctggagtgcagtggcgcaatctcggctgactgcaagctccgcctcccgggttcacgccattctcctgcctcagcctaccgagtagctgggactacaggcgcccaccaccacgccctgctaattttttgtatttttagtagagatgggttttcaccgtgttagccaggatggtctcgatctcctgacctcgtgatctgcctgcttcagcctcccaaagtgctgggattacaggcgtgaaccaccgtgcccggcccacaaccagattctttcatatttatttctcgttatgtgtttaaatcccaggattattctaagcccgctaatattttca

SEQ ID NO: 14258 - DNA, 1178 bp, Homo sapiens
ggacactgggacatgtagtgagaagtgggcagatcttaacccttcccccacatacctttttgagaaagctttgagccaggaattagccttaacaaggcatctatcttatctgggtagaattttctctactagaaaatgttgaagagaaatcttggacattttgaagattaaattcccaccaccatcctcttctcctttctttgttttttttttttttctttttctatcatcttatatcccctgcccctttcttgaacatcgacaaaaaagtttggataagttttagtgaaatatcctttttacctaaggctaatcacttatttcacctgatatctcagggatttgttaggtttattgattataggtttctgatttcaaccaacgaagttaaaaggaaattggtgattcaggtgttctattcaggaaatgtgtgcagatattttatttagtttcaccatagatttagaaataaatgcatcgcagtttactattttacaaatatgtaggaatctgtataaaatgctgatgttttctttagaatttgcatttatcctttttgcaggtgtgaatggaaacagatgctctgaatcatcaactcttcttgagaaatacaaaattggaaaggtcattggtgatggcaattttgcagtagtcaaagagtgtatagacaggtgagtggacagtgaggataattaatgaataatgaaaatgataaataatgaaaactgtatcatctacagatacagttttccttggagtttattcttaattttaaaaaggcccttctggaaagtctctttcattttccctgagtctgcccttgggaccagccatttctttccttttgttgtttgtttgtttgtttatttatttatttatttatttatttaaaaaaaaggcagggtctcactctgttacccaggctagagtgcagtggcaccatcatagttcactgcagcctcaatctgcagggtgccagtgattctcccacctcagcctcccagctaatttttaaatttttaatagagacagggtcttgctttgttgccaggctggtcctaggctccttgcttcaaacagtcctcctgtcttggcctactgaagtgctggaattacaggcatgagtgactgtatccagcagggatcagccattttgcatgcccacaggaaaaaaatat

SEQ ID NO: 14259 - DNA, 1233 bp, Homo sapiens
gattaattattcacaggacatgcgggtaacttttcaatctgtgacagagagctttatttggaagagtaaactctccaagactgagcacccttgtaaggtttgcttattgtctcagaattcttttgagcttaaggtctgggcttgggctgaaggggtgagaacccaggcacagcccaaagcgagagaagacgacagacatccagtgtgtcctgggctgccagcctgggtcagggtaggagcagaggccaaggacagccccttcccccggtgggttcccgaaaccattactctcctgtgaggcttctgttagaagcttggcgttatttctcctcttctgtttctgaggcccgtgcatgctctgttgtgctctctgctcgtggcagctgggacccgagcctgggcccgggtaatgtgttgtctctgctgtttcctcctcagaacacggctctagataaggaggggcagattttctgcagcaagcactgtcaagacagcggcaggcctgggatggagcccatctctccagttcctccctcagtggaggagatccctgtgcctggggaagcagtcccggcccccacccctccggaatctcccaccccccaccctcctcccgctgccccgggtggtgagcgggcaggaacctggcgccgccaccgagactgagcctcctgcagacgggcgaagccgcctgctgcagcccaggaagccagccctctgctcggcctcgccggcctccctgctgcaggcctccctctcttcaccgcctgcgcctgagttcgcgggtcctccgcaggccgcctgggaaccggagcctggcgtgccggagcctggcctggtgctctgggctctgccttctggttcctggaggcatcaaaggctgcatccgttctgccaacagctgttcggagagactcgttccagatcatcccgtcattttcagtttgttggacattttacagcttcaccaggagaatgtgcaactttattccagcattcgatgcatttttatagaaacactttggaaacactttggatgaaccaaggccttttccttatttaagtagactcagaacactccctttcttttcttttctctctctctctctcttttttttttacgaaagacttagaattgcatttgtccttttgtgggtgtcctgtgagaggtgatatgggggctaagaggactggctttctaatagaagaagtgagcgcctgagaggacaattt

SEQ ID NO: 14260 - DNA, 1510 bp, Homo sapiens
gtaggattgtttgagcccaggagtttgaggccagcctgggcaatatagggagaccctgtcccaaaaaataaaaaatatacgtatatatatatacacacacaaagaaaaaatacactgaatagacaaaacctttcatgattaatgatgcacgggaataagtgatgaaaaaagtttcggtcccagatgatggccagtgataacaacatttttctgatgttcccatgcaatatacagttagctaagagggtgtaatggaaaaagcataaggcttggactcagaagactctactaactttgccactagctagctatgtaattcagatcatctatcctttacatgtgaaaggtaaataatggcttatcttaacaggaggatttatgcaggttaaatgaggtaggtgttatgtgtaggtttattccaaggcttctctacttttaaaggaaatggcttatatctgagaactaggacttttagaaaaaaatttactgttactggtttgcaggattccagacagcattggaaaagacatagaaaaggcttgccaatctatttatcctctccatgatgtcttcgttagaaaagtaaaaatgctgaagaagcccaagtttgaatgtaagtgagaaatcacatgattcctgtagggccaaatacattgtttttgggtggaggaggagtgtggggccatatcatggccttctttttcttcctgtcatgcttgcatagtagtgatgaccattatttcaagatatactaacagttttttggtttttttttttttttttttttttgccttttagtgggaaagctcatggagcttcatggtgaaggcagtagttctggaaaagccactggggacgagacaggtgctaaagttgaacgagctgatggatatgaaccaccagtccaagaatctgtttaaagttcagacttcaaatagtggcaaataaaaagtgctatttgtgatggtttgcttctgaacattctttttttaaaaataatctgacagcttggtggattagacagtaaatttgacagctggtaaacttttctgacccagacaaattggatataaacatactactatgcacctttactgtgaagctgaaatggggcggagaagctgttaccaagtgggcatttagtgctatccacctatagtcactcattcattcagtttctacctcttctcaagccttttcagttttctcatttcttgcttagctgataaccttgcttcctttaatcactaaaaaagtttaaagcagagaaaagaaccccacaaatttctgttacctatattctgccacctatgcatgtgttaatcatactaccttctgtcataccactggatggattgtgctaagacataagacagccttttttttttttgcccaatcagcctcatggcttcagcaattcacacctttatcaattcctcgctgtcccttgtatactagtatacaaatactagtataccctcccagagcaccttactaagtccctttatag

SEQ ID NO: 14261 - DNA, 1510 bp, Homo sapiens; identical to SEQ ID NO: 14260

SEQ ID NO: 14262 - DNA, 1283 bp, Homo sapiens
cccaaaggaaaattcattttctttgcattattccagtaatatataaaaactgtgtcttgttatagtagtacattatgaatcacatataaaatcttacaatacagaacaactgttaagatggaaaacagtgccaaacctccacagctcatttctttgtaatataatcagaatgaaaaataatttaagaggacagaagactggtacttttttgttttattttttctctagcttatccctgcacaattattagagtgaatgaaaaaccactttcctgctttccattgttataaattctaagcttaagataaaagtggttctttacatgactgaatcaattacaatttatgggctagagccaaataggttgaagacaatcatccaaacagatcaatggaatagaatttcattggaaatgtaaaacactttcccaacaatggtcatgactttcttctgtttttgagaagagtttcatatgctggaccacattttagcttttattgttttttttttcccattgtccaaaaagttaagcaacaagtggccacacttttacgtgactacaacctggagttctgcaaagaaggtaatatttacttggtctttgactaaagttatctccccattctatggttacattttattttggactatggggacttctaatacgttttggtaaagaagagagtataaagaaaattcttgtcaaatttcactcaaaagtaatttcatgagaaatcaatgatttaaagcattatccaaattaaattatcatttgcagcaaactgtacaacagcaggaaggatatggaatggaacatgaggtatatatctttgcctttataattttaacatcttatattgaagattctgaaaacctatctttattagaggaaaatctcaatcttcagttttggccttctgtcagcagaatgataagtgcaatagttgtaaatctacttgacactgtaataaactgaactgaactttcaaagtccctttctcatactagactgagttttttgagaatggaggtggtatcttttttttttttttttttgagacaggatttaattccctttgaccaggctggagtgcaatgcaatgttggctcactgcagcctctgcctcctgggctcaagtgattctcctgccacagcctcctgagtagctgggactacaggcgcacaccaccgtgcccagctaatttctggtatttttttttctttttgtagagacagggtttcgccatgttgcccaggctggtttcaaacacctgggctcaag

SEQ ID NO: 14263 - DNA, 1099 bp, Homo sapiens
cctttctcagcagtctcgtctggcaatcttccaacaaatgtggcacctttaatcgtctttgatatttctgaagaaccgaattgtccagaaaaccccagtgctacaagatgtccagtgccaaaaccaagatcaaaaagcaacctcagaccaatacccagagattctcacattaaagagcaaagtcaacagaaaatcagcccagcagccgtaggagaggagtcatccccaggccggccccagtctctgctggacaacgctagcacctcagacagtcaggcagtgatgaacattatgaacacagaacaaagccaaaatagtattgtttccagaattaaagtgtttgagggtcagacaaacatagaaacctcaggactgcccaagaaaccagaaattactccacgttcacttcctccaaagcctactgtttcctcagggaaaccttctgtagctcccaaaccagctgctaacagagcttctggagagtgggactctgggactgagaacagactcaaggtgacctccaaggaaggactcaccccataccctcccctgcaagaagcgggaagcatcccagtaaccaaacctgaattgccaaagaaaccaaaccctggccttatacgaagtgttaatcctgagattccgggaagagggcccctggctgagagctctgatagtgggaagaaagtgccaactcctgccccgcggcctttgctgctgaagaaatctgtttcctcagaaaaccccacctacccttcagctccactgaaacctgtcactgttcctccccgactcgcaggggcatcacaagccaaagcatacaagtcactgggagaagggcccccagccaaccccccagttccagttctgcagagcaagcccttggtggacatcgatctcatcagctttgatgatgatgttttgcccaccccatcggggaacctggctgaagaatctgttggttcagagatggttctaggtgagtgaaaaatcagcagtggaggggaatctaaactcatgatagggtattttaaatggcacttgctgttttagtttctggtacataagttattgaggtgtgtgtatacaagtatgtgcacat

SEQ ID NO: 14264 - DNA, 1132 bp, Homo sapiens
gtaattgctaattaccagccctgtatttactgaaatggctgtctgtcatgcttgccatttttatgaaacactttattgcaggtcagctattattgcacgtgctacttcaagtcactggctcaggctggtgtcatgtgtggtttgctgcaaacggcagcctgctttgcagtgtgagctcttcctggaaacagcagtctcttgtagctgatgccacatcagctttaagtcattaggaagatattctaggccccttgttgcttcagccatcagtctataaataacacaacactaattttccatcaagtaacagcttaaaacagaacactgtcaaaccactttatgttccacccttaaatcacatcactgaggaaacactgtaagagaatgcagttgactctttcccccccttctttttgaatgaacctcgtaaacctaatgctttagaaagagctctcagaagactgagaatggtttttaggataattttgcctcagtaaatcctctctacattcaggcatttattaggccattacttgttttgggactacagattatcctggcagctcaataactggataaacaggactttagtgaaagattttcagaggttctttagggaaaagaatgaccaggagaaggtgggtggaagccttcagttctttgacctcttgcacgtagaatcctaaaactgatcatgattttagctaggactgacctttcctagcttgtagggtcactgtgaattttgttcatgtcttaaaaggtttaagttaacctagttcactgttacctacacaagtaacaagacggccaataggacctgtcagcatgacttcgacatgcattccaggcatctttcggggagtttagatttactgtgtcatttcagaacccaacaaaggtgatggaagctcttaggccagattaaatttcatggaacggaggctgcagaagtctgtgctgcttagtgtgtcagctgactttttactgggacaagtctatgaaaggcccacctgtaacaaggcccctttttgccctgtggatattttaaaagagggaatttggtgttgacaatcttacttacacgactcttgctaagctatttgactaagggtttcaatcagatgcttcc

SEQ ID NO: 14265 - DNA, 1895 bp, Homo sapiens
acagactaagaaggaaaagaagaagagatgacaaaccataactgacaagagaggcgtctgctgtctcatcacataaaaggcttcacttttgactgagggcagctttgcaaaatgagactttctaaatcaaaccaggtgcaattatttctttattttcttctccagtggtcattgggcagtgttaatgctgaaacatcattacagattctgctagcctgttcttttaccactgacagctagacacctagaaaggaactgcaataatatcaaaacaagtactggttgactttctaattagagagcatctgcaacaaaaagtcatttttctggagtggaaaagcttaaaaaaattactgtgaattgtttttgtacagttatcatgaaaagcttttttttttttttttttgccaaccattgccaatgtcaatcaatcacagtattagcctctgttaatctatttactgttgcttccatatacattcttcaatgcatatgttgctcaaaggtggcaagttgtcctgggttctgtgagtcctgagatggatttaattcttgatgctggtgctagaagtaggtcttcaaatatgggattgttgtcccaaccctgtactgtactcccagtggccaaacttatttatgctgctaaatgaaagaaagaaaaaagcaaattatttttttttattttttttctgctgtgacgttttagtcccagactgaattccaaatttgctctagtttggttatggaaaaaagactttttgccactgaaacttgagccatctgtgcctctaagaggctgagaatggaagagtttcagataataaagagtgaagtttgcctgcaagtaaagaattgagagtgtgtgcaaagcttattttcttttatctgggcaaaaattaaaacacattccttggaacagagctattacttgcctgttctgtggagaaacttttctttttgagggctgtggtgaatggatgaacgtacatcgtaaaactgacaaaatattttaaaaatatataaaacacaaaattaaaataaagttgctggtcagtcttagtgttttacagtatttgggaaaacaactgttacagttttattgctctgagtaactgacaaagcagaaactattcagtttttgtagtaaaggcgtcacatgcaaacaaacaaaatgaatgaaacagtcaaatggtttgcctcattctccaagagccacaactcaagctgaactgtgaaagtggtttaacactgtatcctaggcgatcttttttcctccttctgtttatttttttgtttgttttatttatagtctgatttaaaacaatcagattcaagttggttaattttagttatgtaacaacctgacatgatggaggaaaacaacctttaaagggattgtgtctatggtttgattcacttagaaattttattttcttataacttaagtgcaataaaatgtgttttttcatgttagtatgcctgtttcttccactgaagtaataatccttcattataagtatttaggatttgtctataatatttaaataagcaaaatcttggtttctttgcatcctgctgtgtgacatagaaatcaatacttcaagcctgttttataccgcgaaagtaaggataatgtgctgcaactgcaaattttatttctctcctagactatgaaggaggacactccactgtgctcatctctgtagattgcattggggtgtataaatatgaaatctggttccctcaaagaatccacaaaacttttgtgataattacaactagaagccttataaataacaaattcattttgaaattttgaccacatattaagtgcttaccctcgatactttctgttcattctctcttaagctcccactatccctgagaagtaggca

SEQ ID NO: 14266 - DNA, 1197 bp, Homo sapiens
ttattggtcaaaggaattaaactataaatcttcatgctaaaaattattaaaagggattagtgttgtttactatggtttttgtgcatgtctttataaagtcttataacttttaaaattgaaatgttctatattgtttactaaagaacattttaatgccttggtggcatcaatacttttttgcaatcattaatgatatttagaaagtagacatataacatgaaagtagaacataatatagattgtacaaatcttgttttttaccctattttcccctgcagaatgtgaaaacctttgcatcttctgatagtctagccaaggtccaagaagtagcaagctggcttttggaaatgaatcaggaactgctctctgtgggcagcaaaagacgacgaactggaggctctctgagaggtaacccttcctcaagccaggtagatgaagaacagatgaatcgtgtggtagaggaggaacagcaacagcaactcagacaacaagaggaggagcacactgcaaggaatggtgaagttgttggagtagaacctagacctggaggccaaaatgattcccagcaaggacagttggaagaaaacaataatagatttatttcggtagatgaggactcctcaggaaaccaagaagaacaagaggaagatgaagaacatgctggtgaacaagatgaggaggatgaggaggaggaggagatggaccaggagagtgacgattttgatcagtctgatgatagtagcagagaagatgaacatacacatactaacagtgtcacgaactccagtagtattgtggacctgcccgttcaccaactctcctccccattctatacaaaaacaacaaaagtgagtatattcaatatattgttaacctgagaaactttacatatctattttaattgtaatgaaactttcctcacagtctttgtattactaaaaattaatcttaagatgtgtaataataaaatgaactagttttttgtcttacagaaggtaatggaaagtattacaagtagaaatactgataatgggacaatctgagtacaaatggagggaaagtaattgagcctattactatgaaaaattattaacatcaaattttcgtctaaaccttgcgtcccgggcagggattagtagcttgtgtggggtgtagaggtttcgggtgaaacatgatttgtgtaaatcaagtaatgaa

SEQ ID NO: 14267 - DNA, 1175 bp, Homo sapiens
tgcagaatcagtaatagtggaaatcatgaataaatcaaagctcacaagagtgaagtgtacttggtaccagggttttgttttaatgggggtataaatctttgcacatatgtattcatctttctagatttttgttgttgagatgaaatagatttaattccccaaatttagccagttagtaagatcctgtattattgagagatcctgtattattatttattttttagttggtattggtgaatgattttggtaacagttgtttaaagggttaaagtattaaagatacagaaaagtgataattacctttgaaggtaaatcaaaaaagctgaagtcccagttacagccacactacatcatttgctattttactttgaaaatttacatatcatttgttatatatattatacacatcccatgtagtgctatggtttatttcttatgcaagattaagaaactgtaataactagaacaatagagctcctattcctggggtcaagacatggaagtacagtggtcttcttttattttacactttattttagaatcccttatgccttggacggtagagatacagtctttgtttaaaatggtgattgaactggataacctattaaaatgccttccaactcagcaagtaacttgtagattagtgatttctatattgaatttaataatggagatattatggtgttcagaacatctgagtctctaataagaaactattttaacttctctgggcttcattaatcttaccgtttaatgtgacagtttagttgatttccatcatcccttctggttttaaattttataatttaacagatttaaagagaaaaatatctctcattttgaaagttaacaacaatctatttagtttaggtctattgcatgtttgaattttaatgtgagatccagttcaagttaaggtatattttatactgttagaactcgtgacagtttctatgtcagaatttagtacatctggaatatgaccagttattactaatagtaaagaaagtagacatgtctttcttattaggaaatttaattatgtacttaatgcatgtattttttccagagaactggggaagagtgtaattgaaataaaagtacattatagacattaaaatattctcagctaaacatggaaggactttaatattttttcagttttagaaacc

SEQ ID NO: 14268 - DNA, 1465 bp, Homo sapiens
tctgtaccactgtaattttatttagacttttttttaaagacacagaaatcacactgtcatttctgtgaggcttttaagcttatgaatttgcttcacccgaagtcattggacagttacatttgcaatttcttttggttcataacaaaacctgcttaagagaatttttttttttgacaggtggacgtgggaatggaaattcttaatggtttctggagtagaaatctgtacttagaaaactagtttttgggtcagttccattttgatagaagtgaatacatagacagcttttattgacttccatatgtaacaataccgtttaagccttaaatcacagatatgtgccttctcagatacagtaattcttgttcaaccaatgtacaaaatccataaagaaacccctgttggataatgtttgatgtgtctattccttccatggaatggagcactatgtatgaatgttgggtttctttgtacttgttaagccacatttgaggtttatggtaaaaatcatcttttgagtttgctctttggtttttcttcattccttttgaggattgggaaaacagaaagattctttgatttgggtaatgaagaggtaatttgggacagtgtggtggtaccaggaagaaagaggattggaaaggccagtactgttttagttgctcggcactgttggttttgttttaatgtggttgccctgtccactacatggttctatcagtagtgtaatccattttcaatgtaaagctcttttagtttttgtcatagacataaattaatattttgagaggcatccctcacctgttcatttcttctgtgttgaaatgaagtacttaaaattaccgttatacatgaactttgtggactgtaagatttgttatatatgttcaaatgccttttagctggctttttaattaatatgcctgttttgagtgcttaatacaatgtaatgtgattgtaaatcatacctattttaaatcattccttcctgtatatttgtactcagagagccttattttattcttccagcagaattactacttgtgatagttcatttacattccccagaatgtgcctctagtgtgaattttgtattcttattaaacgtgtttgctgcagtaaatcgtttctctggaccttcatagtttaagaagtaactatttggaaattctgaagacacataatttgcgttttctgaaccttaaaaaaaaaggtacttctgtcacttataattgttttagctcagtaagctattttttttcaatgtgaatctcttttgagagctgaacatgtccattcttaaccacatttcaataacagttactgtagctaaggagctaaatagtttcatggattaatttttttcagaataaatttaaaatatccatgattctgatagtgggcacatgaccaaaagaaaaaagtaaatcaatatatttagccaatggtacatttactttgttag

SEQ ID NO: 14269 - DNA, 1160 bp, Homo sapiens
ctaacccatgttcagcatattactataacttctcctataacattctgacttcctatttgtttacaggtttttgatgggagtggatcatttttgtcctacattaacacatctgctgacccactctatggcccccaaggcctggccctaacttcagatggtcatgttgtggttgcagactctggaaatcactgtttcaaagtctatcgatacttacagtaatggtgggcaggtggatacccgcttccatggtcttgcactataaactggaatggatttctcaatgcgggaccagattatgactagagtttttatgccagaaggaatcattggtgaactttccaaggttatttctgaatgtaacaatttccttaaaaatgacttatccaatttctgtatttcacctttagggttaaaaaaaactcttctactgaatctataaaaactgcagttttacatctgtgaactatggcttaagggacaggatttatgtagctaaactaattttgcaaatcaaacagacacttaaaaaactagcatatgtaaaggtattcgttaatcctgtgaatggtagcttttgcacagaacttccaaaagcaaaacaaaaacaaaatctattgtagttatatacttcatttaacctaggtcacaagacccagggaatcttctaacctcacttttacagtaggtattactcttgtgacatttttttggttatcaacaactaaatataaattactttggaaaaagtaaggctgtcttgcaaaatgatcccagctctgattagcagccctctggagttcagaacttaagtatcagtgcaaatttctcaacctttctgggttagacaaagatccttttttgtgtgttcttttcaccacccctttggctcaccttgtatcagcaaacaaagtacttcttcagggaaacctgaaatttctaatgccttgaaaagcatattacaaaagtaatgctaccttttgggaaacaaactgccccgttaactccagatcattgcactggaatgtaatcaagaaagttagtcatgttttatgtaccatgttttcacacgtgtctcttctcttcgacttcctgaaagcgaaagctttacctcctgcaaatgtcagcacatgtagtaggacaccagtatcctaggacagaga

SEQ ID NO: 14270 - DNA, 1090 bp, Homo sapiens
attattgtttgatttctctttgtcaagtgtatagaacctgtcatacattcatgataagtagcactgaaaaattactcattcaaatttcccctgggcacgtaaggcaaaatattgccggttgggatttcaaggtcagtgacgacgcatttcctcccagtacagaccccccagccccccttgctggacatggggaggcagagagtcacttgaccatccagaaatacatgactacaagtcctttatgactgtttgccattttttttaatggtacttagtattttgatcaaactttagtctccagaactaaacaagtccctaagtttccttattttaatttactgtgactagatttgaagcaaataaatactccagatccatgcagctagaacacacttgcttccactactaaatatacagggtatgtcctaacatggagttaactggaatagcagtacactagcaagtatctgtgaatccttagcactgacgggttaacagaaatgctttggtaatacctacttagttaattggaggaagtagtaaataaacattaggtaatctgcagattacttcaaatgggaaaaatctttttgtagactctatagtaccctctctattcactagcttctgaaaagggaggagtatttttagtttgacaatttaataatttaaaaacaagacatctccaggtaggaaaaaatgaaagctatttcatgcaaacattatctaatttagcttaaaagtgaaagtggtaatactgttggtttctgtaaatgttgcagggttttaaactttataattactttaatatttttgataactagaaatctagtattgccataaaggaaactaagtgcccatcaaagatttgtttggtataaataaagaattatttgttttgttttcaatgacagtaagctacaaatcatgatgcttaaaaactttctaaagatgaattgtgtggcagtgattggtctgtttgtggagaatgtatgaaagctattaatattctagaatagattaataaattggctatgttgttccaatgaatgtacagcacttccattaacttttgaaagcaacacagcct

SEQ ID NO: 14271 - DNA, 1199 bp, Homo sapiens
aattctgtatgggagatttgtcggttctcatttatttatatcttgtgagctcatggatatttatactttgggttataatccaatattaggtttgccctgctgttttaatgtcatttatccttaatcttatttatgaagttattaacatttgtttacacatttttcaaattttattatgattttaattttaataactaccccacgataccagcttaatgaaggtcaggtggacttaaagttaatagaagagcaccatttatcagttccacaaaatgaatgcattgtctcttaagaacccatacagaggagtcactactaactttggacttgagaaataatttgcctgtaagacagtcttagcatgttccccaaatgtaaaggaagcgctgatgtctatcactggacagaaagaatctaaagagtgaggaggtctctgttttactggcaagactgcccaaggtggggctggaacgggaccagtgtgaattctgggcagcaggcttcctagagcagcttgcctgttacctcaaagtctgggaaagctttcagggtaattggcctcattgaagattttgtttatgttattctgccttcatcttctgtggatgctatgtaattgtatttggtcgaaagccaaaaaagcaatatttgagaaatgttcttccctctttcctcttcatccccatttttccctgggtattctcaaatatcaacagtaatatgttcctttgctgagaaagatcgtttttgggaattcagtgatgagagcaaaggggaactgacttcagctcttactagaactgaatgccctgggaagcatgtctggctctctgtatatatctctctctggtaagcctttttttgagttatatttgaatagcagaagtttaagcattgacaatgtatgagtagtatattcaggttttaaaatgcgtacaaaaatcataaatactgtctaggtacaatgtctatgaaagttttttttttggtggttttttgtttttaaaatgtacttttatctgattagtagtaacagcagcaaaatgtgttctcctgaaatagttttaacaccagtgaaaggtggatcttgggagccagaacatgaagagaatctcattgtcctgtcagcaacatactggaagatacaattgcagacaagaacaacttaatctttggggacactcgcttttggcagtgaa

SEQ ID NO: 14272 - DNA, 1194 bp, Homo sapiens
acgcatgccccatgtcccgacacaggccagcacacttagctggtttctatctccaccctctctttttcattcccttgacacgtgtgtgttgcttttggtcttactgaagagtcttcccattcatgtatcaatattttgaaactcttagtggatatcttattaaaagagagggggaaaatcacctatgaatctctggtgcaatagagtagcctcagtcttcttgatataagttatttgttaattctagaatcattattagatcatgcttatgtagttggtgttggccctcttagcccctaattgctcctgccataggcagagtagacggcccatcccctattatttctcaaagtgcaaccattagtttccatgaactcctcctttcttgctagatgagcagaggtagctgaaggtgaacctggccctactcctcctgtcacctctctctttctgttagaaatgcatgaggttgacagttgtttcagggaaacatgactcctttcacttcctccagaaggttactaccagaagcctgagaagaaatgtgtggacaagttctgctccgattccagctctgactgtgggagctcctctggcagcgtgcgtgccagccggggcagctgggggagctggagcagcaccagcagctccgacggggataagaagcccatggtggacgcccagcacttcctgccggccggtgagtcctgagcagagccccaggcactctcggtggcccttccctctgccctcccacgtacccagtccacacagtctcgatctgccttcaggagtgcagaggacagatgggacagtggccttgacctttgctttggacttactcactttctttttctttcctccctcccccttcccctccatccttgtcataatcatcatcattgtttgttagtgtctgtcttggaaatagttcagagagcttctgtatttagtttgtcatttgtacattcttaatgacaccgcatttgccattgtgatgtttcttaggtgtggacttctatggcactaagtgcatcacattgtgcagccatcacaactgtccatctccagtattttttatcttgcaaaactgaaactgtacccatgaaacaataactctgcattgctccctccctgtaacccctgctcacccctcttctactttctgtgtctataaatctgcctactctggct

SEQ ID NO: 14273 - DNA, 1191 bp, Homo sapiens
tgcttgtatctggaggtaaaataagatttttataataaatatgtttagtctgttattttttcttttaatgatgaataaacatttgtaatgcttctaagctgtcacacttaagtattatagcagcacttgcctggttagggcatatttgcatgttattatgtgtgttcatgcatattcatattacatgtagtatatttcatagcttagtcctctttgagttcccatctaatgaatctcagggatttatgctgggaattgcttaaaattttgtttattattctggaattggatgtcagattttcaggtgctttttaagatctataagttctgaacccagcccaaatgaaagtagacaaaccaatattaagagaaggtggagtgcctgtgtcttatgtatttttataaccgtagtattcccatgcttgggctaatgatgcttcataaatgtttgtcaagctgtactgctgaggggataccaggtgtaactagatttttccctttaagctgacaatggcaccatgcatctttgggactggagaactggctacaattttcagagagttcacgcagctgtgcaacctgggtctttggacagtgaatcaggaatatttgcttgtgcttttgatcagtctgaaagtcgattactaacagctgaagctgataaaaccattaaagtatacagagaggatgacacagccgtaagttctgtgtttcacattcgttaagtaaaacagctataccaatttggcagcatattctcatttaattatcagaaggaaaaataatctttatagtatttaagatatctgtcttcttgaatagtgtccatttatatatttctatattgtttcactgatgccagtgaatccatggatggctttaattttatcccaacttcctttgttatagttgctgggaaatgttgcaccaagaataacagcaaataaatagattgctatgtaaattaattcgagaatcataagctttggtgttagtagaatatccaagtagaaatgttattttagatggaaaactacaaactaaacataatgaatccatccatctgttattagacttggataatgccagaagtttatcaactcttcctaaaactgtcaaagaactaagtgtataaagccaatgaataatgttagataccttatttttgttagaaaggaagcctattagaca

SEQ ID NO: 14274 - DNA, 1138 bp, Homo sapiens
aggctttagtatattatctaaagtttggcttttgatgtggatgatgtgagcttcatgtgtcttaaaatctactacaagcattacctaacatggtgatctgcaagtagtaggcacccaataaatatttgttgaatttagttaaatgaaactgaacagtgtttggccatgtgtatatttatatcatgtttaccaaatctgtttagtgttccacatatatgtatatgtatattttaatgactataatgtaataaagtttatatcatgttggtgtatatcattatagaaatcattttctaaaggagtgaattctaagttttaggggaaaaaatgcaatttattttcagactcccaaagtaagaattaacatatcatgctaagaaaatagtgactattttgaagtatgctacttccctttcagaaatatagaatacacgtttctgttattaaagtatttgattactaattcaaatcatatggcaattataattcttctaaaatgctatcatttgtaactgtatcccctgtattaaatctcattaaccacaggcagctgttacagaaagctgcattgtttcacattgagctgttacattagttcaggctaaatgttgggagctccaaccacatccaagaataaatctggaaacacactgctgggatactgctgttagagcccttcttggccttgtattcccagaaatgagctccctttccttagcttagaagaatgtgattatatccaggacatcatgttcagaaaacttagtttactttcagcatagaatgcattactgttggaataattggcctctagctcttaaatgtctctgataacttattaatatctatctttataaaatagagtgcaactacttttgtgtaaaaatgtttgcctttaaatttagtatttcatatcagcacatcgatatatgtataaatgttccatgttaatgtgtaaaagagtctgtaataaattatttttttcacgtgtctctatacagtttttatttcaataaaaatattaacattatttttcattttattaatgccattattttgtaaatacattttacaattttgcctatttgctaccattataaattttcactgactcctcatagacagcatattcttaaat

SEQ ID NO: 14275 - DNA, 1143 bp, Homo sapiens
tatggcagagtgtgcccgatgagtatctgttgaaaggttctggaggtagttagtatcttattaaagaaagactatgctgttaactctaacaacaggccatcttttaagatatctttttggtcttggagcttgcacactacttgacttcttaaataggaagatagcttgttcatgtattggtagtgatggttgtgccaatcagagtaccacgttttactcttgataaagattatgttaccaagtgagcaggtaccaggcaaatggataggtttcctagaactggttactcttttaagtgtcattgctgtgcatagccttacattttctgaagatggggactgtcatgtgatgcagaccaaggactcttgaaaatgttgcatagatgacaagcctccaaaatctgtgtactttctatattttacctgtggctcaaggataacttgcacaggctagaactcagcaacatgtgtggtatgaggaatgttagagttggaaagaccccaggaacttatcctcactgatgtgcagattgaggcctagagagcagaagttgacttgactttgtcaaggccactagacagccactattaaactgctaatgtggtgatacatttttccttatgtgagaaccaattaggaaaatggaatcctggtttcaaaattcacatactttttataaaagcatttctttattatgttagtggattgcatggttttcagattgggagatgaggtaagaatctgttgcttcggaaatatttacgggaacagtaagggaaacaatctcataataatcacattagtcaaatggaatggtatatatatatcactatatatatactgtatatatatgtactatatatacagtatatatagtatcactatatatatactgttatatatatatcactatatatatatatagtgataacttctgtttctgtaggcatctgacaaattggcaaataactggaaatactacctttataatggttaccattatgttagaactgtactttaagcaagtatatagatgaaggatgtttattttaatattttggcttattcagtgatggtgatgaataatatggctgacattggcatgcttggttccacaaggaaactttctggtaataattttaa

SEQ ID NO: 14276 - DNA, 5236 bp, Homo sapiens
tggaggacattatgttacatgaaataagctgggcacaggaagacaaggcatgatctcacttacatgtggtttctaaaaagttgaccttgaagtagagaatggaatggtggatttcaggggttgggtagatgttgatcacgagagacctaatttcagttagaaagggggaataaatttaagagatctattgtataacataatgactatagttagtagcaatgtgttgtgttcttgaaattgcaaaaaagaaaaattacagtaaaggggaacttggtaattcatgattgatctgctaccataattataccaaccttctttttatcatttgtctatttggttgttttgcatactgacaagattttcttttcttttagttggtcgaattgtcttagaattgtttgcagatatcgtacccaaaactgcggaaaattttcgtgcactgtgtacaggagaaaaaggcattggacacacgactgggaaacctctccatttcaaaggatgcccttttcatcgaagtatgtgtaaattttcttaatcttgttattcttcatacagacaagtcctgttctttaggatttggggaagaaaacactaagtaggaagtgaagcttaaaaagtactattagcgtccatgtctgaggcagtaacgcagtttcgtaaaggttaggctgtgcgaggtggaattacttatggtactaaggtttatctatagagaaatggactcccctagctttacccatcctctcattctccttcactctaagatgatttgattgagaaaggaaggccgtagtcaaccaaccttaggtagcttcattgcctggtgacaaaaaagttatgcatagaccgggcgcagtggctcacgcctgtaatcccagcactttgggaggctgaggcgggtgaatcacgagatcaggagatcgagaccatcttggctaacgcggtgaaaccccgtctctactaaaaatacaaaaaataagccgggtgtgatggtgggcgcctgtagtcccagctactcgggaggctgaggcagtagaatggcatgaactcagaaggtggagcttgcagtgagccgagatcacgccactgcactccatcctgggcgacagagtgagactctgcctcaaacaaacaaacaaacaaacaaacaaacaaaaaaatgcataatttttgggcctgagtgcttgggaaggcagcagatttgaagattcagtgttttgggcacatgggtgatagtgtggtcaaaatatgccatttcatactgcttattacactttgtaatgaatcatacttttgtttagtgataatggttctcccaatagactgcaggctctatgagttcaagaactgtatgttttcaccattttgtttttggcatctaatacagttattgagtaagaactcagtaagtatttgtttaataaataggcaaataagcaataatcacaagagcaacattttttaaacgatttattaagaaaaaattaactttttaaaaaatatttaaaatgtttactttcatgtttaataaaaacttgaaatatgctaataaactatatgcagaaaatatttaacatagcaagtgtgagactgctatctttagaaaggtctgcctgcaagagtagcacttgtttggagtctgggaacttgacacttgtaccatttcctaaatagtaatggtgatttactatgcctagcctatttgtacaaacatgaatgtgtgctctcttttggggagtctggaattttggtacatgctaggtagagtgtgcccaataaataccttgggtgctgagtctctaattggctctcctgggcagaaatactgtgtacatgttgctgcatttttgttgctgggggaagtgtgtgttctgtagcacttcatgggacggagaaagcataaggaagcctgcacatggatttttccagactctgcctgtgtctttcccgtcatctcgctgtgtatccttaccactgtgatccaaccacatactgatttgtgtgagctctagggttctctgaacatgaaagcaatcttggtaacctttgacacaaagtgatatatttgctgaaaattttccattagggtagaacaaatctactgggaatcattggtctgtattcagcagacattattgagtaactaatatgtactatgtgtacatgcacatagttataaggatgtaaaacaatacagttggtgtacttaaggagatcattgctggaaggggcagatcataatgccatatgttatgtaggcagagtcaagatactatgggagaaaaattaggacatacagcttagggatttcagtgacagttttataggggaggtatcatttgaaccgattttctgaatgttagcagggatcaggcagtgaaaataggttggattcagatggtgaaaagcctgaagcgtttggagttgcggagacgggtggggagcgacaaacaggagagagacatgactagagtcatgcactacaaagttgtcttacgtacgtatccattagtaagcattgctaaaggcatccatgtctcagtcactaatagccattttccttttttgtagttattaagaaatttatgattcagggtggagacttctcaaatcagaatgggacaggtggagaaagtatttatggtgaaaaatttgaagatgaaaatttccattacaaggtaaagtagagaaaatgcatgttattgctgataaaaagattgttatatatctggaatacttgttggattaagacaccaaaaaatgtttcaagtgtgcttagattctccatttcttgtaataggaatcacttttgtaaataatggttctttaatatggaaaagttttcattcagtaatgattaattcagcattatttcattgtgatccagtttttatatgcttcagttaagccagtgagtttttaaatgcgaccagcatctggcaaaattgtttccaggaaaaatgtttccattgttggaaggatggtaacttgtgcatccttatccttgaatttgaagagcaacaaaaccatcactaatatccaggatgtcaggggatttgcacactagcagatatagttaaatgtccaagctcctaaaggacttcagtggtgcctgtgccttcttgtcttcgttgtcccaagatgtaattggggtatattgcatcattcaagttataagaatggacatgtaagtacaaaagtaaagtgatatttttggaaataaggaatatgagcaagggtattaggataatttgaaaaaatgtcgtcagtcttccagtcagtgtttattgagccactatcactggcaccaaagggtttataaaaatgaaaggccttgatgacaaggaatttataatcctacctcagagacaagattaagatacatgggactactggagaataatagtatataaataaatgctaaattgattgaatatccttgcttgtataacattgctaatactgtctatatactgcaggagaaagatgtgatttatgcagtctgaattattatggaagtcattgaggaggaatggctacttgggctgtgcagactgggtcttgcaaggcggcaacatgtctgagatttggttaggcaggaactgtagtattgatgcagaatttaaaaagggacgtcggtgaggaaagacaaaggcaagagacgttgaggaaataaagttctagttactgttgtaccaaaggaagctaccagaaggatgaaaactaaaggtgatgtgatgatcacattgacatagagaaaaggggcctatagacaagacacatgattcttgctttctataaacgtggtggccttaaaatctgaatttgatttagactgaggggagtaaaaggcattttggtggggtggggggtgtcatgaaacattatataacatgagagttacggtgcatgcaccaacaaggaatacatttagaaagcctaggagataaagtgaaaaggttaagaaattgggtttcatagatcctttgacaggattatgccaaggtagaattttgatttcaagatgtatgcagcagtttcttttgagcactctccgaagaggtgattcatctgggatgaaaacctaatccaaatcctgtatgatttggattcttttgagattaggaaagtaccaaactgaatgtcttgggtaaattcagtatcccattattgttccagtttattgatgttttgtaaaggaagacttatactgtaggcatatttatgaatttggaagaccgttcaggtcttcccagaaaaaaagagcattcatcataaagagggcaaaatatattacaagagtttcataatgctgcatcttcattttaaaggtgaagtgtaagtattttctcatggccaatttagaaataaccctccccccgactattgtttctgttacctatttactttgataaggttttttaaagtttaaagtgattaagtgccccatgttttgtgaattaaaggttgcagtttataaaaaaataaaaagtaattaaaaaattttataagtgaaaagtaaaaaaaagtagtttgatctaaatggtagtatagtgcaccccagttttatgttcagtaaaagaacagttcagactaacacacaattcagaaaagaacacatctaaccttggttttcttttaatttttatttctacagcatgatcgggagggtttactgagcatggcaaatgcaggccgcaacacaaacggttctcagttttttatcacaacagttccaactcctcatttggatgggaaacatgtggtgtttggccaagtaattaaaggaataggagtggcaaggatattggaaaatgtggaagtgaaaggtgaaaaacctgctaaagtaagtaaaaagttacagtgaaatacacttattatcttagttgctatctttttgagacggagtctcgatctgttccaggctggagtgcagtggtgcggtctcggctcactgcagcctctgtctcccaggttcaagctattctcctgcctcagccttctgagtagcagggattacaggcgcgcgctacaacacccggctaattttttctgtatttttaatagagacggggtttcaccatgttggccaggctggtctcaaactcctgaccttgtgatccgcccacctcggcctcccaaagtgctgggattacaggcatgagccaccgcacccagcctgttagttgctatcttaaagaaatataagtaaaaggatcaggtgattattagctgg

SEQ ID NO: 14277 - DNA, 1177 bp, Homo sapiens
tgtgactcactgatgcatggcaacttttcaaacttatatttccctccaggtcaactgatgagacattcagcttggctgaagaaacctgtagctctaatccagctatggttaggaggaagaaaattgccataagcatcatcttttccctatgtgagaaagaagaagcacaaaggaatttccaggacttcttcttttctcattttcccctgtttgaatctcacatgaacaggctgaagagtgcaattgaaaaggtaataaggatgtaatccaaagtcaaatagagaagtgattgtggggctttgaagatggcagaatttctttgccgatgtatcagatgtctttcctaaggaagttaaatcacctgtagcagtgataaattttaggcatgttgatgttagttaccagatactgggttaccttagggaaggaaatgactgctttttcgtgactgaaggcattattaccttgagtgttgttaattgattacataattttttttattaatacagcccagtagataagttataaaatttcttctcagtaatttgacttgctttctcttcaataaaggctatgatctcctgtaggaaaatagcagaatcaagtctccgagtccagttttatgtcagccgtttgatggaagctctgggagaattcaggtaaagtggcaaagtttggcaaatccaacaggagatgtttatgagcagccatggataaagataaactgtgacttggaagaattgggggcctggcagttattcctcacttttgtggttccgcccttcaagatggaaacagaacaaatgaagcaaaaaatttaaataatttaccgctgagtaatcctcactattgctcaaccgacagtccctgataggattgtttttaacaggatgaatggggaaaactaatgttcaggtatctctcaccagtctattcattatcttatgtcagcctcacaaaagccctaagcactactaaccccattttacagatgtggaaacttgagttcagggatgcttattcaaagcacagatggagaggttatgcatgtcgggaagacatacattccagtttgccaggacagtcctagtttacaccaagtgtcctctggaaactggtgtctagagtccttgctcctagtatctgtgtggaaaggtaaattgtgttgggtagcagg

SEQ ID NO: 14278 - DNA, 1203 bp, Homo sapiens
ggcctggccttgccctgacagacatctccgggagaaaccttccttagaaaaggtcactttccagattggaagctttgcatctccagagtctgactttgaaagccgcatgaaaaaaatggaggaacgggtgaaggcctgtggcccctccttggaggccagtgaggctgctgatgtggctcaggacccgcaggtttctaggagcccttttaaacctggctttcaggagaatgtttgctgtcctcagaatcggctttcagagggggatgaaggcgagtctgacaagggttttgcagaggacagaggcagcagaaacgacatggcagcagatattgctgggcagctcagccacgctgctgacttgggcacagcctcccacggtgcaggaggaacgggagggaggaggctggaggccactagaggtttgtatgtgaaggctgcggaaggacctgtgctggagcctgttgcccccaggtgtgtccagcggggccctggcctcgtggctggtgcgaatatcccctgtggggatgacaacaagaaggccaacttcaggactgaaggagacattccccgaaatgaaagctcagatagcgccctgggagacagtgacgacgaagcctgcgcttcagccatgctagatctgggtcacggtggtgacaggactggagggtccttggaagtggagctgcctctgccaaggtaactccagcaggctgggaagtagagggaactgggttcaaatcccactttcctggcctgacacctgtgatgttgttagccactactattgtctgctttacacacagtatctttttttccacaaagtactagaagtattattaattctatacaaacggtttcccacctgtccttcttccaaggatggtcactggcttagcaccactgagctcactgggacaggtggccagtggttgtctttgcagctatcgtgatcctttggggaagcctaagggatgtggtggagatgggggagggaatagggagtttaattttctgtcaactgcagagaaggtccgtggctggcagcagatgccttgcttcagaggtggtggattacactcgccgtgtggcctctctcctgccgatcagagcagcgtgaggtggttgggaaacaacacctctttcttaacactccatcaggttgattatttggtctgtaatgactgaaagcagtaattagaaatt

SEQ ID NO: 14279 - DNA, 3542 bp, Homo sapiens
aatactcttataagctaaagctcaggacagttcttccttggaagaaaaaaatcaaattctcaactgaaggagaaaggaataagctctctgtgatgtcaaaagcatgagaagagcaaacagaaacagtcattccacctttttgttttgtgtttttgctgtcaagctgatgcttcattgaagacttaggtttacttgacataatagcatttgtgattgtcgtgaacactttaggccatttgttacccatgaatcaacaaagaaactgacctttttggtaggaggaaacataagcactaaacactaagctgttgcaacagattgccttgtgctgtttgggcagaataaagacaagtgacttgagcggggtggtcagcagtgtacataatattccagtaggaaactgcttccaagtttaagcatgagctccccaaactggagaaaacatattttgctattctgagacaacaatcagaatacagactttggattccaggtcacagtttgctttttagacaaggtaaagcaaagaaagccacattgtgccatcttcagctccagtggctttagcagtgactgtttgacataaaacatgtaagaattgcttgttgggaagagtgctttagggacccactgttttcatttcttcttggagtttaccttgtttcagatgcagccatgggtaggtcagagatggattgttggtgcaataaacccaagaatcaatgtagcctcttaatcccatcaagatgtagtttgtagcagcaaagtgtacagtctgaaaccgtatgttttatccttatattttagagctttcagcagcctttttaagagaggccacttaccaaagttatttctataagctcaagagtgtttcggttggtaagttcttccagctgaagccactttttccttatagttaatacaaatgactatttttactttaaaaggcacagctgtcctggtgggaaatgaaacctgcagcagttcaggatgactaatgaaagcaattagcttgaacatttagaaaaaattcatatatgatctaaatttttatattatcatttctgtgccttctaattcctgcatccttttcaaaacatctttccagacattaacttacacattgtataaaaccgaccaaaatgatttcctaaagttcatgcaaaaaaaaaaaaaaaacaacctaattttctgttaatataaaagaaacttcagtttactgaccgtgaaacagactatgtactgacatccagggtaaagtaaaagacttttaaatattggtcattaaaggacaggagctaagctagcaaagcaaaacatctttagcactttgcagatctcaagcagttaaccaggctctgattcccttccactgttttatgaattaattccagttcttttcatgtatctttgaacctaagattatgaagtaatttccctattagggactagaatgacttcagttttttcatttgataaaaatcagaactgctacctttcccttttttaatgatgcaaaatgtagatgagtgcattaagttttgtaagatctttatcattttatgtcattcattgaaaattgaaatgttcattctttttaatgttttcctatttccttttgcctagcatttgactttggtgttttaagttctgtagttccatgacatcattgtttgctgttgtgttacagagagagaaggaacctcacctgtggctcagctcaccccacatccgtttctcattacgtgtaaataaactgtcagagctgatgttacagcttttacagtttaaagcattcccctcgtctctagttccttttttcttgtttacatgttttgggcactttccctcattcaccaccttccagggtttcatagaaaataacttgttacaaaatcagttcaattctaatgtggacatagtggcatgttcataattagacccatataggggacactgagctttaaatcgttgattctaaactctatacattaaaaaaattcagcccaggcccctcaaagcctgagaaaatttaatttgctcttaatttaatgttccaaaactcactcttggaaaaatgcctgttggaaaactacaggtgggtcacatgtgggggctgtctccgtgacactcaggattccagtcagaacctaatcctcatatctattgcctacaaaaatagaccaagaatgttgctgctcttttataatcctttaaatatttaacattcaagttttctttgtcttaaattcagcctcttcctaaaagcaaaaaagaaaaaaaaaacctcacagaattgtgttgagatccaccgctcacacgccgtacaccacccagtggcttcattctggcttagccgcagaggcaagaaagggaccccacttgctcccatgcccacctcaagaaaaaacataaaacaattttttttaaaaaagaaaagaaatctacctcagttgacaggattccacctttagggtttcttcaacttttaagtcttacctgttgagtgtaacttttgtagcatcttgcttttccaagcaagctagtgaggcatgacagagcagaagtctgtaaatgtccctgtgatggacctctttctagcatgttgcagttttatttttaataaattggtaagtgaaatgaatgtaaaggtaattgtgtacgttttagacatgacaatgaaaatttaaaatgtagcttccatacttgtgcataattccaaagtattttattttttatcaatcagtgttaaatagctttttgtacaggcttcaatccatttttcgaagtgtgctgttttttaatgaaagtaactataatcttttcacatcccatggaactgccgtttacacattgcaactttttaaacttaaccatatttttcaaaattaacgtttttggagggagaaaaatccccgcttgctaaatgatactaaaccgttgtttgggctcttataattaggtcctgagattttataaaaatttagtctgtagctttttaggttcttcactagagttggttgtacataaaaataataaagaatataaagtatcccaaaattcttttaaagtctggatttttccgctaatatgtactttagagaatattttgttcatgcatacttccacgttaaattgaaaatgtcttcagcttctcttggtaaatgtgaaccatttgttttttattgtgcttgggggagagggtattttaatataatttttgcctaaatcaagaagtcccctctgaatgttaatttttaaatgtcaaaatatgatgaacgatatatcttgaaagtgagattgcaatatgcttaaacttaagtggtatttcaaaaacgagaaaattctggaatttgtcatttgaagctccataagagaaattgataggacttcgtttttgatcagtctgaatagataccaatgtcattgtgtgggaattttttttaacttgtttatgtattattttgatccatttttctgtggcatttggtgcaataaaacttttgaatttatcttgaacattttcctggtgctgcatgcga

SEQ ID NO: 14280 - DNA, 1233 bp, Homo sapiens
tactgataatttggaagtcattggatgttattgacagggtagaaagttcttacatggttctttttcttaacaagatctagttaatgctacttggtaatggttaaggaatggggtaaatataacccaaattagagtgaacttcaaggtaagtgtgattttttcttatttgtataaaatctataatatgggtttctcctaaatcctttgtttatatttctttagcagtgtttggcgtattataacctgccataattgtgtttcaacatacaagatagtgtggataacgaaatttctgtattacaattatgagttttaagatgtgtaggttgtaggcatggagccaggctgagagagagatcatgccaagtcttagcacagaaaagcatcagtgcctaaggatgtgtgattttacttcatctataaggtttcccggttaggttagtttccttcttgagataagtcacacattttccagagagaggcaagcaattggtaacctacatatataaagtcagataccatcagcatgggggtaatttgacttaaccttgagaggagtgttttggcacatggatatgtgttttgtgggacacgggccagatggaaggtgtagaacttgattgtttaatccctgagttgccatttactttttttaaattgtgataaaatataagtaacattaaaatttacaattttacacattattaagtgtaaaaggccagtgggattaaatacattcccattgtttttgcaaccattaccgccatccatctccagaacttttttgatcttcccaagttaaaactctgtgccatcaaacaataactccccaatccctccttcccccagcacctgtcaccctccattctactttgtgcctacgtgaatttgactatttgactactctggtatctagagtagagcattatatattatttgtccttttgtgactgtcttatttctagcttgatgttttcaagttttatccatggtgtagcatgtaatagaaattcattcctttttaaggctgaataatgcatataccacacttgtatgaatatcattcatacatttttatctgtcgatgaacacttgggttgcttctaccgtttggcaacagtttacttttaagtcgttagttatatctattacagaaaaatatttggacttttgacagaaactagtctagaggattaaatggggtctttctagtgccctttcccagtcagtgga

SEQ ID NO: 14281 - DNA, 1133 bp, Homo sapiens
tattgtccttcagaatctttaaagcagcttctcttcctcttcctccaactattcatagttagcctttgtttgaccctcactgctttgagaatcagtgttggaataagccttggttactcatagaggattgctgacattcctcaggtaaactgaggagaaaataattcatattgatatctctgccattaaacctgtaaaatctgtgaaaagggaatgcctcatagtcatttttatgtccttcgcacatggaacaacttctgatctacagttggcgtgaaataagcattttttttaaactgagttttgtgaaaactgcaaatattatgaaaacaaaaatcaaaagagctgtccatctgctttccactgcacaccatagccttggcttctcattccagttccctaatcctaatatttctacttgctcaacttttgtgtttttcttaggagcttcccacatcttttgaaataaggtaaaagacacataactgtattgcaaaattaaaggttgaactcatgtcctttactttattattttctgtacttttaagttatgagcacttaatagaattgtgatgaatacttttttgactcccatccccaccccactcagggataagggatcagatgcatcatggaagaatgatcaggaaccaccaccagaggtaagtataagtctttttatgcaacattttataaagtagggcaggacttaatcttataaattttatcattcttgctgttagggaagtcattaatactggctagcagccatactgccttatcctgtcctagcgcatgtattctctcaccgtcctagatgactatttcatacctttcagtgaaaggttttgattgatcatttaggaaaaaaacttttttcagttacatttagttgtattttaataattatcaccttatcatttacattgtagtttactatttttgtcaactttgttgatgtctgataaaggcaggctgtcattattttttaaaaatttaattgagtttagtaaatacaccatatgggacatgaagacatggtgcttttaatagctgtccttcttttggaagtacagaatcattggaagcacaagatcattggaagctacctacctctctactttttacgatat

SEQ ID NO: 14282 - DNA, 1139 bp, Homo sapiens
ggcttcaagtggggagccaacaaacaaaatttaaactgagacagtggttgctgttaacgataatttctgtggaagataaggaccaagtgagttttcagaaagtagaatggtctacatactttcgtaactgaggatttcccaagttgtctgtagcctgagaagaaactcattaagcaatctggcaattaagcgatctggtggttgtgactaagagaggtgccatgcccagaattccctttttttagtggtttgtcacatgcttgcttatattcagacaggtgtatgatatgtgagagtattgtaataagaggatctgggttatggcaaaggtttgaaaatgttattggtaaactaaatactactttcccaataccatatcagttttgaagtgctagttttgaattagaacagcagtagtaaacatgtagtaaagttgatatttcttaattgcataatcttattttaatattagaataagcaatagtaaacttgtattaaagttgatatttcttaattgaataatcttattttaatattagtataataatactggactatttttttaactgttttcttccctacagtgaaacagattcagatagttcaagttcatcgtcttcctcttcatcttcctcatcgtcgtcttcttcctcttgtatatcacttcctccagtgctgtcagatggagatgatgatttacaaattgagaaggaaaataagaattttcctcttaaaacaaaagatgaattacttcttaatgtaagtacttagatttattaagcttagtttgcatgttttaaaacgtattctggtaccagtattgatctaattttgcctatatctgctccataaatttgaaatttattctcagcctaataggcatgcttttggtatgccttggctttcttatgtaaaagagagtagtgatctggataatttcttaggttgcttctaactctgctgacctttgataattgttccgattatggcatcaacttcagctttgaactttacattttttacattccctagaagaagatatttcttatgtagatttgcttttttttttggtctgcacgtcagaaaattttgctcaatagcaattgaaatttcaatagcaattgaaatcaatttttttg

SEQ ID NO: 14283 - DNA, 1816 bp, Homo sapiens
agtgctatgatgacatgggtacctgcatgaaggccatgaccaagcagggcaccgagctgtcctatgaggagtgcaacctgctttccgtggcctacatgagtgcggttgggggctgcaggtccacctgcagggtcatcttaaacatcgagcagaagacagacacctccgacaagaagttgcagctgattaaggactaccaggagaaagtggagtctgagctgagatcgatcggcaccatggtcctggaattgttggataaatatttaacagccaatgcaactaatccagagagtggggtcttctatctgaaaatgaagggtgattacttccagtactttgctgaagctgcatgtggtaatgatcaaaaacaaatgatagataattcccaaggagcttaccaaaaggcatttgatataagcaagaaagagatacaatccacacatccaatctgcctggggcttgcggttaacttttctgtattttactatgagattcttaataacccagagcttgcctgcacgctggctaaaacggcttttgatgaggccattgcagaacttgatacactgaatgaagattcatccaaaagacagcaccctcattatggagtttcttagagacaacctaacactatggacctcagacagtgcaggagaagaatgtgatgcagcagaaggggctgaaactaaatccagacagggtgtcatccttcttcccttcaagaaacctttttacatatctccattccttattccacttggatttcctatagcaaagaaacccatttatgtatacggaatcatctgtttacagtcttttcacactgcagcattgggaaaacttcattccttgatttgtcttggccttcctagtgtgtagttactgctgtagaaaagtattaataccttcatttcatataaacataagcaacttccaaacacttaggtagaggactaaaaatgtatctggtatttaagtaatctgaaccagttctgcaagtgactgtgttttgtattactgtgaagatatgaaaatgtagttaattacaatttaaagagtgttccacacaacttctccatttctacattccctcccatactcgtcagggtttcctttcaataagcaacttttccatgctcctaatgtattcctttttagtaggaatccagaagtattaaattgaatggaaaagcccttgccatttctggctggaggtcacaaattgaaatgcctcctgtatcacatattatggaggtcatatatatctgtggcaacagggactttccttattcactctttatttgctgctgtttaagttgacaacctcccttcccaataaaaattcacttacacctcctgcctttgtagttctggtattcactttactgtgtaatgcaagtagcatgttgctgccagaatacaagcattgcttttgggaaattaaagtatatgtcatttcttaatacactgcaaaggggaaataaataaaagtacacaagtccaagtctaaagctttagtacttttccatgcagatatgtgcacatgtgtggggtgtacagtttgtctagtattgttatttagagatttggaccactaccgtgcactgctaatcattgactatagtcccaaaaaagccttgtgaaaatgatatgccctatgtaacagcagagcaacataaaatacaattatattttataaacaacaacaacaaaaaaccactacattatttgcttatccataagaaagcaactcctggctgaggcaggaggattgcttgaggccagtagtttcagacaaacctgggcaacatagaaa

SEQ ID NO: 14284 - DNA, 1115 bp, Homo sapiens
acctgtaatcctagctattcaggaggctggggcatgagaatcacttgaactcagaggcagaggttgcagtgagctgagaccgtgccactgcactccagcctgggcaacagagtgagactgtctcaaaaagtaaataaaataaaagtttaaattcagccttttaaagacacataggtgctgcatttctattggaaggtaagaatatataaagttgctttcagcactgataaacactgataaacttccataactcattattaaaaaaaaaattaggcatgtgtttattggtgtgctggatagtatttctttgatgtatttgtttctcccttgcctctcaaatatagatctctctagctaactttactggatctatcagaagaagaagaggagtgaaggaaagacacccagccacacaaaagaacttcatgatgccaacagcgtgattgcttagaagttcctacacaaaaaaaggatcatttgaaagcacctggaatggtttattagcttcacaggattttattcttcttggcttctatttggagggaaaataacataaattcaaaaggattccaatctgaagcccaaatcgtttgcctacataacaaaaatatctcatcttttcctgcacattattattcttttatgggttaaaaagaaaaataccttttagtgttttagaactctctcatggtaaaaagtgcaagaatttaaaatgttgctttcatattcctataattctccaaaagtattaaattcgtatatgtttgagtgattttctaaaaactgctcaacctgaaatcaattgcattgaccatttggcttcgcacaatagggagaaaataattggttcattgattatatagagagaaagactaagaaaagctattaattgctaccaattttatgataagctttaaggtttatgaaagtatgtttttttatttaatgagtaatgtccatttgaagttgaaagaaaacatgaaatcctaattgtagttcattttatgttcaaatgaaaccattgtttttgtttttgttttgaaacagagtctcactctgttgcccaaggtggagagaagtggcacgcttttgtctcactgcaacctccacctccc

SEQ ID NO: 14285 - DNA, 1555 bp, Homo sapiens
gcttgaacccagaatgcagagtttgcagtgagcagaaatcacgacactgcactccagcctgggcgaaagagtgaaaatccgtaaaaaaaaataaaaaaagaaaagaaagaaaatgcgctacatatacacaatggaatactatgcagccattaaaaggaatgggatcatgtcctttgcagggacatggatgaagctagaagccatcatcctcagcaaactaacacaggaacagaaaaccaaacaccacatattctcaatcaaaagtgggagttgaacaatgagaacacatggacacaggaggggaacaacacacatcagggccagtcagggggtgaggggcaagcaaagggagaacattaggacaaatacctaattcatacggggcttaaaacctagatgattggctcactctctttctgccaccatcttggttcctcgttccctgcacaaaatgccctgtgaagccacagaaaccgtccctgctacagagcaggagttgccgcagccgcaggctgagacagggtctggaacagaatctgacagtgatgaatcagtaccagagcctgaagaacaggattccacccagacgtccacacaagaagcccagctggtggcagcagctgaaattgatgaagagccagtcagtaaagcaaaacagatttggagtgaaaagaaggcacagaaggctatgtccaaactgggtcttcgacaggttacaggagtcactagagtcgctatccggaaatctaagaatatcctttttgtcatcacaaaaccaaatgtctgcaagagccctgctttggatacctacatagtttctggggaagccaagatcgaagatttatctgagcaagcacaactagcagctgctgagaaattcaatgttcaaggtgaagctgtctcaaacattcaagaaaacacacaaactccaactgtacaaaaggagagtgaagaagaagaggtcgatgaaacaggtgtagaagttaaggacatagaattggtcatgtcacaagcaaatgtgtggagagcaaaggcagtccatgccctgaagaacaacagtaatgatattgtaagtgccattatggaattaacaatgtaaccatctgaaagcaacttttcttggtgtctcaaaggagtaactgcagcttggtttgaaatttgtactgtttctatcataaataaagttatggcttcttgttggaaaaaaaaaacctagatgatgggttgataggtgtaggaaaccaccatagcacgtgtacacctatgtaacaaacctgcatattttgcacttgtaacccggaacttaaagtaaaataaaattaaagaaaagaaagaaagaaagttatcagaagtgttttgatggtgacacaaaagggtatacaggatgctatgggaggatggagaagtgatagaagagtcaacaactttggatgaattacccattctaggactcactttcttctgctttgtataggaggcaattatcactacttctcagttctaatgcataggttccattgaatgtttaggtgaagtagtgcatgaatcatggtta

SEQ ID NO: 14286 - DNA, 1284 bp, Homo sapiens
gccatttaagttgattacttatactcaattatcttactctaacaaattaggatccttcttaaataaagcaatgatggccttttttaaaacatagaggtgtgaaagtttatagcattttaaatttatttcaagagtagaagttactaaaatgatttatgaaaataatcttatttggcaatattaccctggcttctgacatctaagaaaaggtggcaaatacaatatgctttactaaaaactagtaggtactcatttgcaaagacactaatgagtattggtgaatatgtgtaacccatttatatcttgattacttgcagaactatttcaagcctagaagaaattgttgaaaagcaaggagacaccattgaatacctgaagcgacacaatgcgctgctgagtaagcgattgttggctctcacttcctcagacctgggctgtcagccaagtagaacgtgagaggctcacggtcatgacagcaattgcagaggaacccagagtaattgagactgactgaccacctgacaagctgccacggggaactgcagcttttgctgaatagcattttacagtgtttgttggaaacctgaatttggttctgacttctgtggctgtttaaaatatagggcttgtgggtcacttgaaaagtacctgtagaagcccggataacttgaggggaatgtctgtttgtacttttggaaattatttaactgcttggtttatcctaggatcagaggctaaacaactccatagtcaacacttttccacctgacattagaaccctgtaatgatttcattatggataggggaagtctaacaagacaatcgattttaaacagggttttaatcaaataagttcttcccacttttaagctgatgaaagaagtcattatttcttgtgaatattttttcctggagagccttatcatgtattttatatgcttatgtggtgttggatgacatcatggaccatatagcttttatagagaatttttctcaccataggactgaggtctcaccaggtgatctactatgcaaattcctacagttttctattcttaagaaataagggctgggcacggcggatcatgaggtcaggaaattgagaccatcctggctaacacggtgaaaccctgtctctactaaaaatacaaaaaaaattagccgagcatggtggcgggcacctgtagtcccagccacctgggaggctgaggcaggagaatggtgtggacccaggaggcggagcttgcagtgagccgagatcacgccactgcactccagcctggg

SEQ ID NO: 14287 - DNA, 1212 bp, Homo sapiens
ttacccaaccttcagcaactgctagtctactttctatcacttagagatttgcctcttctgaatattttagtcatacagtatgtgatctttggtgactcacttctttggcttagggtgatgttttcaagatttgtttatttatactgaggcatttattagtacttcatgcctttttaatgccaagtaatattgcattgcattctgttattaatttttgatttaaccttttttccgatttcctaagataactttggtatttaattctgtcttacaggatgttgttcacttatcaaatagtgttacctaaagatataatgagtgtgctattttatcagattattgatgaaagtataaaattaacatcatcagctataccctgcagatcttcataacatgatttgattaccccatctgtcaccattaggcaagaccctaatatatttcataaaaatcagcagcactttaaggggaaactctgctgccatgaaggaaaatatattaatattttctggcttgaaaaattagtgttttttgtttgtttgttttttaataaatttggctttctatgtgattttatgtgtaggtttgctctatgctgtaggaggttatgatggagcatcacgtcagtgtcttagcacagtagaatgctataatgctacaacaaatgagtggacctatatagcagaaatgagcaccaggcggagtggagcaggtacatgtgaacctgttttagcaactgaagcacaaaaatgatggaaaatagttaaagtaaaatgattcagtggcatcactttacattatctgaaaatatatgatatgctgattttagtggcactgctaaatgtcttttgaattgtgcaggtaatgggagtaattacaaagtaattttactttaaaatttaatgtctaagtgccatagacatttctgtttcatttatatattcaagttgttagcactccttttagttttttgtttttagtgcttattggggaacttgcttaataatcaagtcttttcatgtatatttcttaaaattttgtgctttaatatgcggttattttactatggatattgttttcaaaaggattacattaaaggactttttccctccctgtgtttcacctacatgttattaatatttttattctgtttgacatgcctcttttttcagaataatagtttgttgagatgcttatttaatcatcaattgt

SEQ ID NO: 14288 - DNA, 1104 bp, Homo sapiens
cctgtgacttcttttttctctcttcatttctttgctcaggggtcacagttattgataaaccattatgagcctgaaggacattttcagcatatttatacatgagaaacagccttcaacaagtatttgtgaagtgactgagaatctagcacttctccacttgtagctgcactttaagtctcagcagaagatacgatcgtctgcctttataggcctcagatactgaagattatttttggtagaagcaccgtgtaggctttttctgcaatgagcagcagctgactgaattttcataagaaacttggactgcaggacttaatctgtagtctttagacaacagttgctttcataaagactagttcttatcaaccttgaatgactacagattattttgtgaaggaggatgaagtaatgtgtgttcttgtaaaattaaattttatctttatttcttctaaaaatctgtataccaggaactgaaaatctttgaacagatattaaaatctacgtaagtatacaaactagttgagggatacactgtttgcttttataaaataactttgattacatgaatataataaattatgtgcatataaatgtgtgtctatatgctttcctttaaatatgtttgaaaagatgtttgaaacttgattatactatttataattggcacagtactttgaattatgccagtactacattgtaaaacagagttgtattttttgatatttaacaatgcttaacactttaaatgccacttctgaggaatggacctggtgtaacacacttgaatatgtgtgatgccaaactttttaaaatacaatataaattatgcttatttattattttctttagtttaatcttggtcatgttttggtgtgtatttttaatttttttcttaaattaacactttggcatgaacattactgcaggtttttgatgaatataatgaatgtatggaattcaattgaatttgcatggtcttcggaattttttctgtgtgtataaatttagctgctattaacagaagagagaactttctgtgagtagccatgtgtgttgatcagatacagtttttctgagatcttcaattaatctcactttaaaaat

SEQ ID NO: 14289 - DNA, 1561 bp, Homo sapiens
attaataaaaacaacaatcatttgagatgtatttattccttaataatctttatcatttttgtttcagtggttatgatattcctctcaaccctttaaatctgatccctttctatgctggttctcggcatcatgatttccaccacatgaacttcattggaaactatgcttcaacatttacatggtgggatcgaatttttggaacagactctcagtataatgcctataatgaaaagaggaagaagtttgagaaaaagactgaataaatatctcacgtaaaccttcctgaaagataaacgttttcctgaattcagaaactagtagctaacattgcttctggagagcagaaataagcatgtcttctggctactaagtgataaaaagaacattaacaacctttaattaccttcctagtgggaactttttctactttacctacaagttctatatatgtagaaatgaataaatatatatttaagtacagttttcatgaggaagttttaaaagaccatgttcctaagcttccaagaaggttttggatactagaagtattaatctatggcttttctcccagtaaaaccataggcctgaagttcacattgggtctttaaatcttttagatatatactggtcatttcagaaaattcttcatagtggtattggccttatatttaactttttttttattttttttttgagacaaagccacactctgtctccttggctggagtgtggtggcacagtctcagctcactgcaacctctgcctcccagttcaagcaattcttctgcctcagcctcccaagtagctgggattacaggcacccgccaccacgcccagctaatttttgtatttttgtagagatggggtttcacgatgttggccaggctggtctcaaacttctgacctcaagtgatctgcccaccttggcctcccaaagtgctgggattacaggtgtaagccactgcgcccggcctttttaactttaaacatgttttagaattcacctaaagatcaaaatatcatggattgaacctcatcaattgatagcagtgagtgactgaagcttccaaatcaagaaaagccggcaccaagaacttccattctaatctagagctgaccagtttgagctgattctctctttgaagagtccttcttgattgcagtgcagtactggcatttctgaatggatgtaagtggagtattttagtctaaaggcttttcaaattacttgaatttttttaaaaattgaggagctttatttctatttacccttccatttttgtatatcaaatttccattgtcattaaaaactgtatcttgaaactttgtgaactgacttgctgtatttgcactttgagctcttgaaataaatgtgatttttgtgtgattatctggtttccagttttaaacattaactgtcaccttttattcttaaacttgaaagtacagaaatcattaaattattaagttgtacaataaaaggattggtttcttttcttttttttttttttaagtgcttcctttgccgaaatgtttcctggctgtttgaacatgaattttt

SEQ ID NO: 14290 - DNA, 1174 bp, Homo sapiens
attggcctaccctaatcaaatcaggatataaggggatggaagggaaggtaacaaacttaatattgatttcaaatgggctaggcactattgttgaataatgattacaaagcactagaagactgaataaaagtatgataaaaatacgttctctttcaacctctcaacattcatatgtggtatatatttttttaaaacttgcccaaggtcacaaacttaatacgagatagagtcagattttaaacctagctctacttataaatcatatcattctttcactttatgctgccgcctcgctaagacttaaatgtaggccttccccatccttggcatctacctacccactaaggcatactcccctaatgtatgtgaaccttctctgaaacctggatccaattagtgttacctgaaccagctttcatggttctttccatcatagttgcaacagatgtagcataaaaaatagtgggagtgacatgctgataccttgcactgtctttgttggacttgaacgtttgacttggatttatatgcctgacaactaactatactgccttgtgtttttatcctgcagaggatttccaaagaaggccagtagaactgctagaatagcctccgatgaggaaattcaaggcacaaaggatgctgttattcaagacctggaacgaaaacttcgcttcaaggaggacctcctgaacaatggccagccggtactgatagatttgggacctggacttggaatgttagctacccacatacctttcttcctttctctaagacttaggttcttgatatttgtccacaacatcatcattattattattattatttttgagacagggtcacactttgtcacccatgctggagtgcaatggtgtcatcacagctcactgcatccttgacctcccaggctcaaacaatcctgtgacctcaacctcctgggtagctggaaccacaggcacatgccaccatgcctggctaattttttatttttgtaaagacagagtctccctatgttgcttaggctggtttcaaactccagagctcaggcgatctgcccgccttggcctcccaaagtgctggaattacagatgtgagccactgcacacagccacattattttattacccttgaatctcaacatttctcttgatattaggatttgaatccaaagaca

SEQ ID NO: 14291 - DNA, 1867 bp, Homo sapiens
agtcacagagcaccaagccaaaaaaagtacggccctcagccagtcgctatgcagcactttcggaccagggactagacatcaaagcagcgttccaacctgaggccaacccatctcacctgacactgaatactgccttggtagaaagtgaggacctgtaatccagcattcttgttaaagctgaaacactgaaacagccattgccttgaccaacatattcctttgtcacattatgtaaaaggcagaaacatacctttgactataagaaattaaaaaaaaaacaccaaaataatatttttcttacttgatataccaaacttagtttaagtagataatgctaatacaaatatacacattgcacagaaaatacacatttactgtccaatttaaaactttggaattgctgtgattaaagtgatcaaaatgccaaaatactaaaggaaatcaattgttcacaggtaactacaatttgtattatctacaagtgcctttaaacacaagatataggtgctgtgtagcctgatagtgtgaaatgtttaatgagggagttgtaccacaaacagtactacaatgattctgaagcacagtgtattcagacagatacagtgaaccaagtgcaatatgtaaggatgaaagaagaagagatgacaaagaaatccaagtaaatgccttgtctttgcaaatgtttttatattaaatcataaggaaggaactacttgccttaaatgttaatatcaaaagagttttctaacaaggttaataccttagttcttaacattttttttctttatgtgtagtgttttcatgctaccttggtaggaaacttatttacaaaccatattaaaaggctaatttaaatataaataatataaagtgctctgaataaagcagaaatatattacagttcattccacagaaagcatccaaaccacccaaatgaccaaggcatatatagtatttggaggaatcaggggtttggaaggagtagggaggagaatgaaggaaaatgcaaccagcatgattatagtgtgttcatttagataaaagtagaaggcacaggagaggtagcaaaggccaggcttttctttggttttcttcaaacataggtgaaaaaaacactgccattcacaagtcaaggaacccagggccagctggaagtgtggagcacacatgctgtggagcacacatgctgtggagattgcagtgtgtctgaggtttgtgtagtagtggaagattttaggtatgtagagcaagttgaaaatggattgagactgcatggtggcataaatgagaaattgcctgtagcatctagtctacttgaaggaagtggagacataaggagagacaaaaacaggtttgtgccataaagtattttttcaaagacaccaagatgtggtaaatgaaaattattagttcacttccctgctgccatgaaactttgccttaagaaggtgctggattccaaggtttgtaaaggcatctcggtaaagactgctttttgaatgcatatgattttgcatcagctagactgagttgattctgaccagacttgatggttttaagtcggaaccgataaattttaaaaaggagaaaaaataatttgacctagtagtataaaacatgaggctttaatggtactttgctatgaaaagaaaacactgtattccttatgcaaaacacatgtatctttcattatttataagtggcctctcttagctcagttactcaattcatacgtagtattttttaaaataattttatatctgtgtaccaccccatatatttcatattactgtttcacatgtacagctttctacttctttgtaagaacaccaaccaaccaaggtttaagtgattaataggcttgagc

SEQ ID NO: 14292 - DNA, 1161 bp, Homo sapiens
gatctgggtagtccggaaaacaaaaggagggaagacagcctggtaatgaataagatccttaccacagttttctcatgggaaatacataataaaccctttcatctttttttttttcctttaagaattaaaactgggaaatagaaacatgaactgaaaagtcttgcaatgacaagaggtttcatggtcttaaaaagatactttatgtggttgaagatgaaatcattcctaaattaaccttttttttaaaaaaaaacaatgtatattatgttcctgtgtgttgaatttaaaaaaaaaatactttacttggatattcatgtaatatataaaggtttggtgaaatgaactttagttaggaaaaagctggcatcagctttcatctgtgtaagttgacaccaatgtgtcataatattctttattttgggaaattagtgtattttataaaaattttaaaaagaaaaaagactactacaggttaagataatttttttacctgtcttttctccatattttaagctatgtgattgaagtacctctgttcatagtttcctggtataaagttggttaaaatttcatctgttaatagatcattaggtaatataatgtatgggttttctattggttttttgcagacagtagagggagattttgtaacaagggcttgttacacagtgatatggtaatgataaaattgcgatttatcactccttttcatgttaataatttgaggactggataaaaggtttcaagattaaaatttgatgttcaaacctttgtatgtcccttgtgtcagtccttaaaattttgctttttaaaaaaacaaaacaaaacaaaaaacacgggacacatttgacctaatttgtacctcacaaaaattctttgcatacatctcaagcggaagatgtctacaggaatcaatttggtgattatgacacattttacctctgcaactaacaaaccttgtttatttctccaagaagcttaaaaagagtttgtggagtcgcacgaggtcatgtatggcacttgtgttcccctcttcctcttccagttactaaaataatctggtgagtgctagttgtcttagccatagaaggaaaagcagacctatcaaccaatagtatgataacccgtaagtctcagcatggcttggggacaaaatcttta

SEQ ID NO: 14293 - DNA, 1204 bp, Homo sapiens
ccaacatgttcaactttgttaatatatttataaataattatttttatggtttagattttaaggcttgatgacaatgtgtctcagagcccttgccactgataagaacagggactcttcagctgggcccttccaatgtagaattcactaaatctctaaggcttgaaaggtacttgtgatagacagaatagtgactccccaaggatgtccacctcctgatccctggaacttttaaagatgtttcattacatggccaaaaggaccttgcaggttttattaaattaatagccttttgacaaggtggttagcctgaattatccaggtgggcccagtgtaaactcaaggatgttcttaaaagggaggcaggaagcttagggccagagaaggagacgtgatggtgaagcagaggtaggaatgatagggaaatgagaccacaggtcaaggaatacaggaagcctctagaatctggaaaagacaagggaacagattcttccccagtggcctccagaaggaaccagccctgccacaccttgattttaggacccgatttttaccacaaagtttgagttaacctgttacggcaccatctagtacaggtccttactggtcatcctgtggagcacccatccctgacaaatgaccatggcttctgcctaggtgcgtgccccattgaccaagcagtgccctagcccaagactgccctgtgccatcttcagacagctgtaactcaactcaaccttccaaccgttgttctttattttgagggcccacatagaaaatgcagatctcctttctacatggtgccctgaggtatttgcaggtgtgtccccttgtgtcttttctctaatgctatacccttgaagttttcttttcctattcctcatatcacagatttcaaattttcccttattaaatctcctacctcatttagtgttccaagtccactaaagagacttctggttgatataaatttagtaattccatgattgttgtcacttaatcatgaatcttcatgactagagtgtctttagtatacatttctccatcacatctacaaggatgtcctgggagaactcaccagatgccacattgagattcacctgccttttacatcatcctcccatccacagagttctccccattgctccatcatttctgctgtgacttattgttagcgagtgtctcctggaagagttttatttccctt

SEQ ID NO: 14294 - DNA, 1128 bp, Homo sapiens
atgtgtgggaactgagaaaactatgtttgggattacatttttattataaaacctagcattttgggtgggttattgttttcttagggaggcaggtaccagccaaccacattgcttctattcacactggaggggaagaaacacttccatttgtgcaggaacccatccccctacttctgtagcttctagtaacaccactgcattctgcagttggacctgctatgcaacctgagtgaaattgatcgagtaacttaacacaggcaatgaaatgacctgaataactcaatttctttctagtaaattaatcttgggttgtatcatggataagacacctttgaaaacaactaatttggcttgacattgttcctttaaagattttataagtaattgcccgctctaagcatgtctaggcagctgcattttaattatgcatccccaccgaaaggtagaagtcatgaaaaatgatcctgaaaatagcaaaatacctgaagaatttcacatagatttaacgtattgatagacaggtgagtgttcagccactacccaccttaacaggatcttcagggaaattgttaggaggctagttgagcaccaggctgtccattggaaggccagtttgattcatggtggcgtaccaaatgaggcaatgtgttaccgtgaaagccaatggcagttgaattctgtaggtaagacactgttgtgaccagtatttatcacatcactccccagcatctagtaaaatgcctggttcaaattaggtcactggtaaatttgggttgagcagactaaaagggattctaccttccccaaataacagaaagtacagatttttttttttaatgtgacttgcctttctaaggtttagccagtatattctgttgtattaaacatagtcttctttttaataacttttcttttctcggcaggttcatataagtaccaccgggttaattgtgaccccgcccccaagcagcccagtgacaactggcccctcgtttactttcccatcagatgttccctaccaagctgcccttggagtgagtatagtttctcccatttttatttctcttttaggtctttagtcatgttaatctggcacactccacctcctaacacctgcagcgtatgttc

SEQ ID NO: 14295 - DNA, 1191 bp, Homo sapiens
agaaagactccagatggagttgaggaggagatgcattagtgagagaggaaggcaggaaaggacctatcagaatagaggtttgagaactaataaaatggcgtgtagagtccaggcatggtgcctcatgcctgtggtgccaccattttgggaggccaagacaggcatattgcttgagctcaggagtttgagaccagcctgggcaacatggcgaaccccatctctacaaaaaaacacaaatacaaaaattaactgggtgtggtgatgcgtgcctgtagtcccagctacttgggtgactagggagagaggatcgcttgagcctgagaggtcaaggctgcagtgagccgtgattgtgtcattgcactccagcctgggcaacagagtgagaccctgtctccaaaaataaaagaaagggcatgaagaaaaagcagttaacatttattgcatggcatgaattgcaccaacactttccggtacattacagtgttatctatcttcttatcttcattttacagataagcaaacttgagtatatttatgtcacagtgtgagttaatggtgggaccagggtttgaacttatattgtttacttttctaatagtgcttactgactctcaccatgagctaatgttgatactgaaaatactgcaattacaagcaagatatggtccctgtcctcactctgttattccagtagggaaggtggactgttaactatttaattacagcccacgaggataggtgctgtaggatgaggaatgtagtaggagagttcccgggggacgataccttaaactgacttggcatcagggaaagcatcccggatgaagtggatccttatctgagaactgaaggacaagttggctgaaaggacactctttttctataacttgctgcctcatttttttttttttttcggacagggtcttgttctgtcactcaggctggagtgcagtggcatgatctcagctcactgcaacctccgcctcctgggttcaagcgattctcctgcctcatcctcctgagtagctgggatcacaggtgcgtgccaccgtgtctggctgatttttgtatttttagtagagatggggtttcaccatgttggccaggctggtctcgaacttctgacctcaagtgatcaccttcctcagcctcccaaagtgctgggattacaggcgtgagccaccacgccct

SEQ ID NO: 14296 - DNA, 2822 bp, Homo sapiens
ctggatgcattcagctgaggatgtgcctgatagtgcaggcttgcgcctcaacagagatgacagcagagtcctcgagcacctggcctgttgctccaacattgcaaagacacattatcagtccctatttctagagggattactttgaattgagccatctataaaactgcaaggtcttgcccttttttttaatcaaaactgttctgtttaattcatgaattgtatagttaagcattacctttctacattccagaagagcctttatttctctctctctctctctctctctctctctctctactgagctgtaacaaagcctctttaaatcggtgtatccttttgaagcagtcctttctcatattgagatgtactgtgattttactgaggtttcatcacaagaagggagtgtttcttgtgccattaaccatgtagtttgtaccatcactaaatgcttggaacagtacacatgcaccacaacaaaggctcatcaaacaggtaaagtctcgaaggaagcgagaacgaaatctctcattgtgtgccgtgtggctcaaaaccgaaaacaatgaagcttggttttaaaggataaagttttcttttttgttttcctctcagactttatggataatgtgaccgggtcttatgcaaattttctatttctaaaactactactatgatatacaagtgctgttgagcataattaaataaaatgctgctgctttgacagtaaagagaaggaagtattctgattagctgtatctggtattaattgcatgttaaaacactggaatttttaaaattgaaattagatcagtcattcttttcttttctcaagatatctcatggctgacactgaagaagaaatgtaattcataacttgcactaaatgtatattttttttcttaaaaatttaccattcttatttatatttttatggattaaaatttataaaatacagatcagttaatattgcacttaagtaattttacctttttaatgtgatttttatagaataattcagacttacaaatacagagatatgaacaaagtttacagtgggaacaaaggtttaaaaaaaggttgtggttctctctctgtgatccagtgtgcacataaacctttctctgatctttcactgccatcctctggattatgtcttctgacctgtccattttgacccattaactggaaagttgaaaaactacattaactggaaagttgaaaaactacattactttggagaataaaaccgaaagttcgtgtataccttcttaaaaaaaaaatcaaaccaaaaatgtgaaaacaatagaattgcaaagatagcagttaaaattttaatctgaaaataacctttgaatctcgggctaggttacgtccatatttgaagtggtcagtgatggtttgaacattttttgcaggatgagtgaaaatgcactggattatatttgggatttttgtttttggaattgtctgttttaatcacagccttaattcacaattggcaaaggcagtttactcaaaggactgggctaaatattctgtaattatgcatttttgataggaaaatgaaatttttgcaaacagacattttctttttttttggctggagtgcagtggggcatggtcttggctcactgcagcgttgaccacctgggctcaagtgatactcccgcctcagccacccaagtagctggcactacgggcacacgccaccatgcccagctaatttttttgtatttttagtagagatggggttttgccatgctgcccaggctggtctcaactcctcagctcaagcaatctgcctgcgtgagcctcccaaagtggtggaattacaggcgtgggccactgcgcctggcccagacagacattttctgaaacacaactggcaatgagctgtttttacattttgaaagtgattcttcacttcctagttcttaattatagtatacctattaagatctgtaagatcctgaagacataagatcatgaagccatataagaatgaggattgaaagttgagcaaaattttcgggattttgggaaacattcttagctgtgctatctgcctaaaattattccttattacttctctcctttgacagacttcaagttttcttcatagccctttcaaagttttttgagccatccagagtaaaatcatttctaaatgatagttctgtatatctccaactcgtcttaagtgtatttgcctgtgtgcaacgtattgctagactatgaactcctcagcatggctgctggataacttaattgtcctgagttaatagccttcaaaggacaaatcggtttctttgcagatagcttcgtaaaacttcacatggagtttattttatcatatttcccttttttatttctgctcctcctttaattgcccatcttgcttcagagactgacatttcagggtggatattaattaaagcattaattttgttttttggtatatttctatccctagtatttctatcttactgctaaaatacaggaaaagtgccgtatttttaatgcatttagtggttttctttggtgttatctgttccatttttctttttcatacattgaagtgtgtctccttttcaaccaaaataatgaaatagtggagaccatgaaattgttgtgcctggctaattggcaaattaatttaccaatataataagtgtagcgccttgtttgaataccctttttgagaaggtatgatgagaatgggcaagggtgtcagcatctcttcttcttaataattaattgttttcagttttggttcacgaagaatgcttagttaatctgtaatgttgcctagagctgtatttatc

SEQ ID NO: 14297 - DNA, 1212 bp, Homo sapiens
cttttcacaatgactttaaagatttttgctttcatctcttggtccacctaacattttcatgcttcattacttaaataagaatgttggttttgagaaatagcattttaaacaaattgtggatcttctccttccaaaaaaaccattaggaccacatctgcaattaagatttaatattggtgagaatgagtggttttatttaattttcccttaaaagcaaaggagacagtaatcttaataaattcataggggccgtggccacatcaggtaatggggttatgatgtccaagattgcatggatcacattggtgatgagagcagacccagatgtttagtcctcactctgtcaccatctgaggaggtgaccttggacaactcccttcctctctctgggatttaatctttttcatctgtaaaatatgcaggtagtactcgagggtctacaggatcccttctagttgaaacatttatagttcacagaaagtttgcagtcttccaggataaccaacccccgttgcatgagacaagcaaaaaatgggtccatgaaattggatacttttgccatccaaactttacaacaaacattatctggctctgtaattgagagcagtgggcttggttttaaacctagccttgattagtttgtttatagataactgttgtggaaggtgatagaactagtcatggagtttgatgagacatctcttgaaaaggactgaactgttgacttctggttagaagtgctttgggcagtcacataaagaaatgagcagtgagaaatcaggagaaattatgactcctgttgggctttctggactagcattgtatgtttttgggttgcagaaaagttttaacaccacctcttagaatataaaaattttccagttgtcatggaggtccacagattcattaccatgggtttatatgcccaaagcaacaacagaggacttaagttcattttgtgatactgtatggatgttaccccatcctattcagttgtcattccacccaaacccatgtgtaggtttccacatggaaaggagaaggcatccattccacctagacattgaatagtgataataagctaaaagtgggcagattttcagtggagcaagagcagaaatatgcggccaaagaatgtttcctgattggttttgctgctttagactgcagtggggagagcttatgtagattttcaaaactttctccctcttt

SEQ ID NO: 14298 - DNA, 1105 bp, Homo sapiens
tagcactttctgaactgtgttctatgaaccaaggtgtattatcaggcattactttaaacaggggttttgggccagtaaggttgataagtgttgcatattgtatcaccccctcagagatttcacggcatacattggtacgttaaaagctttgaaaagtactatagaaaagaaacttcagcattttagcatatctttcacaaactgacctggtcactgatccagtttttaaagaacatccagttttctttaaagaactttagtgtcctgagagaagagaaagcgctgtggacagatggacctgtcttcaggggaggaatctggctgcctctgctcgctgaattctgccttgaggccttcctttcatgttcatgtgcagcatggtatcatccagctgtgtaaatcttaccatccttcaagatcagttcaggatctacctgttctctgaagattttcctgaccacttgagtccataccgatatatctgacctcagcaaagttcctgattatgattgatggtaatgctctttagcacgtggctgtttccccagttggttcctaaactcctcaaaagcagacacaccctactttatattattcccctgtccgctgctgagtagcccctggccttactgccctcgagggagaggttaaagtgttccagtggtttttgtttggtttacaaatactcttcgtctccctggtcttgaaccccggttgagacctgcagttcattctcaatcctcaaacttgaggtgctcatgtgatcatcttacactcatatcagcacttatgctccccatattgttttccatctgaacacctctcactgatcttgcggttatttatcaaaaaagatttctgtttacagtgtatttcacaattaaaaattctactgatagttaaaataggtttcctagaacaacccctgcttggcagtcacctccatcttgctacattgccacagagcctgatgaatctgctaagtatttatgtttaggaatttcttttatgcaggaaaccccaacgttaagtggttccttgactccagttatgagtcaaatggttttaagtataacccatattagatttctattcatacagaaat

SEQ ID NO: 14299 - DNA, 1208 bp, Homo sapiens
aatgtacattccaaagatggaaacctgtgtttgcttttcatctacgtttatagagaaaagcctcactgcctggtcatgtgccatgcatggcctatgcaccctagacccctacaggcagctaccaaaagtgctgcatagccatttgggagaggtcccttacaaatccagtctgttctagatatctagggccaggccagtgtttattaccactgtggttaggttctctatttgcttctcattcacatgaattactgtgattctgaaattgcaattaatggtaactttttttttctctgtggtattttacggaaatgtatagtcctttgctcttagagaaagaacccattccagtgttgacttcaagaccataagttatttcaaaactatgtaaagattgacaatccagtaataacctgtcactacacatacccagattttccctgtaaactgtaatatttaacatgaaatgttaaattctgatgccagagttcatcaaaaactaaactgttgcctgctttttgcgtctttattcatttttttagatcagaggcttcgaaactgcttactgcattgatagcatgggaaaaacaaatggaggctttgttgaactaggaccctgccacaggatgggagggaatcaggtaaaccaccttacttttgtgtttaagttgttccgtattgagggccatcaggtttattgatcacagagtgatctttgtactttggttttcgatttggtaattttgtttgttttgataaagtaaaacattctgtaaaaaaattgacagtgttaaaacattcacttaaatgatgggaataatagcagtattggttttcacataagcagtcagaatctagaattaatgtctaatataagggattaaaatatattcctgtgggagtatatatttgtcactaccgtaactatgtaagcctagctccctaacaattttttgcaagtattgctcactaatcctcatctttttgcaaatagagtgttactgccagtaatgtatatttcactaatatatattctcttacttatgtgggtatgtttttgctttttcattttttcacattgttggtacttaataaatttgtgttagtgacccatttggtatcttagagactaaagaacttaatgatttcagtgttaataaggatcttcactaacatcaaaataaatataatttgtctgtggacttaca

SEQ ID NO: 14300 - DNA, 1316 bp, Homo sapiens
gaatcatattttgtaaaccaactaataatttgaactgtttctttttctttccagatgctgtctatgtactgtgctactctttgattctactttccattgacctcactagccctcatgtgaagaataaaatgtcaaaaagggaatttattcgaaatacccgtcgcgctgctcaaaatattagtgaagattttgtagggcatctttatgacaatatctaccttattggccatgtggctgcataaaaagcacaattgctaggacttcagtttttacttcagactaaagctacccaaggacttagcagatatgggggttacatcagtgctggtcattgtagcctgagtatacaatcaagcttcagtgtgcaacctttttttcttttgccattttctattttagtaatttccttggggaactaaataattttgcagaatttttcctaattttgtttatcacgttttgcacaaagcagagccactgtctaacacagctgttaacgaatgataaactgacattatactctaaaagatggtgtatttgtgcattagatttgcctgaaaaactttatccatttccattctttatacaaataccatgtaatgtgtacatatttaactaaagagatttatagtcataattattttattgtaaagattttaactaaagtttttccttttctctcaaactgagttctgaaatttatttgattctgatctgaaactattgtcttcgtaaaagttagatctgacttcagacagaaaccaataccagcttccttttcctttaaactttgaagagtgttgatttgttactatattactatgcaaaactggcagttatttttataatataaatttataatttgattttttattttaaaaactgggttaatcaagtctcggtaagtcctttaaaccatttaggatttttaaaacatcaaaatttatgatttacattcataggaataaaataaaatattattagaactctggtaaatgtttgcttgcttatatgtggtgtgattatgcaaactttactatttttgtaatcttgatgatccccgttcagagtccattgagaaagacatattgtgaagaacagtaaacactctttactcattggttcagtgaatgtctatccagggctttacatgtgttaacattgtgcgaggtactagacatgggccctgctctcacagataatacataactgggtactgagaagaaaaaatctgctgaatggagagcaactatatgaagtatatcttaattaacaattatttaatagttaaaatatgcagcattagaatgatagag

SEQ ID NO: 14301 - DNA, 1193 bp, Homo sapiens
tgttggaattgttaatggaattaactgcagagagaatacaaagatatttttggttggtaactaatcaagagtattatctatttttgataactgatttatcaaaatattaaataatatatatagatggatggtttggagacattttcagtgttgtgaaaatatcactggtgtttttcggcaagttattgatgagatactaaaaatgatgtttttgtctagtacaaatggtgtgatttttctaaagagcagttcaaaggaaatatgaaatgaaattgcatataagatgattatgcagcctactactatagaaaattataatattatttagaaatgcaaaaagtacttaacttacacttcaagaatatgactcataatcgactcctctttgtcttccctctggtcatacttaagtttattcatagtaactgtacttatagataagaaaaatattcaaatttattttaggctaaaaagcataatttcaacaactaaaatgctatgctttattatgaattattgatttacttaatatattatttattatatttcaggtttgaagaaactgcagagttactgaaatgtccaaatcactacttgtaggattttctacatgaacttttttctaggactttggttactatacatattgtatattttaagaattctttatacaattttaatatactgcaatactgcagtttttgacaatttggattccatttggtatatgaatttttgcattcattattgaataactcttttaatatttttgagcaatgattatactgctttaccttgtgtcactttttttttttttaggaaaaactcatgttccagtatatttctcttacagagtgaagtcattacagcactgtatttctgtgttgacatttgttggcagtgtgctaagtaatgttttttaaagcacaggcttgaggactatggtttacatcctgttggaaacattccaaatgggacttgtgtattatacccaggaggctctcatatataccatcttggcatctgtactgatgaataagttataatgaacagttaaaaatgctcattgaaaattaaataaaacaaaaaggcagttatttcatgcttggtcaaaaacatcaatacctttccaattaacactgagaaattaaggttaagattctccttttgtactgggaaacaggctggaggac

SEQ ID NO: 14302 - DNA, 1138 bp, Homo sapiens
gaacagcttatgtgttagccatagctgaaaataagcacaaatagcttatattcagatcctatcttcatttgaatatagcttttaaatgaaatgttacagtttgaagttttccttcatgcacttggtgataaacgttttctaaatttttagttaagtatatggataaaaagttatgaactattaaaaatgtgatgtggaccaaaggctaggttgtaatcttgatagtctaaaaaatgatcaaaacaaatgattttcaaggaatattcaatattctgcctttcagaaagtgtatttatatctgtgcttcataaatattaatgttcttcagaacatcattttaaaggagatacttgaattgttatttaaatcaaaccagatgtaaaacactcacatacaagttcatactttaaaagaggaaagctacttaacaatgacaaatatttcacaataataatttttacttatataccatctttcaactgaacatttcagttcttccaagagcttcttagagtagtatattttgggggcagtcaaggaataaactacagtgtaaacatatcccagatgaaaactgctgtatggaaaaatgacagaaagtaactgattgacactgttgattcacagttcagcctcctatctgggaaagacatttctttcctctgctcactttaagaacttttaccgactccaaaaatctcaggaattaaacttttaacagttacagcaataaagaatagttagtactccaaaaatattatatttaagatgctcaacaagaaaaaaatgcaaatgtaatatttttttcaaattacttctttattgacttgtccaaatttcaaaagtgcctacccttcaataaaacttttttattctgatctccataaattacttagtcttctatgtatagctatcaaggaaataaaaccaattttgccacagccacaactgtaaatgtttttgtacccatgctgaaactcataacaacacagacataaaaatagctgtgaggttttgctttttttgttgtcagctatcttaagaatcattaaatacacctgctttgggtaaaactctttgcaagcagtaattaacactagtaacagtgaaagcacaagatttccaaatcagtcgtttt

SEQ ID NO: 14303 - DNA, 1178 bp, Homo sapiens
aacaaatgtgttactaccagtgtggaaactcatatagtaaaatgagttaacttaacaattaacataatacttaaaaatccaaatattaactccgcttatttcttggtattggcaccagtcttgttaattctggtgaagttcttgtcctctttgggagactgaattgagccacattggtgtcatttgcatctttgagagacattttaatgtctacttgcatgtgaccaaaagtgacatgtacaatttattatacttggttaattattgagccttgtttatgtttgcatattgttaaatttaaatggtggtgattgtttatactttagagctccagtggaattgtatttgcttgaaatatcgagtcctcttttttttttttttaacttagttgatgttacagaaaaccaaattttggatttgttcttttcttactagtcaaagtatctcagctagtaatccttggaggagtatgggaggatgccagtaatctcatactgacatttttttgttttggaataagctggatttcacaatgtatttatcttctgcatatttttattaaattagtggcacattatgtttctgggccgcctcttttctactttagtattactgttatggataaataacctaagaataattaagatctatttaaaagtgatatactgctcataaatttatattttccttaatttacttacatctagagaatatatttgattggaatgttaagcagttgtttctttatttatcagcagaatattcaacaaaaaataatgtaagtatatctaattagaagtattttaatagctatttaaagtcttactctttacgaaagaatacacatttttatatatttaaaatatctgacctgagttacctagcaaaacatcacaagccagtggaggtagctgtgttatgaaaacatttgatcttttgggagcctttttgttgttgttgttgtttgtttgtttgttttctgtttgttctatttagctctctagcattggggtctccagaatggagacttgctatatgaacagacgttaatgttcatattcagcccttaagtcagatagatgggcacatgccttctacaatatgcagatattctggaggaaaggaggaattctgtaggtcaagaagttcaccatgctacctagtatttattcatttgc

SEQ ID NO: 14304 - DNA, 3475 bp, Homo sapiens
gtttttttttttttttttttggtataagaactaacatcaaaaggcctgtttaaagggaaaggttaatgggctacttaatattatgaacaaaacaaaaaaacaaggctgccacagtggaatattatcttacaagaataagaactacataaaacagatttgtaaaaaatacatatttgaagtattccctgtatttccattattctttatggaatataaagtaagcatgaaaggtagttaaaactttcaggtgcctgtagagtcataataactgtattttatgccttgcattcacgcaaattcacattggatgtgatttaaaagtagacattctctttttcctcttttaggatatgtttgattactggaaaattaatatggttatttgttagaagtctggtttataaaaaagccaaaagtgatggaatttattccatttgtcttaggaaggcccataatacttgtttttcttacatgtgactagcaactttctccacttaaagactaaatacctctttatatgatgtaaattattctaattcattttaaaatcttttaggtcagcaaaatgtgtgtcttcagtgctttctctaaaaacgttcctttatagctttgtacttttttttttagcgttgccattgaaagttaaaatgtttgcatggtttaccctctgagttatgtttcttctagtgagcatgcctgctgtcactaagtgaattatttactactttttgtaggtctatattttaataattattgggataataataattgtggtatgctttccatttacaaaccactcatatactttagtgtatgtcatcctcaataatctaatgaggtaagtagtataagtgttagctctttgcagataagaaactgaaacccagaagtttattgaattgcttcattgttacctagccagcaaggagtggaattaaaacttgaactcagatcttctaattttctgagctcatcctttctcttatacctcagattgcagactaatcaaattttacttaaaaccttcctgatatttttgttaccctggacaccctttctattctagaaaaggtttcccattttatatggaagtgactaattttcaagctgccaacaacttatatcgaggtaatattttattctctgaataaattcatttcacttatattaaaagcataaggaaatctacatgtatgtaaaaataacttagaaattcagtacataatacatgattgaatacatgatcgtatttaacatgttttttttttctgcagtggacaaataaacatcctcaaagtagcaactgcaaatcagttacccttagaaaagcaagaccaaacactgtagttacactattagcagtgaccaaaaagggctaatattttctaagaatagtttaaattacagacatttgttatatttaccttatgtgaaatacatcactatttaattacattaattttaacatctgttgtgtggagttgtatagttcatgcaaaagcctgtgggtatgggtttttcaaaccagcagaaaggtcaaaggtacctgaatgctaaactgcctggctcccagctttttcattaaacttttcagggtcttggtttctttatctgtaaaatgacagagttggaccagttaactttaatggccatccttttacaccacacaagttgataaaatttatctgttcagcaaagagattgaacaaaaaagcacgttagtaatatgaagacaggaaaacgaatgaaagtctaacacataactcatattgatttactttatttctgttagattttacactctgaaaatttcacctcatttagtttgtacaaatactagacatggaaacttaaaatgtgcaggtgtcaaagcttaaaaatcaggtgtgtcctctttaaaggcatgtgcgataagcctgcagtcttaaccagacctggtaccagtttaacagttcatgatacttctgtgatgagtggatctgttagtctggtagagattaatgttgaaatttacttgaattacagttatttgacaagcccactttttttggagtttggtgaggaagataagtaaaaatgcccaactagtacaatgtggagaaagttttctgtttgcttgactaagggaaattgctcagaaaaagaatgctccaacatgggaataaggaccttcagtctcaggaactcatttttgggtgcagtttctacatttaaaaaattgacttgtgttcagtttgataaccagttcatttgctttagtctcagtgttttaaagaagtctcataatgttctacaaagacacaaagcttcaggcttatacaaaactgagtatgattagaaatacctgagcccagaaatgattctgagaaaagagaataatttgaagacacttatttaaaagtaattatggttagaaatgaattaatttaaaaatgtgttcacatatccctttctctaacagtttaacctagacaaacatctgtatcagtatttttttattcccctgattgattacatttggtttctttattctgaaaggaaaataacaaaaacttcagaaattcctaagggtgtaataagaaagtgggttttgagtttcctttcctggaattattttacagttctttggtgggtctcgtcagccaattcatagctgggctttaagattatcatcttagagatgatagatgggctttttaaagatttcatcttagagatgaaaagctgggctttttctctaagatgataatcttaaagcccagctattaattgataatgaacatttttcactatttttttttctatctgaagcttagagatctagagctttggatctttcgggtatatgtcaatggaggtattattttataatactttgcattgacatgaagtgggttcatgggggaaaaccatgagctgtgaacattggtagcaaacaagcatatattcatttcaaaactttccttgcttttagcagagagaagcctgtatatgttacatgtgtgactttcagtagtttaaagagatgtttcaaaaaattgttgcatgtttttgatgcaatttgggaaattgtttacttcacaatgtagtcattcataaaaaaattcatgaaaatactgaacatatgtttgaggatttttcttttcctttttaaatttttttattttttctgagacggagatctgctcttacgcccaggctagagtgaagtggcgcgatcttggcttactgcaacctccaccccccaggttcaagcgattctcctgcctcagcctccggagtagctgggattacaggcgcccgccaccacgtccggctaatttttgtattttcagtagagacggggttttgctatgttggccaggctggtctcaaactcctgacctcaagtgatccacctgcctcggcctcccaaagtgttaggataacaggtgtgagccaccgtgcccggctgaagatttttcttaattgcaat

SEQ ID NO: 14305 - DNA, 1193 bp, Homo sapiens
aatatacctttagataaagggaagctcagaattatggccattttctgcgtgattcaaacaaatttgtaagagagatgcttcttttaggatataagcttttttaaaggcgacgactaattactggtctattttacaatgtcaaattaatgataacagcagtgaagactatatggcactaatcacatgtgcctagggttagcctgtacatcatgataacttttgtataaacttgtaaatttacctttttttcctgcagtgggcagatttgtccttcccattctgcaaccatggcaagcgttccaccatgaaaacagtattgaagattggacctaacaatggaaagaatttttttgtgtgtcctcttgggaaggaaaaacaatgcaattttttccagtgggcagaaaatgggccaggaataaaaattattcctggatgctaatatctgtagattctctggcatttagtctcttcaaactgtgtataatgtttggtcctcctctgtttcatagaaaagtcatagaatatctatgatacattgaaaagttactgcaatatttgagaactgttctttttttttcttgtgtgtgccatctttccattgttggctacgtcttttcttttgccttgatgaacgttctatgtatttcatcggatatacagcatattccatttaggatgtgtatttaatgcatttagtaatgacgataaagtgtttttagtatgcttttagtctcttgtaactggggagaagcagtgttttttttttaggaaaggattatgcgacacaataaaataagatattctgtctgtagtgaatacatttctcatgtactaacactatttataatatatgattaaagatatttcttgttttattaaataataagaaataagatctcctttatgaacaagtctatttttaaaattctgttcaaccaacattaagttcctgttagaggctggggctatgccaaaccttgtatgacttcaaatttgtgttctcatgtaaagtgatgtggatgcagactataaaagtaacatttaagaaaagaagaacttgcgtgtaggcgtttaaaagagaggttgatttatatttttctaacgccctctccccgctgcttgtatttaaattttagcacagatcactatgattgttcctcctcgataaaaagtcactcttaaggtgtttctgt

SEQ ID NO: 14306 - DNA, 1134 bp, Homo sapiens
tgggtctgcagtaatttaacagcattaatgcagttatagccagcagttgattcaaagttgctgtacaaatgttccttatcgcccccttaaatcttatacttcttggtccctgaagatttactgattgcctcagaattaattggaaagtctacttttcttcatgtgagcaccatatatatgacttatgaaaaaagcacagagtttatcattttaaaaattcatctctaaattattagtcttgataacgctccaaaaaacagattgccacaaattaaaacccaggataaacacaagccctttagagaatatgcgttacactgaattaaaagggacattgtcttgggagtatttcaggtctgatttttgtgaataacgatggattgcatagcatagtgttattttatccttaggttgaattatctataaatcatgataatgttggcctgaaaagacagatgttcattctcattcttctgcttttccaacagccttgcatctgtcatcagaggccaagtactgactgctgatggaactccacttattggagtaaatgtctcgtttttccattacccagaatatggatatactattacccgccaggacggaatgtgagttagtcccatcacactatctctgaaggatttgaaatataaaaactagaccttcctgtaccactgtcatgtttgactgtccttttaaatatggaaatgcagcaactttttagactctacaaacttgtgacagtacatatggcagagatttaaagtcatatactcacatacttcttcaaaagttgattttattttctaaggcatggtaatactgtagttttgtaggagaatgctctttgtctcagcagatgtatgttgaaatctttaggggtaatattttataatgtctgtaacttgagctcagatggttccgagaaaagagtcaatggaaagcaaatttggaaaaaaaaattggtgaacttggtgaatacacataggacacaagagtatttattgtataactcttggaatattcccatagatctgaaaatatttcatataaaagttgggagaaaaagttgattttctttataaagcatattaacttaaggaggtgtgtattggtagttatgtgggatccaga

SEQ ID NO: 14307 - DNA, 1129 bp, Homo sapiens
tcactacgtagaggcctatttgctatttgcctgtaactagcaaatctttctgtgagctgaattttaaaataaagtgttatttcctgtatctatcttcattcattactttttggtttattttactgaggctattgaaaaaactattatcagacagtttatctcagattaatgccaatttccctgaatggtctaatttactcttctggcgaattaactgtagtgcagtaacttactaaccaggccatttctttttttattaaggtacgtctggaatggcccactgacctagccattaaccctatggataactccatttatgtcctggataataatgtagttttacagatcactgaaaatcgtcaagttcgcattgctgctggacggcccatgcactgtcaggttcccggagtggaatatcctgtggggaagcacgcggtgcagacaacactggaatcagccactgccattgctgtgtcctacagtggggtcctgtacattactgaaactgatgagaagaaaattaaccggataaggcaggtcacaacagatggagaaatctccttagtggccggaataccttcagagtgtgactgcaaaaatgatgccaactgtgactgttaccagagtggagatggctacgccaaggatgccaaactcagtgccccatcctccctggctgcttctccagatggtacactgtatattgcagatctagggaatatccggatccgggctgtgtcaaagaataagcctttacttaactctatgaacttctatgaagttgcgtctccaactgatcaagaactctacatctttgacatcaatggtactcaccaatatactgtaagtttagtcactggtgattacctttacaattttagctacagcaatgacaatgatattactgctgtgacagacagcaatggcaacacccttagaattagacgggacccaaatcgcatgccagttcgagtggtgtctcctgataaccaagtgatatggttgacaataggaacaaatggatgtttgaaaagcatgactgctcaaggactggaattagttttgtttacttaccatggcaatagtggccttttagccactaaaagtgatgaaactggatggacaacgt

SEQ ID NO: 14308 - DNA, 1214 bp, Homo sapiens
taagaatgatttgcaagagagtttatcagcagatcacttaaaatcatgggaaaattctatttttgatagaattttaaatatttgatttagtagaatcaaatagtttatttctatttttgatgttttgtttaattgcttaataatttttgctttaaattattaaccaaaacgtgtatttccagggacatcaataaaaaaatgcataggcaagtttctaaagtgactgctgtacatttcaagcattaacctgaacactatgaaggcaatacttttattaatacttgatctattccaattaccttctgcagtctagtttttaaaaatcattagttctgcccaggtttcaaaggagaaaaggaactggggaaagagtatgttgttcagattactcaaaaaattgcacaaaaaataaaaacagattagtcagattttctcagttcatcggctgtgtccctggagtgtgttgatagttgcaaggttgaattaactctttcagggtgttccatttggcaagtcaatattccggatgtgctaacttgttccataacggttcaagagtaaatgcagcttccacaagtgtccagtttcctctttaaactcgttctgcaactgtctagattagatgatttgatggcctcatatctgtgtgcatcatcagcttcccttacacggtgattgtcagatatttaccctaacactaagctgtgtacaccagccatttaaaacgattgataataaagcaataagtttacacatggacgatcagtgcaagagaacttttcatgttttacaatcacagaactgaagattgacaaatgagtgttttctggagactttgcagcatctgtggctcattcctctgacaataaaataaaagcaatgccagcagctctcactcctggatcccgtaactcctcagcctcccaggaaggtgttcagcacagagaaagtccctggcctatgtttcaggatcctagagtggtgtcagaatatcttgaggctgcaaatgcagaaccagtgtggacactgcacttctctttggagctctctctgggttggggaaggcagtctatgaaggagatagataggatggttggggatactatcatctacatgcttcaagtcaccctaactcctcacttagctacaccgccctcccctaccccatcatcaccactaccacttctcgtaaacacacgtactgatgatatact

SEQ ID NO: 14309 - DNA, 1164 bp, Homo sapiens
tatacactttatccatttttggctaattttatgtctttatacaataatattgtgactgctttgcccctcccccaagtacactagaaattaaacatgatttgagtggttcttcactcagatgagggggggaaagccaccttactaaataattgctaattatggatagaactgcattccccatatgctcttttctcctcaaaatattgtctgtaaagcagctttgatcatgcctgtattatgactaatccagatccattgacaaatctgctggttggctatgaatgtctgggaaaataatggtactgtcgtgacaggcagcacattgtgaatctcgagccactaattgcagaacccctcacaattaagcatccaagcaaattaggcagagaaacgttaacaacacgcaaggtcaaggataactcaattaaaatgaaaatcattttctctagtggaatgtttctgtgcatctgtggtcactaaatctgcttttgcatctcccgttcacaaacactgagtaacagtatgttctctctttacagtccatggttcttctgcttcatagccagcggcagtacatcttcgaatacgatatgtgggaccgcctgtctgccatcaccatgcccagtgtggctcgccacaccatgcagaccatccgatccattggctactaccgcaacatatacaaccccccggaaagcaacgcctccatcatcacggactacaacgaggaagggctgcttctacaaacagctttcttgggtacaagtcggagggtcttattcaaatacagaaggcagactaggctctcagaaattttatatgatagcacaagagtcagttttacctatgatgaaacagcaggagtcctaaagacagtaaacctccagagtgatggttttatttgcaccattagatacaggcaaattggtcccctgattgacaggcagattttccgctttagtgaagatgggatggtaaatgcaagatttgactatagctatgacaacagctttcgagtgaccagcatgcagggtgtgatcaatgaaacgccactgcctattgatctgtatcagtttgatgacatttctggcaaagttgagcagtttggaaagtttggagttatatattatgatattaaccagatcatttctacagctgtaatga

SEQ ID NO: 14310 - DNA, 1120 bp, Homo sapiens
cgccaacaacatccagttcctgcggcagagcgagatcggcaggaggtaacgcccgggccgcgcccgccgagccgctcacgccctgcccacattgtcctgtggcacaacccgagtgggactctccaacgcccaagagccttcctcccgggggaatgagactgctgttacgacccacacccacaccgcgaaaacaaggaccgcttttttccgaatgaccttaaaggtgatcggctttaacgaatatgtttacatatgcatagcgctgcactcagtcggactgaacgtagccagaggaaaaaaaaatcatcaaggacaaaggcctcgacctgttgcgctgggccgtctgttccttctaggcactgtatttaactaactttaaaaaagaaaaaaaaatgtgtacagtgtttccaaatagtcccgaattgtcgacctttgcttacaagaagtagtctgtctgcataggatgtgatagctatctctgttcattttacaatgtggggcaaagttactgtttctagacaacccaactgctttccctgtgcagctttgtagaaggacattggcacagtgacttctgcggcggggatttattaatggattttacaatgctaacgtggtttcccttcggggaaaaaactggcaactagaatccttgtcactgataagcaaaggaaatcctgatttttttgtaaattatgtgagacaagttgtttatggatttttatatgaattacaatttactgtacatcaaatcttagtctcagaggagttaatttatgtaaagtgtttaaaaatttatacttaaaaataaaatgataaaaacgtgaactgtgtgatttttttaaaaggattgcaccttttgttatctgttatagctgtacagtatgaattattatattgtagagatataacaacttatgcctataatgtccagaagtgttaatatttttgtattaggttgaaaaaatgtgcaagcttctatcactagatggataggaccgtgcaattctaggtgggtggcgaatcagagagctcctttctcttccctctctcacgcatcaggccagtgtcctcagcattgtcaactgagaggcacagtagacaactagggctggtggaa

SEQ ID NO: 14311 - DNA, 1401 bp, Homo sapiens
ccgaagtgcagcaagattgtcattgactttgattcaattaacagcagaccgagtcaaaagcttcagtgagttacatctcattcaatctccagaagattgggattatcgtcttctaagaggttgctaatgcctttcatcttgaagttacacataacttcttactagccagtatggcaaaagtaggcatctaaagaatataaagcctcaaatcttccttactgtctctcttgtcacatggaatctacatgtgtttgaactattgctttagggtttaaaataggggagcctgtggtggcctggtgcacagggctagaacgagagtgcctccccttcttgtgtcctggctggctgggatgctggtggctcttcagaggagcatcagctgtctgtcatctgctgcgatccggcagcctctcttcactgctacatgtgctggaaggacaaataaataattgtggttgtgttcttaatggggacgagcagacacactgatctgaacatctggcccaagtgaagcatggcatatagtgcccttggaagaaaattaggcctcaaatgacagtagcattgaagtgtttgctgcagagttgagggaaacccccagccaccctcccggaatccgagatagggtggcacatctgtcctgacagacgaggagtgtaactgaaccaggaatatttcctccattcctgctctcccactgcacacagggtggtggcacattatccctctggggggtggggacgcctgttgttttggctcaatttgggtttgttggtcacatggagctcttccatttcgtttagctgaataatgagttgttcctagaggagacagcctgtctctccttgttgcccccaaagcccatgccctgccgtggtggcagctggggctgtggatgggaggggtccccaacatggatgtgttgcccctcctccgcatgccaacgcagttcatgtacaaggcccctctgcaactggagagaaaattaattcctatcccgtgagtggattgtgagaaattccacccacgtggagacagcttactgcagcactgttggtgttcggagctcttctgtgccctggctccatgctttcacctacacaagcatcaccttcctaatcaccgcggggcggggagcgtgtggctgtgccccttctctttaatctcatttaatttttattaaacatgctcagtacctgtgttgagaaaaggctttctttatcctaaagattattacctttttaaagtgctcttatattttcatgagtttttattttgtctctgagattttgtattccacattctagggtattctgtaatttggctccttaccaatattattaaaatcttattaaaatctaccctaccaaagcatgtacatttttatgttattataat

SEQ ID NO: 14312 - DNA, 1216 bp, Homo sapiens
agaagttttaattttaaaaactaaaaatggacttttttttggttaagatgtcagttttaaaaacacagatataacttaggataactccaaaagatattctgagttatgggtgggaacttaaaatgagcacgtagtatattggagatggatattcatttaacccattgagggaagttttttatgtgtaaatcatggaagtctcttagtactacgttcattttctttccacgattttcatttcttctgtggtcagcctttaacccctgagttctttactctgatatacatccatagtgataattatatgattcttaaacagttcattcacagaacttaaatttatttgttattgggttttttaaaaacccacaacggaaatggaaatcatttaaacagctggtttcatcaagacatcagaagggatatcctagccgtagagatgaaaaattacctttacaagtatagaaaggatgttttgctactttatgattaagttaataatttaggaaagctggtatcctttttggccttgtagaggaaaatgaggaatcagttagttggaaaaccagttatttaaacattctcaatgtcagctgcctgaaagggaatgtatataaattttattgaaaaacacctttattcatgttagttaaatcatagcatatagaatgaaatactgtgaattgttaacaaagaaagatgtattagtgcccaaatacaaagatctctactgtgattatgttagggttaaaatgcatgtacacagattgatgctgacgtttatgaactagaaccattttgaacaaggcatctttattagtggctgcttctggggagtaagactgtagactaggggaataacttggagattatggaattactttttgggtcacttgaaatgattatgtgtatactgcactgttttacacatttaatttaaatgaaaattccctttatagagaagaaaatgttcaaatattcaaatttgtacagagaaaaatgcaagcatttgttaaaatcatgatattccctaaatttctgttaatatttaatattatttaattttaccttatctttagttttggggaagttctctttaattttggtataagttggatgtgaacaataaaatacatttatttaattaatggctggtcttgctttgtggcccaggctggagtgcagtggtgccatcatggctgactgacctcctggg

SEQ ID NO: 14313 - DNA, 1146 bp, Homo sapiens
gaatagttagcttgaaggagagaatgtttttgggggaggggtatctcttatgactggatgatgatataatttattgttcaaaccagggctctttgagactgaaggtcatcactatctatacttatcctgggatgatgggcgtggactaggactgtcttagcaaatggaaacatggttacctacttatctccaaatattttaaggtctgtcttgtgaaagaaagatcagacctcatttatgggagatttaggaccagtggacacaactacaagaagacctgcatctttttccttataacaagccataatccaattcttcagttgttgaagaatgtaagggctgccttatgaagtggtatgtttcttatcactgttgatgccaagaatctgtacagttgttctttctaagtcttgataatgtacaggttagatgaatcgatttgtaccaacccatcaaatgtttgggtattttattcttttcaggtactatgcagatgtccatgtacttattacatttagtttaatcatttggatatttctggccttttactagggaaagttagaatccatgtctttgatggcttttgtgatagctctatgtctgcagtcatgtgatcacttacaccagctgcacaacttgtccattttatcttacagcacagctccctcttttctcttcagcagagtgcagggctgttgtgttttctgtctctggcctttttctctactttcagcacctgcccttgttttgcctggaaatgtaagcgtatgctcttatttggtataacactcttctttattcctaagtatcttttttttttttttttgagacagtcttgctctgtcgcccagggtggaatgcagtggcatgatcttggctcactgcaagctctgcctcctgggttcacgccattctcctgcctcagccttccaagtagctgggactacaggcgcccgccaccacgccctgctaattttttgtatttttagtagagacggggtttcatcgtgttagccaggatggtcttgatctcctgacctcatgatctacctgcctcggcctcccagtgctgggattacaggcgtgagccagcgctcccagccattcctaagtatctttaaaattaaaaaaaaaattatgtgtggc

SEQ ID NO: 14314 - DNA, 1527 bp, Homo sapiens
tcaaaagaacagtatcattcaaaggatgcttttatttggaaagtaggttttcaagttacttgaaggatagttggtttgttggaaaaagtgaacagaaagctatagcagaaataatgctgagaggattagtattccagatgcttattaacttaaaaagacacgaacattagattaacagttattgtgccgttggccagagaatgatttccactgtagaaaatagcgggtcatgcttgatccattatctgtcttaaaacagattcaggaggcagacacctagagtcacaatgggggaccagctaaccagttcagcctcactgaggctcgaagtgtataaactaaaacattccatagccttgcacaaacatgctcttcagacacctgacaacagtttcaggggcttccttggacaaactttccagctctcaagttctggagtcagtcattaggatgcctgtggggtacgtggacggtgggtggggtaaagaggaaagcactttcgaggagagcaggcttgggaacatgtattgcaaagggttggcacagggagaggtaaaagtcctgaaggtgaaacctggggagcctgggatgctgagatgcacttttgtgacatgattttgcatttctgttgattttcatactatttattgagagcacggtagaaataacagggaagagaaataaatagtcatcatgttgtgatttatttatttatatttttttaaagtgacagggtctcgctctgccagccagactggagtgcagtagcatggtcatagcttactataaccttgaactcctcaagtgatccttttgcctcagcctcctgagtagctgggactacactagctaattaatttttttttttttttttaatagagagtctcgctatatttcctagactggtcttgaactctgagcttcaagtgatcctcctgcctcagtctcctattatgacatttagaaaaagtaatttcttcaaatcaatttggttttccactttgtaaaatgaagagagaatgtaactgatgagagcttacagtgacatccattatttcagatgcaaccataaggaagcttttctaatcaaaggccttcatttcttctttgtactgtttacagggttcttaacacaaactgccttagattataaacatttctgcatgtgccttatctttccaattagactcagtctttccaattagcctcattgagagcagggtcaagggttaaaaataaaagtgaaaacatttatgttgtgctttaactctttatagaatacttttcatatatattatttggtgtcttttaacaatatattgactgggatttccaaatgaaaactggaagaacaaggtataatatttatgttttaaaatttgatttaagattcactagagtttagttatactaaaagtgtatattggtaatatcttcatatttttatattatgtattttggagtactgaaaaatatactttacataatctctgagcaaatgtaactaaagttttatgagatttcttt

SEQ ID NO: 14315 - DNA, 1180 bp, Homo sapiens
tacaaaatgttttctatttctgtcattactgttgcggacataaaactgagttcatggactggtgttggtctgcagagtagaccaactttgattagtgctgatgcagagggcagtgtgtctacagtcctgtattaggtgaatgaaggtgggttgggtccagcttatgcagggcattgagtgctggaatgaatagcttggcttttattctgtaggcactggggagccacagaattcttgaatgatctgattgacaacattgtgtgtggtagatttatagtgagaatacactgttgatcagaacctggaagaggaaggaagttgatgagactgggtaaaataaaactaaaatttctggagaagtcactccagcacagctaaataaactccttagaggatacaagaacttaagctagcctactccctaaagcttaaacaagccggaaaacaaagttaaattctaaaaagtaccctccacctaatgttttcagaaaccacgcagatagaagatccaagaaaacaatggaggggggaacaggagaagatgctcaaggactacctctctgtggcacaggatgccctccggacacagaaggaactgtaccatgtgaaggagcagaggctggcgctggccctggatgaatacgtgcgattaaatgatgcctataaggaaaagtcaagttctcacacaagctgtaagtacagtgtggctattcagactttggaagtggagactgaattgtagataacagaagaccacttacatttctatggagtttaattttgagtccttttccctcctaagcaggaagagtctctcaaaaccattgagaggtgagggcacaccccagattttctcacccctacttcagataaaagaatccctgtttgggggttatgcatgccttctgtttctgcacctgcctctgccaggttgccttttatgcatttacgagttaatttttaccttttcagaacagtgcaagtagtttggccctttttgctacttttgtacaatatttttagtggggaggaactggaactattacctagagtgtaatttctgttgaccatctgagttgatttactgctccctcatctcacagattgactatttggagctggctttgtttaaagaagcagctgtgatgagctcagaagttctgcttaaattataaattcc

SEQ ID NO: 14316 - DNA, 1192 bp, Homo sapiens
ttcctaatccctaacattgatgtgagctaaataatctcttgggtcctgtccagatgtacaatggcttaattgaagaagtcttcaaagtaggaagttcttttactgtatctaaaatgagagattatgttatagatattctgtttccacaatttcagctgcatgaagtgagtgggttcctattgaaatagagataacttcttaatgaaatttttagaaataagacatgcatgtattttaaagataccgttcataggaaaatgctgttttgagatagataagacaactggtttaatatgatctcgcttccaaagtcacatgtatggaggtgcaaaattatatcctgctgttattttttcaattatataaaatggtaagtacctactaaaataaagttgtttttttccattgagattagctctttccttttaatttcacctggtagggaaggtttgctgtcttacttgttaagctttatgaaacactttgtgttttctgaacagagtcttgctaagctgcaggagcggtttcatttggatcagaacattggcagatctgagccagatttgagatgtagtcctgtgaactctcatttatgtctctccagacagacccttgatgctgggtcacaaacaagcatttccggagatgtaagttatctgtgctgaagagttggcccagtgttgtccttgatgggccttaattgcaatatggatggtgaactggaaccagaagtatatgtgacttggattctggctgtgtgcattcagtgttccattttcgtaagattagttttaaaaatcatagccttatcttttctatctaggtgccaagtatgtcaggatttgtccatatgagtagctttgttcaaactttctcatgctatattcctttagagacacgctgaaaggctagaggcatatgagaatttaactttttcctattacgtttagagtcttggaaatgtaggtcctttcaaataaacattaggccaatgagaaacagaaaaacatgccttttaagactaataagaaaacttgtttttgtaaatcttaattgattatattaaaatgtttaatttgtgatttatatctgccatttaaatatttaatgtggcttggctattgttaactattttaccttctccattttgggatgccattagcaggtatttacttctcaatacattcccatt

SEQ ID NO: 14317 - DNA, 1182 bp, Homo sapiens
tataccacttataatgccacttcagcccatgccagggcttttgttaaaaatgagccttctgctagttcagaagaaaaacttccttaacgtaggattctccctgctcgactgtgagtacactcaataaaatgaggatttaaaatccttatttctgtattcactgtcatatgattaattttacaataaatgaacaacgaataccaagttattttatagtgagtgtcaatatttttaaatgctaacattaaactctataatgtgattttcagaatatgtctattttgatatctagaagttaggttaaatttcatgagtttaactttttagtaccacattatggtgattttgctgcaggttactagagggtgaagagaggatttttttaaatgagacatttagttaaaaaccccagccaaagaaatggcttggctcattgtgtgagtctgtttatttcccagataacaacttagcatgcccaggttgcgtgttcatggagcatgcctgcctaccaaaagtgttttgtttttgttttaccataggctaacaatgctaagagaggcctctgatgaaattgtggctgaaaaagaggctgaagttaaattgccagaggacagtagctgtacagaagatttaagttcatgcactagtgtgcctgagatgaatgaagacgggaacaggaaagaaagcaactgtgccaaagacctcagaagtcagccacctactagaataccaacactggtgactattccgctgtgctgtcttaaaactgataccttacaggcaccatgtggactagggagatgcttgtttgtctccttaggtgtaaattccatgtcaggattttgtgccaaaagctgatcgtgaaaggcatatgtgggaataggctctaagaagcatcataaatgctttaacgttttaaaatgggcccaagatattctccacttatatttggagaatatataagaagagaaatagtgctagttactttaaatctataaatattctgtgaatattaaaagtattttctgaattcctaggagaacaacagggtgtcttgtgtcaagttccgtatatgtagtaagttttatttccatttcaaacatgaagtaaacatttaaagttcattttggttaggcgatgccctgattagaaaagtgacaggtgacttagtttaggcacaag

SEQ ID NO: 14318 - DNA, 1099 bp, Homo sapiens
acccggcatgtgcaggttttttgattggtaaattctacgttaaataaacagctttttaaatgactaagttagataaaaagggtcaaaaagataaataagatgttgaaagtgtatttgcccaaaacattctttaactgtagatattttttggaaacagtgctatgagtaattttccgtttcatttttgagagttcttaggttttcagatgtagtaaaattgtcacatattgcctgtgtaattagatttctaaaatgtgattaaaatgaacttaccccaaaatcaacatatgcacagcatgagttggtcatgtgggtgttggctcctgatgggtgataaaaaggacaccagcccactggctgccttgcttgccctcctgactttagtccacaatctttgaagcttcataggatgtctccagggatttctaatcagtgttttgtgtgtttcttacatttttattcccttttccaggctgaacagtccaaagaagagcagaagcaaggtctgaatgcagagaagttgatgaggcaagtctccaaggacgtgtgtcggctccgggagcagagccagaaggtgcctcggcaggtgcagtccttcaggtgaatagccccatccaggacagcttttgggttgccctcacggggtctgattgtgtaggaattcacctcagtgcagtgaaagttaatatgaggatccgagacagaagtcctctgttctctaccttgaatatataattttccatttgcacctgaggtgataaatgtgactggcagagttaaaggctgatgaaagcctaactccccacaagaacccagggtgtccccagctcttagtagctgttagcacatctcactgggctatcttgacacaggatacaaaggtacagaaaactcagacatctttgggattttgttcgctcattttacagacattccttgggcagccccagaaaccttacaccttgtcaggctctgagatgtggaggctaagaacatgtgcattcgttctgctcttctggggggctctaggctgtggcagggataggcgggtaaccaggtcattgcagtgcatgtggaaggagctaactaaagggatagg

SEQ ID NO: 14319 - DNA, 1191 bp, Homo sapiens
tcactttcttagggagggtaaaagactgaagatttgtgtttttgttttggtgtttggttttttttggtaacgtaactgtcaactcttgaagaacttttatttcacatcagattttcaacacattaatttgtaaagtaccttgagtgtaatttttatatgcttaaaaaagaaaaaatcatataagaaagatgggataacctggtacacaaatgttgcccagtatgtgcgcattgccagtggacttcattttgtaaaaatggaatagaggcagtaccccacatgtgtactgttgagccggctgttgagaaacaacttggttcagccggtggttttgcttctcctttgtgttcctgtgagtaggctgtgccgatggcagcagcgccacgtggtatctgtgcgctggcgaggagaggagcgctttccatttggaggcagtgtgagcacacgctggagtgcagcgttccaaagtccgcccgaaatggatgctgcgtccacggccatcacctgtgcgggaacacctggtttccttaagacaatttcctttttgtccttttatatttttctaaagaaaactaagatataaactaccaagtgctcttaagaataaaaataagaataagaatacaaaggagcactactcttggctacacgaaagatcttgggattcatgacactgagggcagggagaagaaagaacaccagccacgcagagatacaaataagctcatcaaatgagcagctggtttgtctcactcagcctgaatttgcattaagtgttcaaaagtgagtttctggcttgcactagtgttttgccctaaatctaaggatggtgcctagtggtggccctgtgttctgaggacagagagagctggaggggtggagggaaatgcatcggcactcatttggtgtaaccaagaagagggggaaagatgtcttgatagaatcaaagttgccaaaaacaaagaagagtttatcaagcagatttctaacatttagtagaaactacttcatagctctcatttttagggggttctatctataatttatggtaaatagttgggaggcaaagggaagaatgtgtgtggggggattattaatttgaagtataagctaaattgtttattaaaaagcctattttggatgaacaagtttagagagataaactgactaatgtgtcctccagtttagaat

SEQ ID NO: 14320 - DNA, 1224 bp, Homo sapiens
ttgaaagcaattatatatattttggaaagttcatgttattggaattgaagttcaaattaagcaacttctgagcctagaactttaattactttttcctaaatgtcccaacacttacatacaaatttctttgaagacataactggacatggcagacactgctttgaacaaaaaccagcctagtgaattgactgagtacagtcctttaaggctgcccagttcattctattagatgactaaggaaaactagaaaaagaatacagttcacccttgtcaaggtcaaatgtgaaagacagaagtttatttaatgtagaggtaaatgaaggtgagctgttttcagcatcttagtttgaccatgaaaatgtctatagaattatgtgtagttgttccgtacgattttattttcttcatttatttatttacagtcttatttatgttctgtttaatatatagtttgattctggccattttaaatatttgacacagaagagactatattggaatatttacagctttataagtctttcatcagattagctgttgactttttgtaatacaaaaagtttcagacaagtattaaagaataaaatctgtctcaggctggtagttagcagttgtgaccaagatgcttttggttgttgtatttcacaaaatttcctcatttctaacatgagagatgaacttattttaatataatcctttttctacactttaaaagtcagcaatagtgttatgtatttataggcagcttttaataatcttgtcatatttgtactaacccaaatgattcacagtgacaaaacattttaataacttgatcacaaaaccatatggacaaatatgaattttaatattataaatactatttttaaaaggtagaatttattcgcacagggtaaaaagaatgtaatatttagttctcaagtttgaattatcagtatattattacaattttgtatatcagaatcttaagtgttacaggtacaaaaagaatattgctagccaaatgaacaaagtttagctaaatctctgtagcatgcaaatcaaataaattaaaattttttgctattgctttatctatattgtcttaaatatcaaaagctcaggactgaacttaatatttaatcaggttaaattctgaacatgtttctgttttaatttgtcttgtttgtaaacgtatgcaaatacatcacatagattaactggtttctgcactttccatgtgtt

SEQ ID NO: 14321 - DNA, 1817 bp, Homo sapiens
ttggcagatctgcctcaaaataagagctctcaagaaagtattgtttgtgaattgaggtgcaagtctgtgtatttgggcactggctgtggaaaaagcaaagaaaatgcaaaagcagttgcatcaagagaagcattgaagttatttctcaagaaaaaggtggtggtaaaaatatgtaaaaggaaatacagaggcagtgaaatagaagatctagtactccttgatgaagaatcgaggcctgtaaacttacctccagcactaaaacatcctcaagaattactataatgtgtccaaaatatcactgcatacaatatctggtatttgaagagaaaaactgacttttgtatagtataaaacacaggctttcacaaattttgtattgctttttttccagttttgcagaaaatttacattctagttctcttcacacagtagcagttgtaaataatttatgaatgacagtacacattaaaaggtatgcattagcagcatattagtatgctgttttatttgctgaagaaaatactgtcttctatttttaatgatacattaggtacgatgtgtagttcggtagagtcctaaaatttttgtactactttcaatttggtgaaaatgtattaagttgtctaccatgttttcttttctagctgaataaaccacatcaaaggaaagggaccacagtatttgaatgtttgaaagtctgtaaagcttaaggttttaaaaatgttgcccgtaatgttgaacgtgtctgttaaaaaataaaagaaaaaatagttgcttcaaactatttttatgagaagttgtaagcattttttagatataaagcagtataaagtacttgttattttactctgaagttgtttaaaattcaccatgactttgaccgctgaagattctttaagcgggttaatttatgttttgaggtggaatacaatttacacttttttcttaaaaacatgaatgtgggtttctatattaagcatattttgtgactactattaacagattgatttgtttagatattaaatgctttaagctattttaccttttcaagaagttgtgttttttttctccaagtcagaaccaattcctgcaaataggcttcccatgacttgtcattataaattagacaaccaggtaattgtgtgatatacatctttatttaatttttttttttacagcaatcccctgagccagaatagattaaaagcgattcccttcaattttcaaatctagaactggatggtttttgtgtttatgcatcttttagaataccggaaagaacagagagccgtgttcagctcttgataatgagcctattcaatttaactacattcgttaaaatgaagtggaattttgttttcgtcttaggtgattctgcctgtttgtctgtcattgtatattctgtttactttgcttcaaactggccccaagatgttatttttgtggtttctggctttctagattctatttttagatactgcccattgagcaataatggtgataatatagagagaaaagaaagacctttcatgggccagttgtgttggaataggaaaatcaaacgtaagcacaatttaagtatgtagcagttattcctattttgtattctaggaataaaaagatactttaattttttatgctagaattacataattacataatcagatgttttaattttaccatataacctttaaaaatgattcatttttgaggatatttaattggataccaaagctaaaatccatatactgtaagtgggttgcctttatagattgcgggacacaataacatgaatgtattgtgaaagcacttttagt

SEQ ID NO: 14322 - DNA, 1237 bp, Homo sapiens
tcaacctcctgggctcaagtgatcctcccacttcagcctcctgagtagctaagacaacaggcatatgccaccatgcctcgctaatttttttattttgtagagatcgggctcttgccaatgttgcccagagtggtctcgaaatcctgggctcaagcagtcctcccacctcagcctcctaaagtgctgggattacaggcatgagccgccacgcagagcccaagagttgtctattcttgtctctgctttctttccttccattctttccagaatggcttcgtctcaaacactccaatacaactgccttaacattagtaaattcaattgtcaattctctgtcattatcttttcctgctctcatttgacacaaatgatcacttttaaaatgctttttctacttcgtctccagggtacaaagtacacctgctctagaatctcctccaacctcagggactgtttcttttctatctgctttgcggaatctgccccttcttgctgtcctccaaatactggagtgtcctaggtgaaggcttcagaagtcctcctcatataaccattccctaggggctgtcatcctgtgcactggctttaaacaccttttatactgtgatgactcccagtttctgtcaccaatccaggactccgatctagacggacatactcagttgcccccagcatttctgttggtatgtcaagtgaacatctcaaacttcacggggtagttcctagttttcaacctccctcccagcacgagccttctcttcttcctttcatggtaaatgaaaatgaaaattccatcttttacttgttcaggccaaaaatcttggaatcatcgttgactcctttctttctccccatccaccgcccccctcaccgtctctctctttttctttttctttctttctttctttttttttctttttttttttttgagacagggtctcactctgttgcccaggctggagtgcagtggcatgatcacaggtcaccgcagcctcaatttcctgggctcaagtgaacctcccacctcagcctccccagtagctgggaccacaggtgtgcaccactatgcccaattaatttttgtattttttgtagagatgagtttttgccgtgttggccaggctggtcttgaagtcctgggctcaagtgatctgcctgtttcagcctcccaaagtgcggggattacaggtgtgagccaccacacccgtctctttttttcccttatactccaaaacca

SEQ ID NO: 14323 - DNA, 1224 bp, Homo sapiens
tctgttgagtttagatttttgtcaaggttacattttgaaacccgtttgaagtagctgagcttgaagttgaaaagtagctacatgtggtaaaaactgtaggtgatttaagttacttaagcctcgttgcctatagtttaattttgatactccatggaaatagtgaactcagaaaataccacttgttgactattttctctcttttttttatagttaagcaaaactggctctaaggatgatgagtagcacttggaatttgagacaaggaaagagcattctttaaagagtaaaactgggttcaaaatctttcattactattttctggtattgaggcgactttttataaaacacaattttttgtatgtttcttacattaaaaaggttgtaagttgaaagttcatgaagagatcttgttgtattaaattattttcacaaacttgccttaataaaaggtgaaaatgttactgtttagtatactttatgaagccccttgagctttataaatggacaggcatggggaataagaatcagtgttaatttaaatgatcttatcctggtggatgtgctattttcttaaaggagtatgaagcccttttcaaactatcatcccagtggagcggagtactcagtgaacagttactccatagtgcaatccatattaataggcttcttctcttaagtcttcatctcttcttttgcttaattactgaaccgtaaattacttcagagaaatttaaatgctggtatttgaactttatacatgatactttttgtagtttcttttaatttttgaaagatgaactgcttccttttaataaattaatatctatttatacttttctcttgatttgggtcaagatgtttgatcatgagtgctttgagtggtatgtggaataggagaatataaaaacaaatctgccaaatacactagaaagcattttagtaagaaatgctggccctttcttaaaacatttctcttgcatataccaggatgggagtaaaagatgccttaatatttagtttttgtattgttggagacattgattttaataaaatcctatttatctgctgttgtgtgcttttagttgttggataactgaggtctcctaaatggttcaacataaaaccacatttcaagtcttgtttctttttggagtgtcttttcaagtattcaaatgtatttctcaacctgagcatctttttaatcatatacatgggagtctttta

SEQ ID NO: 14324 - DNA, 1197 bp, Homo sapiens
ccccctccctcaacaaatattctgaaaattatgggaaacagtcacttagttttaaacttcaggacatgagagagccttgggaatttcaagaaatagatattaataattttccttttggtctagcatcccgtaccacacagtaggtgcttcaagcaaaattgtaggcttctataatagcaaatgagacagcaccatttcaaacagtcttttctccacgaataagtaattaccagtgtgaaatgtgatttatagcaataggcttgacatttagccttggcctttccgataccttcaggataaactacacttaagctcaagaggttagagcgggcacctataaactagcgagctcttgcaaaaggacagttagagaatgctgaaactttaagtctcgaagactatgccttatgtgactgtttaagctcccaactcatgctaccaaatctgaagaaatcctaagaattcatgagcttcctagcaaccagtaagttcacaggccatgagatgacttcattgttcatcttgaatattaatttcccagtggtggtttctgggcagaaaggggaagatcttgccttttgttcaaatcaagatgaataataaaaagtgcatggcgttatcttaagaagaaaagggattggaccaaatggatgtgggatcattcttgggcattttctaaaagtagaagttacgatattaatgaactagagataaaagcaaaactccccacaaaggagcaaatctgtataatgaacgcttagtactttatgtatgaaaacatgctcatttgtctctgtgaaatgattttcaaggccccaaaccttttgttgatgaagttgtgagagctttctctgttagaattatgtgaactgtaagctcttcacacgaatgatgctgctaacttttaatttccttccctctcccctcccccagccctggggatgggcgcctctttatattccatgtataatgccagcaaagttttgggggacatccttattgatcaagcatggaaagtaattttttcattatacaggttctacagcacatgatccttaaaagctttgtttctgcatgagaaagcgaagtcctggcccatttgagtttgatgcttatcattttgataacatctttaaggagtaaagcgtgcgtttttaatactacggttttaaagcctttgaaaagaaagataaaaca

SEQ ID NO: 14325 - DNA, 1173 bp, Homo sapiens
catcacctctgggaaagaataaggaggaccatgacactctgactttggcagaaggggtgaaaaagctctccccttctgataggcaggtcccccactcctccagggagcctgtggggcacaaggaggagtcaccaaaagggccgggtgggggccccgctgcttcgggaggagtggctgaagggatcgccaacggacgcctcgtccagcaccatggtgccgagcccagcagcttggacaagaggaaagagatatttagcaaagacacactgttcaaacctcttcacagcaccttgtctgtaaacagctatcacaagtcgagcctgtccctcctcaaatctcacccgaagacacctgctgacacattgccaggccgatgtgagaaactggaaccgtccctggggacctcggcggcacaagccatgcctgcttcccagcgtcagcaggagtcaggagggaaccaggaagcctcttttgactattacaacgtctctgatgatgacgactctgaggaaggggcaaacaagaacacagaggaggagaaaaatagagaggacgtaggcaccatgcagtggctcctcgagcgggagaaggaaagagacttgcagaggaaatttgaaaagaacctcacccttcttgctccaaaagaaaccgacagcagcagcaaccagagagccacccattcagcccggctcgacagcatggacagcagcagcatcacagtggacagtggattcaactccccacggtagggagaggtgtctctgtgcacacacatgcgcctagcggggcctggggctttatgcacgtaacttgacaagtttctgatttcgtagtctcagttctatggatgagggttaagagttgtatgagttgtattgttaacaatctgtttctgacttctttttcaggaattgaaaaaaatgtttctgcacctgtagagatcaccaatctggactggtgggttggctcctcccctcaaacttgcatcagtctgatctaactaaaaccaatatttccagtattttttctgctacgttcatattgccacccatgctaagagaaggatgttttttaagtccttcaaaaatagtaactttttgagtagaataaatagtctgggggcgggggaggaagataggggttgggagtaaactgattgatgctaagataggg

SEQ ID NO: 14326 - DNA, 3135 bp, Homo sapiens
ctgctgattattacatgtctgtggaagcttctggagccagtggtggagaggcagatgtgaataatcagtcgagatgtatattgatatgacattatgaaccaacagaggaaatccattaacgacatcatttgctcttcctctggggctcaatttataattatttatgttccaaacaaaacaaaacaaaccctttttgctcttttagtactcgggagagcctggcttccaacacatcaagcattgttgaaagtaaccgtcgtcagaaccccgctttgagcccggcccatggtggagctggtccagccttcaacttccgagcgagcgcggagcccccgacaaatgaagctgagaagctacagaaaccttccaactgcttgcaagcttctgttactagcgtgtgattgtccttctgcctcagatcttctgtctcattcgatacagcaaagtttacgacactgggactgatgtttacatctttggaaagacaagcatctcaaccacagtttttgtgtttacttaaactgtgctgctaagtagggctagggcaaaaaaacaaaaaatctttatttcagagtattgcttttcacatttatggctctgtagcaactgagtaacagtaggggtgatatgtatacttttgcttcactaattgtatctgagcacacataggaaagtctagacactgtaagtgtaatacgcattttcaatgtcatgcagttgccaattccattttaaaatgccacagatgcgtgttgctcccagtctgtggttaaacggtgccacagaactgatccttgacacttccaaaaaaaaaaaaacaaaacaaaacaaaaaaaatttaaaaaaaaaaaacaaaaaacaaaactaagctaccacgaaatgtcaaatgcaagggtccaccttgagggaaatagatgccaaactaactagaagggaccccggccctttgtgtgtgaattgtttatgcaccagtcatttttcactgtgagttttcgtgacactattttgcaggagcccatggaagtgtgtgagaaggggtcgcaatggagatcactgggagtgaatgttttcagggttttgttttgaagtgtcacagatgcttgtctgatttttttaaccttccgtgatcacaaacaggaatataggcctttgaatctgaagtggacaaaggaaagcaatttccagtctggctggggcacagcattaggtgattgaaaaggtgatgtggacttgtaaaaggtgttactcaaatattgaaggaagagaatttcctccttgtgatacttaggatgaccctatcttactctaatagatacaataattagtttgtttaaaagcaaaatgttctttgtgatacaaatgaagagtagggcctgaggatgttattctttctaatggaaggacataaatctattttatgtagttttaaatagaatgcctaaattaggctgtgggagataatttttagtggttgtaggaaagagcaaatttagggagtgttgaacttcaggccttttattcctgggaagatatgtatagagaaaacttttaaaataatttttgattagaaatatacatgtgcccatgtaataaacaacagaatgtgctcattctgctagtgcggtataatccgaatttgtactcccctaaaatttatcagaataacaattatgcatacatgaactatgccagagtaatgtttacagatactttgtaaccaatttcaggaggcgtttttagctggatgtgtagttaattagaccaacttatttccaaatggtttgttaacattttgctttggtttacaatgtcatgttgaacacaaagaagacccagcagcaaagggatgaccaataatttcatcttatagcaaggagacattccaacgttcccatgttttattttctgagaacagtgggacagatctgtagtaatggaatattatttgcaaaagggttacatatgacacaagtaagtgttctgacataaagttttatttagttcagtggcatgtgctgttgggagccatacaccataaaatatatatatcccaaaataaatctagaatattttcacctccaatttcagtaattggcatatgatttgtgagacgcatctgtttttgtatgaggtttaatcactagcaatctgtttaaagaatccagtcctatacacagttggactcattcttgaaacctttaaatgctccctcatagtttttcagttatttggaagttgcattgggtcaaactgaactccttgagtttggtgtaaattccttttttctgcttattatagtgaaacttcagcatgtttcttagtaaactcccataccattgaaatgcttaagccagttggctttcagtctcatgccttatttcctccaaggcatgcctcaacgcattgtttgtctcattgcttaaatatgtccagaaggaatgatcatgtatctaatagactacatagttggttcccttggggagttatatatcatacagttactaaatatttgtctaaattcattttttccaaaaacctgctctcaaatttttcttctactctcagttcataaataatataaccattgaaacaacacatcagcctctagctgatcctctgaaagtagccattgaaataatcgaatactgtgtgaacaggaaaggaaagcgttacctttaagagaagctttaaaataggaatttattgatatttcacaagatataggtttacagaagacattattcaaataaatatgtacactatttgcctgatgctatggggtacataattttttaaaaactcccttagaccagcagccattagtgtagaaatgatggactttaaaggtgataccatgtaagcagatgttgcatataaaaatattcctgcctgaatctgatcgagattcttgaatgggggaggagtggcagccggcagcacattgcaaatgtcattcgaggtcacggtgaggctctcggtcccggaacagtgggggcctcgccaggcgttgccagtatccctttcctcctgtaaaatcatagctttgtgttacacgactgcttatccagtcttagggtttagcagctgaaaggtttacaaaactgaatctggttgaatctctgtgaaagggtcaac

SEQ ID NO: 14327 - DNA, 1611 bp, Homo sapiens
tgtcggcattttgcacacttatgtattattatgatacaacatattactttatggtaatttttatttttacatataactacctccataaatttgatgaaatggcagccgtgtgttaaagtgtatcgttcagaagagcaaagttgaacacttccttcaacattagggcatggcgtgctgtgtgtgtcagtgattgcctctgtggactcatgactttccatcgccatggctttctcttacgccgctgtttggctttcagatgtaatcctgtcttctcctctcttccccacgaaagcgcactcgattttgttaggaatgaacggaagtttaaaaattcttgtgcccacccccgccctccacccattcctgttaaaagttctctggcgaagagccaatgggtgaacgtaattgaaagagctatttactcttttggaaatctgatttgaagtctaagttttcagtaacagaagacacacaagcaatgtggactgccaagcttgaagcacttcgggctctgccttcactcgcatgctaccatgtcgagcccaaactccactttaattaaaagagctgtgctgtgaattccacaacttctgttaaataatttgtattccattatatatattttgcacatctcaggggaccataatgaacatatgaaaggggggggggtgccatcaaatagagaaaacaaatagaagaggtgaatggagactagctggataaaaataacaaattacttcttctctgatgttgtgaaggtcaggttcaggaagcatcaattcacagttaatccggagtaacaatgatctgaacaccagctgttcccaggtccctctttttcatagcccaaccagcatctaaaatgtaaatttaaattacattgcagtcaccatggggagaagaaacctgttcagtggaagcagaagcattgttccttttttaggttggcgcagctttgcaaaactctacccaggataaaccacttatcaccaccaagtgtacttgaaaataaagtttttaacttaaattacaagcatattgctcataatacaatagtgatcattttttgaaagtcttgccatttataacatgggcagtatttggagcttcatttaaaaaccaacaacaaccgataatgactttgcacgattcactttgggatctcaaagtgcttccaaagcattcagatttacaaacaattcacaagacaggtcatctttgtaatacgcatacttacaacgaattaacaaaaggagtgacttaagattctccaggaacacagtggcagctattgatgatctgttttctatctgtttgatagagcatcatgagaaatcacaaaatacaatgctatttttctgatgtgtgctaataaagtcaaagaaaacaaatacatcttgacacttttgtccattttcattaaaaaaaaaaaagttcagggtgtttggaattttacatctcagcacaccttactggtatcaatggataaagcgggtgattgacagatccacccaaatgccactgcagtcagaagcagatctggacacacccttgtttacagtttcatattgggttgctatagttcccgtgctaaatcaccagctttcagga

SEQ ID NO: 14328 - DNA, 1590 bp, Homo sapiens
acatgtttagggcttgggggagctagaacacaggaaacatgaatgcaaaaggcatggaaaacactgttttgctttgggttagtaaaatgtgggcaggacaaagattactattggtctgagctttgccaagtgagatagaatcaactgtcaccccattcctttcccagaaggtcttatggtattaaggatacatccagtattttcccacagatttttattcaggcgatgtttcataaattacatatatgaaaacattcattattacatttccttgtgtgtttcaaacagacattggcaccttcctattgagttaattctctgcatcttttgcagcagcagcccacaaggagattcccagagatggctcccctaacacacagtcctgtgattttacagttctatgacttacagttgatgattcacaagattcaggattctacaagactcaagggggaactaaactttcttacgattgtacatgatcagttatagggctgtaatcattaattgttggcttcaaatgtggacacacacacacacacatcatgccaaggagggaatggggtgtttcaagtcaggcagcgatgattctggaaggttggaaatgtaaggttagaagcttggctggtcttagtaaacttgttcccttgctcccaccaagaagaggtaccaaatgtgagacctgagatctcctccaatatctgtcctctgcagttccgggaaactaatcatgaagtacacatgcagcagctcctccacttcctttcctccgaggtcctcctttccattctcccacctagatactgacacaccgccacggtttccacattggaagggcagaacactgtgcagtatcgtgcacacttgctgggttaggaatagagctgccctagggtcaccttcatgcaagtattgacagctacaaattaaagtccttagagcagttgacacagatactacgttctagaagagaattaaatttaaacgtcaagtttaaagggatcataattctgcaggtatctttctctgagtgactgaatgtgactattgcattagggtaaatgaattaagacgtgcaagtgggatttactgtatgttagaaaggagttttgcagccaagactgccttgaataaaatgtgtttgcactgaaaaaaaattttaaattacttggtctctggttgctgtaaaggtcatccaagatggatgttctgtttatattgtatagtatttcatatgaaataattacagttcatgaaatgtcttccctaatgttactgatttataacagcacatttgtaacatggtttttatcgtgtcagtgtaccatactgtaaatgatgattacttgtcatgcttagtataataacttaaaagaaaaaaaaggacagggatttttgtaagtctatatttgaaagtccctccctatggtgatactgtgttcatgttgtttatgtagtgttgtgtgaaatatccattttggattgtgttactttttaagatattaaataacatttggttatatgtcttaagtggattttttttggtacttgagagaaaatattttaggtgaggttaattgacttctctct

SEQ ID NO: 14329 - DNA, 1073 bp, Homo sapiens
ttaggcatctgtgggcatggtcaaaggctcaaacctttattttagaattgatatacacggatgacttaactgcatttttagaccatttatctgggattatggttttgtgatgtttgtcctgaacacttttgttgtaaaaaaataataataatgtttaatattgagaaagaaactaatattttatgtgagagaaagtgtgagcaaactaacttgacttttaaggctaaaacttaacattcatagaggggtggagttttaactgtaaggtgctacaatgcccctggatctaccagcataaatatcttctgatttgtccctatgcatatcagttgagcttcatataccagcaatatatctgaagagctattatataaaaaccccaaactgttgattattagccaggtaatgtgaataaattctataggaacatatgaaaatacaacttaaataataaacagtggaatataaggaaagcaataaatgaatgggctgagctgcctgtaacttgagagtagatggtttgagcctgagcagagacatgactcagcctgttccatgaaggcagagccatggaccacgcaggaagggcctacagcccatttctccatacgcactggtatgtgtggatgatgctgccagggcgccatcgccaagtaagaaagtgaagcaaatcagaaacttgtgaagtggaaatgttctaaaggtggtgaggcaataaaaatcatagtactctttgtagcaaaattcttaagtatgttattttctgttgaagtttacaatcaaaggaaaatagtaatgttttatactgtttactgaaagaaaaagacctatgagcacataggactctagacggcatccagccggaggccagagctgagccctcagcccgggaggcaggctccaggcctcagcaggtgcggagccgtcactgcaccaagtctcactggctgtcagtatgacatttcacgggagatttcttgttgctcaaaaaatgagctcgcatttgtcaatgacagtttcttttttcttactagacctgtaacttttgtaaatacacatagcatgtaatggta

SEQ ID NO: 14330 - DNA, 1159 bp, Homo sapiens
ataaaattatattagggcatacaaatacaaatttctttcctagaacttaaacatttctattaatctgaggcagatggcataacagtagcaaagtctgcagtaaaaatccagaagcaactacaaaatgtattaaaacaataaacttgttttcccattatattcctttttaatgttccttaactttttttttttttttgaggcaaagtcttgctctgtcacccaggctggagtgcagtagtgcgatcacagctcagtgcagcctggacctccagggctcaagcgatcttgccacctcagcctcctgagtagctgggactacaggcatacaccaccacacctggctagtttttgtatttttagtagagatggggtttcaccatatcgcccaaggctggtcttgaactcctgggctcaagggatctacttgcctcagcctcccgaagtgctatgattacaggtgagagctatcacacccggcctgtttcttaacttctaaaatcctacctaccacttatacgggaaaatagcttgtttttcatatgcaaaagatgccgtgaacatgggctagaccaaacagaagaggctggtctttcgaacatggctgagtggtcttacatgaatgaaaactgtaatacagcagagtgtgatttttcaattgagatttatacacagaataaaaacttcccttgatgaaattcagctgtccgagtgaaaataccttacacaatcagcaattctagacattactcctccagccttcattaagtagctaagaaaagtgctgatataatgaagtttcactggcttatagtgatactattttaggtggactctgtaattctgtatctgcatttgtctttccccaaagcttctgatactctagcatgaaaatgccctcccacaatcatcttctgaagcatggtaaaaagtaaaattggagttaccgtttcctttacgtttggttcttgagcttgaacatctgaataatcttgataaagctgttttaaattagataagaaatatgctgcattcctaagggaagactttctctctttaagttcatcatattttgtttgtagttgtttcagctgtggctctaacctaaaacaaaaataagtgacaaataataaaatgtaccagcctatcgtggtgaaactga

SEQ ID NO: 14331 - DNA, 1107 bp, Homo sapiens
tagactagtaagaaagaagctcaaactagaaccaaggtcttcagattcctgtctggtatattactgtatattactacaattatttaaattaatacactgagtaatcttgctgtatcctacaagtggcctatcagatagattaaaattcagaaaatacagctaacaatgaagagcttatccccagtaatgttaaataacagcacaatactaaataaagatgcagtaaggtgattaaaaggcagcaatgcttttggttgctttagcagaaataggagaaccagcgagacagcagttagagtgaaagtgtatgtaggggtttgcgagactgtgcacagggataagaagtgagtacggcacctcctctctgattgttcagctgtagctatcttttacaatttggtgagactatttttgtgtcaggctttcagaaccctggacctacagccaaaatatgaataaccagcatgttaacttatcttaatattttagatacttctgacattgtgcacatttggtgtccagaaggaatgaaaaccagtgacatcaaggagttgaatattgttttgcctgaatttgagaaaacccacctagagcatcagtaagtcttttgatgatgtgctatatttacctaataaatttcccctgaagcaccatttttgctcatcctacagtttttgttatgtactattttcattgtcattgttttagatatttttacattttattataattttttctttaattctttgaagaattcatatgtttttatttgtcccaaatatgtagacttttaaatttatatttttgtattaaccttctatcttaaatatgttgtggtcaaagatcatggtccagtgatacctttttttttttttaaattttgaggctttcttcatgacctggtacatgatctgtgtggaatttctaatcattagatctagatagaatctctaattattggatctatgttcagtttttcttggtacttctattcatttgtgctgtatatatttagagactattaggaaaatcatgtttaaaattgctctgtcttgcaaattgaacattttagttggtcacccactctattcctaaacatactttgtc

SEQ ID NO: 14332 - DNA, 2045 bp, Homo sapiens
gtggcccgtgtcctttttcctcttttaactgccttgtttattggcaggtcaaaggcatcacattgcaccctgaattattttctatcgacaatggccttctgactccaacaatgaaggcgaaaaggccagagctgcggaactatttcaggtcgcagatagatgacctctattccactatcaaggtttagtgtgaagaagaaagctcagaggaaatggcacagttccacaatctcttctcctgctgatggccttcatgttgttaattttgaatacagcaagtgtagggaaggaagcgttcgtgtttgacttgtccattcggggttcttctcataggaatgctagaggaaagagaacactgccttacagtcacctcatgttgcagaccatgtttatggtaatacacactttccaaaatgagccttaaaaattgtaaaggggatactataaatgtgctaagttatttgagacttcctcagtttaaaaagtgggttttaaatcttctgtctccctgtttctctaatcaaggggttaggactttgctatctctgagatgtctgctacttgctgcaaattctgcagctgtctgctgctctaaagagtacagtgcactagagggaagtgttccctttaaaaataagaacaactgtcctggctggagaatctcacaagcggaccagagatctttttaaatccctgctactgtcccttctcacaggcattcacagaacccttctgattcgtaagggttacgaaactcatgttcttctccagtcccctgtggtttctgttggagcataaggtttccagtaagcgggagggcagatccaactcagaaccatgcagataaggagcctctggcaaatgggtgctcatcagaacgcgtggattctctttcatggcagaatgctcttggactcggttctccaggcctgattccccgactccatcctttttcaggggttatttaaaaatctgccttagattctatagtgaagacaagcatttcaagaaagagttacctggatcagccatgctcagctgtgacgcctgaataactgtctactttatcttcactgaaccactcactctgtgtaaaggccaacagatttttaatgtggttttcatatcaaaagatcatgttgggattaacttgcctttttccccaaaaaataaactctcaggcaagcatttctttaaagctattaagggagtatatacttgagtacttattgaaatggacagtaataagcaaatgttcttataatgctacctgatttctatgaaatgtgtttgacaagccaaaattctaggatgtagaaatctggaaagttcatttcctgggattcacttctccagggattttttaaagttaatttgggaaattaacagcagttcactttattgtgagtctttgccacatttgactgaattgagctgtcatttgtacatttaaagcagctgttttggggtctgtgagagtacatgtattatatacaagcacaacagggcttgcactaaagaattgtcattgtaataacactacttggtagcctaacttcatatatgtattcttaattgcacaaaaagtcaataatttgtcaccttggggttttgaatgtttgctttaagtgttggctatttctatgttttataaaccaaaacaaaatttccaaaaacaatgaaggaaaccaaaataaatatttctgcatttcaggtgagtgaggcatcttttttaatgtcatgtttaatattcggaacagcctgtaatgtgcacaagcgaagagcaagaatggccctgggcctggaatccttcccagttgtcttcttttcttcttagtcaccctcctctaactcagctggcctcaggcactgacagacactgacccgagcctcccaccaggttgtctgtggcaaaagtcctaactggttgtggaaaagaaagtcatggtgtgaataacagagaaggtcctgaaaatgcagcttccttgctggaaaatgtatttcaggcgacgctggctgtaactggtgattccgtggtgaatgta

SEQ ID NO: 14333 - DNA, 1448 bp, Homo sapiens
tccttcctctattagagcatctagtagagatcctcatctccagggtgatcagagtgacactgagaaattgtcattttttggccatcatgtctattaaatccaaagccctttgaagcagggagtgttactcatttctgtcccccagtaagcccctcatacagttctcaaacctagggaaagtgaaataaataaatggctatagctttatataattcaatcaccttttcagtttatttggggcaataccttttccctcaaataccctaataattgaagcaacattggattattttggcttgttatccagtaactaacatggataacagtatccatttacacgtcctcagtatccatttgatttcctcatcctttttttcttcaaaaaaaaaatctaggaagtgcaaacctttttttttctcctgtcctcttcccttctctctaccctgcctgtcctctgtcacccaccctcccctccaccaggtccagcatgccagcaaacagatcagtgctgagaagcagtacaaagggatcattgattgtgtggtgagaatccctaaggagcagggcttcctctccttctggaggggtaacctggccaacgtgatccgttacttccccacccaagctctcaacttcgccttcaaggacaagtacaagcagctcttcttagggggtgtggatcggcataagcagttctggcgctactttgctggtaacctggcgtccggtggggccgctggggccacctccctttgctttgtctacccgctggactttgctaggaccaggttggctgctgatgtgggcaagggcgccgcccagcgtgagttccatggtctgggcgactgtatcatcaagatcttcaagtctgatggcctgagggggctctaccagggtttcaacgtctctgtccaaggcatcattatctatagagctgcctacttcggagtctatgatactgccaagggtgagagaggggcatcggggagaaggagggtggtgtggaaagaggatcctatgggatctataactcacaaaggacctgatatatattgatcttgttttttctagtctctgggataattgaggcttctgaatgaggaggtgatgtgcataagttaatagctgaagcgttccttgtgtcctctactgaaataaactctggcctttagttattcagagaggaggaggggggagcctgtctccctctagacacagccatagcagttactgagtttaacttgaagccacttccaatgccctgtatacaagctgagcactgcccctccggggtccggagagggcagcagccacctttgctgtctgcctggtcatatgtgaagcacctgcacaggggcaggttccccgcaaggtcagagcatggagctggaggtgcagtggcctctctccctccacctgctttctgctgagaacaggcacttcatagc

SEQ ID NO: 14334 - DNA, 1448 bp, Homo sapiens
tagtctctgagtacattttatattatctttgttgccacatgtcaggatacaacacaatagttttataaataacaactgtactttgattttaggtactaatttaatgctttagtttttactactttgaaaggggaggttcatctaagtattactgataacagggatccaacttaaagtaaaagttggaaagggcaagagtcttttaagcggaacttcaattctgttgtcatggttacttatatataatgaatataaatagacaaataggacttggaaaatgtggtatattctaagtcaagatgctatgaagttgttatagtttaagggacattcttaagaaggaattacttaagtacattactcttctcatttcaaggacatgaaaaagtaaaggatggtctggcactattttattttattttttttttgacttgtactgaatatatgtactttgaagatttacatctataactagaaagtatgctaatccgaggtctggttattaggccagattcttgttcagttattttttaaactaatgttgcctcctttttagtaagattctacgaaagttttttaactattaaagttatttcttaaggggtagctcttatacttcctctgctctctttttcagtttccataaaaagctgttttcttagctattactccaaataaagttctttggtttgcttaaaaatgtagtgtaatgcagttgttttctctccgctaacctgagtgtccacagtagatatcgagacagctttaggaaggtgacggtcatgggtaagtgacggctgtgcctgtcatcttcagattcttcaaatactgcaaactatgaaacatgttaagaccaatataaacccaaagatgtgagttgattatactttaataattacattcataaaaagtttactatcttcaatgccaaaaaagtcttaacctataaatgattatatacaatcttagaaaatgtgcttaacagttatggcttctttatttctatgaggaaagattagtaagaaacttaaaattaacatccttttaagattttctgttccattttaatgtattttaggcatttagaactagcctggcataatgaagaaagaaataaaagaattaaagataactgagttttgatcctatgtttatctctaaaatgggctgtcttgttccaattttcaaaattagaataatttttacgtgccttacaagaccaagaattagtaggaataaagttggaaggatgatgtcagttatttctgtctttgaaagtatttacatggaaaagagtttgcttaaaattatattcttaatcagaatttctttaaactacatcatctaattgcttctgtaaaattattatggtactacaatacagtggacactcttacagcttaaagaaatgggcttgttgttgttgttgttgtttgtatttttgagat

SEQ ID NO: 14335 - DNA, 1291 bp, Homo sapiens
cagtctccccagaaggcagtgggccacagaagtctagatccccctcacactcatttgcattatcctgttgcctggtatgtcatgagtttttaactgaaacctgctgatgcgcagatcaagaaatgggactagctgaaggacagaataaaagcttaagtcacagctttaaaaataactaaattactttaaaatgcatgtttgaaaaaaagcagtgaatttaaaattatttacttcctgctgttttaagggagtgaaaaataaaaaataagttaaaagccttagttttgaaattcaaaatggttagaaaactattttattgtctattaattcactgattataatacagcgacagatttttttttaaattagcttattttaagccttgaataaggctcgagaatcaagcttttctgaatctgtcctctgtgttgaaaatggtagtttctgcatgaaaactaaagaattaaggctaaaatacgagcagatagtttggaatttacacttgaagagggagaacaactctaccaattttcttggataagttatctgcttcctatgactttgctgtattcccaggaggagacagaggaggacagtgacctgtcagattatggtgatgatgtggatgggaggaaagacgccttggctgaaccatgtttcatgttgattggggagatttttgaacttcgaggaagtaagcttctttgttattatttagtggtatttgctagttaagtggtatatataatcgtacattcacatgcatttaatatccctttattgctgaaatgcatcagacatgtatttatattcatgcatccattcattcaacatagccttttaagagccaacccaggccgggcacggtggctcacgcctgtaatcccagcactttgggaggccaaggcgggtggatcatgaagtcaagagatcaagaccatcctgaccaacatggtgaaaccccgtttctactaaaaatacaaaaattagccgggcatggtggcgcatgcctgtaatcccagctacttgggaagctgaggtgggagaattgcttgaacccaggaggtggaggttgcagtgagccaagatcgcaccactgcactccagcctgggtaacagcgagactccgtctcaaaaaaaaaaaaaaaaagagccaaccagatactatgctatatatacaaccccaagacagatatcatctctgtcctaacgtaacatagcgtcctgatttactctgccccatgttcctctgactacagaaggttagaatccttcacgttgctttttatgt

SEQ ID NO: 14336 - DNA, 1369 bp, Homo sapiens
cgagtagctgggattacaggcatgcactaccatgcccagctaacttttgtatttttagtagagatggggtttcgccatgttggctgggatggtctctaactcctgacctcaggtgatctgtctgcctcagcctcccaaagtgctgggattacaggcgggagccacctcgcccatcctcccttgacttttgatatcacattgccgcataactggttggttttcttatttcagcaaagccaactgtttcccagtcatctctgattatagttaccaatattaaatactgtttgagagttacttgtttactgagataatttcagacctaaaattagacttttctcttagatgcagatatttattttgaataaacccttggagaaaaacatttttccacttttttccttctttgttggttcaggcgctgatggaactgctgctaattgaactgtgtcctgagctgagagttcatttagatcaacttaaagctggccaagtttgagactacacaaataaaccaccagaaaaatgtctgtgtaataatagacatgaaacattttcctcttttccacagagggcttaactgagaaccgtattgatttttattttagttacctccctctagttttatgtgaaattagtagaatcagggaggacgggacttatgctgtggtaggcaacagaaaaaaacttctattgattttaatttaatatgaatactttaaagatcaacataccgattgaaatacaaatgttaatatgtgagaacctaggaagtattttaaatatttatgaaaatattttgttttaaaatgaactatgaatattgtacagttaatttcctcactgaggactgtgaacattcttatattatttcatgtatattgaagaacattgttatgcaatgctttgtgtaaagttattgtgaagattttattgtctttatttttaccaaagatttcccatagtttgagcattcaaagcaataaaatataaaaatgaatcacagtgctctatgatatttaagatacttatatctcaaagaggttgaaactctacaggctgttcaaatatttatcaaatgcctttttagagaaaacactatgtacttaactacttctgcagggaagtaaaagtttgctgccttctccagaaacaaaataaatctgtaaaatatatgatttttagtgagcagaaagagccaaattagtgcttgaagtgaggcattagggaggagagatgggagctgacccttggagtatgggcagggccgagatgggggagcggaaagaggagggcagctacttcaggggctcggttgtattatcaagccgtttagaccacagggacattaggggagatccagagtaca

SEQ ID NO: 14337 - DNA, 1099 bp, Homo sapiens
tccagatgggaacaagcaggaatgtgtatgatttcttaaagacacctcaggtgcctttggtctctcgtattgtatatacagtgtatatgcaatacagtgtacaatgtaaagtgtacagtgtacaataccgtgtataatagaaagcagtgccaaggtctactagttttctctacagcagcagtcaacagtcaagttagagaacaggtggggaactagagacagagtgggatagagagagagaggaatgagccaggaggacacgtggaatccaggaggcaacggagccctgaggtgctcagatggaacagggtgttcagacaaccgcgagtaccatgaaccaggtgtgggacgacggtgtgtcccaggaacagggtgtgatgggtacagcatgtcccaggaacagggtgtgaggaggacagtgtgtcccatgaacagggtgtgaggacagtgtgtcccacgaacagggtgtggtgtggacagtgtgtcccacgaacagggtgtgaggaggacggtgtgtcccacgaacagggtgtggtgtggacggtgtgtcccatgaacagggtgtggcgtggacggtgtgtcccatgaacagggtgtggtgtggacggtgtgtcccatgaacagggtgtggtgtggacggtgtgtcccatgaacagggtgtggtgtggatggtgtgtcccaggaacagggtgtgaggaggacggtgtgtcccaggaacagggtgtgaggacggtgtgtcccaggaacagggtgtgaggacggtgtgtcccacgaacagggtgtggtgtggacggtgtgtcccacgaacagggtgtggtgtggacggtgtgtcccaggaacagggtgtggtgtggacggtgtgtcccaggaacagggtgtggtgtggacggtgtgtcccaggaacagggtgtggtgtggacggtgtgtcccaggaacagggtgtggtgtggacggtgtgtcccacgaacagggtgtggtgtggacggtgtgtcccacgaacagggtgtggtgtggacggtgtgtcccacgaacagggtgtggtgtggacggtgtgtcccatgaacagggtgtggtgtggatggcatgaacagggagcgag

SEQ ID NO: 14338 - DNA, 1371 bp, Homo sapiens
gtgactatgagagcggggacgacggccacttcgaagaggtgacgatcccgcccctggattcccagcagcacacggaagtctgactctcaactccccccaaagtgcctgactttagtgaacctagaggtgatgtgagtaatccgcgctgttctttgcagcagtgcttccaagctttttttggtgagccgaatgggcatggctgcgctggatcctgcgcctctggacgtgctagccatttccagtgtcccaactactgtcatcgtgaggttttcatcggctgtgccatttcccaacgtcttttgggatttacatctgtctgtgttaaaataatcaaacgaaaaatcagtcctgtgttgtcagcatgattcatgtatttatatagatttgattattttaattttcctgtctcttttttttgtaaattttatgtacagatttgatttttcatagttttaactagatttccaagatattttgtgcatttgtttcaactgaattttggtggtgtcagtgccattatctagcaccctgatttttttttttttactataaccagggtttcattctgtctttttccactgaagtgtgacattttgttagtacatttcagtgtagtcattcatttctagctgtacataggatgaaggagagatcagatacatgaacatgtcttacatgggttgctgtatttagaattataaacatttttcattattggaaagtgtaacggggaccttctgcatacctgtttagaaccaaaaccaccatgacacagtttttatagtgtctgtatatttgtgatgcaatggtcttgtaaaggtttttaatgaaaactaccattagccagtctttcttactgacaataaattattaataaaatacttgagctttatgcctctttttccttcccattgatactcctgttcaggattcagtggctgagatagaagaatggatgaatggaagggtggatattgatgtatttgcttttagtggacaaggcgtaaatgtgaaaatcctctctaccctgaccaaaagccctgctgtccaagcggagccagccaccaggtggcagtatatagctacttgatacggctcaaaactatagccacaaaagtaaaaagcataactttttaatatttttaaacaaaaccaagaaaattttatacatttttaattagtatgaatttattggttgtaattttaatgcttacatgtttttcacctttgtcaatgttttatatcaaaaacagtctctgtgaagcattatacctttctgttgtcaacttacacagtactgtatgatttaatgtgagatccagaagctattttttatatatttttatacagtcaaaatccatccctacttcc

SEQ ID NO: 14339 - DNA, 1454 bp, Homo sapiens
attctgtcatagtcattgacagagctgggtttcagtgtgaattagtgaagtgctataaagaaatttgtccttttctttgatacgtttcttgtgtggagaaatgagtatctaccagttagtaattttttgggaacttgagtaatacaaatgtttttattgaagaagttataaacagtgccatagacaaaggtgattttatttttcttttcttgtaggtggcagataatggaaagcctcagttgtcatctttgacatacattgacattagggtaattgaggagagcatctatccgcctgcgattttgcccctggagattttcatcacctcttctggagaagaatactcaggtggcgtcattgggaagatccatgccacagaccaggacgtgtatgatactctaacctacagtctcgaccctcagatggacaacctgttctctgtttccagcacagggggcaagctgatagcacacaaaaagctagacatagggcaataccttctcaatgtcagcgtaacagatgggaagttcacgacggtggccgacatcacagtgcatatcagacaagtcacacaggagatgttgaaccacaccatcgcgatccgctttgccaacctcactccggaagaattcgttggtgactactggcgcaacttccagcgagctttacggaacatcctgggtgtgaggaggaacgacatacagattgttagtttgcagtcctctgaacctcacccacatctggacgtcttactttttgtagagaaaccaggtagtgctcagatctcaacaaaacaacttctgcacaagattaactcttccgtgactgacattgaggaaatcattggagttaggatactgaatgtattccagaaactctgcgcgggactggactgcccctggaagttctgcgatgaaaaggtgtctgtggatgaaagtgtgatgtcaacacacagcacagccagactgagttttgtgactccccgccaccacagggcagcggtgtgtctctgcaaaggtactgcacatgagtgtatgaaagtcggtgtcacagatggtttcagacggcctttgaagcctttgatggctatacatgaaaggtgatgttcttgaaatgtctgttaattatcttttccctttctcccctctttgaatgaagagggaaggtgcccacctgtccaccatggctgtgaagatgatccgtgccctgagggatccgaatgtgtgtctgatccctgggaggagaaacacacctgtgtctgtcccagcggcaggtttggtcagtgcccaggtgagagttgaatggttgggtatacttttatttttaaaaatcggtttcattgtttcttaccattttcttctttattggagtctaaaaatattgcaaagtatgtttattgtaagaagacagatgtggagatgaataaagaatgacagtagtaagttttgcttcct

SEQ ID NO: 14340 - DNA, 4118 bp, Homo sapiens
ttccaccacacattcccagtgcagccgagagagggagttttggcttcgctaagagcagagtgctgtttcttctgttttttgtttttcatcatttatggacaaaattctgtaaagtatacctggttttaggtggataaaaataaaacaagttgaaggttccattcaaatattgacatcccctgagtttctgcttaatttcagaatataatttttaaggatactttgtttctgtttctctaactactactactactgccccttgtgtttttctgtaacatgtattttttcctctccttccaggaaatattggaaattcttttatgattgatcctgtcttgggctctattaaaactgccaaagaattagatcgaagtaaccaagcggagtatgatttaatggtaaaagctacagataagggcagtccaccaatgagtgaaataacttctgtgcgtatctttgtcacaattgctgacaacgcctctccgaagtttacatcaaaagaatattctgttgaacttagtgaaactgtcagcattgggagtttcgttgggatggttacagcccatagtcaatcatcagtggtgtatgaaataaaagatggaaatacaggtgatgcttttgatattaatccacattctggaactatcatcactcagaaagccctggactttgaaactttgcccatttacacattgataatacaaggaactaacatggctggtttgtccactaatacaacggttctagttcacttgcaggatgagaatgacaacgcgccagtttttatgcaggcagaatatacaggactcattagtgaatcagcctcaattaacagcgtggtcctaacagacaggaatgtcccactggtgattcgagcagctgatgctgataaagactcaaatgctttgcttgtatatcacattgttgaaccatctgtacacacatattttgctattgattctagcactggtgctattcatacagtactaagtctggactatgaagaaacaagtatttttcactttaccgtccaagtgcatgacatgggaaccccacgtttatttgctgagtatgcagcgaatgtaacagtacatgtaattgacattaatgactgcccccctgtgtttgccaagccattatatgaagcatctcttttgttaccaacatacaaaggagtaaaagtcatcacagtaaatgctacagatgctgattcaagtgcattctcacagttgatttactccatcaccgaaggcaacatcggggagaagttttctatggactacaagactggtgctctcactgtccaaaacacaactcagttaagaagccgctacgagctaaccgttagagcttccgatggcagatttgccggccttacctctgtcaaaattaatgtgaaagaaagcaaagaaagtcacctaaagtttacccaggatgtctactctgcggtagtgaaagagaattccaccgaggccgaaacattagctgtcattactgctattgggaatccaatcaatgagcctttgttttatcacatcctcaacccagatcgcagatttaaaataagccgcacttcaggagttctgtcaaccactggcacgcccttcgatcgtgagcagcaggaggcgtttgatgtggttgtagaagtgacagaggaacataagccttctgcagtggcccacgttgtcgtgaaggtcattgtagaagaccaaaatgataatgcgccggtgtttgtcaaccttccctactacgccgttgttaaagtggacactgaggtgggccatgtcattcgctatgtcactgctgtagacagagacagtggcagaaacggggaagtgcattactacctcaaggaacatcatgaacactttcaaattggacccttgggtgaaatttcactgaaaaagcaatttgagcttgacaccttaaataaagaatatcttgttacagtggttgcaaaagatggagggaacccggccttttcagcggaagttatcgttccgatcactgtcatgaataaagccatgcctgtgtttgaaaaacctttctacagtgcagagattgcagagagcatccaggtgcacagccctgtggtccacgtgcaggctaacagcccggaaggcctgaaagtgttctacagcatcacagacggagaccctttcagccagttcactattaacttcaatactggagttatcaatgtcatagctcctctggactttgaggcccacccggcatataagctgagcatacgcgcaactgactccttgacgggcgctcatgctgaagtatttgtggacatcatagtagacgacatcaatgataaccctcctgtgtttgctcagcagtcttatgcggtgaccctgtctgaggcatctgtaattggaacgtctgttgttcaagttagagccaccgattctgattcagaaccaaatagaggaatctcataccagatgtttgggaatcacagcaagagtcatgatcattttcatgtagacagcagcactggcctcatctcactactcagaaccctggattacgagcagtcccggcagcacacgatttttgtgagggcagttgatggtggtatgcccacgctgagcagtgatgtgattgtcacggtggacgttaccgacctcaatgataatccaccactctttgaacaacagatttatgaagccagaattagcgagcacgcccctcatgggcatttcgtgacctgtgtaaaagcctatgatgcagacagttcagacatagacaagttgcagtattccattctgtctggcaatgatcataaacattttgtcattgacagtgcaacagggattatcaccctctcaaacctgcaccggcacgccctgaagccattttacagtcttaacctgtcagtgtctgatggagtttttagaagttccacccaggttcatgtaactgtaattggaggcaatttgcacagtcctgctttccttcagaacgaatatgaagtggaactagctgaaaacgctcccctacataccctggtgatggaggtgaaaactacggatggggattctggtatttatggtcacgttacttaccatattgtaaatgactttgccaaagacagattttacataaatgagagaggacagatatttactttggaaaaacttgatcgagaaaccccggcggagaaagtgatctcagtccgtttaatggctaaggatgctggaggaaaagttgctttctgcaccgtgaatgtcatccttacagatgacaatgacaatgcaccacaatttcgagcaaccaaatacgaagtgaatatcgggtccagtgctgctaaagggacttcagtcgttaaagttcttgcaagtgatgccgatgagggctccaatgccgacatcacctatgccattgaagcagactctgaaagtgtaaaagagaatttggaaattaacaaactgtccggcgtaatcactacaaaggagagcctcattggcttggaaaatgaattcttcactttctttgttagagctgtggataatgggtctccatcaaaagaatctgttgttcttgtctatgttaaaatccttccaccggaaatgcagcttccaaaattttcagaacctttctatacctttacagtgtcagaggacgtgcctattggaacagagatagatctcatccgagcagaacatagtgggactgttctttacagcctggtcaaagggaatactccagaaagcaatagggatgagtcctttgtgattgacagacagagcgggagactgaagttggagaagagtcttgatcatgagacaactaagtggtatcagttttccatactggccaggtgcactcaagatgaccatgagatggtggcttctgtagatgttagtatccaagtgaaagatgcaaatgacaacagcccggtctttgaatctagtccatatgaggcattcattgttgaaaacctgccagggggaagtagagtaattcagatcagggcatctgatgctgactcaggaaccaacggccaagttatgtatagcctggatcagtcacaaagtgtggaagtcattgaatcctttgccattaacatggaaacaggctggattacaactttaaaggaacttgac

SEQ ID NO: 14341 - DNA, 1108 bp, Homo sapiens
ccaaagtaggtttcaaaagcctataaagaactgttaaaagttaaagttgagacaaaatggaaccaaaaccttaatttaaattctcttcatgactttgtatgaacactgccttttgggttttttctttcaagtgaagaagagtatttttattgttgctttttaaggaatcatttcgaaactagtatttttcacctacacatttaagagattgggatatttttactaccaagaaaaaaaaaataaggaaacaaccagccaaacgaggtggtgtcccaaaatagatttatggtattttccagaaagggcagtgccagacttttccagtagtaatttagtgggaggcggggaggtgttgggattgtgggcagtgtggttggtaagtatataagaaactgtgtgtaaatattgagatttaaaggtgagagagaagctggaaatttgtaggtcatttattctgtggtccttgctttacagagaaagtaagtagtgtacagtagacttacgtttatatgcttttggaaatgaacaaaagtgatagaataatatttacacattggacctcgtattcattacaagatacattttttggcagaagaattatcagcccaagttatttcttcagagattcctggcaggacaattggtatcacagtgtagaaactcctttaggaaaaatcagtatattttgttggctaaaattaggcatgctaattattcacttggagtgtgtcttaactaatttctagggcatgaaggaagtgtggaaagatgcgtgtcaggtgaagagatggaggggcagttgaggaacacccgtgggggctgccagagactgcactacagcttggtgtgccttggcgtgcacccggcccaggccaggctggtgcttgctggaacttcgctccttgcccattgcccatgtccaccagggtcttctttgcctaactcgggggcatttaatattgcgctaattaatatgagcctgtgcaggagtgctgtggctctggggaccaacaacctgtccacgtaactgtttgcttcttgtctttgacttaaagctactagtgttggttgagtattataaccaaatttttgtcatattttacctatt

SEQ ID NO: 14342 - DNA, 3135 bp, Homo sapiens
acattttggagacagtgatggcagccaacgacttgaacagactcctctgcagtttacacacctcgagtacaacgtcaccgtgcaggagaactctgcagctaagacttatgtggggcatcctgtcaagatgggtgtttacattacacatccagcgtgggaagtaaggtacaaaattgtttccggagacagtgaaaacctgttcaaagctgaagagtacattctcggagacttttgctttctaagaataaggaccaaaggaggaaatacagctattcttaatagagaagtgaaggatcactacacattgatagtgaaagcacttgaaaaaaatactaatgtggaggcgcgaacaaaggtcagggtgcaggtgctggatacaaatgacttgagaccgttattctcacccacctcatacagcgtttctttacctgaaaacacagctataaggaccagtatcgcaagagtcagcgccacggatgcagacataggaaccaacggggaattttactacagttttaaagatcgaacagatatgtttgctattcacccaaccagtggtgtgatagtgttaactggtagacttgattacctagagaccaagctctatgagatggaaatcctcgctgcggaccgtggcatgaagttgtatgggagcagtggcatcagcagcatggccaagctaacggtgcacatcgaacaggccaatgaatgtgctccggtgataacagcagtgacattgtcaccatcagaactggacagggacccagcatatgcaattgtgacagtggatgactgcgatcagggtgccaatggtgacatagcatctttaagcatcgtggcaggtgaccttctccagcagtttagaacagtgaggtcctttccagggagtaaggagtataaagtcaaagccatcggtggcattgattgggacagtcatcctttcggctacaatctcacactacaggctaaagataaaggaactccgccccagttctcttctgttaaagtcattcacgtgacttctccacagttcaaagccgggccagtcaagtttgaaaaggatgtttacagagcagaaataagtgaatttgctcctcccaacacacctgtggtcatggtaaaggccattcctgcttattcccatttgaggtatgtttttaaaagtacacctggaaaagctaaattcagtttaaattacaacactggtctcatttctattttagaaccagttaaaagacagcaggcagcccattttgaacttgaagtaacaacaagtgacagaaaagcgtccaccaaggtcttggtgaaagtcttaggtgcaaatagcaatccccctgaatttacccagacagcgtacaaagctgcttttgatgagaacgtgcccattggtactactgtcatgagcctgagtgccgtagaccctgatgagggtgagaacgggtacgtgacatacagtatcgcaaatttaaatcatgtgccgtttgcgattgaccatttcactggtgccgtgagtacgtcagaaaacctggactacgaactgatgcctcgggtttatactctgaggattcgtgcatcagactggggcttgccgtaccgccgggaagtcgaagtccttgctacaattactctcaataacttgaatgacaacacacctttgtttgagaaaataaattgtgaagggacaattcccagagatctaggcgtgggagagcaaataaccactgtttctgctattgatgcagatgaacttcagttggtacagtatcagattgaagctggaaatgaactggatttctttagtttaaaccccaactcgggggtattgtcattaaagcgatcgctaatggatggcttaggtgcaaaggtgtctttccacagtctgagaatcacagctacagatggagaaaattttgccacaccattatatatcaacataacagtggctgccagtcacaagctggtaaacttgcagtgtgaagagactggtgttgccaaaatgctggcagagaagctcctgcaggcaaataaattacacaaccagggagaggtggaggatattttcttcgattctcactctgtcaatgctcacataccgcagtttagaagcactcttccgactggtattcaggtaaaggaaaaccagcctgtgggttccagtgtaattttcatgaactccactgaccttgacactggcttcaatggaaaactggtctatgctgtttctggaggaaatgaggatagttgcttcatgattgatatggaaacaggaatgctgaaaattttatctcctcttgaccgtgaaacaacagacaaatacaccctgaatattaccgtctatgaccttgggataccccagaaggctgcgtggcgtcttctacatgtcgtggttgtcgatgccaatgataatccacccgagtttttacaggagagctattttgtggaagtgagtgaagacaaggaggtacatagtgaaatcatccaggttgaagccacagataaagacctggggcccaacggacacgtgacgtactcaattgttacagacacagacacattttcaattgacagcgtgacgggtgttgttaacatcgcacgccctctggatcgagagctgcagcatgagcactccttaaagattgaggccagggaccaagccagagaagagcctcagctgttctccactgtcgttgtgaaagtatcactagaagatgttaatgacaacccacctacatttattccacctaattatcgtgtgaaagtccgagaggatcttccagaaggaaccgtcatcatgtggttagaagcccacgatcctgatttaggtcagtctggtcaggtgagatacagccttctggaccacggagaaggaaacttcgatgtggataaactcagtggagcagttaggatcgtccagcagttggactttgagaagaagcaagtgtataatctcactgtgagggccaaagacaagggaaagccagtttctctgtcttctacttgctatgttgaagttgaggtggttgatgtgaatgagaacctgcacccacccgtgttttccagctttgtggaaaaggggacagtgaaagaagatgcacctgttggttcattggtaatgacggtgtcggctcatgatga

SEQ ID NO: 14343 - DNA, 1202 bp, Homo sapiens
aagagcataataataagtcgtgaaaaaaaattcacatccagaagttggagggccacaaagtacaagtcgtccaggccagtctgcagagactgttcatgcttccgcccagcaaaaatctggcaggcgacacatcgcgacgaatttcggctgcagaagaggaagagcatcacctgcagtccgcggcgtgggaaacgccgccggaggggctccgcgagccggggaagtgcgcgcagcggggctccaggcggctccaggcgctgagtgcgaggaacgcccgcgctcgccggcgcccgggagacgcagccgaaggaggagggcgggcgtttcacccgcgccacagctgcggccggccagagagaccgcagaggccgggacccccgcagcctccacggccgctgctgccactgtcggggtggcgcgcccagccggagaatcccgtccgcgcccggggcggggggcgaggcggggcgctgacgtcacctcccctcccccaccgcctccaagggggagggagtggggaaagaggcagcgagtcgccgcagccggcggccgcaactcctcaactcggcggctggctgcctgggcacgtcctgacaaacttggctgctcccgggccctcgttccggccccgcgcactctcttttcgcctgcgtttggtgcttaagtttgccctggtcggaagcctccggagatgcggccgcctgggtcccggcggcacggacgttggcactctggttagggacatgctgaagatcccggggaggcaaagttggtacttcaaacccggctcttaacacatatctacaccgcgaggggatcacggagctgccgaggactttagagcccagggccgaggactcggctagactggtgagttctttgttcaaatcgtgcatgccttttggcatttaagtttaaacgttaatgaaattacgtggggtgtgtggctctaagcgagtgcggggaagcgtgtgcgccctacgggttctcggctccaggagctgcgcatccctctggctttgtgcggatcggcgatgaaagattcgtatgcatagctttgggagttcataaaatacatatagagcactgttaaaaagaacttgagaggcgatgctgtttgtgcattattttgaatgtaacttattatagcaatggtgcctagggagggcgcatcggggccgcgagatttgcaggggcgcagc

SEQ ID NO: 14344 - DNA, 1059 bp, Homo sapiens
tgcctttcttttttttctgtcacccaggttggagtgcaatggtgtgatctcagctcactgcaacccctgcctcccaggctccagcgatcctcccacctcagcctcctgaatagctgaccaccagcacactaggcaaacccaccccactcacggcctcccttgggaattcagacctaaccatcgctgagctgaagtgtaggtgtggtctgattagactcattttttcttttttgtagagatggggtttcaccgttttgccgaggctggtcaccaactcctgggctcaagggatccacccacctcagcctcccaaagtgctgggattgcaggcatgagccaccatgcctggccttaggaaattcctttctatgtaacaccctgcatcattaatagccagcttttttgaaacttctacattaaattgtctaaactctcaaataaattcctagtaaagtaattatatagggttgttaaatcagagatcaacagcacaatgactaatgcatactcatgatttcatctcactagacaaatgtactgaggctggagcctgtgtgaacagaacagaagaggccttcactctagtagtgctcacagtccagcaggtaagacagacttgaagcaagggacaccagagctctgatcagtgtgaaatagggagctaggagaacgtttagctttgggactcaactgagctgaagaatccagggaagcctgcctgaagaggtgatgtttgcgcatttgaagtatggatgggaagcaagcctctgtgtgtgtgttggaggataggtggtattttagtgagaaaaaagaacatttgtaatggactgatctgatgctttactggagaaagtttattatggctgaatagtgaaatacaagagctatagatggcaggaggtgagcttggagggaaaagcagcagtcaattaaattgcagttacaggttgagtattttttatccaaagtgcttgggaccagaagtattatggacatcagatttttttgaatgtttgagtatttgcaaaatacccaatatgagcatcccgagtccgaaaa

SEQ ID NO: 14345 - DNA, 2688 bp, Homo sapiens
gtgtcttaggtcattttttgacagtggctctaatactggaatctattttaactaaaggttattatcataaagcaggtgtttgctgaagacagcttactcagatcactactgcctggaggtggttgatatatcctggtgtaaaccttcaagaagggcacaggcaggaaaacatgagccagcaactgaagaaacgggcaaagacaagacaccagaaaggcctgggtggaagagcccccagtggggctaagcccaggcaaggcaagtcaagccaagacctgcaggcggaaatagaacctgtcagcgcggtgtgggccttatgtgatggctatgtgtgctatgagcctggccctcaggctctcggaggggatgatttctcagactgttacatagaatgcgtcataaggggtgagttttctcaacccatcctggaagaggactcactttttgagtccttggaatacctaaagaaaggatcagaacaacagctttctcaaaaggttttcgaagcaagctcccttgaatgttctttggaatacatgaaaaaaggggtaaagaaagagcttccacaaaagatagttggagagaattcgcttgagtattctgagtacatgacaggcaagaagcttccgcctggaggaatacctggcattgacctatcagatcctaaacagctcgcagaatttgctagaaagaagccccccataaataaagaatatgacagtctgagcgcaatcgcttgtcctcagagtggatgcactaggaagttgaggaatagagctgccctgagaaagcatctcctcattcatggtccccgagaccacgtctgtgcggaatgtgggaaagcgttcgttgagagctcaaaactaaagagacatttcctggttcatactggagagaagccgtttcggtgcacttttgaagggtgcggaaagcgcttctctctggactttaatttgcgtacgcacgtgcgcatccacacgggggagaaacgtttcgtgtgtccctttcaaggctgcaacaggaggtttattcagtcaaataacctgaaagcccacatcctaacgcatgcaaatacgaacaagaatgaacaagagggaaagtagtcctccaacaggatgaagcagattaacagaagagtgatcagtgacaaacatgcctcattgattattgtttctaggaaggaatttctaaatcaatattgcaaccccaaaagcggttataatttggtgttactaagatgctcctacactttgtgataccgttttaaggacatggtgcatttttttttcttttatttgttttatttagaactttttttatttgttttatttagaactttgtgtgttcttaaagtgtgcttccaacaggaaggtcagtgataaattttcaaaagcataaccttcaatatattatctgttggattattggatataagacttattttcatgtactataaatatgaaaataactttgatttttaattgtgtagtttccatttcttagcttttgccttttaaatttatacttcagccaggcatagtgactgatgcctgtaatcccaacactttgttgggaggccaaagcaggaggatagcttgaggccaggagttccagaccagcctgggcaacatagtgagatcctgtctctacaaaaaaatttgtttttatttgtatttatatatttttatttttgtttttgttggtaggcgtctcgctctgtcacccaggctggagtctagtgtcgtgatcttggctcactgcaacctccacctcccgggttcaagtgattctctggcctcagcctcccaagtagctgggactacaggtgtgtgtcaccacgcccggctaatttttgtatttttagtagagatggggtttcaccatgttggccaggctagtctcaaactcctgacctccagtgatctgcccacctcggcctcccaaagtgctgggattacaggtgtgagccactgtgcctggccccccacaacatgtttaaacttagctaggcctggttgcatacgcctgtgttcccagctactcaggaggctgaagcaggaggatagcttgagcccaggagtttgaggctacagtgagctgtgattgcaccactgtactccagactggataacagcaagagcccatcttttaaaaaaagtaaaaattaaaaatatacttcatggttcatgtcatagccctagagaatgaaaaatttgcagtagatagtcaataaatgaatcagtagttaaatattccttaaagtcaactgtatttcattgtgatttttgttttctttttatcattgtatcaaactatatggaaatcatatggttagatgtgattatttgataatgttagtccatttgaatccattttagatatttcacaattaaagaatatgaaacttcagaaatatgccaagtctgtattttaaaaaatcaaagtctacattgaaaagagataccatttatttgttcttaaaacttagcaaaattcaacagactgatgttcggtataggtgagatatggcgggaagttgggcttacgtgtggttggataagggataaactgtcacagccagtttggaaataaattttgtaattgtgctatattcgtttttgagctgccgtagcagtactcccaagctaggtaacttagcagaaatgtattgtctcggttccagaggct

SEQ ID NO: 14346 - DNA, 1154 bp, Homo sapiens
ccctgcctggcactatctgaggacctgagaactatgagattgagacatgggcagcaggatggggctggcaacccagaaagattggatttcagtgccatggtgctggctgcggagagcttcacctcagggaggcactactgggaggtggacgtggaaaaggcaaccaggtggcaagtgggcatataccacggctctgcagacgcgaagggcagcacggccagagcttccggagagaaagtcttgctcacggggtcggtgatggggaccgagtggactctctgggtcttcccccctctgaaaaggctcttcctggaaaagaagttggacacagttggcgttttccttgactgcgaacacgggcagatatcattctacaatgtgaccgagatgtccctcatttacaatttctcccattgcgccttccaaggagctctcaggcctgtgttttccctctgtatcccaaatggagacacaagtccagactccctcaccatcttacaacatggtccttcttgtgatgctactgttagcccttaatcttctgtgtgtaaaatccaagaccacgagacaccagaaagttggagaacaagactttgaaagaatttgtgtaaactaacccaataaaaagcgttccaggagtaggagcctgatttaatatccagagcctttgcatttgtgtaactgtcaacacctgtgtgtagtggaagaggttgcacttaacctgaatcatgaatgataataacggggagatcctatgctaatgagaaaaaatgcatatgcatcgtaagcttggggaattagagaagaaatacagtctggggtccttagaactaggttaggaacttgatgtatttctgaaaacatttgcagaatcaggtataatcaggaatgaaagcgggactttagatatgagcatgccaccatgcggaacaggtgtccattactgacagtgagtatcaggacttcctaaagtgttttattccaaatagagaataataatttatatagatattttatgtggataagaaggagttgtggaaaatgtgaatatttttaaattttcttttctttttcttttttttgagacgaaatttcgctcttgtcgcccaggctggagtacagtggctcgatcttggctcatcacaacctccccg

SEQ ID NO: 14347 - DNA, 1163 bp, Homo sapiens
tcttgagaggaatcctgcttcagcagaagaatatcatggccttgcctaattatgtctgttcctggggtagcaggcagaaaagcagggtttttttttttttggttttggttttggtttttttttttgatttggagtcttgctctgtcattcaggctggagtgcagtggcacgatcttggctcactgcaacgtctgcctcccaggttcaagcgattctcctgcctcagcctcctgagtagctgggattacaggcacccgccaccacgcctggctaatttttgtacttctagtggagactgggtttcaccatgttggccaggctggtctcaaaccctgacctcatgatccgccggccttggccacccaaagtgctgggattacaggcgtgagccactgcgcccaaccgaaaagcaggtttttaaaaacatggttgaattaatctataggagaagttaccgaactcttgttcctgaacttgaggttgttgaatagtaacgaagaaatgcttctgcagagactgggccgtgtggggagagagaacatggagaaactgaaggagagtgaagccagggcttctgaacaggtccgcagcctcctaaagctcatcgtggagcttgagaaaaagtgtggggaaggcaccttggcattgctcaaggtaagatgctgggaaaaagaaaataaaattcattccagtatttgagaaatgagaagtggacagtactcattaggggttgctgtcagaacacaatatccaatgatcttcaaccacaaaagaaggctacatgactttctttcagctgccaaaagctttaggaatggtcatagctttgtgggatagtgtggagctgcttcatgagatgaattctcaccttaaaattatcagcagtaagttagggttgagatgtgacacaatgtggttaatacctccatgcaatgaaatattctgtgatcataaagaataaaacagctctataggcactaacagtatttcaagcactcattaagtgaaaaagaaagatgcagactgctttttgtttgatctttggataataagtatatatacacacacatatacatgtgtggttgctaacattcacagactttctggcaaaaaattaataaatgtatagtcatctgtgataatcttgaaacaagggtgagatt

SEQ ID NO: 14348 - DNA, 1145 bp, Homo sapiens
tcagcctctagcatgtgtgcttttcacagagataagtctcaaagtttggggttggtgaggagcccagtatacaggagttccacattaagtcataattggctttgtgttggacagtgtatgtcagctggtgaaatcaggcacagaagagataagggtttcttgtcataacaacataggaacaggtcacccgcgtgttactcaaaactgtaggacggcagtgagggctttgctaatcccagaacagaggtgtaacctggctgcatatccagcctcgagaaaatgtctacagcagatctgatggagaacctcagggaggaactcacctgtttcatctgcttagactatttcagcagcccagtgaccaccgagtgtgggcacagcttttgtctggtgtgtctcctcaggagctgggaggaacataacacacctttatcttgtcctgagtgctggaggaccttggagggcccgcatttccagtcaaacgagcgtctggggaggctggccagcatcgccaggcagctccggtcccaggtgctgcagagcgaggatgagcagggcagctacgggaggatgcccaccactgccaaggcgctctccgatgacgagcagggtggaagcgccttcgtagcccagagccatggtgcaaacagagtgcatctctccagcgaggctgaggagcatcacagagtaagacagctgctcagcatgaaccccacgactcatcgcagctaactccgttagctttcctgacgtttcctaacgtcctctgtgggggacagtcacgagggcccatctgagcaccacatcacaaactggcgtgggtccagtttacacccttttttttccctttttttgtttttgagacagagttttgctctgttgcccaggctggagtgcagcagtgcgatctcagtcactgcaacctccgcctcccaggttcacgccattctcctgcctcagcctccccagtagctgggactacagtcacccaccaccacgcccggctaattttttgtatttttaatagagacggggtttcaccatgttggccaggctggtcttgaactcctgacctcaggtgatccgcctgcctcggcctcccaaagtgctgggattacaggcgtgaggcgccgcacccagcctgc

SEQ ID NO: 14349 - DNA, 1760 bp, Homo sapiens
agtggcgcgatcccggctcactgcaacctccacctcccgggttcaagtgattctcctgcctcagccttctgagtagctgggattacagacgtgtgccaccatgcccagctaattttgtatatttgtggagatggggttttaccatgttagccaggctgatctcgaactcccgacctcaggtaatccacctgtctcggtctcccaaagtgctgggattacaggtgtgagccaccgtgcttggccgtagactttgaattcttaagtgagagtatttgccatgtatgtttctgttcctttttggttatctgacacctactttcattgaataaatatttgttgaataaatgaacacacatttttcataatttttcttaattttgttttatttgtatcatagtcctgatcactacttgtcatatttcttactcatttttggttttctccactagaacgaccgcctcctgggaatggagattttggttttgtttactattgtatctatagcgcacatacctccgaaaacatcaacctctacacccagcgcatcaacagattaaatgtattatatgttggatttcaggaattgttgccatgaaactctaggacttggccaggcatggtggcccacacctgtaatcccagcactttgggaggctgaggagggtgggtcacccggtcaagagacttgagacaatcctgaccaacatggtgaaaccccatctttactaaaaatacaaaaattagctgggcgtggtggcacactcctagactatagtcccagctactcaggaggctgaggcaggagaatcatttgaactcaggaggcagaggttgcagtgagccgagattgcgccactgcacttcagactggcgacagagtgagactccatctcaaaaaaaaaaaaaaaaagaaagaaagaaactctaggacttgtaaggattaaaaatctacagacaagggcatttctcttactaactttatctcgtgtgtgtgtgtgtgtgtgtgtgtgtgtgtgtgtgttttggcaggaagaaacaaagacttgtaaacaggttgttgtgtcagaatacatgaaaatgcaccagttcctgaaggaagaggagcagctgcaactccagctactagaacaggaagagaaagagaacatgaggaagctgaggaacaatgagatcaaactgacccagcaaatcagaagcctaagcaaaatgatcgcacagattgagtcctcaagtcaaagctcggctttcgaatctcttgaggtgagaataacattcatgagagtaatgggaaaaattatagtaactcatagtacttcaagccataggaaataatgttttctttattcatcttaaaaactaagttctggtccaaaagtagttttcctaaagaattgacattctatatgtcaataaagccttatagaagagagagagagagaaaaaaaaaaacacatccagaggaataactatcccaaacaagcctgagagtggcttcaatttcttctgtacctgcctctctgcaacctcagctttgttaatttttttttctagtttattaatgtgtatttactatgtgctgggcacattaaatttaatcttcacaaagacctgatgaagataagtaccattatgatatgaactctaggtctagatgactgtcatctacaggatgggttaatagcggcactgatttaattattcatacctgtggtactaacgagatctgcccgcctgatagttaatagacaggagagccctcc

SEQ ID NO: 14350 - DNA, 1124 bp, Homo sapiens
ttgcggaggtgccccaaggccagcccccaggtgcgtgacctgctgggagatctcacaggactcagcacagggttggactcagcacagagcagaatcagcaaagggagagggtgtgtgggtggcgctcagaggagccacgtgtggacaccccaggatccactccctggagtcatacaggacacacctaactattaagaataagctcactggagactcagcacctggggcttttgctaagggctggtcatgtggtaccccctgcctggcctgtgtgggaattccccacttgtccagaaggagggtgggtttggtgtggtctgtgccgtgagcacaagtactgtggtcacagagccacgcgtaggagttaatggtgctgggaagtctcccagaatccgagttcccagatgtcagtcaagggccagccttgcacacaggccctggtaggacacagccttgggcctgctgtgtgaattcgtcaccacgcacctcactttacggagatgtggaagagctaacctgcctgaggtcacgcaggtagtagtgttggagccagtctgagcccgggcaccttttctccagaaccgcgagtaacctgtgtgcagtgatttgatagtgtgtggccaggcaggagcgggagcaggttgtccatctgctttcaagggccatgttctcccctcctgcccgtctgtacgggagtaggagcaactgttaaaaatcctaagctcatagagcccacgtggcagtatgagagccactattcatggagtgcatgttccaccctgagctgtacacgctttacacgcatgcgttgtttgaaatccgtggaaccccttgagcgcggcggaggcgggctcagagccaacatgcgctgcctgcaacagacacgggccccctgccatgctctgctctcggcacccacgccctgctaagggtgctcagatgcttcacccaggcaggagtgcagtggtgtgatggctaagggtgctcagatgcttctcttcttcagtggctgctagcgtgcctctctgctctaccaccatcgctttatctgagaaaaagtcacttttattttcattttttattttttttgagagggaatctctgtcacccaggcaggagtgcag

SEQ ID NO: 14351 - DNA, 1161 bp, Homo sapiens
cataggcgagggtctgtttctaattaaagcaggttttcctgacagggctgttccaagactccaccagtgctgtgggccctggagagtcagagggtcagctctgggaattagattcgcgttctaggccgagacccaggagccaggggagctggggccacttaccttccccgtgcctcggaagctgagtgtgaagctctgctcttctttctgtcgtggctgcggctggatttcctcacacatcccattgcacggcctgcctcacagctgcaagtgcaccttctcctgggacttagggggtcagggctgggggacaatcccccacacccccacccagggcgaaggtgacaagactttaagggatttcaccccattcacagacaggcatgcattgcccagtccctggttagtggtcagcagtggggccccgccaggctctgagggctgaggtctggtgggaagcctcaagtgagtttgctgcaactgatcttttgctgcttgaccgttcctctctgtctcagccatgtttgaccgtgagaacaaggccggcgtgaacttcagcgagttcacgggtgtgtggaagtacatcacggactggcagaacgtcttccgcacgtacgaccgggacaactccgggatgatcgataagaacgagctgaagcaggccctctcaggtttcggtaactcactcactctggcttgtgtagcgtgtttcattttggaaccttggagccgttgaagttctttaaaccttgttggacttaactgattgtctaaccaggctacgtaaagtttttgttgacgtcatgcaggttcatatttgatattgctcatgtcggaaggcgatcctcgacatggatacgtttattcaggtttttatccaaaatgagataagggctatgcaagccgttcatcttttctgaagtggaatgatgtcgtgagcaaaactgagaatgtggcttttgaaatcatttaaaagtggatccatgaaaataccgtggggcagggcagcttatatttcatgatagatcaaagcacgttgaaaaggcaacagtcacctaagaaacagctgtcagtcaccaggtccaaaccgtgcgcctcagaaggggcgttaggcagaacgcgtgcccattctcaggtgtgctcggcgtgtgtgtgctcggc

SEQ ID NO: 14352 - DNA, 1379 bp, Homo sapiens
tgccagatggccccaccaaacgtgagttgagcccctccagcaatgaccgtgtaccttctaggcccccaccgtcaccatagaggggttcctccaggccctgtctctggcagtggacaagcagtttgaagagagaaagaagcttgcagcttacatctgatcctgggcttccccatctggtgcttttcccatggagaacacacaaccagtaagtgaggttgccccacacagccgtctcccagggaatcccttctgcaaaccaaacgttacttagactgcaagctagaaagccaccaaggccaggctttgttaaaagaagtgtattctatttatgttgttttaaaatgcatactgagagacaaacatcttgtcattttcactgtttgtaaaagataattcagattgtttgtctccttgtgaagaaccatcgaaacctgtttgttcccagcccacccccagtggatgggatgcataatgccagcaagttttgtttaacagcaaaaaaggaagattaatgcaggtgttatagaagccagaagagaaactgtgtcaccctaaagaagcatataatcatagcattaaaaatgcacacattactccaggtggaaggtggcaattgctttctgatatcagctcgtttgatttagtgcaaaaatgttttcaagactatttaatggatgtaaaaaagcctatttctacattataccaactgagaaaaaaatggtcggtaaagtgttctttcataataaataatcagacatggtcccatttgcaggaaaagtgcagactctgagtgttccagggaaacacatgctggacatcccttgtaacccggtatgggcgcccctgcattgctgggatgtttctgcccacggttttgtttgtgcaataacgttatcacatttctaatgaggattcacattaatataatataaaataaataggtcagttactggtctctttctccgaatgttatgttttgcttttatctcacagtaaaataaatataattaatggtttgcatgtgaaattcacttttgaaagaacatgttaccttaccttttgttttagaagttttcaagtattaaaatattttttagaattttcttgttttgattctaagtatctcttccaagtgcttttaattttactaaaaattactcacatgattacttaactttaagcctgatttatggtgtggggaccttatggtgtaactgcatcatccagaagaaattgggaaggtgccagtggcccaggtgcagattcaggaggtagatcaccaaggccaaggcatatgcaggttctggtcaccgtgtcgtctgctgggccttaactctagattcagaacccggagccactcctgccgtggaaagcagagc

SEQ ID NO: 14353 - DNA, 1488 bp, Homo sapiens
tctaccccatccagaacattcttggaagagcacccggagctgaagctgtccctgatgatgaaggtgaaacgtcagccctggccatggctccgctcagggccccggtcacctccgagtcactctgttccttgactgtctttgtgtttctgtacctcaaggcactgaagctggaggactctgtccatgcccgtgtcaccctcgtgtgggagcctctgggctcggcaggtccacatttcatgagctgaggcgtgggccagggccatctggaaagggaactcggcttttccagaacgtggtggatcatctgtcgggtgtgtggtgaacacgttcagttcatcagggcctacgctccgggaaggggcccccagctgtggctctgccatgccgggctgtgtttgcagctgtccgagtctccatccacctttagaaaaccagccacttcttttcataagcactgacagggcccagcccacagccacaggtgcgatcagtgcctcacgcaggcaaatgcactgaaacccaggggcacacgcgcgcagagtgaacagtgagttcccccgacagcccacgacagccaggactgccctccccaccccaccccaccccaggagcacggcacacagttcagcctctgagctggctcacacgtgccatccccaccccggtgctccagggaaggaggacacggacccgacgtgggaggtcctcaggcagcagtggcgcctggtgtcaggtctgtctggctgagtcccgggcgtcccctgccatggcctgtgccttgcatggaggcggcggtggcactgaagagatagctttcaagggcccaacactttgcacttcggctggctgtgagtttctgctttgtaggttgtggtcacatttgcaggctgcgggcagtggcaccgacttgggcctccctttctatgtggcatatttatttatttaaacaccccagggagttacgtggtaacaaggttgtccataaagaggttgcttctatatactagaggccccagatggccaggccttgggctacgtctggcttgcatggtctcccaagggaatcagccccatcaacaaagttcaaatcggggcagaggctgcacttgtgcccccagatgtttctgaggagccagactagggctggcattgctgtagagtgacggctgctgcccagagcgtgtcccagacatcacagcggggctcagcagttcccacagcctctgcctgccttggctaagcatgagttaagcagcaaaacgctcctccatgtctggatggggccggcaggtcctgtgtcccctgcacctggaggagagcaggctagaggcacagcggccacatggtgctggctctgaacgttggttggtggctggaaaacagccctgcttctgagggccgctcagttctgcacacgaaaccacctcctgagggctcagctctgcccccgccctgggctgcagcctctgcacgcaagcaccaggcatc

SEQ ID NO: 14354 - DNA, 1146 bp, Homo sapiens
agggcctcggcgggggcctcaggtgtgtgccccgggccattgtcccctcaggggcctcggcgggggcctcgggtgtgccccgggccattgtcccctcagggcctcggtgggggcttcaggtgtgtgtcctgggccattgtctcacctgtctagcatgtcacctgtcccacctgtctaacctacctgttctcctgtcctgcctggctagtgcccacctgtccatcggccctgcctgtcccacctggcttctgtggcctgtctcacctgtcacctgttcaacttaccccacgtgtgtcacgtttccccatcccatctgtcacctgccccttttgtcccctgtcccgcctgtcatgtatctcccgtcccacctgtgtcgtgtgccccgcccgtcccatctgccctgcctgttgatgggccgtgccctggtaagcgttgccgtggtaacagccgccccaccctggctgcaggccccaggtgctggtgatgctgaacctggacgcggagcaggccgtgaagcacccccgcctgctgtccttcacgtcgcagctgaaggccggcaagggcctgaccatcgtgggctcggtgctggaggggacgtacctggacaagcacatggaggctcagcgggccgaggaggtgggccgggcggggtctgggggccaggcctctttcccaccccagctgcacaggaaacgtgccctggcatgtcctcatcgcagcgtgtcaacacggtgctgtgcgtggcgctgctgtgttttagccgtggcggtggctttgagctcagagcagcgcgctaaggcctgggagcaccagccgcaccccgggaagcttgggaggtgtgagggccattagctttccaagggcgaaccctgggaccgcctcctcccgccatgggtgagccccgtccagagccgtaatcatggttctgctgcaagctcagtctcccgctgttcaggctcactgggggctgcataagtgtgatgcccgtgtgctgggggctcactgggggctgcataagtgtgatgcccgtgtgctgggggctcactgggggctgcataagtgtgatgcccgtgtgctgggggctcactgggggctcactgggggctgcataagtgtgatgcccgtgtgctgggggctcactggggg

SEQ ID NO: 14355 - DNA, 1143 bp, Homo sapiens
gtgtctccgccagccttcgtcagacttccctcttgggtcttagttttgaatttcactgatttacctctgacgtttctatctctccattgtatgctttttcttggtttattctttcattccttttctagcttcttagtttagtcatgcctttccctctaagtgctgccttacctgcaccctgtgttttgatgtgaagtaatctcaacatcagccactttcaagtgttcttaaaatacttcaaagtgttaatacttcttttaagtattcttattctgtgatttttttctttgtgcacgctgtgttttgacgtgaaatcattttgatatcagtgacttttaagtattctttagcttattctgtgatttctttgagcagtgagttatttgaacactgtttatgttcaagatatgtagagtatcaagatacgtagagtattttaagttatcattttattattgatttctaactcagttgtgtagtggtctgtataataccaattatttgaagtttgcggagccttgctttgtgatctagtgtgtgcatggtttccagaactgtccattgtaaatttgacatcctgtcaatagtgggcatgcatgttcactatatccagcttattaaggtccagtgcaaagcttctgtctccttctagatgcatgaaattccaagaaggaggccatagtccctcacctgggggatgggtctgttcatttcttctcgtttggtagcatttatgtgaggcattgttaggtgcatgcacgtggtagaatttttatcttcctgatgagtgaatcttttggagacttctatgtctctagtaatctagtaattctttttttaaattgctcttagtactgccacactgggcttcttttgattagtattttcctgctgtgtctgttttctgcctttaatttatatatatatatatatattttttttttttgagacagagtcttggtctgtcgcccagggtgagtgcagtggtgtgatcacaggtcagtgtaacttttaccttctggcctgagccgtcctctcacctcagcctcctgaatagctggaactgcagacacgcaccgctacacctggctaatttttaaattttttctggagacagggtcttgctgtgttgcccaggctggt

SEQ ID NO: 14356 - DNA, 1129 bp, Homo sapiens
tcctcctcttagaaaaatagcccctgcagtggggtttgctgatgtgctcatttgtgtcattgcaggctttatcctgtggataaacgcagagtgaacgagtttggggagtcctacgaggagaaggccacgcgggcgccccacacggactgaaggccgcccgggctgccgccagccaagtgcaacttgaattgtcaatgagtatttttggaagcatttggaggaattcctagacattgcgttttctgtgttgccaaaatcccttcggacatttctcagacatctcccaagttcccatcacgtcagatttggagctggtagcgcttacgatgcccccacgtgtgaacatctgtcttggtcacagagctgggtgctgccggtcaccttgagctgtggtggctcccggcacacgagtgtccggggttcggccatgtcctcacgcgggcaggggtgggagccctcacaggcaagggggctgttggatttccatttcaggtggttttctaagtgctccttatgtgaatttcaaacacgtatggaattcattccgcatggactctgggatcaaaggctctttcctcttttgtttgagagttggttgttttaaagcttaatgtatgtttctattttaaaataaatttttctggctgtggcatttttcttgacctggtataatgaaagtatttcggatatttgagtttaacccttttccagaaagtaatacatgatatggatttatttatgcattaaaagagcaaatttaaagagccctttgcaagcctttgagtcatgagtgttcttagatacgtagcatcttagttgtttaagactaaactattgtacagagccatgacccatcaggtcaagcttatcttgccctaggttgaggcagagagagagaaatggaatagaaagatgggtggagaactgctggactcggtgtgtagtgaagtttaatgtttgttgaagttagtttttgtggggtttgttgttctcagctcacagcagcctccacctcccatgttcacacaatcttcttgcctcagcctcctgagtagctgcgactacaagtgtgcaccaccacatccagcttttttgtattaatatttttagtagagatgtggttttgcca

SEQ ID NO: 14357 - DNA, 2544 bp, Homo sapiens
acatttgctcgtccccattccataaccacaggtgcctttgtctttccagctgacttccacaggtttgcagaaatgtaccctgccttcgcagaggaatacctgtacccggatcagacacatttcgaaagctgtgcagagacctcacctgcgccaatcccaaacggcttctgtgccgatttcagcccggaaaactcagacgctgggcggaagcctgttcgcaagaagctggattaggacccagggttgcggagagacgcggcccctcccgcgtggacatcaccgccatgagcctctttgcgagtgacctctgggctccgctcctcactcctgctgtacaggcactgtcttcagcccgagttccaggggcctcgggggctgtttgtatcttgttcctttgtgaagtgtgttgcagaaccgacgcttactgtgcgagaatcggagggcgcgcacgcggatcccccgcctggcctggaccccgtggggtcaggttccctgccgggcggggggcaccggtgccgccccgtgttctcccacggggccctggtttcgagtctctgtcacagcctcttccggcggcagcgtgcaccgggcgggcctccgtgcacactcagcacacgcctgccacacagcgtgcgcttgcgtgtcactctggcacgaaacctgtctgcctctgtggatccacagcctggcagagccgagccgtcacctgatttttcagtgtttctacctgtgtgctggagctcatgagtattttataaactccatttaggtacttcaggaaacatgcagcattttttaaaaaatgaaaattgtttttctacttcatttttccttttagagtcaaaggatatttatttataggcctttttttttttaatatagaatctgaggctgtttgggctttgacttaaatttccatcaggcctctctccagcaggtaatccctctccttccgctgggtcccctggggaggtgtgaactcaagggcctagccccaaaacactttttctgcttttcttaatccttttccagtcccctctttttttataaacgttggcagtttgatgtttctgtttcggcataacgtaatccatttcactgtagcctaaactccagtccgaggttggatattgttcaaatgagcagggcccgagctggaagcgcaaggcagccgccgccgtgccgctcctcccttgccctcaggccaggtccctgctggaagcggctgcatcttcctgtcagccctggtttccatggtgactggcgtcacgctgccacccgagtatggctgaccttcctgcagagagaggagccgcagtcttttgcttgtggaaggagacgctgggctgtgcggtgcggagggtgatgaggatgtctggtgacagccgtgcggacaccactcctctctgcagcactgcctcccagcgccagggtcgcgggcacatcccactgagagcgggggtcctgccccatcttagagtcaaaggcagaggggcttccaggccctggatggggtattttggtgtcacctgaagtccctctgacatcaccttgtttcatcattttttatgacagaattagaaacccatccttcaagcacaataatcatcacagacttgagtttgcttcctaaagcaaaggctccgggtttgtttggaaaatttttttgatttctgaaatgaattgatttttatatttggggcatctctatagaaagtgaccaccaaggccagtaagtacgggaaaaaatgtttactaacttcctcagagattcgtgatacgcgtttctccactgacagacatttaaaaacaaccttcagctccgtttcaatcaatcacctcgacttgttttttagcatggacactgccagcaggacagacagggatggagtaaaccgaagtcaatttcagggctcttggcgtgttggacacagaagaaatcctagtgcagcctttggtagctaacagtcactgattttataattggagaatgcgtaaagattcatttttcaaggagaagagcctgcaaatggccaatgaaggaggtaaataaactaagatattccgagggaagggacccaggccacctcccttccgcaggtctgcagatgaagggttttttgaatgaaatgccactgtgcattttcagaaaaaaaaatctctgataaacagactttgaatggatgtttgttcctcctgattctcttttctcttcgtggcgacttagagttggcggatattcggaactgtgaatgtacatagcgttgagttaaaccccttgtgtgtgagacaggacgcagcgggcccctggtggcctgggggccagacccgtgggcaggtggggcatgggccctggcctgcggggacctgctggggtgtgagggcagagggagggttgccatgaaggaacttgggattttcaatggaataagtaaaacataaagtctatacttgggaatgatgttgttttgtgtggttctttattagaaagacaacaacaggcattgtgagaggagagccaatccagatgagattttcttggtg

SEQ ID NO: 14358 - DNA, 1106 bp, Homo sapiens
ccccgggcttcctgtggagatgagatggggaagttcgcacgcaggtctcagcttccgccctcagctctgagcgcccccccccccatattgcgatatgcgttttaggtgttttaatgtttttcccatttcaaaatgataggatgctgataaataagttgctaacatgaaggtccggaggtcttctggcctgggacttgtgctgtctgtgttccggagtctcatgttgtcttagcactgcctgccgcgtggcccgtgaccaccacacagggccccgcggcctccttcgtaggtgagagcgcagccagcgaggacacaggcggaggccaggaaggcgcggcgtcttttcttccctcaagcagatgtcccagcggcggcgaccacaggaagcccgtggcctggactgcgccctggagggctctcccgtgggaccgcccctgtgcctcacacagactccgagactgcggacgtgtgcccgcgtgacgcagcgccctcttttgcagggttgtggacttcctgctgaaggccatcatgcgcaccatgtggttcgccggcggcttccaccgggtggccgtgaaggggcggcaggcgctgcccaccgaggcggccatcctcacgctcgcgcctcactcgtcctacttcgacgccatccctgtgaccatgacgatgtcctccatcgtgatgaaggcagagagcagagacatcccgatctggggaagtgagtgagacacccctgctgggagtgagggaccctgccctgctgggagtgagagatccccctgctgctgagaataagagattcccctcctgctgggagtgagggtcccccctctgttgggaatgagtgagaccccctctgttgctggcaatgagggactccctgctggtttttagggacccccccttctgggaatgagagatccctccctgctaggaatgagggacccccacttgctggaaatgagtgagaccctccctaccgggagtgagggaccccccccccaccacgctgctgggagtgatcgagcccccaccgccgggcacattggccttgtgccccattttctgtgttggggtttcctgtgtaattttcgttgttgtaattgtta

SEQ ID NO: 14359 - DNA, 1264 bp, Homo sapiens
ctcagggactcaggcggctgctgggcttggtgttctccccaaagcagagtcctggttaagggactttaacttcgttagagctgacatttattaaaagctgtcattatcttgttgcctgtcctgaaaaggggacagtgtaacaggcataaatggttaagcagcctagagtgggactgggcacccggcatgtcccctcctgggctccagccctgaaggccaagcctggttgtgcctcactgtcgtgtgcagcacccaccgcctgctccaggccgctgaggtgtggggagtgaatggagctgcaggctgacagtgatgtccctgggggtcctaggggatggctgcgtagcccggggtgggagcctgaggccaggggcttcggtcagcctggaaccgagatcgacagtctgcattcttacttcagtagtaactgcgtatttttgtttctgacagtctaagttttatacatacattttcaatgcttaatatctagatttgaagtagaatatggaaatatgacatcattccttttgaattttttcaggacaaagaaacaaaaaccggcacatgcggttactgtgggctccagttcagacagcaccaccactagagcgtgtggcacgccgggggtcccgcagcatcctgtgagcatttccgcggggaagctgagcacgtgaagctcgctggttctgtgcgaagggtattcctggtgctgaataaagggtgttgctgtcaaggctgacaatttgtaagtttgtttctttcatagtctgggctttggaagtgaacatccacgtggacatgggtagacatgcgagtggaagcagtgcccgctccagtgagcctgagctgcctcctgccggccgctgcctgccttaccggctgcttctgtgtgtctcctcttatccttggggccacgtgggctgcaggaatgggcggggggcagggaaggagaaggagaagtgcctcttgttttgcagatgcaactgtgcttcagagagccaaggtgggtcttgaggtgcatagtgaaggagggtgcccaggcctcaactggtcctatgggaaggtcagcctctctcctgttgctggcttgcagagctggtctatccgtccgtcctagtccctatgttgaaatgtcagatcttaaaacccaagaatttaagcactggtttgaaggcatcgaaagtcacatactggccacattaaggacagtctatgtttttaaaagagtaaggattataatgtagtgtaacataaaaataaaagt

SEQ ID NO: 14360 - DNA, 1319 bp, Homo sapiens
gacagccagacaatgacgtgactgagggacagagagcaggagagcccaacagcccagatgcagaagaggccaacagtccagacgtgacagcaggctgtgacccggcgggggtccatccaccccggtgagcaggcccaaggcagcgggggcccacacccctcacacgcaaaactggcttcttctggtcactggtgtctgaaaccaaatccagagcagcctgtggcctgtaaagcatatatttctaatgactgcagactggtgggatcataggagccttctgaatgaccaggactgctttctttggagctgatgaaaatgtactcttttagcgtgttagaaatcacttgttttattttgtttctttggccaagctgggtctagtgtttcttttgctgggaatagactttcaaaagttgtacttctatcaagaaacaaaactgcccttgcagaaatttcaggtcttttgttaagcctgtattggtcttaaggtgcagtattttttaaattattatttatagaaagaatctataaattcttggggaagtgtgttataagctttaataattacattgagctgcacctcagtggtgtgtcattaacatgcagtggggttaatatctgaggcctcagatgactttgtgccttttggaataaagggtaaaataaactctcccagagtaagagctgtatcgtgaattgtcatactaattattgagggggacttatgtgcttttattgaatggagtgctttacaatttttatttttaaatggggttgggatccttggaatatttcaataaaattgataaaatatatacatgtgtgattcctgtttttgctcttaggaagcagaaagaacaaacttacttttggctaaatggcagtgttagaatacatccttattttctctagtgaaagcggttttactgtgaaggctgctgtcttcctgtctacctcattttgtgtgttggtctgtacaaacaccgaccacacactgcctttggtggatttgtctctggagtctccactgtggaatactttcaagctctgtggcgtgaagagctcctatttctctttcgcccacattctccactgaacatttctctacatttgcatttgcatcctctggtgtgcttgcatgtcactcattgttttctgaaccctttgacagtaagttacagacgtgttccgttacccccttgctcctgtggtgtttcctggaaacagaggccctctttacagctcgcagcataggcgtcagaaacgtggatgcaggtcaccctcaaaccagcaagctcgctccagcggcccagtaatgt

SEQ ID NO: 14361 - DNA, 1112 bp, Homo sapiens
attcataccctcctttctcgttatttatatacttgtctttttgcccctgccgggtattttagaaatcgtgcttggtgcactttgtgtccttcagtgtgccttacccagagcagatgcacgataagcatttttacacgagaacaagctggtggtgtaggcctctgctaaggaacaggctgtatatgctctttgtgggattaaggtagaatcagctttaactccaaagaaactgtccatgaattttgtttataatagcaagtagatttaaaatgacactttaaaaaaattctgttgtctttctctacatataatgctgtagaaaaatataactgatggattttgtgaacgtggtatttttaacttttcgtagcagcacaaagaatgctcctctttgtgtgtcaatgaaattgttctttatgacagcttcagggtaaatctgcagagaccagagaaagcacacagctgagccctgcagatctcacagaagggaaacccacagatccctctaagctggaaagtccgtcattcacaggaactggtgacacagaaatagctcatgcaactgaggatttagagaataatggcagtaagaaagatggcgtgtgtgggtaagaaaagtggttatgtcttgatctaatacgctggtgtcttcacagtccttttggattaaatgggatcccagagccacttcttggtcggtttgagggggcagtacatgtgtggtatcaggcacatgcagtgtgagggctggactctgtggaagccggaaggtttcaacatctgccgcaaaccgttccatgttgcacagaactgacagaaaggaagaatgtgcttttggtattgaaggttaccacacattacagattgatttgtctcatcctgattccctttttagtcctcctccatcaaagaaaatgaagttatttggatttaaagaagatccatttgtatttattcctgaagatgacccattatttccacctattgagtaaggattcagcctttttaattattcatttaaagaaatttactatagagtatcaaatgtacaactgatcacatgtaaccattgttttgtatgtagttctgtctagctttttttttttttttaa

SEQ ID NO: 14362 - DNA, 2148 bp, Homo sapiens
gaggggcggctaccggagtcccgcactgccgggactctgcagaaagggttctcaagtcaggcttctccggggtagccggggctgtgggtgcggccccgggggcggggcgagcacttgcgcggggagggacctgcaagcgccccacccacgccggggccgcagtaaccccgcgccgctctgcgcacgcgcggcttcaggctgtccgcggagctccttgagcccgcgtgggaaacctgggcgcttcgcgcggagacgcctttgtggctgcttcctggagcatttttttccccttagagctgttcgctgttttccctgtcacgccgcttttctgaaagacgggttgtgcgctttgggcttattcctggacggtccccaaaggtccccgaaaggaccaggcccggacacgtggggccttggtttccggccggaagtcccgggaggtgtagggctagagttctggccgtggcgggccggtttctgcgtgctgcgtgcgcggccgcgtgggctatggggcggcggtcgcggggtcggcggctccagcaacagcagcggccggaggacgcggaggatggcgccgagggtggtggaaagcgcggcgaggcggtaggagccgggacccggcgggcgggccaggggctcctcctgggcttcccggaccccgaggcctgcgaggcggcggcgagggggcggctccttgggcctcggggtagacgtctctttccttcctcagggctgggaaggaggctaccccgagatcgtcaaggagaacaagctgttcgagcactactaccaggagctcaagatcgtgcccgagggcgagtggggccagttcatggacgctctcagggagccgctcccggccactttaagaattactggttacaaaaggtagggaggcagtgcctgattttttgggagttggggccaggatgctggaggttaaaggcgacggtgttttcttcgacaagtgttacagtgccagagaaccgtggcgtttcagcggtttggattcaggaagcattgaggtggggagcacagggtccaatgaaatggtcacggaggtattgcaggcgcaaggttagaagacgaaatgaaaatgagatctgaggaagattcggctcctggggaatcttccaggagggaagctgagggtcttaccttttggaacgtaagagaatttatagagaatgcataaaaccccttggttctcccctcctccgcgccccccctccatctttgtagttacatctttctaaatgagtcgcaagtaaaacttaacggtaggatatgcttaggagagaaggaatgcagtgttgctcttagggctcaaacagtgtggattgcttaaattttgaaggcatacagtgtaaaagtagtgactaaagaatgtttactctccatgcaaaagttggttttagttttaaaacacttgcagtcttaaatttaagaagatacaatgtattaacttagttttttagatcagtttgaaacttccttatttttcaatagccacgcaaaagagattctccattgcttaaagaacaaatattttaaggaattggaggacctggaggtggacggtcagaaagttgaagttccacagccactgagttggtaggtaccacagtgcttcatgccgaatatttatttgggatattaatctctatcacttgaattatatttcttggtactgcatttgctgttaaagagcttgggtatactttgcaaacatcctaatgttctagtacctggtgcttttatcaacattatattgctacgcaagttttcatgcgatttgcgatttgcagctttatgagtcactgatttcagccagctcttcctagtacatccagcctcttcctttatgtcaccacttccgccagctcccttttacagcccttgttttctcacatcaaaactgttgcagagtggctgctttgccttcagaaaaaggacagacttagcttgacaacagtctcctggtaggtagtctcttagtgttttccattacagacaggttaccactgtctgctgtcaggttgtctcctggtacttcgcagtacagactgcaccagccaatgtagcatttccgagtctcagcacccaagcgtgctactactctgggagctacctctttcttgacctgtc

SEQ ID NO: 14363 - DNA, 2215 bp, Homo sapiens
tgccttcccaggattcttccttcagtgctgaggcaggtcgggctcaggaactgcagggacgtgaacatgcgcttgcggtttgaggtagccgtgtctgttccttcgcggtttgctattttcatttcctgttcgtcaaagcagcagaggagatcaaaccccgttcgtgtgtctttcctccacggataagcttgggaggtcattgttttactgccctcacattttgtttgaaatttcagaactgtttttctatgtaaatattgaaaacttatgatttgtgcaataactcagatattttttatttaatttcctattttcacataagttatatttaagggaggagggaattttttttaaacaagcttaggtcctttcccgagctgcattttctaagttgggtcatcgtgtcggctggttgtctgacgagcatcgttacaaacaccatgatgaggggtttggggttttattttgatgtcttttcttttggtcggaagtgagtgaaggagccaggtcgccctgaaggttttccaaagggcttggctccagagccacctggcagactgcccgtggccctgctgtcgggccccaggccgttgtcctgctctgaccacagagttttaatgttttggttttcacttcttttaaactggacaacaaatccagcatttcaagtgccagaagtataactttctaaggagagaagggttgtcacattataaaatctttaggaaaatgtgaactggaaaacgcttcggtcagttttagtgacatagcctgtgatgatgggtctggtgactattattgcggaccgtggtacccagttttaggaatgtggagaaaggaattctgttgattccgttgaggaatctgtagcgtatgcattcgttctgttaagagcaaatctaggagaagtgcttcagctgcccagtgcgccgtggggagtgttttaacggatcgtgtcgcaggagagcacagcccagcgttggggccgggaccgctggcgcccgacgtcggaagcatacaggtatactatgcaagtgtattctgccacaacaaccactgtctttgttacctttttttgaacaagaatatatccatcctgcctaaccctgagtttttggagcaccacagttgtcctgggagttggttgcatcttgtaggccatctgacttcctgtttttaaaacgggggtctggtcttgctaaacactacaggtaggttggtctttgaagtccactagtggagaatgtcaagacaagatacttattaccatgacatctgatgcatgtgcagcagtggggagttctagattgatctctgaatgtgatcgacgcccagcaaggacaagctttaaaatgtctgcggtctgcccttttgaagcaggactggctcactctgtcattgggagctgtcagctgcgactgcaggttctctaggaggcattccagaatagagtagcacactgtgtctgcagttctcgatgaccgaaagttatcaaaaatatttaaaatatttaaattgtgaacctattgataaagaatatttataaaaactgatctgtaggcctgtactaatctctacgcattagcaatattgactgtaaacccacattaaggaaaccactacgggtctggcagtgcgtgtcccgtggggtgtgcattttaaaactcgattcatagacacaggtaccatgttccatttccgtcatggtgaagcaaatgaattggcctggctaccactgtggtcgcgtgctacaggtttgacaaaaagatatcatgtttcgatttttttgtgtgtggacaacaatatggaagctaaaattgacatatttttatgtaaagtttttctattctttgatttttaataaactttggaaaccagttttgtgtttgtgtccaagtgtatgctttcaagggcaagagtggcttctacattttccgtattgaatttctaaattagggcagtgctttagccatttattctaaataagattcaagagaaggcagatgattccagtcctataaagcaagttgcagcagggagattatgttgtcactggtccattgaagtaggaggaggtaaaaatacaaaaattagccgggtgtggtggctcacacctataatcctagctattcgggagggtgaggcgtgagaattgctcaaacccgggaggcagaggttgcagtgagctgagaccgtgctactgcactccagcctg

SEQ ID NO: 14364 - DNA, 1128 bp, Homo sapiens
cccccagcctcgcacccctgctttgaagtttctgctctgtgcctcttatcttctggttcccaattccagttccctggagatgaaattgcccttaacatggaacatcacttcctggattctactggtaggagttttgtttttgtttttgtttgaaacggagtcttactctgttgcccaggctggagtgcagtggcatgatctcgactcactgcagcctctgcctcccaggttccagtgattctcctacctcagcctcctgtgtagctgggattacaggtgcacgccaccgtgcctggctaaatttttatatttttagtagagggatttcgcacgttggccaggctggtctcaaactcctgacctcaggtggtccgcccacctccgcctcccaagatagttttaataggttatctttctggtatattagtgagtaagattataggattttggattaaagagacccaggtttgaatcttaactttcagaatgaactctttgaccgtcaataaatcatttgagcttttcaagttttagtttcttcccctgtaaaatggtgataaaaatacacatttataatgctgtttcagagcttaaaagaaaaagaaaaaatagaattaggaatttcagcctcatgacagatccataattgatgttcaaacagtaactatcattaatattagttaactatttctttattatttcattaattattcattaaataatatttctttctaagggaaggaagaacttggacagaacactgggccattactgcttattttgatgggattattgaatttcaatcttactacctgtttgccaattaaaaaagcaatctttcagtcattttgacatatagtgtagtgatacagtataagcatttttctactgtcagaggccaactcctaaaagctggaaacaaacctctctgctccaagaaggtcttgctggccatgaggccacatgctcactgcagcttgttagggaaacccgagcttgttaacctcattggatttagatagcgcaatggcaatgctcctcaacctttccgtcattatcaccccactaatgagatattttagacacttcttctcagatcactcctatctacatacaaattcagatata

SEQ ID NO: 14365 - DNA, 1171 bp, Homo sapiens
atactattgtatgccaagcactgttctcggtgcgcttggagagctgtagatttaaacaaaattcatctttgcgaccctaaaatgaggagaaaggaggatgggggtggggggaataaataataaacacgttttagtctcatcaccaggctgaatttcactgagtagaccctggcccaggaaacataatagctttttacctcttagaaaaatgttctttttacattatattctttagttacgttcttcacatcactgagggttgaatgttcatctgtaaggggacacatgtcctattcgaccttcgctagaactaaaacgaggctttcttttaaaaatagagggcttctgcctctaagatgacttgcagcttaattctagaagctgcttctttccatgatagcatctaacttgtgctgattatactaaaagtgaagttttgttgtttgcctgaactgattgtctgctggcttatttgcagtcctggctggtgccttgttagaagaagcggagcaattgctagaccgaggcattcacccaatcagaatagccgatggctatgagcaggctgctcgtgttgctattgaacacctggacaagatcagcgatagcgtccttgttgacataaaggacaccgaacccctgattcagacagcaaaaaccacgctgggctccaaagtgtacgtttcagtagatgatatgattacccatttgtagaggaggcagtttgtttgccatttcttaaaggcaacacaaaatgaccactggtggatttgtatcgatttgattatttgttttgattacttggttttgctttgtttttaatgtagatgtagacagatgcattttgtatttaagttgagaactgaatttctaagttcaggtataaatccccttgacaatatttgcaaaatatagttattttaatttagcagaataggttgtgttaaaaatcagctaaggctggatgcagtggctcatacttgtaatctcagcactttaggaggccaaagcagtagcttgcttgagctcaggaattgaagaccagccagggcaatgtagtgggaccccatcgctacaaaacaaaaaactagccaggcatggtagcacacacttcagcaactccagaggctgaggtgagaggtcgaggctgcagcaagccatgatcatgcca

SEQ ID NO: 14366 - DNA, 1115 bp, Homo sapiens
ctacacttcattgagataagagtgactcttcctgagtgattacttacctttcccattctgttctgaacttgtaaaatagtaacagtattctgtaaaagtgctgcattctaagaagaccttaattcatgccagactacagtggtttcttgagtacattcataatggaaggaaatagtaaatttcagagttagcgaaaataaagatgtaattttttcctatctaagtatacagtcccctttagggcccatggatcacaggttaagaatctgccccagactgttgaaaatgcaggttgagatggcattcccctctagaagactcaaaacatcgtttgatttatatctttgagtaacattgtgttatgtggcctgctttggttgcagtaattgtgaaaccaatgaagtttgttttgtggtgttttcctcagggtcaacagttgtcaccgacagatggctgagattgctgtgaatgccgtcctcactgtagcagatatggagcggagagacgttgactttgagcttatcaaagtagaaggcaaagtgggcggcaggctggaggacactaaactgattaagggcgtgattgtggacaaggatttcagtcacccacagatgccaaaagtgagccattgcatctcacagcttcgcactgttggttaactcttaattccaccaattaaaatgtctttatgttcccccatagaaagtggaagatgcgaagattgcaattctcacatgtccatttgaaccacccaaaccaaaaacaaagcataagctggatgtgacctctgtcgaagattataaagcccttcagaaatacgaaaaggagaaatttgaagagatgattcaacaagtaagtcttaccagagtcctcagtggaatttaaactcccaaagggtacagttagttaggtttggttagtaaatatgtgtagtctttcttcagttctaaaacatacacaggaaaaaaccaaattgcatagaaaggcataaacagggaagaattctaattttgtcttaaaatggtagcgtgttcaggccaggtgcagtggccatgcctataatcccagcactttgggaggctaaggcaggcagatcgtgagatcatcgagaccat

SEQ ID NO: 14367 - DNA, 1072 bp, Homo sapiens
tctcacttggccctgtcgttgacttactaaggctggaagacctggtctcatccaaatactaatggcagtcccaggcaacggtgcctcggtggttctcactgcagcgcagtgcaaggaacatgcaggctgggttcccagagtgagggagggctgcacagatgggagatgagggtatgagcttaggggacgggcgccgggtgatagatctgggcagcaccaaagccccaatcaagacgtccagctcaagagccttgttacctagcaaggtgctttgggttgaactggagatgtctcggtcaaagtggggcagcagttctagtgaacaagttggtcttagatcaagttttgctcatttgtggcccagttttgaaagttaacttcaccagtactgtcttcatccttctccctgaccaccccaattagctgattgccatcgcaacaggagggcggatcgtccccaggttctcagagctcacagccgagaagctgggctttgctggtcttgtacaggagatctcatttgggacaactaaggataaaatgctggtcatcgagcagtgtaagaactccagagctgtaaccatttttattagaggaggaaataagatggtgagaattcaactatttgtcctatactgttgcttattttgcttcatggtctggcttttttgcctgtgtgtatttaacagagacacagtcaccataagaaaaataatcgtggttctcaaacaatgacgtatcatggtgtaaaattactgaagaccatgttaaattgttaatttcacaaggcacatttgcctttctgctgtcccttagagtatacaatatacactatgagatttttatatctttttaaatacttaaacacagtttaaatattcaagtcctggattttagaatgtttgatacagttacattaggggttggttaaactgctagccctagcaacataagactcattttaattacaatatggtattattaccaaggatgacttacatctgtcccttaggtagaaaaagggaacccaagtgaataaccattgacgatctctgttctttgagaatgagtt

SEQ ID NO: 14368 - DNA, 1142 bp, Homo sapiens
tagtaggaggaggaaggcaaagaattggccctgaagtcagaaaggtcatggagagccacctcctagagagtcttacacgacataagcactttggcttttgcttgagtgaattgaggagctcttggaaagctttgagcaaaggagtgatctaacttaggtttaaagaggatcattctgactgctgtgatgagaggaaactgggttggagtggctaggtcagaaacaggaagccagctgggaggataatgcaatgatcctggtgagaggtgagggtggcagagatgaaggggaggtagcagtggaggccttgagaaatttttaggatattgttaaggtacagtcaaaaggattctctagctgtttggatgtgaggtgtcaaaggaaggagtgaccttttgtgtaacatgctactaatatagcaagtgaggagagaaccaagacctacccatcagtttagcaaaatgaaagtctttggtgacccttatcagaaacaatttggtggagtttgtggggaaagcctcactgagttggagagagaatgaaaggagaggtaataaagacagtaagtttattagattcttaagaagttgcgttgtaatcccattaaatagtagtcatatgcaaaatacaattcacattataaatcctgcctctttcagtgatgctccagtgagtgaactgtccctcgagctgcttctgcttcaggttgtcttgccagcattactcgaacagggacacacgaggcagtggctgaaggggctggtgcgagcgtggactgtgaccgccggatacttgctgtgagtatgggcagctgactccttggacatgcatgtcatttgtgactatggaataacctttctggaaaaagtatgttccatggcccactcaagaaaaattagttttaataagagacaatttagtaatatttgcaattgcatataatacttctaaatgaaatttttttttcttattgtccatcctttcatggagaatatatacatctttttgccctcttatagaagtttgctgctggtccagctttcatggagtaaatgtcttttttttttttagtgcattaaaaacaaaccagtttacctttatttagaccaactaacttacctttatttagtgctcataacctg

SEQ ID NO: 14369 - DNA, 1218 bp, Homo sapiens
ccttattaaaataagcttagttttctgtcttgatgaatgagccaattggaagatagttactctaaattatttgtaatgtttctacatattaaaagtattgacatcacaaataagagaagaaattccccacttttgtcctattatttgcataacagtttcatttggtgataaaaacaatgaaaacattaattccctcaaaagcttttttagacctaaaagaataagtaattggcatgacaaatcagagtgtatgtcccagtagagctcgcctccattgaacttaccttgttttggttgtgatttcatcaaattgtgtactctttagacattgtgatttttgtcttttgtttttttgatgaagacattgatatatcgaatgtgatatctttttcctaatgtgaaaatactaacataacaacatgaagatgacaattctctttacctagccacatgtctcatttatcagcttttctattttcagtatttgctggccgttggttaatgtcgttttggacggggactgccaaaatccatgagctctacacagctgcttgtggtctctatgtttgctggctaaccataagggctgtgacggtgatggtggcatggatgcctcagggacgcagagtgatcttccagaaggttaaagagtggtctctcatggtatgtgtgtgtaatacaagactgatcttgtatgttaggaatagtgaatatttttccagtcatcttaaatttttttttttggcacatttatttccttactatattgtttcaagagagttgattttttgaattagaagaaatactctttcaagatagtggctttctggttcattcttgttcagagtcctacgttcagatatatgaggtttaaaagaaaaacaggttgggcacaatggcgtatgcctgtaatcccagtactatgggaagctaaggcaggaggattgcttgatcccaggagtttgagaccagcctgggcaacaaagcaagaccccatctgtattttaaaaagtatatgtatataatatatttttactggatcatttagtagcatgtttttctttatacacgtgcatgcacacacctacacatgcttatattacttacttaagggccttactggacactttgtaacattattgctctcagtaacacatatgactcccacaaatgtaggataaaaaaaatactgtaagatgattatctgagtgcagtgat

SEQ ID NO: 14370 - DNA, 4204 bp, Homo sapiens
ctgtatccctcctggcctccacaggtctgagtttctgagaccccctaaaccactgactgaagcatgtcctccattgcacagcattggaggccttccagcctgtgctgcttctgcagcttcctacaaacccatacctaggtagatgtgtcagcctttacaggtgttcactcgggactccctttgacttgcccaaccattgacgagttttaagtaggagttagatttaaaaagacatatgaatgttttactctgtacattcatagaagagagtaaccaccttgtttttgcaacctaggtaccttgtgggtcaacgactcgtgaactacgaacggaaatctggcaaacaaggctcatctccaccacctccacagtcatcccaagaataaagtagttgtctcaacaacttgaccttcccctttacatgtccttttttgtggacttctctctttggagatttttcccagtgatctctcagcgttgtttttaagttaaatgtatttgacttgtgttctcagcattcagagagcagcggtgtaagattctgctgttctccctggatcttctgacattactgctgtctgagatttgtatatgtgtaaatacaagttccttgataccctaaaaccttggattaaacagaatgtgcattgtacatctttaaacaaaatgtatattaatttattaaatctagttgtcactttattttggacctgctgtgatctcgacaggaaacgtgccacagagcagtagtgcgcaggcaagacttttcagtgacgccttgtggaacgcagttcatgatgtcctagcagctctcactaagggaactgtacattctttctttcttggctattcagaccttaccaagaacgttaaaggaaacaagtagaaatcagcagtggagtgtctgtggtaagaaaacatgaactttatgcttcactgttagttgtttgtggaagttattttgtataacaccaaagctgttgtacatttcctactgcctgatttttttcatgtgtctgtgtttgtaatattgtatagtatcttgtgctaggtgaggaaattatttttaattttgataatttaatattcctagtgtgatcagcattgggagttgggtttcagtggggcatgtctatacttagagaaaaaaagtccaaatgaagattttcatgagtcagcccccccgcccgcccccaccccacacccacatcctctcttttccacacacaactatctgtttattttttgtagcagtggccgaaagtcctgcaaggtcataaatctttcagagtgacatcaccaactgtactgcatcttactggatttaggacttctgagatgcttgtgaagtatagatgtggttgtggtcttagattgacagcattagagaagactggttagaacatctggtctcgctggttagtgcctcgttggctgaggactaggtgtgcatttctcctagcttttcatcaggaaatcccaaagtttccaaagctttttgtttacagaataaaacttcaaataaaaccaattcattatttgtccagaaggaagcttggctgagctggccttttaacataggaatgtatttcgttggaaacattctgaaaaatctcagagaactgaacccttacaaactttgttttccctcataaccaaagcttcaggttagaagtttagaaaaatagaatggttgggtacatgatctaaatgtttaatgctaaaggtatatcgtaagggtagtgtttgtttttgaacgataatttagaagttctcatagaaagcgtataacataggtcttcagaaactataaaagaattttcatatagtattaaaatccatagactaaaatctgagaattttttaacatatgcaagtcagccaaacataagctaccaaaataaagagcaatgtgttctggctgttttatacttcaacaattttttccctaagtggtaagcaattactttaaaacatatttttaaaaacatcggtatcgggagctgcggtggctccggccggttgtcctggcacacaaggaggcgaggctatgcgttcgaggccaacctaggcaaaattggaaaaaaaaaaaaaaatcagtatcagaaataatgcttgacataggattcagtgttatactctttggcactttagagcagccttttctctcatttgaaataaggtctttgttagccctacctttactcagaaatttagtcctactataaaaaattaggattttaaaatataatgctgcctgtcatagtgtatttctaaattgctctctttgggagaaaaacattattattgaattgagcatataactatataactatataactatatatatatatatatatatatatatatatatatatatatatatatatatatatatatttttttttttttttttttttttttttttttgcccccgagacagagtcttactctgttgcccaggctggagtgcagtggcacgatcctggttcactgcaccctctgcctcccaggttcaagcgattctcctgcctcagcctcccaagtagctggtactacaggtgcgtgccaccacacctggcttattttagttattttagtagagatagggtttcaccatgttggccaggctggtctcggaactcctgactgcaggtgatccgtcctccttgggctcccaaagtgctgggattataggtgtgagcccccacgcctggccaacttgattatattaattttgggttttttgttttgttttgttttgttttttaatttttcaaagaatttgtggatcttggtataaagtcattggaacatatctgttttaacagcaagagatcctaggcagatacttcaaaaggttaaaaattcttaatcctacagaattttaaatgaatcttatcaatgttttgtaaacaaacaatatgaatggccaaaaaattgccctccattttactggcaggtaatttatattgtcttacttaagaattctcccctagtttttcaattgtactttatcgtgttgttttcaatgagataagtattttcatagggaaagcattttccagcataatatttgcttgggtagcatccgggttttagtatttaaccaagagccttttaaatattgaaaacccatagttcagaaaatgttagtattgctgcccttcttcacataaatttttttttaaattatactattattttgcttaattttatattgggttaaaacaaccttcaagaaggttaactaggaaagaagacctttttgttttatttttactatttatatatagaagacaaatcagcatttggtgatagttttacatgaccagttatcaaacggtcatagtatgaagtgtgcagttgttcattattagtaaattatgtttgatttttaaactatttagtactaatagttgagatgaaaactgaagaaaaatgccaatgtgacgtttgtgtatagctagccttaaaaaacttcccatgtttttaggtgacttttttccccctcttagtactctggagaaacaatgaagatgggccatctcaattccagatgtaaacaaaaagtaatttttatttcaacatttaatgtaactgctattattgtggattcttgtcttgtgtattttctttcccttattcaagtaatatagaataactttccttaaaatgatttgatccaagatacgtcatttctgtattggcaaaatgccactattaaagtgtaattcttgaatttaggttgaattgatgactttttaaaacaaaacaaacactggacagttctacattgtattgcgtttgcgaatgtgcgtgaacacacgcacacgtgcaggagaatgtagtgccataagaacactggcgctttttaaaactttccaagctagctacttattttcattttcagggttgagtactctaagctctctacttactgtgagaagttttctacattgtaaaattaaaagattatatttaaaatacttctttaggatgttattcagccatcaaaaaaaaacccaactaaaatgtcttaccagtaaagtattattaaaagcctcatttgtggagattcgctgacttccttggttaagctgtcttgtatttacttaatttgtcccctcaaccaggtgttttcttttcagcctgttactgtcctgtgccatttttaaaaatagccatcatgagtaagggcttc

SEQ ID NO: 14371 - DNA, 1113 bp, Homo sapiens
ctttccttcctttgtctgttttcttctcccagctggtttaagttcttgatcatccctggcaccacctaccctaaggtcttccaagaacagaaaagccagggcctgtgtggggcaatgtgttgtccctgtcgggttatggtgggacctcctagaccccagagtgaatgaatggcaggcctgccagtgactgtgctgatggcttagaattcctacacggctgtgcctctcccaccccgtcctctttgctcggaagggagacctggtttgctctcctccatgacagcccagcccctgctgtgcacaggggtggggctcgggatccctccctgcaccctgatgtttattaactgtagatagtgaatttcaagttgacaggtaccttctcagggatttatatataaatatagttagaggaaaagttgaagtctattttactactttttagtgtttgagtaaattatgctttaactggacagaagaaatatttctcagacaatgtcgatgctgctgatgacaactgagatgcctggagctcacccttgatggagacttccttggtgattggagatgggggactctggtggcagaaatggctttggggtaggtgtgaagttgcttcagtccctctgagttgcctcttctggatggaacgtgtgtatcaacaacaatgaaatgcacctccgtgtgcatggaggcggctgatgagaatacagataggccagtcctcgctcttccctccagaaccggccgctcccggtctgacgttggagcacgtgaactaagagtgacaattttttctacttgcttctgtgaataaagtgttctacagtcagcccagcactaaactcaccagaaaagaggagggaacagcacggagccattcatctggaattactcgatgtgcagaggctgccccttggccgcacttgggaacatcgtggacatcttccttcctctcaggctcctcctgacagactcctggcagcactggagacctcaggactatggagatcagaattgtaatggctttgtcatctcagtgtggccactcctgaggcaagaggctcctcctgggagcaggagagagagagtttgtgatgttggttggaaaat

SEQ ID NO: 14372 - DNA, 1133 bp, Homo sapiens
cgagtacaccatgcacctgggtctcaagtccaccggcaactacgttgacttctactcagctgcccgtccctacagtgaactgaactatgaaacgagccactacccggcctcccccgactcctgggtgtgaggagcagggcacaggcgctccgggaacagtgcatgtgcatgcataccacaagacatttctttctgttttgtttttttctcctgcaaatttagtttgttaaagcctgttccataggaaggctgtgataaccagtaaggaaatattaagagctattttagaaagctaaatgaatcgcaagttaacttggaaatcagtagaaagctaaagtgatcctaaatatgacagtgggcagcacctttctagcgtgagctgtagagtaacgagaagtgctttatactgaacgtggttgatgggaggagagacgaggcattcgggccggtggggcgtaagggttatcgttaagcacaagacacagaatagtttacacactgtgtgggggacggcttctcacgctttgtttactctcttcatccgttgtgactctaggcttcaggttgcattggggttcctctgtacagcaagatgtttcttgccttttgttaatgcattgttgtaaagtatttgatgtacattacagattaaagaagaaaagcgcgttgtgtatattacaccaatgccgccgtgtttcctcatctatggttctaaatattgcttcaatttcaaacttttgaaagatgtatggatttccagtttttctttactttctcccagtatgttttaacaaaaaaaaaaaaaagcaggaaaaaaggaatatttagcagtattgttcgttctgatatgtgaatttgtttgtgacaactaaacaaggcattcagcagtttctgacaattaacatacatcattccacactccttgtcaacaaagtgctttttcactgcctaaaattttagatgtagatatttgaaatagattttttcatttataccagttttctttatgatgatacagtgttaaaagaaaataaattacaattgatctgtcatccatatttgctaagaatgtctatttccaagaacctatatcttacaaaatacacattcttgcttgtgtgtctgtgtgtgtg

SEQ ID NO: 14373 - DNA, 1121 bp, Homo sapiens
ccggtctgctcgcgcgtcggctgagcagcagcaggaggaggaggaggcggcggcggcggcggcggcctcggggccggcacccagagcgcagtccttagcgggccgggcacggggcagggaggatgcagactccgggttggagagcggaggagggcgggccaggtccgggcctggagaggcgggcgggggtgctggtggcggcctcggggaggacggccgggctggggacaccgacaggccgggggagcggccctgcgctgggggacgcgcgggaggtcggcggttcacgcttttccgtggcctctttgaaaatcacctccccagattcggtgagatcagttccccaatccgggtcacgaggagcaattgcagcgggagggcgatggtgagaggcagaagttagcagtgctggtagatacctggtttagtactgtcttctcttggttgtcttgatctttgctaggcggggttatttttgattcattttagcagattggttgtggctgggagtgacacagccgactgtccagtgttagcttggggttaatctactccccagtgctcactctccttgagaagtgcctgcagaaagcaaaggtttaggaaaacatgagctccttctaaagaaagctacccccccccacctttttttttttggtgcgactggccagatagagcagccccgtcttacctcttaatagcagaactgggacgtattcccttcatgccctgaagctaagtctagctttctctctacctacctgtcacagaataatagattctgtgcagaattcagctcctctctgttagaaaggctcttctgcgttggagatggattttttggtgtttgtgagaccaggcttttttacatctctattatgcatagtacaaaaatcacttctgctgctgctaagagccctccctaaaagacaccgaagatttgctgcctgttggcgtggctctctccaggagttgtcgtctgctcttggctttgcttaggcctgtgctgcccccgccgccagggctcctgttcatgttccgtttgggtcagaaccaggtaatgtctcactggcttgttcctttcttctgccctccaaaatgacaaacttaactttttagtt

SEQ ID NO: 14374 - DNA, 1201 bp, Homo sapiens
agtgagggtcaggtgccatccgtcgcagattataaagtcatcagcatagcttggagaatgttccttttgctttcctttcaagacttagacccatcttgttgataggaaagaaagaactttgaatgcagggcaatggggaaaaatgtgggggagactggcctagagagcagctgtgagggaggtggttgtctgaggtgagtgaaacacatggacgtgacaacttttttttctgtccaaaacataaaaactgaagaaaggagtttttcccaaaacattggaagaaaaagacaaggccatatgtagtaccttccatgtggcctgcagagctcagagattttctcccagatcccctgaagggatgacatgtcctcactgtgcctcagctgaaacaaggacttctgccctgtgcaaatttgtgtagttgctttaggaataattttgacagagtgaatggatgataacataggatttctgtcttatcttgtgtctaagtgtattcctaatgtttgttttttaggtgggagagataaacgtggaggtcccattttaacgtttccggcccgcagcaatcatgacagaatacgacaggaggatctcaggagactcatttcctatctagcctgtattcccaggtaagttctgtgtggcttgtgcttgtcactgatgtcacatttacaagagatgtggcgctatactcgttagaaatcagctaaattgtagcctgcattccaggcaaagtagtataaaatgaaagtcattatctttcaccttattaccattttgtgaccattattgtctagtgtaaagccctttggggagcagggacatgaaggtaggtaagagctttgtgtgttgacagtggatctgggatactcagctgggatttcaggatgtggcgcctgagttagaaagccattgttgatgattctaataccgtgacacagaggcctgggtgatcagaattgggtgctgcttttgacaatgcatttctgcctacttggcaaacgttagttctttaaaaatagtctgttgatatgtagcacgaagtttgtggggcattaaaaatccttattagctatatattgggcgtagatttgggaatctctatcaaaattgagactccattggtaatgggaatttttagcatagatgccaaagaacaccaagagcaagcaatgttgtgttttctggagagtccgca

SEQ ID NO: 14375 - DNA, 1760 bp, Homo sapiens
aatgggcagacccgagagcatgcccttctggcttacacactgggtgtgaaacaactaattgttggtgttaacaaaatggattccactgagccaccctacagccagaagagatatgaggaaattgttaaggaagtcagcacttacattaagaaaattggctacaaccccgacacagtagcatttgtgccaatttctggttggaatggtaacaacatgctggagccaagtgctaacatgccttggttcaagggatggaaagtcacccgtaaggatggcaatgccagtggaaccatgctgcttgaggctctggactgcatcctaccaccaactcgtccaactgacaagcccttgcgcctgcctctccaggatgtctacaaaattggtggtattggtagtgttcctgttggccgagtggagactggtattctcaaacccggtatggtggtcacctttgctccagtcaacgttacaacagaagtaaaatctgtcgaaatgcaccatgaagctttgggtgaagctcttcctggggacagtgtgggcttccatgtcaagaatgtgtctgtcaaggatgttcgtcgtggcaacgttgctggtgacagcaaaaatgacccaccaatggaagcagctggcttcactgctcaggtgattatcctgaaccatccaggccaaataagcgctggctatgcccctgtattggattgccacacggctcatattgcatgcaagtttgctgagctgaaggaaaagattgatcgccgttctggtaaaaagctggaagatggccctaaattcttgaagtccggtgatgctgccattgttgatatggttcctggcaagcccatgtgtgctgagagcttctcagactatccacctttgggtcgctttgctgttcgtgatatgagacacacagttgcggtgggtgtcatcaaagcagtggacaagaaggctgctggagctggcaaggtcaccaactctgcccagaaagctcagatggctaaatgaatattatccctaatacctgccaccccactcttaatcagtggtggaagaacggtctcagaactgtttgtttcaattggccatttaagtttagtagtaaaagactggttaatgataacaatgcatcgtaaaaccttcagaaggaaaggagaatgttttgtggaccactttggttttcttttttgcatgtggcagttttaagttattagtttttaaaatcagtactttttaatggaaacaacttgaccaaaaatttgtcacagaattttgagacccattaaaaaagtttaatgagaaaaaaaaagaaaaaaggaatgatgtaaaattatagttttttatgaatgataatgaatttctagtgtgttagattctatcggaaataagtcatgattattttaaaatatctataatacaatggaaattatatcctttaaaactaagtttctcatagaaaattttattttattttatatataatgtacatattttgggggacatgtgataatacattcatatagtaaagatcaacttagtgtaattgggatgtccatcaccttaaatatttgttttttttaatgctagaaacattcaaattctcttttagctattttggactgtacaatatagattattgtaactactgatctatcaaacactatgtctcatttcttccatcaaactatatatttttacccattaatcaacatttcttcatccctcctcctccctactcttctcaacctctagtaatcaccagtcta

SEQ ID NO: 14376 - DNA, 1187 bp, Homo sapiens
acttgtatatcttctttggagagaggtgtctgttcagatcctttgcctaatttttaagctggttatttggttttttgttttgttaattgttgtaaaagttctttattctggatacaggatccttatcagacatatgatccattcttgattatctgctttttttttttttttatttaaatcgaaaaggattggggctgggcccaaagcaggaggaaaaaacgttgtggcttcaccattgctgtgcactgtgggataatggatggaacatggtgttaagccacgtttttcagtgtgatcttcctcagaatacccgtttgctcttcttcccaggttgaaatgttccttcttgcctatgctgtgcgccacaccatccaggtgtaccggctctccaagtacaacacggaagaattcatcacagtctaccccaccgacccacccaaggactggccagtggtaacgctcattgctgaggacgatcggcactataacatccccgtcagagtgtgtgaggagaccagtctatgagagacgcatgctcctgacagcctggcgacgtggcgaagatgcacaggtggctcctgggcttgggctgcaggtttgggggtctctaagaacaatctctgagaagaacccttgggcccctgggagccaagttggacaggatgtcctgaagactagcttttgataagagaaattaaccaagtctttcccctcatctatgatgcaatatatttcagtgggggccttcagagcacacctgttggacggtgcaaaccatatcttctccagaaggcaaatacttttgtatcagaggaaactcagttttggagaggaatatgttctttatgtctcaaatcaaaactctctctaatggtaaactggcttctaatttttttaagtacagtatttttttttcccctttagtagtaacgggtttctatagatcttcctatacagtctgctttaactcaggaccttgagattatgagactgacgtgctgcccactgcactgagggggcttctaacagtctgctttaagtggtataattctgggatagatctgttactggcatagtcatgacaacctctggtaatcttaccttctcctttttatgaagggaagagcaatggtttggacttacatcttaattaaggctattttaagcagattgttttgcaacagatt

SEQ ID NO: 14377 - DNA, 1380 bp, Homo sapiens
gccacggagggggaagactctgccatgacagacatgcctccgacagaggaggtgacagacatcgtggaaatgagagaggagaatgaataaggcacgggacgccatgggcactgcagggacagtcagtcaggatgacacttcggcatcatctcttccctctcccatcgtattttgttcccttttttttgttttgttttggtaatgaaagaggccttgatttaaaggtttcgtgtcaattctctagcatactgggtatgctcacactgacggggggacctagtgaatggtctttactgttgctatgtaaaaacaaacgaaacaactgacttcatacccctgcctcacgaaaacccaaaagacacagctgcctcacggttgacgttgtgtcctcctcccctggacaatctcctcttggaaccaaaggactgcagctgtgccatcgcgcctcggtcaccctgcacagcaggccacagactctcctgtcccccttcatcgctcttaagaatcaacaggttaaaactcggcttcctttgatttgcttcccagtcacatggccgtacaaagagatggagccccggtggcctcttaaatttcccttccgccacggagttcgaaaccatctactccacacatgcaggaggcgggtggcacgctgcagcccggagtccccgttcacactgaggaacggagacctgtgaccacagcaggctgacagatggacagaatctcccgtagaaaggtttggtttgaaatgccccgggggcagcaaactgacatggttgaatgatagcatttcactctgcgttctcctagatctgagcaagctgtcagttctcacccccaccgtgtatatacatgagctaacttttttaaattgtcacaaaagcgcatctccagattccagaccctgccgcatgacttttcctgaaggcttgcttttccctcgcctttcctgaaggtcgcattagagcgagtcacatggagcatcctaactttgcattttagtttttacagtgaactgaagctttaagtctcatccagcattctaatgccaggttgctgtagggtaacttttgaagtagatatattacctggttctgctatccttagtcataactctgcggtacaggtaattgagaatgtactacggtacttccctcccacaccatacgataaagcaagacattttataacgataccagagtcactatgtggtcctccctgaaataacgcattcgaaatccatgcagtgcagtatatttttctaagttttggaaagcaggttttttcctttaaaaaaattatagacacggttcactaaattgatttagtcagaattcctagactgaaagaacctaaaaaaaaaaatattttaaagat

SEQ ID NO: 14378 - DNA, 1119 bp, Homo sapiens
actacgacagagagaaaggagaatttggaggttttggttcagttagtggaaaaattgaaatagaaatcaagatcaaccatgaaggaaaagtaaacagggcccgttatatgccccagaacccttgtatcatcacaacaaagactccttccagtgatattcttgtctttgactatacaaaacatccttctaaaccagatccttctggagaatgcaacccagacttgcgtctccgtggacatcagaaggaaggctatgggctttcttggaacctaaatctcagtgggcacttacttagtgcttcagatgaccacaccatctgcctgtgggacatcagtgccgttccaaaggagggaaaagtggtagatgcgaagaccatctttacagggcatacggcaatagtagaagatgtttcctggcatctactctgtgagtctctgtttgggtcagttgctgatgatcagaaactgatgatttgggatactcgttcaaacaatacttccaaaccaagccactcagttgacactcacactgctgaagtgaactgcctttctttcagtccttatagtgagttcattcttgccacaggatcagctgacaagactgttgccttgtgggatctgagaaatctgaaacttaagttgcattcctttgagtcacataaggatgaaatattccaggttcagtggtcacctcacaatgagactattttagcttccagtggtactgatcacagaccgaatgtctaggatttaagtaaaattggagaggaacaatccccagaagatgcagaagacaggccaccagagttgttgtttattcatggtggtcacactgccaagatacctgatttctcctggaatcccagtgaaccttgagtgatgtgttctgtatcggaagacaatatcatgcaagtgtggcaaatggcagagaacatttataatgatgaagaccctgaaggaagcatggatccagaaggacaagggtcctaaatatgtctttacttcttgtgattttagactccccttttttcttctcaaccccgagagtgatttaacactggttctgagacagattttattcagctatccctctatataataggtaccaccgataatgcta

SEQ ID NO: 14379 - DNA, 1623 bp, Homo sapiens
atgcaaaacagtttattgtaacttactgaaaaatattaacaattaattgtgaatacatgctgttaccagcttccttattcctaatacctggaaaatttttttttcaacggatagattttgatgtaaaaaagaccgaaattatcaaggtatcttagttgaaggacttgggaaatactatcaaaattaatttcttaggaaaaaatttaaaagtatatttaagtactctggatagactgaaacgtttccatgttatttctgcagttgtagacttaggcttatttgtaaagaagcatgctccattgactgccatctctagtcttgcagtgggtggtattaacccatagaaagcaagcagttgtgtatcacatagacaatggttatgatgtaaacagattcagttgttttgttgttcattcgtcatatgtttgtgatagggatgttgggagcacagctctattctgcctgctcagacttaagttagacccttatcttttatattatgtcatgaaaaaagtctcctaaaattgtgaaactagttcttgatgagtgatgtgatcatcagcaataaagatataataactctgttttcttagcctgtatagaggagaggaacttgcttggctttaaaatatatttatttgccatttaagtataaatatggaatctgtttcttattgggaagatagaatatatatattttcctttaaactttttaaggtcacttttaaataaccaaatttgatttatggtttttaacaaaggactaaagagctgaaaccaacctagttttgtttttgtgatataaactttaagtgtcgagggaccatgccagcaactaccaaaaatctcttaaatcttcaggtacagctggcattttggcagatgcatagagacatctgagaccctcagaaaggaaggataatccaagaatataggaaatctgtgttctcttcctttcattttatcccttatatttctaaagactaattataagtaatctgacattttaatgtagctactcttatttattttttctttctgaggtattaaaatatctggactgagttttgccaaatgttaaagggagaagagttactgaagactttgaacacttgctttttgtgattgcttatgtcattagtgcctcatgactgtgtttgatgtcctttattgatacaaagtgagcctgtgccttcattatcttgcccattttaatacaaatggaaacctggtgtttgaaaatctctgaactgtgtgggttttggaggaatatacctgaattttattcaataacagtttctggacaggaagaaaaatacagttacatatttataaaatagtcgttatcagtatttttttatgtgtatgtttctttctttaaaacaatattcttggatataaagtagaaaagtttaaaggtcatttccatttcttcactaaggagaaaaaaagttaaataatccaagtaattaaagaatataagtcactagatgaccttacaggaagacgaactcaagggctgataatctgtggtggtatgaacaataaatctagaataaaatgttaataactacaaattaaaaggggtgtgaggatgggaggaagttggtagggtagaaaaat

SEQ ID NO: 14380 - DNA, 1296 bp, Homo sapiens
tccgaggatccttttgcctgccgccttcattgatcctgtattaagctgtcaactttaacagtctgcacagtttccaaagctttactactcttagaggacacatgccttaaaaaaggaggggaggaaccacgctgccaccaaagcagccggaagtgccttaacttgtggaaccaacactaatcgaccgtaactgtgctactgaagggaactgcctttcccccttctgggggagacttaacagagcgtggaaggggggcattctctgtcaatgatgcactaacctcccaacctgatttccccgaatctgagggaaggtgagggagtgggaagggggatggagagctcgaggggacagtgtgtttgagctggagtgctgcgggcagcctttctcatggaatgacatgaatcaacttttttctttgtttcatcttttaagtgtacgtgcttgcctgttcgtgcatgtgttcataaactcaacactttaatcatggtttcatgagcattaaaaagcaaagggaaaaaggatgtgtaatggtgtacacagtctgtatattttaataatgcagagctatagtctcaattgttactttataaggtggttttattaacaaacccaaatcctggattttcctgtctttgctgtattttgaaaaacacgtgttgactccattgttttacatgtagcaaagtctgccatctgtgtctgctgtattataaacagataagcagcctacaagataactgtatttataaaccactcttcaacagctggctccagtgctggttttagaacaagaatgaagtcattttggagtctttcatgtctaaaagatttaagttaaaaacaaagtgttacttggaaggttagcttctatcattctggatagattacagatataataaccatgttgactatgggggagagacgctgcattccagaaacgtcttaacacttgagtgaatcttcaaaggaccctgacattaaatgctgaggctttaatacacacatattttatcccaagtttataatggtggtctgaacaaggcacctgtaaataaatcagcatttatgaccagaagaaaaataatctggtcttggactttttatttttatatggaaaagttttaaggacttgggccaactaagtctacccacacgaaaaaagaaatttgccttgtccctttgtgtacaaccatgcaaaactgtttgttggctcacagaagttctgacaataaaagatactagctaacacgctgtgtgtttcctttatcagaggaggctctaaaaaccatgga

SEQ ID NO: 14381 - DNA, 1211 bp, Homo sapiens
aaaataagcaggtggaagagatcctccgtctggagaaagaaatcgaggacctgcagcgcatgaaggagcagcaggagctgtcgctgaccgaggcttccctgcagaagctgcaggagcggcgggaccaggagctccgcaggctggaggaggaagcgtgcagggcggcccaggagttcctcgagtccctcaatttcgacgagatcgacgagtgtgtccggaatatcgagcggtccctgtcggtgggaagcgaattttccagcgagctggctgagagcgcatgcgaggagaagcccaacttcaacttcagccagccctacccagaggaggaggtcgatgagggcttcgaagccgacgacgacgccttcaaggactcccccaaccccagcgagcacggccactcagaccagcgaacaagtggcatccggaccagcgatgactcttcagaggaggacccatacatgaacgacacggtggtgcccaccagccccagtgcggacagcacggtgctgctcgccccatcagtgcaggactccgggagcctacacaactcctccagcggcgagtccacctactgcatgccccagaacgctggggacttgccctccccagacggcgactacgactacgaccaggatgactatgaggacggtgccatcacttccggcagcagcgtgaccttctccaactcctacggcagccagtggtcccccgactaccgctgctctgtggggacctacaacagctcgggtgcctaccggttcagctctgagggggcgcagtcctcggtaagtacctgcctggcgtgtcccagtgaaatgggtggccggtcacacccacccctgttgcatcctcaagttgaatgaagatacccgtaggatatctgtgcaaagattgcagagtcgtggtcttagagatcatcttaaaccttttgcttattccataagccaattgcattcataagtagaactttgatgtgcctgtttcagttttagcacaaagcctagagctgagctgtgcccaagacttcagaaaactggctatttatttatttattgttgttgttgttgtttttgaggtggagtcttctctgtcatccaggctggagtgcattggcaggattttgcctcactgcagtccccacctctcgggtccaagctatcctgctgcctcagcttcctgaatagctgggattacagatgcccgccagcaca

SEQ ID NO: 14382 - DNA, 1162 bp, Homo sapiens
cggggaggagcccagcaaggaggaaggggaacccaaaaagactgaggcgcccgcagctcctgccgcccaggagaccaaaagtgacggggccccagcttcagactcaaaacccggcagctcggaggctgccccctcttccaaggagacccccgcagccacggaagcgcctagttccacacccaaggcccagggccccgcagcctctgcagaagagcccaagccggtggaggccccggcagctaattccgaccaaaccgtaaccgtgaaagagtgacaaggacagcctataggaaaaacaataccacttaaaacaatctcctctctctctctctctctctctctctatctctctctctatctcctctctctctctcctctcctatctctcctctctctctctcctatactaacttgtttcaaattggaagtaatgatatgtattgcccaaggaaaaatacaggatgttgtcccatcaagggagggagggggtgggagaatccaaatagtatttttgtggggaaatatctaatataccttcagtcaactttaccaagaagtcctggatttccaagatccgcgtctgaaagtgcagtacatcgtttgtacctgaaactgccgccacatgcactcctccaccgctgagagttgaatagcttttcttctgcaatgggagttgggagtgatgcgtttgattctgcccacagggcctgtgccaaggcaatcagatctttatgagagcagtattttctgtgttttctttttaatttacagcctttcttattttgatatttttttaatgttgtggatgaatgccagctttcagacagagcccacttagcttgtccacatggatctcaatgccaatcctccattcttcctctccagatatttttgggagtgacaaacattctctcatcctacttagcctacctagatttctcatgacgagttaatgcatgtccgtggttgggtgcacctgtagttctgtttattggtcagtggaaatgaaaaaaaaaaaaaaaaaaagtctgcgttcattgcagttccagtttctcttccattctgtgtcacagacaccaacacaccactcattggaaaatggaaaaaaaaaacaaaaaaaaaacaaaaaaatgtacaatggatgcattgaaattatatgtaa

SEQ ID NO: 14383 - DNA, 1976 bp, Homo sapiens
taaattaagcaatgatgcatcatgatgattcttccattactggaagtcacattttatctgaatttattctcatgtccaaatgtttgtgacgtatatttaatttgcttattgccacatgcacagccacacacagaggatgacgtaaagcaatcatagaaattaacaaaaagacgtatttttattactttatcagtatttcaaattgatttttaaatcagaaaaaaacaggttatttgaaccagacatagattggctgtattgctctcataatttggcagatgtctgtatgttccatttatagtacaactgccacatttatttgctttttaaaagtgatatattagcactctgtccctcactcgccgccgacaacctgtctcgccgcgcgcatgccctgcagccgccccacagaaatgcttcggttacccacagtctttcgccagatgagaccagtgtccagggtactggctcctcatctcactcgagcttatgccaaagatgtaaaatttggtgcagatgcccgagccttaatgcttcaaggtgtaggtagaccttttagccgatgctgtggccgttacaatggagccaaagggaagaacagtgattattgagcagagctggggaagtcccaacgtaacaaaagatggtgtgactgttgcaaagtcaattgacttgaaggataaatataaaaacattggagctaaacttgttcaagatgttgccaataacacaaatgaagaatctggggatggcactaccactgctactgtactggcaggctctatagccaaggaaggcttccagaagattagcaaaggtgctaatccagtggaaatcaggagaggtgtgatgttagctgttgatgctgtaattgctgaacttaaaaagcagtctaaacctgtgaccacccctgaagaaattgcacaggttgctatgatttctgcaaatggagacaaagaaattggcaatatcatctctgatgcaatgaaaaaggttggaagaaagggtgtcatcacagtaaaggatggaaaaacactgaatgatgaattagaaattattgaaggcatgaagtttgattgagggtatatttctccatactttattaatacatcaaaaggtcagaaatgtgaattccaggatgcctatgttctgttgagtgaaaagaaaatttctagtgtccagtccattgtacctgctcttgaaattgccaatgctcaccataagcctttggtgataatcgctgaagatgttgatggagaagctctaagtacactcatcttgaataggctaaaggttggtcttcaggttgtggcagtcaaggctccagggtttggtgacaatagaaagaaccaacttaaagatatggctattgctactggtggtgcagtgtttggagaagaggggttgaccctgaatcttgaagatgttcagcctcatgacttaggaaaagttggagaggtcattgtgaccaaagacgatgccatgctcttaaaaggaaaaggtgacaaggctcaacttgaaaaacgtattcaagaaatcattgggcagttagatgtcacaactagtgaatatgaaaaggaaaaactgaatgaatggctggcaaaactttcagatggagtagttgtgctgaagtttggtgggacaagtgatgttgaagtgaatgaaaagaaagacagagttacagatgcccttaatgctacaagagctgctgttgaaggaggcattgttttgggagggggttttgccctccttcgatgcattccagccttggactcattgactccagctaatgaagatcaaaaaattggtatggaaattattaaaagaacactcaaaattccagcaatgaccactgctacgaatgcaggtgttgaaggatctttgatagttgagaaaattatgcaaaattcctcagaagttggttatgatgctatggttggagattttatgaatatggtagaaaaaggaattattga

SEQ ID NO: 14384 - DNA, 1138 bp, Homo sapiens
atgttactttcctttgcctttttttccttccccacttttatcttttgattctcttcggtggcattgtgcctttaagctgaggtgtcagacctggaaaactttggaacaataggagaatgaacccatgcattgtgtttatgtggtctggaatagggtagggggagcattgggagtcatcttccctcagtgaggaaggaagagctactgtgtagttatggatgccccaccaccaccaaaaggtgatattgaaagcataaaatgttgactccagtatatctacacacttgcttttgcagggaaagtgttaatagtatggaagcgagtctgagcatactaaaaaagtagaacaaatactaaattaacattgttaacgtatgatctaatctggatcttagaaattgaaagcttcaattcagagtgtataaaacctgtaaattaaaaaattagtatagtgtgatagcttttcactcaagattttggaatttaaaagctctacatatggtggtggcacctatttccccagatggtttaagaattcttactattctttgcctttatttctgttttactttgggatatatgcatatatgtaaacatcatatgtatcctcatatacttatttttatatatgtatataaaataaatgtaagaagtggttgaactctcataagaggctttacagtaagaaatgacattaattcagagtactttaaaaatattttattaatacatgagtgcccaaagttgttgcaaatgttcattttaatcacacttttcatatttgctctctaccagttgttaaaggctcattgttggagcaccacctgtctagtggtataataatctccaatgtacattgaactctgttttaatgatgctcattgccaaaataagttggtccctagaaaacacagtagtaaattactttaatgcagtagtttttaaagggcagacccagaccagcagcatctgcatcacctgggaacatgtcaggaagacggattcccagtcttgattccagacataggaaatcagtaatcttgggggcaggacccagctgactgctgcgtttaacatgcatgctggagtttgagaaccattgttttactagatatatatattttctaccagctgttct

SEQ ID NO: 14385 - DNA, 1208 bp, Homo sapiens
ctggatattagtcctttgttggatatatagtatgcaagtattttctgccattctgaaggttgtctgtttacagatacttggggagataagatggaaagatcagggcttagaattcaactggatagacagctccctttcctgcttaatttgggatgatacaaagatggtgctcccatgctgagtttttgttttgtttttgttttttgagacagggtctccctctgtcatccaggctagagtgcagtggcatgatcatagctcactgcagcctcgacctcctgggctcaagtgatcctcccacctcagcctcttgagtagctgggactccagtcaggtgccaccacaccagcctaattttttattttttgtagagatggcgtctcactgtgttgcccaggctagtcttgatctcctgggctaaagtggtccctccaccttaggattacaggcgtgagccactgcacccagtttatgctgttttaaagactgaacttatttcattgaaattttagctggccatgactcatccaagtcatcatttaaattttggaatgaatcctgatcatgccaggaattcattatctaactgtggaattcggcagcccaaatacggagacagaaaagttcatcacatgcacatgcggaagaaaggtatgtctggatgattttaagatgtgaatctcctattttggcctgtgttttctgttgtaaattatttcgcctctaggaatggttccctgggtgactctttcaccgtctcatattctagtgcttactgactctttttttttttttttgagacagggtctcactctgtcacccaggctggagtgcagtggcacgatctcagctcactgcaaactttgcctcctgggttcaagtgattctcctgtgttagcctcccaaatagctgggattacaggcatgtgccaccatacttggctagtttttttgtatttttattagagacagggttttgccatgttggccaggctggtcttgaactcctgacctcaagtgatctatccgcctctgcctcccaaagtgctgaagttacagacctgagccactgtgcctggccccacagactcttttataatacttactttgagcaagaactataataagggttgatgagttttttagagaaatttctttttcctatccagtgttttaaataattgtttatcacacttttagacaggtag

SEQ ID NO: 14386 - DNA, 2071 bp, Homo sapiens
agctaaaaacctggtggaaaagggtgtattgacaacagagaaacagaacttcctactttttgacatgacaacacatcccctcaccaataacaacattaagcagcgcctcatcaagaaagtacaggaagccgttcttgacaaatgggtgaatgaccctcaccgcatggacaggcgcttgctggccctcatttacctggctcatgcctcggacgtcctggagaatgcttttgctcctcttctggacgagcagtatgatttggctaccaagagagtgcggcagcttctcgacttagaccctgaagtggaatgtctgaaggccaacaccaatgaggttctgtgggcggtggtggcggcgttcaccaagtaactctgctcggggtgaaccattctcctttctctcaagtaaaccagtagtttttcttctgttgacttctggttttctgtaatttgtactttcccacactataattggcttctgttttacaaaatggtgggtggctttttcttttttgtacgtgtacaggattctgctggtacgagaggccttcctctttctgtttttaaaaaaagttttactgccatattggcattccattccctgttgccatcctcactgttacctgttttgggtttctggtctactttgactttcaaagtacctccagcctcctcatacgcacagcttttggatgacctcagcttgagtttctccatatgtgcatgtacatctagcattctgcctacagttcagacagaagtcacaaaaaggccttcaactcaccaaaggtaaatatctgtatctattaggacattttttacatagacttcagttgagatgtatacttagcaaaattatttttaaattgaaacagcacagtaaatacttaatataaaatgtcccttggattttgcttcccatgtaaatctattgtattattacacttgttataattttaactataaaggtccaattgtttcacagagccagtttgggatgggctgcattccatttatgctgtatatagtttgaattatatataaattaccccttcttctggccacccctgctcccatcttagtattttgcaagatctaatcagttgtacacctggtgcccctcgcttgcttcaatcatggttatttgatggcaaaatcgacctcttgtcgctgaaggagagagaaaagatgtgtgtctgattggtcctgggattttttgagctgtgccatttatggtactctttgcctatgcatccccttgttagattttttttaaattttatcttactgtttttataatttctattgggaagaggcttgtgaccagtaccaatcttgagtttctttttctgtccacaagtaaattaatatctgctctgaaatgtcatttatctactcacacattcttggggaaaaaaatcaaatgtcagtcctagcagatgttgcatgtaaattggtagcaagtaatgattacaacccagaggattaagaattttgtaacagaaagctctatgttttaattttttatatacaattaggataattagcattgtcagactataaacctttgctttttaaagtttatttttactatttctttatcactttattgtatcatcaccattggtttcataatgtaaatactatatgttgaacaaattaaatgtcaaaattttttattaccatagtccatgttaatagtggggctttcaggtgtttagagattttttttgttgttgttaacattcattgcaaaagtactagatggtgtataactctagagttgaattttaagggattccctaatatgtatactatctttttatctgaagtaataaataaacaatgatcttgaaagtgcctgaatcagagcaagcatgtcatttgtgtttttgtattctcatttagttttctttcaaatgaaatgttacttactgtagcattgtaatattttaatgcagggcttgggtttcttaaagggccagatagtagatattttaggctttgtgagccgccagctgtgtcagttgcaactactgaactttactgaatgaaaactgttatagataataca

SEQ ID NO: 14387 - DNA, 1175 bp, Homo sapiens
aggtccactttcaaaccatttggacgcacttgctccttctaaagggttagggagtcccggcagatagcgtacccctccccgcccagcagcagagagcaaagtccttcctgccgatcctgcagaccccggagtccaaatgggaccccgtccacacgaccgcggagtcgcctccgaagacggcggtgtctggggcgtggagggcacggctggaggctgagtggggtccaccttcgcgtggcccaggctcttccattcacggggggccccgccaggttcaggctccagccctgggtagtgaaggggaaacggggaacggaaggagggagggcacgtcacgggagcaggactgcaggaccgcgggtcagggggcgcaggaacgccaaagaaaagacaagcaccgagggccgggaagggtgtaggctgcagtggcagcggatccccggccgccgcttccggcgcctcccggcccagctctcccgcgccgactctgccacatcctccggtgacgtcagccggggccgccatattggaaaggcgccgccgccgcctccgccttggagctcggggtgtttcggggactgcggccacaggcaggaaggcgctcctctcctgccccgccgacgcccggccagcccgcttcgccctgacctgtttcctcatgactgcccccggccctgctgccgacggacgtcgccccggcgtccggatttaacacggaaacccggatcggaggccgcgcggggaggaggagggcgacccggtcggtcctgcgaccctctcggcccggctcggcgcctcggcgggagccatgacctcgctgacccagcgcagctccggcctggtgcagcggcgcaccgaggcctcccgcaacgccgccgacaaggagcgggcggcgggcggcggcgccggcagcagcgaggacgacgcgcagagccgccgcgacgagcaggacgacgacgacaagggcgactccaaggaaacgcggctgaccctgatggaggaagtgctcctgctgggcctcaaggaccgcgaggtgcgggcgcggcgggctgggcggggggcggcggcgcggggcccgggcgccaggtgagctccaggtaggtgccaggtgagcgcccgaggcttccggcccgcgcacctgccctcgctccgaagtccgcgcctggtggcgccca

SEQ ID NO: 14388 - DNA, 1242 bp, Homo sapiens
cgtaatagggttgtggccgttttctgatgcctaagtattatacagagcccacaatggccagtttactaccagaaagggcttcagtaagatattcttggacttgatactttcttcagatcctctttgtgccaagataatttatccagtcattgggaatagtaagtttctgtgtaacccatctcaattatagaagcaagttcagctttatgtatttgtatggggagttgaagattcagatagaggtattaagatgtgtggcatttacttaaaccatcacatttttttctttctacgcccccttgcctgtaaaacacctgggaagttccactggtgtcatccatcctgatgcttcagaccaccctcccttcttcacagaccgtgtcactttgcctgtgggtgggggctagccagccaccaccctcttttctgtgctgccagccccaggtcttcctccgcctgctccacaccactcgccgctgtccctctgcactccctgccttggtgcgtgtagtcccagtgtctcactgccaaacctcttggttacgctgcggggatctgtttctttgcctgagatccttcctgaggagcgtccattcctctggagtctctccttgtttggaacaaatcgcttcgcctttttctacttgcctgctgaagctttggagcacttgtgattgcagttttctgccgcaacccctgagccgagttcctcacattcttttacctttatggactgatgggattgggtcacttttgaatgtggctttcataggaaagcagcttaaacataaatatcagaagtgatgattatcatatgatacctcagtgattttaaaagccatagaagaaacttgactatgcctggtcaccttcttggatctgctgtctaaatgatatatatatgatatatatgtgatatatatatatcatatatatgatatatatatatatatcacatatatatgatatatatatgatatatatatatcacatatatatgatatatatatcatatatatgatatatattttttttaatgcaggaaagtatactttgtaaggagcagatttttttgttctcagtggaaccctgtcaaatcgcataaaagaggaaaaaaacaaaactcattagaatgttttaaattgaatgttcgccttttacatatatttgctcttcagtatggatcccaatttgaatgttacatgttcggaaaaactttcagttgctcaagggcaataagaa

SEQ ID NO: 14389 - DNA, 1097 bp, Homo sapiens
tcatttatgatgttctccagactactaggtgctgagtgggtccacattctgggacagtagggggtctcagcaggggtcctagctgtaaacccaggagttgactgtcatgaaagcatgtctctagtcatttccctttcatcttttataagctcaactttcagagtgggttttctttgggccactggaatcagttctgccaacagtggccagtctgttcttgtgcttactccagaggagtgaagcacgctgactgctctcagagagccagggcccctgctggaagagattgggcttcctttggcagtcacttaaaagtcaggcagcacctttcctctcattcttgggaagtatccctagaagttgatcatctacttcatttctttagcattcacttattgctgtgtaacataatttcccttcctgatttcattgctgatctgtagtgtttgatgagaaaaagaaaactctctttggacaactgaagaaataccctgagaagctcatcatccactgcaaagaccttcgagtgttccagttttgtctgaggtacacaaaggaagaggaagtcaaaagggtaactagttgcatgtgtttttaggttttatttcccatcaggttttccccactagctctagtttttgcttacgttgcatgaaggttgaggggaggctttcactctgtgaacttgaaattggttgtaatcccatattctttgattagaacgtgaaaagtaatttgataaagcatgcgtgtgtatcatcttggcacatgctacctttaatacttcaattcataatgtttttattcctggagccactaaatggtgggaggtggtaaaccaggtcagtaggcggtaggggaaaatgaagaaaggatgagacagctaaaagtttatccctattctcccacctctgacagtctttccaaaagacagtagtgttggagaattccaacttctatgagtaaatgagtttacctctgggaggtagtagttgtgcatggaaaggaggaagtacacaggtcagatgagcaaagccaaataatcagacatgcttttagagactaaataaacataatctcctggtcgccacagcaag

SEQ ID NO: 14390 - DNA, 1196 bp, Homo sapiens
ttagggcagactggggcaagcccatctgtgttcacttagggtattgcttctatggaacatctgcttgggtcaaagtaatgaaaacactaagatttctgcgtgaaagtgcagctcagatcattagtacctatttggaaatttccattattcccagtgagaagatagagaaatgtcctgcacagaggtgtatctgagccatttcaatttcacttcttggtggtttccactctgccgcatcttctctcttatgtttttgcagctcctgccatgctgaaaagtgtaaagttctaaagccctgtgttgtattgtatgtttgtccttatgtaaatagggctggaaagcctttagtgtttgcatatcgtatgttccctgagaactctaaggaggacctgttttggtttctaccaggtgaacagctgctttgtgaagccagcacagtactgaagtatgtccaggaagattcctgtcagcatggggtctatgggaggcttgtctgcacagacttcaagattgccttcttgggtgatgatgaatctgcattggataatgatgtatgtatgggctgcatttggcagagtttgtgggcaacagtgtggttgtggttccgttgtctttttttcccagcttctcagttactctaccccctaacacacataaacacaaaggacagaaatcctgaatgtatgaactgcatttggtgaagtttggggggaatagcacagttgtaaaatagctctgttgtcttttttcccccagctactcagttactccacttcccatcatccccaccctccccaccatcccacataaatacacacaaaggacggagtccttctcatcactggcctgctctctgtcgttcagggtctcctttccgtggcaggaccgttaagaaatttctcacccgtgcctcatgtcatactggcttacttttgacctcatgtgtcaactttcaattttcttctgtatttcagtgcaatatatatcactcactggaataacatcttccaaatatactagttccccacgttttctctatactaagctcttccttaaacccaggaactgagttcagtaatgaaaccgatggtgaatgcagcctttgaatttgggttcactctgtttttgttttgttttttatttttaattgtttttgagacagagtctcactctgtcattcaggttggagtgctgtg

SEQ ID NO: 14391 - DNA, 1169 bp, Homo sapiens
gtatttaattctttttctactttctttttcttaattcaaaatagcttttttaaaataagttctttaaggtacatttccccaaaacaatacaggctttattctgttgctttttattttattccagtttattgaggggatataaatctgtgcaagtttctgactgatccacgttatttggtaaaagaattctataactttttttgatgtttttaaatgtcaaaggctttttttctatagtgatgacttaaaccttatctcctcttgtttttctcttcttggtgttatagattcagaaattttatttttagcttagcattatgcatattctcccccctcctgaattacttcacagtctcatctaggtgtgggtgtgcagcggtgagttcacagttaacttctctgagcctagtttcacaaactagacaaagatcatttctagctcccaactcttgtgcttctagactctgtgatctggtataaaccagctgattatggcacaacatgccatgtttgcagagggcctcaccaggaatgttgtattagctagtgcatgctaatttctggtcgctagtacatgagcatgggacggggctggcctggtcttggggagagcctcaccattaaaagtatttcaccattaaaagtattgggaggtgaaagcacaggaagccttgcttacatgtcttcccccatggacttggcagagacactttttctgggactattttaaaccctaatgaggccctgtcttcattatttccttcaaactgtgatctcttgagaggctgacctagtgactgagccatcttccggtatttccttagtgtttcagccagaggtaattaaccccttgaaagatgagagaacagcaccataatatttgtcccttctgagtgtctgaaactgttcgttttcatattgaaggtagactaaataaattttgagccaaaaagtaaatttaaagaccttgaaggagctatcaagtgggagattccaaggagaagatggttatctgttgcatgagaagaaaaatcctttgggttttttttgttgttgttgcaaaacatttatacttagtttttcatttcccccatagtcttctcttttgcctgcccccgtgagctcctctgcttccagatggcagagaatactgacctattccctaatcc

SEQ ID NO: 14392 - DNA, 1881 bp, Homo sapiens
ttttcaattaactcaaaattctgactctctttgttgcagtttgcattgagactccttgcattccgccagatacacaaagttctaggcatggatccattaccgcaaatgagccaacgttttaacatccacaacaacaggaaacgaagaagagatagtgatggagttgatggatttgaagctgaggggaaaaaagacaaaaaagattatgataacttttaaaaagtgtctgtaaatcttcagtgttaaaaaaacagatgcccatttgttggctgtttttcattcataataatgtctacattgaaaaatttatcaagaatttaaaggatttcatggaagaaccaagtttttctatgatattaaaaaatgtacagtgttaggtattatttgaatggaaagacacccaaaaaaaaaaatgtgctccgactagggggaaaacagtagttccgattttttcccattatttttattttattttctggttgccctagcttccccccctatttttgtgtcttttattaactagtgcattgtcttattaaatcttcactgtatttaatgcaggatgtgtgcttcagttgctctgtgtattttgatattttaatttagaggttttgtttgctttttgacactagttgtaagttactttgttatagatggtatcctttaccccttcttaatattttacagcagtacgtttttttgtaacgtgagactgcagagtttgtttttctatatgtgaaggattacaacacaaaaagttatcctgccattcgagtgctcagaactgaatgtttctgcagatcttgtggcatttgtctctagtgtgatatataaaggtgtaattaagacagagttctgttaatctaatcaagtttgctgttagttgtgcattagcagtataaaagctaatatatactatatggtcttgcaacagttttaaagcctctgcataattgataataaaaatgcatgacattcttgtttttaatagacttttaaaatcataattttaggtttaacacgtagatctttgtacagttgactttttgacatagcaaggccaaaaataactttctgaatatttttttcttgtgtataagtggaaagggcatttttcacatataagtgggctaaccaatattttcaaaagaacttcatcattgtacaactaacaacagtaactagcccttaattatggtgacagttccttattggtgtgtgtgagattactctagcaactattacagtataacacagatgatcttctccacacaccccatcacccagataatttacagttctgttaacagtgaggttgataaagtattactgataaaaaattatctaaggaaaaaaacagaaaattatttggtgtggccatcttacctgcttatgtctcctacacaaagctaaatattctagcagtgatgtaatgaaaaattacatcttactgttgatatatgtatgctctggtacacagatgtcattttgttgtcacagcactacagtgaaatacacaaaaaatgaaattcatataatgacttaaatgtattatatgttagaattgacaacataaactacttttgctttgaaatgatgtatgcttcagtaaaatcatattcaaatttattgagtactgcatcttgttattcctgacaaatgtttgttgtctaagcacataattttcagaaaattttgtaattcaatactatattggcttaatttctttctagggtcagaatctacccccaaagtcttagagggtcagaatcttcccccaaagtcttagagggccaggaaactgtaggagaccacaggggaaatagaacaggagactcagacttttctcccagattcatcacacacagattatctaatcta

SEQ ID NO: 14393 - DNA, 1150 bp, Homo sapiens
gtgacactccgtctcaaaaaaaaaaaaaaaaaaaaaagaaatgcctgttttgggttcttcatttttttcctataactgtaactatattgagcattctatatttatcatcagttctttgttatattagctccagaataacttacgaccatttagagtactgaacaaactcagtagtttattgtacatactcattaaggtggatttttgtgttccctcttgtcttgttgtctttgtgctagtgcactgtgtccagtaatctttccttcggatttcgttttggtgggtagggtttatatttccagaaattgtttattatattactaaattaataagttaaccttttgttcctcatattggattatgtaaatttattgaaaataactccgtggatatattaaagtgccaacaagctctcaaatggctcatgtgacactgatgctaccttaaggaagtgtcttgctcacctggtcaaacacccattcctcactgcattttgccaattcaatccattttagatgtaacctcgggtatggtgaaagacccaccggacgtcttggacaggcaaaaatgccttgacgctctggctgctctacgccacgctaagtggttccaggttcggaacatcattttacttttttcttgtagccttatgagagaagtagttcagtacaacatgtttaactgtgcttaaacatttcaaaagactgcccaagcaatactattttaaattaaatatcagaaaatatgttaacatagaaagctgggtatgatgatctgcatattgcagttattattaatttgacaatgaacttaggtttggggagtgttttgtagttggggtttttttattttttatttttagtggctatatttaaagttgacttgtttaggaacatcacatgtttgtgtatatatattatattccataaggctgcagattaactttgctttaaataatggaatatgtgtttaaagctttgtgtatagttttaagatttttttccccctctttctctaagttaataagtgtagggagtgaaaggtgaggaagcagctgtttggtttagtgactttgcagtcatgcaaaggcacagaagggaaaccaaacagatttccttaacctttcagtccctagacaaactttttagct

SEQ ID NO: 14394 - DNA, 1146 bp, Homo sapiens
tgatgtcagaattcagcaactgcaagagattttgcaagatctacagaagagattagagagctctgaagcagagagaaaacagctacaggtcgaactccaatcccgaagggcagaactggtatgcttaaacaacactgagatttcagagaacagctctgacctcagccagaaacttaaagaaactcagagcaaatacgaggaggctatgaaagaagtccttagtgtgcagaagcagatgaaactcggtcttgtctcacctgaaagcatggataattattcacatttccacgagctgagggtcacggaagaggaaataaatgtgctaaagcaggatctgcagaatgcattagaagaaagtgaaagaaataaagagaaagtgagagagttagaggaaaaactggtagagagggagaaaggtacagtgattaagccacctgtggaagagtacgaggaaatgaaaagttcatattgctctgttattgagaatatgaataaggagaaagcatttttgtttgagaaataccaagaagcccaagaagaaatcatgaaattaaaagacacactaaaaagtcagatgacacaggaagccagtgatgaagctgaggacatgaaagaagccatgaataggatgatagatgaactcaataaacaggtgagcgagctgtcacagctgtacaaagaagcccaggctgagctggaggattacaggaagaggaaatctctagaggatgtcacagctgaatatatccataaagcagagcatgagaaactgatgcaattgacaaacgtgtccagggctaaagcagaagatgcactgtctgaaatgaagtctcagtattcaaaagtgttgaatgagttgacccagctcaaacaactggtggatgcacaaaaagagaactctgtctctatcacagaacatttgcaagtgataaccacgctgcggactgcagcaaaagagatggaagaaaaaataagcaatcttaaggaacaccttgcaagcaaggaagtggaagtagcaaagctggagaaacaactcttagaagagaaagctgctatgactgatgcaatggtacctcggtcttcctatgaaaaactccagtcatccttagagagtgaagtgagtgtgttggcatcgaaattaaagga

SEQ ID NO: 14395 - DNA, 1438 bp, Homo sapiens
taaaaactctaattccatgttttcttcccatctgccttatatatctcatcaccctgcttatcaatattcagtttgatgagcactattaactaaaatatgaaacttaaaaacaaaagcaagttgtccttaaaagttctttttttaagtaaattgttgacatactgcaaattttctatgcaaacttgcctcctgctgttatctgtgaagctcaggaaatccaaacatttgtgtttcaacaagggacagtaaactgtgtgtttacagccaaaagaaatgcctcatagttcttaacctcaacttttgtagaagtatttttttctctgtaatatttttattggctcataaagatgttttcatatctgaactcctaaataagtgaaattacagtagattatattaacaaaatactttttaggtagccatgcttgagactttttaaaaatataactttttccttaaagttttcagctatagcaaaaggtagttatgtatgccagacctaatatgagctgccaccaacacccctagaactttcagccatggtgtcttcagaattgtagcgcatttctgaatctagcaaatcctccttttacccgttgaatgttttgaatgccctgactctaccagcgcccataaatgatctctagaaggactgttagtaccaatctgtttttcaactttgaagctaaaaaccctgatatggtaatattatggtgcatagcagaggtctcggaaaaaaaatatttctgttcactttactttcaggttaaaaatgtttctaacacgcttgcaacttcccttatggcattaatcttgttgagggagagagacagaatcctggactctccaaagtatttaactgaaagtagggcctgctctgacagggcccatgtcccacaaggctgcttggcctcagtgggtgcttggctgtgctggatgatatgttgatctgtattggataaggaccaatgacagcaaagcaaaaatggctttaaagcttggtgttacttttcttaagttgtttaattatagttaagcaatttcaaaaatgctccaaagaaatgtgaaaggaccttttgtcacagcacttcagaaaatacacaacagccccttctgcccccgcacagaaatgctgcagagtatataaaacttgagacatttttgtaggatgcctgacgaggtgtagccttttatcttgtttccggatgcatatttattacgagtactctggttaaatattgaaaagttatatgctgtagtttttagtattttgtctttgtaatttacagaagttattggagaaaataaacttgtttcattttgcatttctggtgttgatttttggtgtattcagaagcatatctgcgtggcttctgaagatcagttcaatagcatttcagtgtaataggttttctagtctgtgctatgctcagctggt

SEQ ID NO: 14396 - DNA, 1158 bp, Homo sapiens
tataagtactaatagatttcagaaaatattgatgatttgccatttaccaagtttcacccccaccttgattttatggattatcaattatttcaggcacatttataatgaggttatagccagtataccttttgggaataacgtaaccaaaccaaaatgaaatgtttcctttttattaaagatcatagaagaagatgctgctcttgtagaaataggacctcgttttgtcttaaatctcataaagattttccagggaagttttggaggaccaactttatatgaaaatcctcactaccagtcaccaaacatggtaagcggttgtgtcattcagtagtcttcaatgtaccagaaccctttggccaaaatgattctgtgaagtaattgctgttttattacctgtgaaactgaatttggtttttgctgcatagaaacttggaaattactcccttttttcatgacactggctgaaaggatatatggttcataactgaaagtctttgccttatataaaatgtttatttttatttcaaaagcatctaatcttttttttttttttttagcatcggcgtgtcataagatccatcacagctgcaaaatacagagagaaacagcaagtgaaagatgtgcaaaaactgagaaagaaagagccgaagactcttcttccacatgatcccactgcagatgtttttgtaacaccagctgaggagaaaccaatagaaatacagtgggtaaaaccagagccaaaagttgatttgaaagcaagaaagaaacggatttacaaaaggcaaagaaaaatgaaacagaggatggacagtgggaaaacaaaataagtcaatggaaacctgatttgtttttcagttactttatatttattttgtattcaatgtgtaaatacttttattatctaatactatcttacgtctaattagtgtagcatttacaagaaagaaaaattaagatcttaaaatcagtgattatctttttctaaataaaatatcaccagaattcatcagttaatttctgatttctttttgaagtttgtgttgctaaaaatgtagcacacttaatgtagcctgttctcttgggttggaatttttggtttagcaaagctgaaattcagacatttattaggtcatattatttgtaaaagcattcaacact

SEQ ID NO: 14397 - DNA, 2295 bp, Homo sapiens
ttaccaaatgaatacaagggcttttgaataatctcattgcataagaggccctcatttcacagaaatggtaagaactaaatcaaaagattcaagggttttccctttataaagaatagatcagaaaatttgacaatccagacattcaaaaaaacattctgccagttgatttttttggactactatttgattagatgatcagttctgaaatttaagctgcatgtatgcccaaattaaattagcataggaaagtcaatgtgtgtggttttttaaaagtatattttagcatattaatggagcaatttaatttacattcagttacaaacctcattcttattaataggtttagggaatgttcttgctggtgtgctgattaccatattagagaaaaaataaactctccatattataattcacctgtttagtaaggtgagtttcttacttgtgatttgagtggattatgcctaaaaattacaagtatatttgcactaagcgacaaaatatgtccctgaaaaatcttagcgtacttgaatcatcaaatgtaatggattgtattgaattctaaatgttaagaagtaagtggatttagggttttgtctttcttttcttatgtcctctctcattcctttatacctttcttcctttctgaggcctatgtttatagcatgacttttaatgtgctgaaagattttccttctgttttgtgtacagagttgtttttgatgagtggtacgctcagaaggaactagttctgactacaaatcccactacttgaaatagcaatattgtacctaaagtagtcaaacagattttgctagacaactaagcaacatctgaatacaaatgtaaagtatgctggctcagtgtatcttttaggtcactaaagaggacacatcagtaaataaattgttttcagtgtaatatttttacataaaaatagatttcccccccaaaatttaagatttatttagattcttgagacatctttttatgaaaaggaattaataacatacatcatcaaaacttttcttaggagcgttgaaacaatataagaaggttacagaaggccttctaaaatatgaattcccatctgtatgaggtacttctttccaactcagtgactttttgcccagagacttggaagactgggcaatgttttctttcccctttcccaactcctggagacaaggccctaggagcaatttcctccagtagggcaggccgtagtcctgctctgtcttacttcccactgcagcaggaacatgtcctcgcctctgattccttctgtaccaagccattggtccattgaggtcaattgaggactcactgtaaattttaaatctgttaataaagcaaggatattggcatgttcctcttctcatcaatatcctaaaagacatttattttttacacactccttgggaaaaattaactttttttcactgaaaatatttccttttttggttatcttgatctcagattattttgtgaaagaattttactgtacttagttcaaaagagtagaaagaatgatttactattgcagacatatgtagggtaaaatcataatttatttaaactgactgtacaacaccatttagagttgatattgacataaatgttattagcctactaatttggaactgcatttctcaacaatgctggcaagcatcttccgtacttagcataccaagttgtaggggagagactgtgtatatattttttaaaagcaatccaatggatttgtttttgttcatattttgaaaacaactcgaaggatttttcttattttagaaggtagaaaatatgtggacctgtgttttaaattaatatgtatttataaattataacattgaatgatacaacagagctctaatattgatgttctcactttctgatatttaatttttataaatgtttttgtaagtaactaattgtagtattgcttttaaatagttttaaaatctatctcaaataagttctgcccagacctatttccttaggacagtattctaaagttcagtagtccagtgtgagcttgaaatactcctagatcccgtcagtgatttttatatataccaatacacaagcaaattattaatataccaaaaacctaatttctgcattgcattaataaaatacttgttattttgcctttatccaattcagttgattaggtgaaatagaaaattaatcttttcaaatgtgcatatgatcataatttttcaaaatgttactgtggtcatttttggtgcatgatgccaagtttatctttagttagccattgccacctgatat

SEQ ID NO: 14398 - DNA, 1238 bp, Homo sapiens
tggatagacttactctgaattgaaggtcatatagactacacttaagaacacacacatacagtcttttcatgtgaagtgtggccagaaagcaataagccaggagcagagataatttgatcctctttgtaatttaatgattgactaattgaatacctttggcaaatcatgtagctcttcagtgcctcaagtgcttcattctgcactttcatttgcagaatgaagatgatacttgctatttacctgctgatctaccttacaaagccattgtgaggaagttgaattggtgtttatgtactggagtttataactgtgctatttttcctagtgatacttgaaggtattggatggggaaatgatcatcccagaaatgggtccagtttcttattattacagaaaagtttacaagtacttaaagcaaaaacgcttttggactaattcatcaaaagtcctgtgaaagtagtgttgttttatttagtctttgggtttactttggaataatttcttaagtataatgtttctcatcaggttttgtcatgaaattaagatgctgttgttgaaacagaagcagaaaaggaaaagaaattagccaattacttttataactaacttttataatgccctaagataaattggtaggaacgtgtaaggtaatgttaccactttcctttagtattaaattttttatggttataataattgaagtgtatacgtgcatacacttcacaaccggtatagattcctttatgactttcaagttatatttaaaatatttggttgtttcagtgattcagaatattcaactttaagcagaatttgtcttacagaatgttatatacaatcatataaaaatgttattttgttggataaatttgagttcagaaggcaatgacttgaccctggaagactcagtttattgctggggaaccaagttaatatttgtcaagccaccctgtgtaaaaaactgtaatgggtagaagttttctcttttgagaagcttattgaaatataatgacatctactgcaaaataggactactaaatacatatactttacatgcaaagtacatttcttaaagaattatttctggtaatttttgatgactttattacttgataataagtattagtttaaaattttccaaattattctttaaatagttgttaggtaagaatattcagtaagccagtaattcagaataactattgtagaaaataataataatctattaatttaatgaa

SEQ ID NO: 14399 - DNA, 1201 bp, Homo sapiens
tctgaggtgctacctttgtaatatattgtttgcttatatatactggtgtttaattttactttttgcttttgtgaatgggatttttttccctattatttttccagcctgctattgctgatacatagataagctaaagattgtcattttacacagttttctttttcggatgattctcttgggctttttgggtagaaaattttatgttccaagatgatcattttttctttctaatagtgtgtggttctaattgcattgccctgaacttccagcatgatgttcaatgatagtagtgataacaaatatccttgtcttgttcctcatttaatagtgaccatcatgtttttttgcttttcctagatctctctactttagttagaagatgccccaatcttgtccatctagacttaaggtatttttttatttgtttattttagatcaaaagttgaaaaatcttgatttctcattaaattgggaaaggatcataatgttgaagcaactaaacagtaggttatttctgtcttctttatctaggatcaatgtgtgattttcaatatcttttcttctgccttcttaacagtgatagtgtcatgctaaagaatgactgctttcaggaatttttccagctcaactacctccaacacctatcactcagtcggtgctatgatataatacctgaaactttactgtaagtatgttttgtttttaatgcttaatagaaggcaggaaacaacagagatgccccttggtgtgaaaatccatttttattaatagacatatgaaaccgaaacattagtaataagtataccacagactggctatgaaagaccagcagagtattgcttaaactggtgaaattgagttgatccagattgttcactaaacatttattgtttagctgtaagcagttttaattactagcttgctgtcttagtatctatgagaagacttagcagagaagcagaagataaccttttcctccaggaaacttgaagtgtaattgggaaggcagacccaatgtgggttagtgtctttttttttttttctttccaaatttttcggattaactccagttgattccaaaactttcatctgggcttaaagttctgtatcttctagtgatgtaagtcctggatagtgaagaaattggaaagatataagcctgtagatggtatgtattgtaagtctgatactgtttttgaac

SEQ ID NO: 14400 - DNA, 1120 bp, Homo sapiens
aaggatgaactgattagacattttctattaggagtttggtaaaatattgtaaaaatatcttcacctgtgttaggagtattatcagaaagaatggattctttaataaatatgtaaaacacagtagttttggaattgccttccttagtattgtggttttcacctagcttatattccaagatttacagaatagcttttaggataagatgttaggactttttttttttccccatgagaattcctttatttttggaggaaattattatctaattattgatctacttataagtaatcctagaatttttgccaaaagatcctgtcgttgcataatcaaacagttggtattctcgtgccgttgttcaaagtcatgtgtttctttcatttggtgctgaaaatttctgttcaatcattgacaaatatttattgaacacccactctgtgccatgtaaaactatgtcaggtgctggatatgttgatgaatgaaacagactctatccttatacaatttgagtcttgtgggctcagaagtaaattctgtgaaagctggacggatagtcgaattgagtgctcttagttttgccaatatttaacatgttgttcttatcaattttttaaaataaatgttaatgtacaaagttaatctaggttttgatgtatatccagagaatcaatttttcttaaagtatctgcgtagacattcatagcaaagaatttatgacatatcagatagaaatacattaaaatgtagtgttttcccagagattgatctggctttttttttttgatatacataagataccactttataaagaagctccatactatagaacctcccctaacaggcttaaaataccttctttttttttttttttttttttgagaacggagtcttgctttgtcacccaggctggactgcagtggcatgatctcggctctgcaacctccatctcccaggttcaagcgattctcctgcctcagcctcccaagtagctgggattacaggcaggcaccactatgcctggctaattttttgtatttttagtagatatggggattcaccatgttggtcaggctggtctcgaactcctgaccttgtgatctgcctgcctcggcctcccagtat

SEQ ID NO: 14401 - DNA, 1130 bp, Homo sapiens
caggtgttaggaatgattgtcaattttagtactaagtaagattttaccctttgtcattaatttttgctttgttatcacagcagcaagcagaatttataaagtctttaaactatcataatgtttatacccaaaacacaaaattaatttatatgcagttaaagtcataagctaaatcttaaattcggataaagcacacaaaggatataaagataattataactttgtcagtagggtgtcatctagtggtgaaatgaggtagagtatatcacgtttgaaaacattgaaacacaaatcgtgctcaaagtagtatcagtatttgtacctcattctggatattcttaaaagaattaacacacatcataacacttttccaccagtgaaaatcaaatcataattttaatgtatattttaaacctataaatgtgtttatttccatttcattaacaatactgttttacagaataacgatactgaagaagaagaaaggttatggagagaccttattatggagagagttacaaaatcagcggatgcttgtcttacaactatcaacattatgacatcccctaacatgccaaaagctgtgtacattgaggatgtaattgaaagagttatacagtacactaaatttcatttgcagaatacactttatcctcagtatgatcctgtttacagattagatcctcatggaggttagttcgtataatatcaaaattattgtaaatttttgccatgttagatgagtcaaaataggacttaaaatggcaccaaaatttttgaatcatataacttgtaataaacactgattttgattatggatttgactagaatatagtacttgttcaattataatttctttaggaacatttatatataatagaagttatttctacttgtcagggaaaatctcagaaaatactaccttctggtttcatttatcacttcgccctaattttacccaaaatagcagttgtctacaaaatggattgattcaagataaatactccttttcttgttcttaacctttataaatgagcaatgaaatgtatacatttgaagggagtaaggtcatacctaagtatagttcctgaataatgaacttgacgatctattgtataactgcaaattaa

SEQ ID NO: 14402 - DNA, 1149 bp, Homo sapiens
aattatgatttgaatgatactaaatatctttgattcaagttacacatagcaaggttttaatggggctacaggttctgcaaatgaagcaaaacaattaaaaaacaggtttaattggataaacgaaaggctccaaagtatggactatacacttaacacctgtactgatttttaagttaaactttgaatcattaggaaagatcctttactcatttatatacagattaaagagaggtaaataatagatttgttttcttttgcatgttttcatgctatttttaattaaattttatgtattctaaaatttacaaaaatgtcaatgtttgcttggcagatcctacgagttcttggtgaaaatgcaattgctgttcgaacaaaagccatgaagtgtttgtctgaggttgttgctgtagaccccagtattctagcaagggtaaagagcaaaaatgattctttcttttctactcgaattggaatattcactctatttaggtataaattgtttttttctcttcatttttctttagcttgatatgcaacgaggtgttcatggacgattgatggataattcgactagtgtccgagaagcagcagtagaattactaggtcgatttgtcctttgtcgacctcagcttgctgaacagtattatgatatgctgattgaaagaatattggtatgtttgtcatttttataatgattcgtgaatataattttgcctttcaagcatcatgttttgttttaaagtgttaagttagaaaaataaatgtaccaattatatatttatattgtcaaatttatgaactattgccactttctaaacaagtacatattttcaagaatagcccttgcaatatcataaaacaaatcattggtaataattggattccttttttcagttgctgtttctttttaattataccagtttacaatgagtagatgataggaaccacatggggtagttaaatgtttttgaacaagaatctagagtgattttatgtatatatttatgtatgtatatatataaacaggaagaattatttcagtgagagacacgtacagaacgttggtacctgacaatatttttggatcccttaggtgcatcttcttgtttccttaaagctgattaatgatagctcagatacctacaagtt

SEQ ID NO: 14403 - DNA, 1096 bp, Homo sapiens
ttttataactatcttttattactgtccttagaagaaaattgtttccctttgaatgatatttcagaaggatttttttgaaggagtggttgtaggggagggggtggatattatatataattttatttagttttagaaactatcccctaagattacatatccagttgttgatataaagtcaagaggtttataaaatattagtttaaggaagctttttcaagctgttgaatggagcatacttatatttactagtggcattttgtttttattgtttatcaaacgattttttctttcagtctatggtaaaggacaaaaggaaagagagaaaatcatcacctagtaaggaaaatgagtcaagcgacagtgaagaagaagtttccaggcctcggaagtcacggaaacgtgtagattcagattcagattcagattcagaagacgatataaattcagtgatgaaatgtttgccagaaaattcagctcctttaatcgaatttgcaaatgtgtcccagggtattttattacttctcatgttaaaacaacatttgaagaatctttgtggattttctgataggtaaggttacataagcagtgagagaaaaaacttcactctgttcaaataataaatatttgggctgggtgtggtggctcatgcctgtaatcccaacattttgggaggctgaggcgggcagatcccctgaggtcaggagttcgagaccagcctggccaacatggtgaaacgccatctctattaaaaatacaaaaattagcctagtgtggtggtgcacgcctgtgaccccagctactcaggagactgaggcaggaaaatcgcttaaacctgggaggcggagattgcagtgagctgagattacgccactgcactccagcctgggcaacagagcaagactctgtctaaaaaaataataataaatatgaaacccagttttgtttgcatgcttactttaatgttagaaatgttccttttttaaaaaggagtttattctcttctattgctggatagtattctattgtgtaatatgccataatttatttttattaaagggaaaaaaacatattcctatacttggtgataatgcattac

SEQ ID NO: 14404 - DNA, 1125 bp, Homo sapiens
aaaactgttagtaatgtactttttaattattccttaacaaaatagaataaccaaaccaaatgcttcaaagtaatagcaacaagagagaagaagagtgggaatgaccagagctaacaaaacactctattcctttctctcttttttttttttttggagacagaatctcaccctgtagcccagcctggagtgcagtggtgcgatcccggctcactgcaacctctgcctcacaggtttgaagcaatttgcctgcctcagcctctcgagtagctgggattgcaggtgtgcgccaccatacccagctaatttttgtatttttagtagagatgggtttcaccatgttggccaggctggtcttgaactcctgacctcaagtgatctgcccgcctccacctcccaaagtgttgagattacagacgtgagccaatgtgcctggcctattcccttctctctttatgctaccacaaataattaccttctgtttattgtaagtgatgcatgtctaacaatttgtacaatacattttgaatatatttttccttccattattgtcttttcccaagaccatagggttgccttctctacatttgttctcttagaattcagctcccttttccctataatcttctaatgtagaatatttaatagaatgccagaacgtcactcagtgggtactactacctcttatttttcaacttttcagtttcttaagtttagcgttttttgaatatgtaaagtgaatgtatgcgatacattaattcgttttataaatttaaaattctgtcatgtctacttaaaaggaaggccttgtctgaatgttgtaatttaggtgtgactccagttctgctagagataagaacttcatttttgttttaagcacatttacatactagcaatatgttgttatatatactcagctcacaacattgaaagtacatgttttaaaagggctgtaggcttccatggttagatggtctgttagagtcagaaatctgaacactgtccttttattcacacagcatgctttgagaggttttaggaattccagccccacaacagatgcttgcaataccttttggggggtaagattcctaagagagaagaaattaggtcccctcatttttaccc

SEQ ID NO: 14405 - DNA, 1097 bp, Homo sapiens
ccaggcgtggtggctcacacctgtaatcccagcactttgggaggctgagatgggcggatcatgaggtcaagagatcgagaccatcctggctaacacgtgaaaccccatctctactaaaaatacaaaaaaattagctgggcgtggtggcgggcacctgtagtcccagctacacgggaggctgaggcaggagaatggcgtgaacccaggaggcagaggttgcagtgagccgagatggcgccactgcactgcagcctgagtgacagagcgagactccgtctcaaaaaaaaaaaaaaaatcttcaaatggaacccacctacacccaagttttcttttttactttatttcttatttacttaatcacatggtctttcctctcctgtgagaattaaagttgccagaagttggtggggaagaagtcctgcaggaggaaatgtttgtaaatgtataattaatcatgtgtctttttcgttgtaggagaagatttacaaatctctgcctggatgctgtttgtggttaccttgttgagctccagtctatgagctcgtcagtagcagtacaagccatcactgggaattttaaatctcttcaagctaaattagaacggcttcattaattactgtgatatactttcatccgttttatgatctgtaaaataaaaactcagctgggtccagatatcaggtgttctaaatctaagaatgtaagaacaatcttaatagaaatatgtttttaataagtggctaatatctacaaatagtacctttgctaaatgaattcttttttatgactattttgttttttagtaattgggtgaaaaaacaactgaaatgagattatttattattttaacataaggattaaaaaaatttagaaactcttattttgaattgtactgcaggcagaaatttcgaatttatattattcattttcaagttagtccaaggatattggcattaaaactccactaggcggccaggcacagtgacttacacctgtaatcccagcactttgggaggccaaggtgggcgaatcacgaggccaagagtttgagaccaacctggccaacatggtgaaaccccatctctactaaaaataca

SEQ ID NO: 14406 - DNA, 1235 bp, Homo sapiens
cacctcagcctcctgagtagctggtaccacaagcacatgccaccacacctggctaatttttattttttgtagaaacagggtctcgtgatgtttcccaggctagtctcaaactcttgggcacaagcagtccacctgccttggtccctgaaagtgctggcgttacaggtgtgagccattgcactcagtctcacctgtctctttatgagtgctaatggtctaatggctgtctaacatataattgctgtgaccctttatttttgactgcgtaagacggttttttttaactttcttaagataaaatatttggcattaaacatttaatgtttgaactacaaatttaaaaaaattaaaaaatacccagttgttaataggagaggaaaagtatcctgagaaatgaatactatttccaaagtgtgctcttcattgcagcagaggcaaagagtttctgtttctgtattttcagggatacgagcagcagtgaaagtgaacagagttctgactcttctgatgatgagttaattggccctcctttaccccctaaaatggtaggaaaaccagttaattttatggaggaagatatcctcggtcctttacctccacctcttaatgaagaagaagaagaagcagaggaagaagaagaggaagaggaggaagaggaagtaagtatttcagtggtaatttaagaattcggtggagtaatatctttactgtagagatcagttctgctaaactgtttttcatgagtaagagccaatttaaaaactgaggaaaggccgggcatggtggcttaacacctgtaatcccagttacttggaaggctgaggcaggagaatcgcttgaacctgggaggcagaggttgcaatgagccaagattgtgccactgcactccagcctgtagacagccagactccatctccaaaaaacaaacaaaaaaccaaaccgaggaaaaaggccggtacagtggctcacacccgtaatcccggcactttgggaggccgaggtggacggatcgcttgagctcaggaattgaaaaccagcttgggcaacatggcgaaactctgtttctacaaaaatgcaaaaattagacgggtgttatggtgcgcacctgtggtcccagctactcaggaggctgaggtgggaggataatttgggcccaggagatagaggttgcagtgaggtcgacagatggcactccagcctgggcgacagagtgagaccctgtctcaaaccgcccc

SEQ ID NO: 14407 - DNA, 1301 bp, Homo sapiens
gagtggggaaaatgtctaattgataagaaagttgatttatattatatttacatgcatcttctaagattgcctttacagtagccaatcagaactttaaaaaaaaaaaagctaacaacatagatcctatgtgttgcccttaagactaaaatactttgcacacgtgattgaatggctcacttaagttgttgaatttccttatacatttaaagtgtacttccgttaagaattattccattttaaatgggtaactttcagcttccgaactattttcctaaacattccagttgtgtattataaaagatcaaaatatctctaggtggtagtacaattttcatttataacgtggaaaagttaactgttaggtttaacattagtattagtgtttttgcaattgctcatagaaaagaacactgaataatggttttcatacaatttttgtaaaacattcttctcccagtttgattccaaatgcttttccccaaattgtctaatatatcataagctagtgtttccttgtatttaatttttccttccaacacaatatttaggaaaaatatgaataacattgtgagtagcgggagacaacacgaaaaagaaacctttcattgttgtggaggggtaggtgttatgtgattgatgcccttcctggcgtttgttttatcctgttattttctcaaaaaagagcacggctttttcttaaatacatttaaattcagaattgcttgcaaaagattggcctggatagatagacatcctagatttaagatagtaccatcttaaaagtatgttgaaaggtaaaataaatcatttcaaaatacttaactttcctaataaggatgttaggttttcttctctttcattagctggccataagtcaaggtccttataacactaggaaattacctttttttactttcaaaattgcattatagtgaattactgtttacaaaatacacatactgtgaacagatataagtttctgtcttttataaggtttgtagaatgaatgtttttttaaagtgagtattatatgttaaatattttaagttttttataaatactagtaactgtttactaatttttgtttggtcaaatgcttgtaaatgtagctgaaagaagatagggagaaactgcggatcccaaactgttccctttttcatttcttgaaatgttaccactacagacatttttttaaggtgaataaacagttgtgatgtgctgtacctaaaatcatgtttaatcgtataaggaaacatttcaatacacttatacaggaagaaaactatagatgaagtacatgt

SEQ ID NO: 14408 - DNA, 1190 bp, Homo sapiens
tactattacactctcagaaactgtggtaaaaagtcacattttcaaaacttcatgcatattgtattcttgttggaaataagtcctatagtttcttaattgtcttcatgccgtccatatttaacaaacattgcaagtcctttttatatttgggtaattatttgtaatttagtgaaggagactaggggatgttttcttccaaagggaatttaaaatcaattttatggtattttgaaagtaaaatactccttaacgtgtcaatatttttaaaatgttatctcgaagttttctattgctcaggtatataatctaataaaattttttgtttgctctaaggttatttttgctattctctattttgaattatgttaaaatttgtgtgcattttatgaaatgccttttttcttattttgaaagtgtaaaattgggcatctcagagtaaaatgtgggattattagctacaaagactaggcacatcgtgaaagctcagtaactaattttcttgactgagtcctatcccagagtgtcacagattcaacagaattttcctgaagggtgatacacaccaaaatctagcttgtgtggatctgagactattgactcaaagattcaaatctacttcggaagtgactccacggtttgagtgaaaactgaggaaggactcatgcctgtatatcactagatatcttatttctccataattttaagtgttcataatttcttcttctttgatgggtgtgcaactggggcatgtttgtaccagccagcatgtgttctgcccaacagtgtgtccgtgtgtgaggttaactgattcagaactcattctcttgataaactatttcttgaaagcatttattttaagtctttatttcctgctgaaatgaagtttcatgctgtcatgcccatcttatttattctagaagaaaattttcatagaagaaaatgatttatggccaaagttacagaacattcatcttttagacttagccttagaatatcattggaaattacttggcttgaatttggttcgtttttatctttatggattatgtaccagggctattaataatacttaaaccccttattttgctatggtggttagatttttttattccttttcaattagtgctattaattattacatggtcgtattcatgcttattacagatgaactatttttagtgccagtgtaa

SEQ ID NO: 14409 - DNA, 1233 bp, Homo sapiens
tggaggcctcagtgccaccaggctaggttcgtgccagcaggacatgctaactcactctctgtcacgtttcctgatctgtctctacctacctgtccccaccaccgccaccatatttatgtatatagagaggggttgggggacaggggaacagagacaaaataagcaacaaaatgtgttgggactagtttctggtatttagctttacttttctcaactctttttttctaattttcttcggcagaaaagccctaaacctcatgtacactggaaccagaattctcaaggttgagaaaaatacaagtcaaagtacatgtgtgaacactcatcttcacaaacaaggcctttaaaagctcaggggcccgtgttgacaggactgaactttgccatgtggggccccaggctcaagttctgcctgtgctttatgatggtctaagattgaagtcagcatatgtgtaaagaaatagaaccagatatttttctttccattcaacagtcttacagatttattctgcatgattacttttctttagcagaagggtttattgactttttaagtcctttaaaataattagtataggaaacaaactggtcacccttgggcaggaaggatactgcccatgagcatattttgtctggcctttagaatgtgtaaaacatatgcattattttctcacatttacaaactttggtgtttcatttaaaatgccagatttctacctcatctggaaaaatcagcatatttggcaaaatgaggctggtggctgccacttttatgctaggcagaggggctgcagtttgcacctgctgtgaacacgtttgttacttgctttgcccctgcatatttgcatttgcaccctgttgctgcatcctaattttgaaagttagctcctgaaatcgtataaaaatttgtgctcctctaaggaataaggcattgacaggggaaaaaagtgaattctgacaatgtttctatcaggagtgagcagagaaaagcttcacaagcatcactttttttctgaaagtacttcggaaggctctgttcatgtattgttctggcccacagtaagtccatttgaaagttttgcttggtggggaagtctgatgtgttataagcacaatattgtattgcccaaatagacttgcccagaattctctgtgtaaatgtatcacaccagaaagtcttctttattatcctgcttaagttaagcaggcttcagtgacactgccgttgatcct

SEQ ID NO: 14410 - DNA, 1151 bp, Homo sapiens
cactgaaatctgtgagaatctttctaggagcattcttttcttcttttagttccaagttccagggtatttttcattcctagtaggtttatatgactcacagaatgtggacttttttcctgtttggagtatttttgtaatgtaagtatcggatagctgcaccacagcatgcataaattgcacattttgttttactttctttatagaatatttaatttcaaaaatataatttatgccaaaaaaagcatacctttcaattttgctacttggttgatttagcacaaaatgcaaagtcttggggcagagagggggagtgaaaaaaattttataggtaattgttacaaaaatacctgtcagaaaccctaaagctgcattgtaaaacaaatggtgtaaactagttttgaaaagtggtaaggaattgtgaaaaaaatctcagacttaatgctctctaaccacatgagtttcttcttttttatttagtaatacgctgctacatatttggaggttctggtgtttgtaggtcactgaacagacattgaaatctgatttatattgtataactgtaacatagaaagaaaaagtatttatattttttctgtaagaatatttcattgagttgtgtataatttaaataagatttgtccccaaatggttttgctcaccttgattttttttgttgtgattttcttgtttttgtataatgtgtatagtttatgtcaagggcattaaaagcctcctgaagcataatcttatcaaagggatacattgttaataaaatgtacttaaaattcttaaactttgtcattgttttatttgaaatcttaaaataatcagtggtcatatggccttgatttgagtcctgtaatgccgatgctgacacacgtgactccaagcaaaagtgacttttaggtaccacagacatgtagagtggctgttacaaatattttaaagtaatactcttcttaaacacttcataattaaacatctttgtagttttttaaatatctaaagggatttggaaaatgggtcagtctttagatagaatagctctgaatttttttaggaaataatgtacaatatgagtgatgatgatatgacagtggtgacttctctgtggaaggtatttgatttctcacacataaactgccctgata

SEQ ID NO: 14411 - DNA, 1092 bp, Homo sapiens
attttttccctagatgcatgaagaagcagaggctgtgttggcaacaccaccaaagcaacctatagttgatacatctgctgaatcctgacctcatatttatgatggatatagatacatactatatatattcatatttgtggatttcctaaaagcctcagaaaatacgactgactaggcagcaaagacaggagtatcttctgtacactgttccgcagttactggtacatgaacagttggaactgctgactttcctaaccaaaacaacttccttctctcctttgttgagccttttgaggggttcatgattcattaccacagttttaagagtttcagttaccattgtatgcaagagccaagcactgaatacctacataggttttctattttctttcattttaaaagcataatgacagtggaacaataatgggatatgcagaagcacccttcacaagttatttctgaatgatttttagggtaaataatacagatgccttgtttgttaactaacttgtggaaagcaggaatcagtgtctctaaggctgcatcctattaccacaatggggtgtgctataactgctggtattagagagggaactttggccctttcacgtttttcttaatgtttgtaacactacttcagaggtttataacctcaaagcagaagaagagcctcaacaacccgggacttataagttatttttatgttactagacttgcataaagattcttgttttccaactcttcattttgttgcaatgtgttattacaggatatatgaaccaattaaggtttttcactacagttcttgaataaaatttaaaaatcattttttattttaattaaaaatatttcccatttatagaatgcatatatttgcaatggacttccactttcatcaactttccatctcatcgctttaaacaggaacttgaacaagcactgttagtttagacctaaaggataggaaagcattaaataatactttggatctcctgaggaaaagataagtttgcttgcaatttacacattccatggggaaagaagagccatatttccttaaaaaaaacattaataaagcttgttattgagaaa

SEQ ID NO: 14412 - DNA, 2698 bp, Homo sapiens
cccttcacatctatccaatgaaccctgaaatatggaaagaagacctctcttgggcaagaacgctccaggagcagcagaaggtagcacagaggattaaaaaaagtgaagcaccagctgaagtaacacacttttcaccaaagtcaattccagactatgactttgaaagtgatgagattgttgctgtttgtgcagctattgctgagaaagagaagacagtttcagcaaataaaacaatggttattgtgtctgcttctggggccatagagactgtaactgaaaaggaggatggtgctacaccaccagatggctctgtttttatcaaagcccgatgaagcagtatgcataggattatttgaatctgtctttttgattgcctcttgaagttttgacatagagacatttactctggagatagataggagaacgcctggttgtaaaatatgtttttcagatgaggcatataaaaactaaaatggcaggattattgtatagtgtttggaatatgctttgataagttatgatttatatttctcaaggttaaaattctgagtaaaatggtctttgattaataaacttagtttaatctgaatatgtaaatgaatacattttaaagacaaaacttgaaaaatgtattcttgaatagtgaataatttgatcaatgttactgaaatgctgtctcaacttttgttttatgataaaggaagtgtgtgatttccctccctctgagaaatatactgcgcttaatatttgctgtctttttcttgcttcattagagtaagtctgtcagaaagcttgaatatttttgacattcattttgattcaaagttgtcatttggttatatgtggaatctttgaaagtttggctgaaaatgcacacaaatgtgtacattctgaacattttctgaagtttctcttaattctgatttgtgtttctgttttgactttgaagttgtaacaatgatagttgtctccttcagtatttggtaaaagtgtaaagtattgataaatatgagaatgatggttttattttttaattgttacagtaagtaatccttaccacaaatgagtcatttttaaaatatgcatttttaaatgaatggcttttacagataggttaatgacaattgtactgctatattatcccagtcaaaaccaatactttcttttctttattttacaaagctttaaaaaccctggaaacaacttacttcttgcttgtgtctttccatttgatgactgggaattacttttctagataactttttttgaaactactcagtgaaatgaaaaataattacaattttaaatagctaattatatctttctaaaaataaaaaagtagggctgttattagagtgccaatgaataaataacttaagcacaaaatacatagaaattggaatgtgatttatagtacaatctcatgagtatgaaaaggctatattaaaaaaaattttattgaaagtccacagtcatattcacaaaccaatactgtcattgctaatctgaactattatttttatactatatattgtagtacaataatatagaactgttgggttctgttacttctgacactcaggaagatactattggtgtattaattttatctttgttagagatgaaagtagcccactttatgttaaagatcttactactgttggagcttataagtaatgatctacattttttatgaagatggtttttaaaacttttgttttattggaatgcatatctcttttcagggttggagaaattagcacttgccttgaaaagaatattctttccttaagttatatcatcagaaaattagctctggttagagaggttagtttcagagtgctccaaaaaatatgttaattattttattttgtttaataaagaacattctcaaaacgtaaataggtatctagagaagtgagtactcaacatttggtatattgttttgagtaatggatgtttgttttttgtgtaatttgtgaataaatagtttttttctgcattttgaagattttcctattattttatgttgttagcttttgaaaaattagattgatctacttagtgtctttcttatatgaacttaatatatttaaagtaccttgcatggtgcctcacacatgaagtaatgccagctatttcagtaaatgctagctatttctatgaagaacttgagttagtttggagatatttaacctcaatttcctctgattttaaaaaaggagaactttttttgtaatcctttccttatctgaaagtaagaagtctctgattccagtattataggagagatagtgggatttttcttgacagggtctatagctcaagtcccaaagaggcaagactcaggatggaatgcatgtggccactaggccctgttataagaacctagtgtttcctctgtactggcatggtaggccaagttagtctctttcttacccagatataagacataaaatagtttagacataagacagaggagaaaaagaaacagtaagttatggagaaggaaggcagctcatttctgcaggcccctcaaaatgcttattttagctcatactcttctatgcgtgaagagaaaaatgcacccattattttacaaggatgtgaatactgatatacaaacatagactaagcttgttaattttaataacaaatctttatgaatctgaagagaattgatgttcatgataatgat

SEQ ID NO: 14413 - DNA, 2385 bp, Homo sapiens
tgtcactttgtcacccaggctggagtgcaatggtgtggtctcggctcactgcaacctccacctcccgggttcaagtgattctcccgcctcagcttcctgagtagctggaactacaggcgtgtgccaccacacccggctaatttttcgtatttttagtgtagacggggtttcactatgttgcccaggctggtctcgaactcctgaccgcgtgatccaccacctcagcttcccaaagtggtgggattacaggcgtgagccaccgcacccggcctccatatcccccttttaaaattctgtagtgtatggtaagtcatatcagatatcagacctaatttaaatttcattttagctttacaagtccaaaaacacagaatttatatattcagatactctagcactaattttagtcttaaaatattcccacgatattctgtacacaaaatgttctttttgttacaagagctgagttgcatatactgtagataaatcatattatttttgccaatttcacaaattcctctggcccatcatgtcagtcattattgagtatatgcacacattgctacttatttgattatgtatcttttaaattgattcagtgcatagaaaactatctcttacaaactttaagtgctctgatatgacttcccccccaaattttattatgaacatttttaaaaacagaaaaattgaaaaactgtttggtaagcacatgtatatctaccatttagattcagcagttgttaatgttttgtcatttgttttctctatacctatatatgtatagatacagctagttatgcatatatatgcatatatgtgtttgtttgtgtatgtatatatgcttttttccccctgaaccatttggatgttacagacatacttatcaccgtgaaaatacttcaagtatctcctacagataatgacattctcctaaaaatccgtaataccattgtaaaagtaataattccccaatatcatctaatcaagccatatttaaatttctgaagttaactccaaatttctttatagctgattatttcaaactaggatccaattaaagtttacatatgacacttggttataactctttagttggatataacattattattattttgataaaatatggaacaaatcaattctattaataagtggtcacatttgttttgggcttaaattactttttaaagatactggattttcctaagatttctgatttacactgatatttttttttgtcattcttaattgcatcacacaatagatgtaaatgaagatgtagtcacctcagataaaattggtatcgtgtatgataatattgtatcatttatatttgccttatgttaactttaagaaattgatttttttgtattaatcattttcccattgcaacagagctatattttttctattttaagaatcatattttaggattatttttggcaaatacagtgagcacttatgtaaccagatgataatgaactcaaatgtcatgatagcttgcataaatggtgactctagtagatttgactcaagcacttctagaatcatgcactgaattcaaaagaaaaatcttgctgctttttgtccagggcttgttctattcaacttctaatttgaaagctgtacaaagtaatagaagttccatttaaatatgagttcaaaactgtatttactttttatgtggccctctctttaggggattctaattttacttagggtctctaagtgcagcataatgttcctgatgttaacagaagactgtatttttaaagttacaaatttgtatatggaattaagtaatggcgctatatacgctgttgtggggaggggggaagaaaaggaggaaccaattaaataggaccttttaaaaattgttaattttgtaaactttgcttctcttataagttattgtgattcattttagttactgtgttttattttgaaaatatttaaatattgcacttctataaatagtatgataaatgcacagacaattgcagtaaattcttttttaagctaggatatttgaaatgacaacctttggttaagtgtgtcaaggttgcaacagaattttcacaatttttttgttgtttgcaaattgttactaatattgaagaggtaagggaggcaatgcaaatgatttttaatctttttttattatcttttcagcagtttatattttttgtgactttatgcaaccatatttttactttgtcttgacaactgaaagatgtataaggttttttgccagaaatgtactgtatacatagttttaagtataacagattttactgatatgtaaaaattttgccattaaaataaatgatttctcactgagaggaacttttctaccaggttggggcatatgggagcttaata

SEQ ID NO: 14414 - DNA, 1048 bp, Homo sapiens
agtgtccagttttaaagatagcaagacagttcagggctttgtagacacccataggtgtgttcatgtgctgaagcaactttctttgcatttagggtcataacgtttttgtgggcttaatgttgagtggtctgttagtacaatataggagttaagagcttgaactgaagccaggcttttaaaagtaggatagttgacctttcttagagtagatacttcttagagtagatacagatgttaaataagttaaaatgcaaagctcttggtttagaaaatgtctgccattaaacatgctaattgttttttccttgcttagtgaaagtagttgggatctattctcagtatagggaaccattttcacaaataatctgtgatctcttgccaaatatgaacaaacatactggcccaatgactagtatagccaaataagtttttgagcctttattgcagttgcagttaactatatccgaaaatgggtatctttaagcaaagtgaagaatttcagcttatcagtgatgttgtaaaaataaatgtctgaacatatgaatgcagtattgatttcagcatttaactgagataagcgcattgaaatctgtttaacaaaaattaaaatgtatgcatcgatgttgctgaagtaacttgttcttgtttttgacatcctgcaggcatggattccgtgaaggaacaacacctaaacccaagagggcagctgttgcagcatccagttcatcttaagaatgtcaacgattagtcatgcaataaatgttctggttttaaaaaatacatatctggttttggtaaggtatttttaatcaattaggcttgtagtatcagtgaaatactgtaggtttagggactgggctagcttcatatcagatttacttgttaagtgactgttttggaatgtttacttttggactgggtttgtaacacggttaaaggcaatgagaaacaagcagaattccaggagtccttgaagcagagggcactggaagacaatatagcagattaaaatagcacagctcatgtggcataggtgggtattttagat

SEQ ID NO: 14415 - DNA, 1048 bp, Homo sapiens; identical to SEQ ID NO: 14414

SEQ ID NO: 14416 - DNA, 1633 bp, Homo sapiens
agggccagccccgcattccaggttctccatgtgcctagaagacagtaatcgacggtatagcaacagatctgactgctaacgtgcgaaaccgatcagtagtagcagtagcaccagcaacagcagcacgaaaagcaaaactgtaatctaaacggccctcagggtctaagcaggcccgacgaagactcgcccatccggtcgccagaaaactgggagtcccgcccgcctttccggcactgaaacgcgatcggccctgcctggtaccgcatcctcctcttgaccccacctacactacgacgacggacgctcgagaacgctgcaccgcgccccgcaggaagtgcttccctgggcggaagcttctgagcgtgatatagcggaagtgccttctcttccggtctttctggtctcggccgcagaagcgagatggtgagttgtgactgtggtgtttgtgaatcgcgttccatcctcgtcctttgtgcctctctgtttgctgtgcttggggggctggcaagattccggataaggggaactggtgggctggaaagaggcatgcggtggccctcaagagccagaagaatgactgctaactggtgcctgggggacctatcccgccgtaattgtggtgctagagccgcattgtgtcctttgcctcggtccaacctttggagacctttcacggctctagccttggttgggagccgagggaaggagtttgggaatgtttggctctgtgtaacaatgaaataattcattggtgatgctctctggccggagtctgtaaagataaggtgcatttcagaacattgcaactcttgcggagggttttaggtaacgtgaaatgcgggtagtggtctctgacttggcattcgtggaaagaggcttctcccgcagtttcgatctttacgattgcctttaaattttatcagtaattggtttcccggagaactcgagtaaatctagaagttgccaggtttcagaactatttattcctttaatgtgcagacgaagggaacgtcatcgtttggaaagcgtcgcaataagacgcacacgttgtgccgccgctgtggctctaaggcctaccaccttcagaagtcgacctgtggcaaatgtggctaccctgccaagcgcaagagaaagtgtaagtaacatttttcaggccaactgtgttagcttttgtttgtattgcacttaagtgggggcataggtttgaactttatttggtgcctatcttaaaactcgtacatctgtatgccgatgaggtggcataaaactcgtgtgttaacaacacctacaaggtgtgtgggagaacaccgtttgaaatcttttctgaacttatgttttagataactggagtgccaaggctaaaagacgaaataccaccggaactggtcgaatgaggcacctaaaaattgtataccgcagattcaggtacagtttgtatgttcgatcataattggtccagtgggcttgaatgaaaccctcgtgtttacttgtaaaaagataacagtaccctgatggttactggggatgagatgttggaagctttttatttattgttgtttttgaggcagggtttcactatgttgcccaggcttgagtgtagtggcacgatcacggctcagtgcagcctcagtct

SEQ ID NO: 14417 - DNA, 2004 bp, Homo sapiens
tcaataatcataattgtgtatttaacaggtggttttttattagttttcttgtgtttcagactttatgcagccatataaactgttctctaggcatgctgtgacattttaataaaaagcaaaaggagcatttataattatctcatttgttaaggctgagaaggttgtttttataataggtaattatattgaatgcattttcactgaatatggtatgtatgctaaattatatgaacctttccccaagaagggccctagaaattgatgtggctttcctcttaaatattaattattagtcctgaaagaaagataacatatgtgatttttgtggttaggagagttgctgtcatgattgttttttcttcagcctcctctgacttttcttttggggcttcagattttatgattacatcttgtccccctagaacatcccccttcctcccatactgcttttaaacagatgcccaagaaggcaagcaggaatgcctcttgtgggggagggcagggagaaataactagttcaaaccaactatctatctatgctttgcaaagactaaggcgtattataggaagagggctagaaacctaactgattcttctcagttttctcattttaaaacagcccagtattcctttgtatcctcaagggtccttgagaatacttctgttattgagaccctgtgggctacttgtactgtacctcctctcaagccaagaagggctgtgggataatttaccatgaatccttagtagcaatgacagcagagttaaaaaataaaaggtgttttactttcaggctcttgttttggttcagaggagattttaaatattgaatgacacttctacagaacaacggtttttcttctgccaaggctacttcctttaacgaagtgcctttaattcagccttatccaactagggaaaataatgttggacaagtctaggatttgaagagtcagtgaacttttagtgtcagggaataaacatggtgggtagattaggtttgaaaaaaacttccttagaggtatttattctcaatacctgacaggggcccatgggaatgacttcagaagcatcccggataatagatgggtaaaaagtctaggcaccctgaagaacaggtgagacagctggcctctggacagaggtaggcatagtacagtacgatatatcattcctctggtcctaaatatacaaacttattcatgtttttaggtgatgatggtcattgaaactcacttcttttcaggtgtagctacaattgtgtaatgtacaatattagagaaaggacaggctttttatgagtaacacacaccatatataaaacagcctttctggctgaccacatggttaaatgcataccttcccagtactggggggaaaaaatgacccttcttagaatgtgcaagttccatgagagtaatatattgatatgattttgaaaagaattgttgatagttacatcttcaaacttatcattccagtatgcatctttaagataatgtgattctaagtagatgactttatattcttgattgaagagtgctatacatgttaagaaatgcattaaggaatacaataaatattctaaagtgatgtagatcagtgtgactgtcctttatttcacttgggaatggcattgctaaatgtgggaataatgcaacagattgtcagggtagctaacaataaagtcagcacacatcaccacttcttttttttttccttttttttaaattatactttaagttctagggtacatgtgcacaatgtgcaagtttgttacatatgtatacatgtgccatgttggtgtgccaacatgctaatggtgtgccattaactcgtcatttacattaggtatatcttctaatgctatccctccccccttcccccaccccatgacaggccccggtgtgtgatgttccccttcctgtgtccaagggttctcattgttcagttcccacctatgagtgagaacgtgcggtgtttggttgtttgtccttgcaatag

SEQ ID NO: 14418 - DNA, 2240 bp, Homo sapiens
tgatcaattgcaagtacttccacttcttccctaaatgcgctttgtgtgttttccacctcagtagccttgcacacatcattacttctgcatccttctttgtgaccaagtgaatacctacctacctcttaggactcagcttcagtgattctgttttcataggctttttaaagcccttttcagtcaaattagatgctcctttgttctggtcctttactcttcccctcccatgttgtcgcactgatcacactgctttgtaattattttctttattgttggtaaactccatattttaaaaatttacctgtatacatagtgcttaatgcatggtaggcccttagtaatgtttttgaattaatgaggcatgattctaaatgccaaactttgcacaaaaagttgttgctattggattccaaactgctatgccctctataccagtggctgacaaggcatatagggatatatgccatcctgagaggagtaaagtgtttagattctgaacctgagaaaagagaactttctcttaagaagttggaaacttcattttaccttcgtgaccctggtagaccacttggtctcactggttggtacaattatgagggtagtactgggtgctttttatacaactttccatcccccacacagttggagaataatttgtagaccatggcagttaaaatgctttttactctggtgtattatagaataatgaacacatttttatatatgttaaagcctgctaaatcattcacttagaatgaagtaacctcaaggtaccaaataccccacataaggaaagtactacactaaattcactcaactattgtatgcctaccatatgccagattttatcctagaccctgaggatatagctttttaaaaccccctcctgtttcagagcttatattctagtggaggaagttagacaagcattttaagtaataaatgtatagagagtgtcaagtgatgagtaccatgaagaagaataaatgagggtaaggggctagtgtgatagggagaggggtgggatgccatcatatttaggggtggttgggaactgtctactgctttagcatttgtgtcttcaaatttctctcctttggttatataccttgcgtattccgcacattgataaagtttctttcttacagaagttctgatattgaattaaggaatgggtcactacttaagactttatcatttcagctacacataaaaggtttctctcccctatggattttgctaatggttgagtgatacctaaaggccttgttgcattttttacacttggggtttctcttcggtttgaattctctcatggttaccaaaactctgttaaaggacttttcacagtcgttaaatgtgtatggctctttcccaatatgaatttttttgatgttaactaggcttttagacttagttaaagacctgtgtgctctgctgcatttatagggttttgggctgctgagaataattgatgctgattaaggtgcaaatcatgactaaagacttttctttcttcttttgcatatagtagagtgaggtgagggtcgtggctaaaaccccacaataactttacattcctagctttacagtcttgctgtgaattctctggtgttcattaaagtgtgagctgtgttaaaaggcattcttagattcattttaaccacatttttaaaaactcacagttggttaacatgatggtttcagattgcttgcctcttttctctttctaccttacagggctccttttctagcttaaataagggtactccatctgccacagaatccaggattctatagttttttagtttcacttccctatgttctttttttttttttaatttttaacaatgagatgataccatgttacagcggtattacattaagatacatttaatatagccacaattaaagtatgtattatgtatttatgctggtgttctttcatgttatttcttctagtgaaaatttccaagtaaactgttattgagcatatacatttttaaaaaaataaaaccatacacccctacttgttgcttgttttatatttggctgttgcatcagaattaaaacttttatcatctcagtttactattttaacttctgaatgttatttcttctggtcctaataacttttaaagatggggtaatatagtggttaggattctgagctctggagccagaaggcctgagtttaatcatagccctgccatttataatactaactgtgtgactctctt

SEQ ID NO: 14419 - DNA, 1188 bp, Homo sapiens
gtctagacacaatttcatttccagcatttttataaactaccaaattagtgaaccaaaaatagaaattagatttgtgcaaacatggagaaatctactgaattggcttccagattttaaattttatgtcatagaaatattgactcaaaccatattttttatgatggagcaactgaaaggtgattgcagcttttggttaatatgtctttttttttctttttccagtgttctatttgctttaatgagaatagaaacgtaaactatgacctaggggtttctgttggataattagcagtttagaatggaggaagaacaacaaagacatgctttccatttttttctttacttatctctcaaaacaatattactttgtcttttcaatcttctacttttaactaataaaataagtggattttgtattttaagatccagaaatacttaacacgtgaatattttgctaaaaaagcatatataactattttaaatatccatttatcttttgtatatctaagactcatcctgatttttactatcacacatgaataaagcctttgtatctttctttctctaatgttgtatcatactcttctaaaacttgagtggctgtcttaaaagatataaggggaaagataatattgtctgtctctatattgcttagtaagtatttccatagtcaatgatggtttaataggtaaaccaaaccctataaacctgacctcctttatggttaatactattaagcaagaatgcagtacagaattggatacagtacggatttgtccaaataaattcaataaaaaccttaaagctgacttcgtttgttatgtaggctgtatgcatatattgaaaacagaagtgaaactttcgattgcttttaaataaataccaactaatgaatttactgctaagctcaaaaccgtctacgcttaaggtgagaatctttgccaacagaaaggcgttgctctaaatcgcgaatggtattacgaagaattgcaatctccttgtttttttcttcttgaaaatgctgaagtttctaaacgaaacaaaaaatttgttattagaattcagaaataaaatttagtacaaggaacaacaaaataacaaagaaatgcacttctgctattggtattttaaaaaataccttatattgttaataagaattagatgatttttatagaaacatgcttagaa

SEQ ID NO: 14420 - DNA, 1262 bp, Homo sapiens
aatggatagtcttgctttttgctattatacaaattaggtagcaagtcaaaccgccactgtttgagttgcaaatacaagacgtaacaagtaaaatactgttacgtggtgggtctctgtggcaggcttcctctcccccccatatggataattgtatactaaattcaccataaggtgaaaaatggatattgagttcccttcatgaaaagttatataaaatatatatttagcataaacttctccagagttgtcctttattaagtttctttacagaaactttaattggtgccatgattcttgtgggggaaagaatcataagagccatcaacttttttcctttcattttagcatattccaagccctgccaagaaagtaccaagactccctgccacagcagcagaacctgaagcagctgtcattagtaatggggaacattaagatactctgtgaggtgcaagacttcagggtggggtgggcatggggtgggggtatgggaacagttggaggaatgggatatctggggataattttaaaggattacatgttatgtaaatttttatgtgactgacatggagcctggatgactatcgtgtacttgggaaagtctctttgctctatttgctgacatgcttcctgttgtggtctggccaatgccaaatgtactcgaatgatgttaagggctctgtaaaacttcatacctctttggccatttgtatgcatgatgtttggtttttaaacatggtataatgaattgtgtacttctgtcagaagaaagcagaggtactaatctccaattaaaaaattttttaacatgtaagaattttgtactttgaacaacaagattacagaaagtacctgtggtttttggaaaacatttctagcttggggaatgtgacaacattccccagtgtggtaaaattggggtaaaatgtggtaaaatgtgatacgcacaaaccctttgaaaatagcaaaacaaacatgccctttttctaaaattgataaatcctaaagaggaagaaaagagctgggacaataaaacactggctctggaatctggaatgttaagtccaggccagcagtgacaaaagttattgtaatgacctctgaacagagaaacactgccattgaagaggcttctggtatagaaaacatggtacattcaggagctgtgaatatagctctaggtgtgctcctgaatcagttcatggtagattatgctgaacaacagtgagatgttattggaggtgtggatgagggagtttgtt

SEQ ID NO: 14421 - DNA, 1126 bp, Homo sapiens
agaaaataattaaaagtgtgtgaatctcctcaggagagaccatgtggttaaatatttacttatatcctgacatatcctcagaagattacagatgatatcacctacagctgattacatacattaaagggggtaaggttaaaaaaagacaaggtgggccaggtgcggtggctcacgcctgtaatcccagcactttgggaggccaaaacgggtggatcacgaggtgtggagttccagaccattctggccaacatggtgaaaacctgtctctactaaaaatacaaaaaatgagccaggcgtggtggcacgcacctgtagtcccagctactcaggaggctgaggcaggagaatcacttgaacccgggaggcagaggttgcagtgagcccagattgcgccactctactccagcctggcaacagagcaagactctgtctcaaaaaaaaaaaaaaaaaaaaaaaaaaaaaaaaaaaaaaaaagacaaggtggggcataaaagtgacatcagtgttatgttaagaagggatgaaatgtggactaaggtcaggtcttgaagaatccttgatttaagggaatggtgaagaagaatgattaaactaaaaacaggtagaagtgaagaagaaaactgtggcagcccaatgttaggggagaaaagtaggggaaaagagagtttggtgcaagggaatgtagacaatgctgttacacgttgatgaggtttagtaggatgaagactaaagtcattgggtataagaagacattggcgaccattgcgaaacaatgtcagtaaagagatagaggtgaaagctggattgcagtgaattgaagactgataggagagaaggttggtagtgagtgaatactacacttgagctgtttataggtaggaaatagggataaagtgaaagtgttttctatagaacgttatttttttctggcaggtaaaacttgatcatcttggtagtagaaggggataatgtggaaggggatggggttagtgttggaaaggaataaaaacatttcataagattgcttgagtgcctgcaaggcagcatccacagtgctggtcactgtcatatttgttttctcttttaatacacacaacaatcctgttactactcccattttacaaat

SEQ ID NO: 14422 - DNA, 1147 bp, Homo sapiens
ggcgcccgccaccacgcccggctcatttttcgtatttttagtagagacggggtttcaccgtgttagccaggatggtctcgatctcctgacctcgtgatctgcctgcctcagcctcccaaagtgctgggattacaggcgtgagccaccgcgcccggccaagtgggacatacttttgaaggatgtgcaacgttcaatgataagtgtgacaaaaactgacaaccaggaagcttgtgtactcagtgagagtagcatgtttgtctccaagaaacgtttcattttgaagacacgtggtaccactctcttactgaaagcgctggttcccctgttgaagcttgctaggcattacagtgggtttgactcaattcaaagcttcttttattcttgtgagaatttcatgaagccttccccctaagggtacctacactagaatttccaggaagaaatagagtttcttaatgcaattttcccaaatggagcagcatattgtatgggaagtatgaattctgactgttggtacttacgtactctggatttcccagaaaggtaatcagtcagccagatcaaaccctggaaaatttgatgagtgggcttgacccagcagttatggaccagttctacatgaaagatggcgttactgcaaaggatgtcatttgtgagagtggaattcacaacctgataccaggttctgtcattaatgccacaatgttcaatccttatgggtattcgatgaatggaatgaaatcagatggaacttattggactattcacatcactccagaaccagaatctttttatgttagctttgaaacaaacttaagccacctcctatgatgacctgatcaggaaagctatggaaggcttcaagccaggaaaatttgtgatcactttgttaatcagagttctaaatgtcgcgccgtgttttcttcacctcagaagattgaaggttttaagcgtcttgattgccagagtgctatgttcaatgattacaattttgtttttaccagttttgctaagaagcagcaataacagcagagttgattaagaaaaatgaagaaaaaaatgcaaaaagagaacacacgtaagaaggtggtggatgctttctagatgtcgatgctggggtcagtgctttccataaccaccacagtgt

SEQ ID NO: 14423 - DNA, 1376 bp, Homo sapiens
gctgcagtggacaatccaatcttctacaaacctaacacggccatgcttctaggtgatgccaagaaaacatgtgacgcgctccaggcgaaagttagagaatcctatcagaagtaaatattaaggatcaagctgttagctaataatgccacctctgcagttttgggaacaggcaaataaagtatcagtatacatggtgatgtacatctgtagcaaagctcttggagaaaatgaagactgaagaaagcaaagcaaaaactgtatagagagatttttcaaaagcagtaatccctcaattttaaaaaaggattgaaaattctaaatgtctttctgtgcatattttttgtgttaggaatcaaaagtattttataaaaggagaaagaacagcctcattttagatgtagtcctgttggattttttatgcctcctcagtaaccagaaatgttttaaaaaactaagtgtttaggatttcaagacaacattatacatggctctgaaatatctgacacaatgtaaacattgcaggcacctgcattttatgttttttttttcaacaaatgtgactaatttgaaacttttatgaacttctgagctgtccccttgcaattcaaccgcagtttgaattaatcatatcaaatcagttttaattttttaaattgtacttcagagtctatatttcaagggcacattttctcactactattttaatacattaaaggactaaataatctttcagagatgctggaaacaaatcatttgctttatatgtttcattagaataccaatgaaacatacaacttgaaaattagtaatagtatttttgaagatcccatttctaattggagatctctttaatttcgatcaacttataatgtgtagtactatattaagtgcacttgagtggaattcaacatttgactaataaaatgagttcatcatgttggcaagtgatgtggcaattatctctggtgacaaaagagtaaaatcaaatatttctgcctgttacaaatatcaaggaagacctgctactatgaaatagatgacattaatctgtcttcactgtttataatacggatggattttttttcaaatcagtgtgtgttttgaggtcttatgtaattgatgacatttgagagaaatggtggctttttttagctacctctttgttcatttaagcaccagtaaagatcatgtctttttatagaagtgtagattttctttgtgactttgctatcgtgcctaaagctctaaatataggtgaatgtgtgatgaatactcagattatttgtctctctatataattagtttggtactaagtttctcaaaaaattattaacacatgaaagacaatctctaaaccagaaaaagaagtagtacaa

SEQ ID NO: 14424 - DNA, 1131 bp, Homo sapiens
tgacctctgggtccggaatcgcgggcaaagatggcggcggccaggtgttggaggcctttgctacgcggtccgaggctttcattgcacaccgcggctaatgccgccgccacggctacagaaacgacctgccaagacgtcgcggcgacccccgtcgcgcggtacccgccgattgtggcctccatgacagccgacagcaaagctgcacggctgcggcggatcgagcgctggcaggcgacggtgcacgctgcggagtcggtagacgagaagctgcgaatcctcaccaagatgcagtttatgaagtacatggtttacccgcagaccttcgcgctgaatgccgaccgctggtaccagtacttcaccaagaccgtgttcctgtcgggtctgccgccgcccccagcggagcccgagcccgagcccgaacccgaacctgaacctgcgctggacctcgcggcgctgcgtgcggtcgcctgcgactgcctgctgcaggagcacttctacctgcggcgcaggcggcgcgtgcaccgttacgaggagagcgaggtcatatctttgcccttcctggatcagctggtgtcaaccctcgtgggcctcctcagcccacacaacccggccctggccgctgccgccctcggtgagccttggattccgccccagggcggaagggagagatggggattgtactgggttactctgccgcagatttacccctcgtcatttctttctctctgcttcgttcatgttttcctagtcctttcgttcctatctggggtggcctggttttgtaacagtcactgcgttaggaatctagagactaggtgtgtgtggctgcgctaacacctaccagctcttcaactctgaaagcctgagctctccaggattccagtcctggattctactttgtgagtgttcagccaaatggaagagcagtggtgatgaagagaaacgccacttaagagagtggggcgggccaggtttcctgttggctgttccaccacaaagctgtgtgaccatgtgtcacatggctgagtagtaacttctttttaccttaattttaaatttagtatgtcttttctttttctttagtaacttttttgcttaatttttcgcgttttacggtagtagttctttgtt

SEQ ID NO: 14425 - DNA, 1123 bp, Homo sapiens
ataaagttactacttggccttggtaattgggtaatgacatagtaccagatgtagaaagcatctgtgtagataaagcttgctgctcttagatgaagtaaataagactgatgttgttgaaaaagattaatcatgagattgaggatactagaagggaggaaaatattatttgtgcagaaataaaatatagggttagaatagagatgataaggaaactttgaggtcttcagggattttgttacataaagtatctaagttgtaggaggtatttgataccctctaatgtctaatgtgattgttttgtttgggtaagatatattctatgtgtaaatttcagcataactttcttctacaggattctggagtgaagcagatgttactcgaccttttgtctcccaggctgtgatcacagatggaaaatacttttcctttttctgctaccagctaaatactttggcactgactacacaagctgatcaaaataaccctcgtaaaaatatatgttggggtacacaaagtaagcctctttatgaaacaattgaggataatgatgtgaaaggttttaatgatgatgttctacttcagatagttcactttctactgaatagaccaaaagaagaaaaatcacagctgttggaaaactgaaaaagcatatttgattgagaactgtgggaatatttaaattttactgaaggaacaataatgatgagatttgtaactgtcaactattaaatacattgatttttgagacaaatatttcttatgtcaacctgttattagatctcttactctgctcaaattcatcactgaaagatttaattttagttaccttttgttgatttaaaaataattgcatttgtatattgctaactgataagacaaattgagttattgagctattaaatgcacattttaatataaatgcagaaatcccaaataaaatgctaacatactgaattcagtaattaaaagaacccactgcagctgggtgcaatggctcatgcctgtaatcgcaacactttgggaggccaaggtgggtggatcgcttgagtccagcagtttgagaccagcctgggcaacatggcaaaaccccatctctagtaaaaatacaaaaattagcctgtcc

SEQ ID NO: 14426 - DNA, 1171 bp, Homo sapiens
aatcttattttctttcttacgctgttctctttctgttaattttcctttgttccttgttcccaccttctctaactctttgctggcttttcataaattagtatcaactaaagatttcctatcctggaaattttatctgctcactcaaatgctacctgaggttaaaactttgaagaaaataattactctaaggtaacttagtaggtgggaagaaagaacaggggtttgaaaacatgaagcctctttcttacccaaaacatttaacttatccaaaaaggaacaatacttttgttgttaggctcaataatagaagaccttccatttctatacattggagacaattatatcgaatctatctactattattattactactaactacaccctaactactataaattagtttcattgatatataactgaaagtacttaaaataatgtaatgaaaaaatgaaaggagacaatatttgcacatttaatacatttcctttacctaaactctttcagtaacatacatttctctattttattctcagtccctgaacttcatgggaaaaacaagccattgatctcttacgtaggggattctactgtcttgacatgtaaatgtcaaaattgttttcctttaaattggacctggtacagtagtaatgggagtgtaaaggtaagatagttccttgatttgaagaaaacaacaacaacagaaaacatttatttaaaaaataacaagattgtaacagactcagcattcctaagatgatttatacttttgttatcttgttgtttagcttatgttcataaagaaagagcagtgacaaacagagttgtcatttgatggtttttggcatgtttacgttatacatatgaagatactcttaacgtttcattagctggtagtttgttttttaggtttaacaatttaattacattctttgaaaagaaattacattttgtgtgtagttgcctagtttagaaataaccccattagaaaatattctttttaaaaatcattccatgaaagtaactagaaaaaatgctagacatctttttgggcttctgtctcctgaaacatctgtgatagaatgcaaaatagtggcactatttgagaaaataatgaaaactttgtaacttaatcttacatcttaggttctatcagaaagtgtcattggccttt

SEQ ID NO: 14427 - DNA, 1235 bp, Homo sapiens
tgggcaaatatggcatgaattttgaaagccacatttccccaaggcctactcccttttcttgattcgagagtaaggctcgagtatcacctccttccctcctcttggcaggtgggttggctttgaggattttttttttttttttttttttttttttgagacggagttttactcttgttgcccaggctggagtgcaatggcgtgatctcggctcaccgcaacctcctcctcccgggttcaagcgattctcctctgtcagcctccagagtagctgggattacaggcatgcgccaccacgccgggctaattttatatttttagtagagactgggcttctccacattggtcagtctggtctcgaactcccaacctgaggtgatccgcccgcttcggcctcccaaagtgctgggattacaggcgtgagccacctcaccttgccgaggatgtttttttagagctgagtaggggaaaaaacatcataaccaactagccaaccaaagatccacaacttacaggataacgtgtgtgtatcttcattttacaccgtggtctttgaaaacaaaatgtgtgtgtgcatgtgtgtgtgtgtatgtgtgagatttttgcttgttgttttattgtttaagacactttgacagagggattacgtgcaaaacattaacaaagccaacacgaaagttgccattctaccttcacctgtttataattacttttcatattgaaaggattccatccaacctattgcaagtttctgtgtcataaatgttaccagccagtaagggtaataaaagaccacctctcaagctggtaaatattggccaccagtaactaaaattgggacattattctgcaaaaagttttcaaactctcatgggaatttattttcatgggcttgtaagatgtggaatttttgtaacacaccatagagaaggaaggataatcaaaaggtaagactattaatttttataaatgccttttaaaacgtctagttgttaacaacttggacagaacatcgtgggttccttcgcagatttccttgtgccacatctcttttccataataccacttataaagaattgtccaggcctgtaatcccagcacttttgggcgctgaggtgggaggatggctggaatccaggagttcaagaccaccccgggcaacatagcaaggtcccttctttattaaaaaaaaaaaaaaaaaaattaaaagtgcggttgtggtgatgtacaccagtagt

SEQ ID NO: 14428 - DNA, 1570 bp, Homo sapiens
cctttccacaaactatgtaacttctagtctggttctagtctcggcctgtgctttgagatcatctgtgatatagggaagggtggcaggtaggtagagtgcatatgtcaaagaacagctcataccagagggcagctcaaacttgtttaggaacttctgagaggtgaccacttaattcaacagctaatgaagatatctgcctttggaaaagcatatttagaaatgttgaagtagtaggtatgtttggaaagaaaaaaaaatgtttaaaactaaagactttctgtcttcccctatgtaaccttgcccatgatgtctctcgtcatgattgttaaaagaggagccattgaaatagatgtgatattcatttgtctgatttattcaaatatattttatattcgtatagtagaatggtctatttttaatacctgttatgattttgttttttaggaaatatacgaagagtcatcaacttggaaaggaaacaaagagtgcttttgggcatccaacagttaatcacttatgtttttagagcatgcaatcttaactttgttaaactattattattgatcacattttgatttttttctctccacatcaggatagtttactgaagcacaatctcttatactagtgggacaaaagggagaaaaaggaagcaagataaatgggtatgtaggatgaagggttatttaaaatggaactaaagatagaaggaggactgtaggaagaaatggaataatttaaatgtgaggaaagatatctgtggtagacatgtccttccatgactaatttctaattgtaactcaacacacattgaggtatgggccctcctcagtgactttaactagctcagaaacgtactcccccaccaaccccacctcaccgccccccatcccggttctgggagagcattgttattaaggatgcatgacaggaatgttggcagaactggaaagtattaaaaaagcattatcagacagtcttgatattatacattttcagaaatatattaaaaataataaactaaaacccatgatttcaaaagtttaaaaagagtattttctttttttttaaattgcctaaaatagttctcattatggagatttctgggatttcagaatctataatcttaccagaaaactttttgttgttttttattagttgttaattttgtatcaatatacaaatcagcacaaaattgtcataaagctaactagcaacaaggtggtttgtgttgaaatgtttaggtaaacaatgccccaatttttaactggttaagctttatagtattttgatagacttgtacatataagtcccatatagttcttaaatttttttttccagctttatttaggtatacttgacaaaaattgtatgtatttaaagtatacaatgtgatttttgatacacatatacattgtgaggtgattaccataatccaactaattaacatattcctcagctcacatagtcccctcttctgtgtggtgagaatatttaaggtctactctcagcaaatttcaggtaaacacatagctcataaaataataaaatacaggcaaaatttgggcag

SEQ ID NO: 14429 - DNA, 1220 bp, Homo sapiens
taaatagttgaaagtttatcaaaacagttaatcatttaaaatgaattttttctactctccttgatgtaattttaaaacctgttatatttaactatgatgatcattaaaacaagtcagttattatttttcaaatgtaattatttctaaattctttagataaataaaattctgcagaactttgttgtttaaaatatatgcttattgaaatgctatttttatgtagtatcaagctgtgtaaaacttacatgtactaaatatcacaaagaaaatgaatgttaagtattacagtttttatatacagacaggaaccattaaaacttagagaatgatcgttctatatttaaattgtttaaggaacaaaagatctttcccctacagtattcagccatctctattatctgtgattcttcagcaattaaagcagatttatttccctctttgttcctacttggaatacttgaacaatactggagaattgaactgactgaaatgttttatctttcaaaaggtttaaagttctatgtaccaattagcaaaatacagtaaaggtttaaactgttaatagccacaacatctttaatgcatagacctgtagtatgctagtgctgtataacagttctccattgtgtgtctcttttaagcagagtaactgtgtcagttcttttcttgctttactacctgctgtgtatggaaattgtgtatcgtacttgacacttgctttcaagaatttaaaattcttgcatgttattatgtaggaaactttggctctcaagaaaatagaattgataatatttcatttgtttggattttaagtttaggttttttgtcatattctagagagtactcatttatatctgaaaatacattattagtctattactcattagtgaatttgaagtacataaactgtatgttatctccttgaaaattgcttatctaatttttttcatttaactgaatataattataaagaaaccatcaaatttatggtagggtatgcagatagatccctgatgctttattttacactctatttgaatttggttttgggttttttgttttgttttgttttggtctttttggtagtaaatagtactttgtttttaaagttatagctcttgaattagccagcttgccagataagtttataactcaagaattaatccaaatacttaaacttgttaaagccttatatctgccattttgtagtaagttctcaa

SEQ ID NO: 14430 - DNA, 1222 bp, Homo sapiens
actatattacagaatgatgtaatacctggtaattctccagaagatagacttcagacccttaatgccatttaaatgtagtttttgtggtttaatcttatgagtagattgtaatgaaatcattacctttgaaacatcaaacacttctttaagctttttttttttaatgtcatgaatcaggaaggatacatagtgattcgtatacaattttgtctgcagcattcttgaatatttttaacactgtgtaatccctgagcagcacaaaacttttattccgatgaccagttacacaattcctgtttttattttgtcctgttgtgctcatcttctatgaaaaataaatgattattaggccttgctttccctgcaagttcattaaatgtagaatgttgtctttttaagacaccgtggctgagtgctcctaagccatctgttaaatgacttcccgtggtctgcgtgtgtgtgttcatgtgtgcgccagtgatgggcctctcctcaaacccacgactgtctgcagcgtctcagccgtcagaatgaaaacattatcaatcagtacccaacaacagctgtttttgacaagtttctgtctgacgcctaatgctttacaactgtcaataaggctccctctttgtctagcaggtcggagctcgctgtcttgctgcttccgcgcggcatcctgtccttgtaaccctagaatttgccatgttttggaaatccacgtgggggcggggtggggcctgaacgggtggggatgggtgggtgggtggtggggtgggtgggatggctgggggtgggagtgtaagtcccttttcctactttcatgtaaagtgccacaggtgtcttggtttgcatattcaaatattatataggaaaaacagtctgttatgtatttcttcacctagcttcttgtaatatttatggacgtttccagtttttgtaccttcttagctaaagcagttgcctttttgtaatggcaattaatttatatgataaaactttgtatccactgtagttgacagtattggttgctaattaactgccatattgccctgtctttctattaaaaaaatactgtacctgtacttagaggctaacagattcatgtggacatttaccaggcaagaccaacttgtattgtccatgatttctacgatttccactatcttcaaatgaaaaataaacgctgagtagaactggtgttttcagactaactcctttcaacttt

SEQ ID NO: 14431 - DNA, 1150 bp, Homo sapiens
tgtctttcctaggtaaagagcaaatatctttttccttctttttgtgattcatctttcagtaagactgatagttataaatgtagcgttgtcatagatatggtctgaaaatgattctaaacttgtgtatactggagcatatgtggctttgagtttcctttttatttgtatccattttaaatttacttttctcaaaacttttgcttgtaatggaatttgcataataccaatatggggactgctttaagtaaagcatttttccccataattaaataaacatataccatacaggtgcatgtctacactttagactgctttaatgggatacatgggctaattccattataagtcttgaagtttatggaagcacagtgacatggttatacttactttgggtctggcctaaaaagaaaaggatatatcctagatttttcccatttcttgatgacagagaagtttctctgtgtactgtattaaaatgccttgttgaaatgctctcaggaatgttttaagaattaaatcagtaccttattgttggcataaaaatggagttgtggaattgaatcttaaacattttgtaaacaataactttaaaatcgttgggagcaggcattggtattatagaagaggcagtagaagattgaaaagtgagcaaagtcatgtgttactagaaatgtatttagataacggtcgtctttttattctctctttcctaaaggtgttgcacatcctgtgccctattgctgataagcattcttactcatttgcacctgctaatttgtgtatgttttatggaatttaccaatgctaaaaagatggtattttaatctgcaaaatacttgtgaattttaggcaaaattctgatctgtcagaatcaaggaaggtgcattcaacttaccaaaaagcactaaactttgattcagttagaaaagataatcagtcataaaggctattgattcttcttctcactccattgaaattattacattttatgtttaatgcagaaaatgtgcaataatttatcctgtcactggagtgaaactgtacaaacacactattggttgatgagtgtgtctggatactgttgactttagaagtggggagaagccagtgaaattcaaaagagaaagtcaaattatcagtgggactccaa

SEQ ID NO: 14432 - DNA, 1197 bp, Homo sapiens
tttgtgtatttttatggcctacttcctgtttagaaatgttctgttcaggtaatcagcaaaaaaagagatttgctgtaaaatgcattagtttctcattcactttcctttaaattgtattactttgctctttaggaaaaaaatagtacatggtctgaaactgacctagatgaggccctgatttggagatgtttatgaatatggcatataaaggttaggtctcgttacagacatttatgcctgggtattttattgctggttttattgcataattctgtttttataaaaattgattttttcccttcaagccattacaatgtaagaattagatttttttaaaagaaacatttatttttttacttagttttctttcctagtaaaagaaaaaaatcctattcctctgatctatttccaatgtgagaagatgtgaaattatgcatagctgggaattatatgagaatcttgaattcatttctttaaatctaatcatcagatacatgccctaacttttaaaatctcacttttggttcatcttgaattccacataccgagactcttgaaagccactgatcggggatgactgatgcagactgggagccacgtgggccccgggtctggttcagcgcagcagcactctcttccattcaaagtctcagatgtctgcccctctgcaaagccgtgaggccaatgtctatagctgctaagcatgaaatcccctgcttctgtttgtttcttttgttgccacgagttaatagggacagagacaggagacagcccagaacaaagcagaaataatggagtatttcaccccaaaaaggaatgtggattgagaaatacaaagggtaaggcaaagacagatttagtgtcctgaggcagtgtgatgtattggccagaagcctcagccctgggacaattccagtccaaagccttcatctgtgtgctcccagcagcccacatggctgaaaggtttgacccaccttctataaaaacaatttgttgtttttttcccactagggtcttaaaggatgacaggatttccacctcaaaacataggttgctcttggaacgtggagaagtcttcagctgggctgtgtctggcagccaggggcctcttcacagcactcctttgccctgtttgttatttttcttgctatagatgccattttgaacttgtttgcaagaaccactagtcaccctaag

SEQ ID NO: 14433 - DNA, 1350 bp, Homo sapiens
gattccttctttttttaaaatgagtaattatggtcctcactttaaatttcaaaggtattgaaaatagtttgggcaactatttataatgcccaagattctgtttaatatgtagttatgttcttgggatatgtggatatataggtttttaattaattgttatttttaactacaggagctcttaccaaagtcaaggagagtaggcgacacgtggaggaagggaagatggaggtgcagaaggctgacggcattcaggatcgctgtaacactatttcttttgccactttggctgaaattcaccacttccatcaaattcgagtgagagactttaaatcacagatgcagcatttcttacaacaacaaataatatttttccaaaaagttacccagaagttggaagaagctcttcacaaatatgatagtgtttaatgactggacgttggattatggactttttcagttcaaggataatttctacagcagaataaaaactgctgtcaaagagctattgccagctatcagtggtggtacaaggacggttttgtgttcatctgaaacccagctgaatttataattatgtaggaaataaacagttaatatggttatataatagaaacagtaccacacattgtaactaaattatactatgtatgcctacactaccattgtaacttttggaataatgattatactatttgccttattgctttttgaagtatgggtattttagtgcatactttgtagacctcaaaacccatgaagggtctcaaagaagctggctggatacaagcctgctgtggatgcctttttactctcatagattgggattacctaaattcaacctattctctgtttacaaactccaactagagcagctatgcgaccttgtgcctttagactcttggtttttcatttctccccgtcccttccccacctttttaaagtaagccacagcttttctgattgaaagagtgaaaggccagtgcatataatgacaaactgatgataaccttatattggcagtagggggtggggggggcggtggggtgggacgatcagctgtcatcaatttgcacagcaagtattatctcctgataagatgctggtgaatgcaggggagtgagattcattgctcatctttggatatgaagtctgttagggaagaaacagtgccactattcccttagatgcaacagtagcatagcctcttcacccaggcgtcccaaaagcttggcgtgaagatttcagcaaacatgtcttacaacatgaggaggaggagtctaaatcagtcaggggataaaagtatcgaatcattgacaacacacacttggctttagttcttaggagggtttt

SEQ ID NO: 14434 - DNA, 1909 bp, Homo sapiens
ttgtttttgtttttaggttgaagattttcttttaatattcagttttttgaaaaaaaatggatctacactgttaactgattgagactccactgtgattcacttgtttacttaaaaacttttcagggatgtctgtaaatttcagtgttaatatgtcatgaaaagtggtgtggattgatctaaggagggaccagaaataatttttgctattccaaatactgaaggaaaaagataattgatttatactatgttttaaaaaaaaaaaaggtattgatgagccccccccccccaggacatttaaccttaaaatttattttaaatgtattcttttattattataagggaaatacagatggctgataaataccaaaaagattcaaaagcagcttaatttaaaaagcacaaagagattctggcttacagtgccccaatctcaatgtttttatagttgctgagctaactaatgtgattattgagtttacagatttaaaaattgtcactgttagagtatctactgtttttatgaagtcaaacttatgctgcctcagaaatccctgggtactgaaatggtaacatggaagtgaagaggtcactttgaaatattggtgagtcacaaagattaaagaaaaggatcagtttgcagatactcagaaaaggttattgaaataattactgaacagcacattttctctctaaaaagtagtttcatatgggttgtatttttaagatcagattatcattttgatatttggtcaaaattttgtaccttaggttacttagagccagatttaacatcatgaacattatgtggctttgtctttactacagatatgtggaactgtaaccaaatatgttgtctctaaaacttgttgattgcaaaatacagttctataaacaaaacccatatgtatatataaatgttaattttgcggaagtctggaaattataactatagcatttaagtttgagtctgtattggacaaataagcaccatgcttttcaaatgatttaaaaattacttttatttgcctctttattttgatggtggttggatttttttttttttaatagtaaaatcactaaacttgtgcaatggtagcatggaaattatctgaggtatattgtatgattgtactttagccagggtggacatagcttaaattataaaaactaaagatgaaagtacaaggaagtataagttatacttatgtaagtataaattcatgctgcctacttctaagagaaatttcattcttcataaccacataacattataatgccactgattcatacgggatttacattaattctatgggggaggacactagaattattagtgttcattttcatctaagatctttattctctaacgttcttggtcctattgaaacattgcagtatgcaaaactactgcaatgttaaacccaagagaaaagccattatcatgtgtatgctggtcatcatgatcagtgtggtacaatttttaaaaataaactatcatgcccttcatgccattatttgtctttatttctatgatttataatcctgatatgtgatgtgtttgtaacacagggtgtgcacttgagcctggttttactgtttttattagacagagttgtttatatgctgtaactgtaacgcagcgagactggttctacagccatgtgtcgtaatcttgttccccgtccaagctgttgtatctgaaggtacccagtttgcacccaggatgagggaacgcattcaaaagtgaaatgtaaagccagtgcacgaatattatagtaattgagattttcccaggcttcactgatacagttgttttgcatttattcacaataatacagcagattcttaaatgccgatttttaattgtcttaaattttgctgctgttctcataattaaggacttgaaaaa

SEQ ID NO: 14435 - DNA, 1100 bp, Homo sapiens
gacccctcacttttccaaacatttacaccaggtgttcctttatttgtcactggagacaaccttgtaaccccagttctctctcaggaaaagcctatgatttcctcaagacttgtggcacagacagaaactttagggaaactgacccagaccagatggcagaaagcagatccctggggacagcacagtggtgaagagcccagtgtggatggcagagtttctgccatcaaggtcatttggccaccagccaccactaatagtcagcttttgggcacccacacagcccagagagagcagttaccctctgatggtcatcatacccttggctgccgtggtcttcgtgctgaaagtggctgcagtggccatgtgtgtctggttgttgagccagaaggtagaaaaggcaaaaccccttatcaagccccagaccaatccggaacacacaaccccaagtcataggccacaaaggagcataaagttcccactgtcacagtgacaccccttctgcaaagctccagcagccccccagtctgtcttttcagggccctgcagtgtgaacaaatgtcttctccagtggccgagccagtggacaaatgtgctgcttgggagacatggatgaacctggtcaaactctgccgacaaaccaacccaacactgaagcacaaccagtaccgggtgtagattgagggctcgcatttcttactgaccacctaccatgtgtcaggcactgggataggcattgggatataaagcaaataaatgctggttggatcaactgagaaaagtcaggccctgctagtgattcaatgttcaatcctagctccatggttagatgttgcggggtggttgattgtgacttgtacaacactcatgggctttctgcaatgggctctgtgtgtcatcttctggacctgactttctcagtatacatcagttggtcaatatttaaaccctttactaaggtagtacagaacatgttagccccactgagaatgctagtattaacctggggcatagagttaaaggaggaaagctttgaatattttacactgagaattccctctgagtgagtcagcaggaagtacaagaactatttcagcatgtag

SEQ ID NO: 14436 - DNA, 1173 bp, Homo sapiens
aaaatacatataagcatataattactggagagaaaagcagttgagagagaaagagaacaaaacagctacatgtattgattgctgttatttcattagaataaaatgatgtgccatttgtataggttgggatctccttcggttttactagcatggcttaaatattccaactttaaaatttcctgagtttagtatgtaatctataagcatgggaagagttttcatgtgcaaatttctctcttctttttcttttgtgaaaggtccgattttctcaataaaacattatgaaatgaaaagtgagatgagattgattaattatgattctttttcaggtgagagtaaatttgggtacaagtgaacaaatgctcctttctgagcagagacttcatatggatgacctggtttggcatttggtggaactgtgctatgttaagcataatatttcctttgttattgacaaacgttatgagacaactggccaaatggcagctggtgggatgcataatttgaattttcaacatggaatctatgtaggaggccgcagggcactcaatgtaccttatctgtacggaaagctccccaatttttgaggatgtatgaaggatgtggtatttaaccagagggagatccttacgtcccttagatcttaccctggttttaagaaggtttatgaggtgtcactaggatgcaatgacgagttttttttgcaggggaggatgaagccatcaatttctttagctccagattctctgtcagttttccagaatggaaagtgcaagggtaaacactattggaatttactttgcaaactgtaactcagcaagccttgctttcatttcagttgggtaaggaaggagattttgttgctttgtaaatagatgaaagtctattgaaggcttatgtaggaaggcataaaagtaaaactcagctttcttcttttagttttgtcagtgacaacaagtggcatgttattcaattcaaattcacaggggagtatctggacctaacagtagatgaaaaaaaggtaaggaagtcactgcctttgcaaagcaaacatttgtatctgaaggagccctttttgtgggaggtcttgataaccaaatgtgggaagaagtaaagaggttagaacttgcctctgtgcctgggaaatttgctcgaggaacctctttcaaaggg

SEQ ID NO: 14437 - DNA, 1133 bp, Homo sapiens
ggtggctcatgcctgtaatcccagcactttgggaggctgaggcgggcagatcacaaggtcgggagatcaagattttgctgttttccagaatatccagctcaaaggtattttttactgccagtgaattagccaatatttcccagaagctgtcatatatttgtaagcataattaacagtaattggcttatgtggaaagccaaaatttttaaaagcctaaattttaggctttaaatttagattaaaagcataaattttcgatccaaaatgataataagtctaaaatttagttttgttatgtcagtgtgatgtcggtttgaaacattattctcacatgttttgcatttttgtgctttgactttaactcttctcaaacttcatgttgtttttaatcatgtttcctttcttagggtttataacttgttataaattttataaaaagagaaattttaagaatatgttttttaccagtttttttcctaaactctgaattttaactatgttcattcagatttcttctggtgaatacattcagatgtctggtcgtgctggaaggagaggaatggatgatagaggaattgtaattcttatggtagatgaaaagatgagcccaacaattggaaaacaattacttaaggtaactacattaagattgtgtacctttaccaagaattccagaaatatacttcaggagccatttcagaattggttgtgtcagtcagacacctaagtgaaatgagttaatatactgaaactatctgggcttgggaagatggaagggtgtgattactcaaaatactaacatcttgtatcctacttcacctaataggtggagagcaactcatgtaatggatagggtgtgaagatctccagagagggcagaaatgtttactttgtcctccaaatttaagaaatctctttatttgacccatccactgcacaagttgttctttacctggtagaacaggaagttctgttctactgataatcaagtgttttgggcaggcaatgagcttcctctacctttgcaagcgcagatagcttaataggttaattcagcaatctgcgtttacactttaccctattgattataaatatcccaatcaaaaaggacacattttaagctttattgcaga

SEQ ID NO: 14438 - DNA, 1184 bp, Homo sapiens
gcaacctctacctcccgggttaaagcaattctcctgcctcagcctcctgagtagctgggactacaggcatgcgcccgccaccatgcccagctgattttttgtatgtgtgtttttagtacagacggagtttcaccatgttggccaggaacctcgtgatccacccacctcagcctcccaaagtgctgggattacaggtgtgagccattgcgcccggcctctgttctctgtctcaagctttttacactttctaacatctgcttgctctgcctcaaatttttcaaatggacattttgtattttccatgtacttaatattttaggtagtatttaataactttacagatacatcattactcttgtgtaatgttccgggaatgtatctaagaagctccagtttccccagtctccccagcactgaagctttaacccagaagtatactgtaagatgttctttaaaaatattttttgtttgatttcatgaataaatctccttgtacattgttcactttattattgaactttctttatactttcatgtgctttagattgcaatagatattaaatctgcaaagcgagaactgaagaaagcaagaacagtcctacaaatggatgaactcaaatgtcgcaaacgtgttttaagaaggttgggatttgctacttcttctgatgtaatagagatgaaaggacgagtggcttgtgagataagcaggtaaaatctggttattgttctagaaagttcattttttttttcatttttaattttaatttttgtttattttttttgagatggagtctcactgttgcccaggctggagtgcactggcgcaatctcagctcactgcaactccgcctcgcagttttaagtgattttaaaaataaccattatctttaggaaaaaagagctttcttaaaaatataaagtttgtacaatatcttccacactaaatacagttttgaaccatgaaattgagaaattagaaaaatcttagatctcagtaattaacacaagcgctcctagcatttgtatgtatttcctttgactttttttaatgccttgtgggatttttacataatcttagcttatatataattttgtatactttttaaaaattattaacattttcccaccttgaaacttagcctagtaaccattatcttgttacgtgcatagcaaattgtaatgag

SEQ ID NO: 14439 - DNA, 1249 bp, Homo sapiens
tgggaaaaggcttctttccttgtgctccttgagaacactgtgtaaagaacgtactaatgaaagaatctaaggtcaagaagaatgaatgcacctttaaaatgacaagttttatcttgttactctcctgctaaaaacagtctgttgcattctatgagatggtatggatggtgtccagatgcctcactaggccacactcagggtccttgaatagctgcagtttgccaggcttttctgcattgtcgtggtggtccttcccttgttgctgctgcctgagagatactgcctggttcttacagacacagattatgtcatctttgcagccttcacccaaagttgctccctccttctagggcattttgttttcctacttaataccaagtgtcagcatgttagtaataaacaggtgtctctaccattagtcaaaggtgggagttaagcctttcatctttgtagctttctccagtacctaaccatgatttacttcatgggaagtccctcaaagtactattaattatcgtgtgttctcctgccttgcctcttaacaaaaattctgctgttcctgattatttccattttaccagtgttttgttccttttctatccaggcagcataattcgttgtatgaggcgcctggaagaattgcttcgacaaatgtgtcaagcagcaaaagccattggaaacactgagctggaaaataaatttgcagaaggtcagtatcaaatggataagctgtttctaatttagacaaatttggtgaagcaaatcttgagccctggaccacaacctaggaggacgttttgagatgttcttcactgcattgtcatggagagctatctactagtgtttctataaaatttagtgtgttgggggaaaagttgagattttatatatacatgcatttacgtatattaattgtacgctaactacatgccaggcattgttttaagcactaggggatatagtgaacaaaaagacacccctgccttcatggagtttacattctagtgtggggagatagacaataagtcaacaattaaatttatcagatggtgataagtctgtaagataaaaacaaagcagaaaagacaatagaattggcagatggatatgatggtctagggcctccacagggaaggtggcagttaaggcctttggtgtatgcttgatgtacgtgaacaccagcaagaggccagtgtggctggagcagaatgggcagtgagtagaggagtaggggttgaagtgagaaagg

SEQ ID NO: 14440 - DNA, 1169 bp, Homo sapiens
ctctactaaaaatacaaaatttagctgggtgcggtggtgggtgcctgtaatcctggctacacaggaggctgaagcaggagaatcacttgaacctgggaggcggaggttgcagtgagccgagatcacgccgctgcactctagcctgggcgacagagcaagactccgtctcaaaaaaaaaaaaaaaaatctgatctgatgaaacaattttgacttttgagaaaaaaatcagtagaataaaggaaatggaagtggttagagatatttaggagggagaagaagatgcggagatgtgtcattgattttagacaattcttttgggaaggtgggccctgaatgaaagacacaaaatcatagggacagtgtagaaacatataaaatgatcttggttgatggagatttaaaggggatgataagagaatactgtgggagataggcttaaaaaggttgaatcactctgatttagataattattagctttgaacttcataagtattgttttacttctccaaacatttttatttctttgataatttatcatatcccagaatctaagtaaataatgcattataaatagtctcagtttaaggattaggccacacttggcttaggtgtaaacttcatgaaaggttaagaattggcataaatggctcaaaggttagggtaaggaattaaaatgaaacaaaagaatatggttatcttgtgtggatcaaatgggcagacacatctctgcatttaattcagaagaattgatttagaacttctttattgtctgcttctctcagcgatgtgagttgacctagcatttgctggctttagagactcccctgcattcccattattaatggttaagtttcagcttacactacttctgaagatcagcttttaatctgtgcccagtattctgaatattcctagcaaactcattttctgtcatcactggcaagagccaggatttgggtggccataaactatgatgattatgactgggaagactcacaaaacatactacctgtttctggaaaatagttcagtgcctaagaacagctcatacctgagatgtggaagtttcaactgctgaaactgtggttgattaatatacttgatatgttttcaagaatcaaagattaattccaaaatgaaatgttagataagttctttctggctgctga

SEQ ID NO: 14441 - DNA, 1495 bp, Homo sapiens
attttggaaaaggcgcgatgttttagcccagtgtattaaaccatatcctgaatacaacttattagtgtttaattgctaagggtcatttcagattttagccactatggcattaggctgccgattaatggacactgagtccattaatttattcaatgcatattgatggaaggctagcttcgtggccagtaccatgttaggtactagggatacaaagatgaataagataatccctgccctgaagggctcagagtctaatgatgaagaaataaacaagtggttataatacatcatgataagtacgataatggaggtttggaatatgttccctttgagcaaagacgagagccttgtcttagatctgctccattgtagataaatgatttgtctgtttactcttagagacgcagaaaggtcagaagttacctggaattactcgtagctgctgctgcttttttttttcttttccaacttgatatagggcagtaggaacccaagtaagtaccaatgtttatgacttatttgcgggcagtcccacaatatctagaagatttagctggaactgacaaaactttgattccttatacctgtgttttgctgtttttgacaatcatttagaatatctttctgtgctgtgtgtgttccatttgcccttccagatcttttctccactctgctctgtgcttctgggaaatgaattacatggggtacatcaactgagcccttcctttttggtttcagattagctttgcccagtgggagggacatcagaaaggatctccctaaaagctagttccctcttgctggatttagtgttgccaaagctgttctgtgagtagttcacaacttgtattcaataatggccctctctgccagccatctatagttacacatctttctgggttctaataacccttccctagcccctttagacctggagatgataatggcttcctgacgttgctaacctggagttataccaccatcttttgctgttttccctaaaccctgcctgtaccttttgaaatggttccttcattaagttttcttgaatacttcatttgagtatgctgcttttcttggcaggaccctactgataatacccatctatgtctaaaacagatttgaggtagcttccgtttctgcattaaacaccaattacagtgtccttaatggcaaatgcaaacaggagcccatgggctgccatcttggctttcttgggagggagggggttatggttccctcagcatgctccaaatgtggtatcatcattatgccaaatcaaagtcaatgggtatagagtaaaatctggctgcaaaaacatttgcaaccaatgctagatggttgtggggtccctgttgcttgttttaacccagtaattatctcaaatactgatgccatttcttattaccataatgctgacatcattttaccccttaaggatactcctaaggagcggtccctttgttaagcctcaatctgggtcccttcctcaaag

SEQ ID NO: 14442 - DNA, 1166 bp, Homo sapiens
agaggagcctggtcactggcccatctcagtagtgaaactggaggtttgatgcacaggggattctcagtagcaggcgccagtgcctgatttatcgtgagaagcagtttaatatttcggctataaaaggctagaactagttcctaattagaaggtgtgccaggttgtaaattgtcaggttgcaagtagggatgagcacgccaagtttttgcgtataggtctaaagaagttttgggggtgggggaggatgcggtaccccagacctgtttccttgtctgcccagaccttgccatggtgtagctttccatctcttgtgacagtgtctcaaggagcagtagacattctttggctgcagcagatttcgcattgtcttcctgattggaagagttcagttatgaggcttctggttgccagttactcctttcttttgaagagaaagaactggaatcatttggataagggatgggcgttggaaggagtagttttcactttttatgtattgtataaggcagttatgctgtgaactatttatatatgatggaataaacaaaaacaaagcaagagctgctggaggtttggatagtcctactcatgttgaagtaatcagaatagtagtagtattggcaagttctcagggtgggagatctgtggctttagccacctggatggaagtctgcgtaatggtttctcagtgacaggagattccctcggttttaatccagtagttcctagttattccactctccagtttccaaccgggtcatttaggcccttgcaatcttgtggaattcttataaattctgttaccaggttttgttgttgttgtaaggaaaaattccattttgttatcttttttttttttttttggatacagtctctctctgtcacccaggctggagtgcagtggcgggatctcggctcactgcagcctctgccgcctgggtccaagtgattatcctgtcttggcctctctagtagctgggattacaggcaccgccaccatgcctggctaatttttctgtttttagtagagacagggtttctccatgttggccaggctggtctcgaactcctgacctcaggtgatccgcctgtctcagcctcccaaagtgttgggattacaggtgtgagccacagcgctgggccctaaaactgcattttgttacctg

SEQ ID NO: 14443 - DNA, 1221 bp, Homo sapiens
gggcaacaagagtgaaactccatctcaaaaaaaagaaaaaaagactcgataatttagaacttctaaaatcttgtattagacttacgctgtatgactttgccttcttaagtttttttttcatgagatcaactctttggcctattatttggcttggtcagagaactctttgtaagtgtgtatatcctggcccacacattagaatgatgagatatgaagtcattcatatctcaactaattttagaccttctttgtctgctgtcatctctttgaattttctaattgaatttctttcactttttgctctcatgcttaactcttgaatttagcttaacatacaactgaggatattattaagtaaaatatggattatttagaggggtcttccttagaaagtctatatatgaatatgtggtatgctaatagccagaaaggacaaagaaaattaagtttgacacctgtgggtgatcatccaaaatcaattttattatcacacccaaaaaatgctttgatgtaaggaataaatttattcataaaaggggactatattaaagggaaatactttatttatattaagtatattttgcaaatgcaatgcagctactaactatagaagtaaaagacttttctgtccagtgctttggaggagataaagatgtataagacatcattcatatctgaaatgaacttttaatctagtaaaggaactgtgtatataattaactatgatgcaaagcaatttatactgaggactattagagaaacagatccctttcagttgggagccttgaggagggttgataaaagaagccgagaggtcaagcagcaacgacccattttcaggttcctcctcataactgtccaaaatttaatatttggtaccttcaccagcaaatgcaatcatataggttaaatgtattcgcttttagtttggtaaatttcctctaagataagttttctgcgacttgtttaatgcttctgtatgctatttattctctttgcattttgaacacattgcattattctgttaatcttggacagcaaagcacaatggattaatagggcaaataattagtaacacattgggtggtacaaacagaaaaatgcataagtttttctcaccaaagatttgacttatttaaatatcagtattcaaagtgtcaaatgtttgaactcattgataagagcagaaaatattgatgttgtatgttttctttacaaagc

SEQ ID NO: 14444 - DNA, 1069 bp, Homo sapiens
cacatgaagtcatccagtgaccctagctcttattgtgaagttagtggagtatacttagaaatgttacaactttaaaatgttacaaaacattcattaaagctcatatttaaagtagagcatctagtttgagaaatagaaatcaattattaaagatgtcttttttctacccatttaactagttaaaaccatgacatgtaaatgtagaagtagaataatcatagaattccctaaaatatttctgtttactaacatatattgaccaagtacatcaagcaggagagatcttccttcattctgttatagtccacatcattctaattttgctcagttgttattaagagcatattcctaaaccatacacttttgtttcaataaagttttattttgttgagatgaataaaataacaaagttataagctgcataagacaaaagttcaattgttcaaaaaaaatttactgggatagctttctattacaggtattgttagattatattgtgctgataagattactttctaaaaaatttgtacttttctgtaaattaaaagaatatggagtcataaaatggcaagtgttttaggattagcctaaaattggacattgtcattgatttcaaagaaggtatgaactagcagtcttacagcctaattcttctttggactggtccttggcagcagttccttttcagactcgataaacagaattcagatgatgtaagtcaaaacaaaactttacaaagccaagcgtattatcttttgcattaacctatttttttccatcatacatgctactagtatgtgcattagcatgatattctcatatacattgcattaaaaattaaaaggtggcagctcagggtgagctcttctgttgctcatttgttcctaaatttttaagggctttttctcagtcaatagtttgtacaaactggttagtttaacttcattacccatttcattaaagttgatgggtcgtgtgatgagatgcatttaaggccgatagtgatagatgttttttttatttcttgaacacaggctttgtctgaatgatgttcttttatctcttgaac

SEQ ID NO: 14445 - DNA, 1412 bp, Homo sapiens
tttttaaaggcttaaattgtagtagtaaaggggaaaacaggaagtagtagtaaaggggaaaaaaaaccaataaagcatctaaaaaattggcatgttaaaaggcttaaattgctaatgtgtgtatatatatatatatatatacacacacatatcattgacttttcttaagacttcagagtactgggtagatgaacactttatacagtatatatcttcagcttaaatttgttttgagtattttttttatttttaaataagtaggcaaagatttaaatttttttatttttagtaaatgtttgaggcacactaagacaacttgggcaatatttgccaaaacaaaacagaaccccaaaaaatgtacatcttgttcttagcaaatatcattattgtagagacacttaataaagagatggtattttaatgtctgcagttctgaggtagggtggaacttagttctacattgtgatttaggaatttttaaaaccttttttcttcaagggagaagtgacccaggcctcgagtttagtgctaaagccgctagtgtacttatgctgtcccctaaccaccacgtgcgatatggaagcagatgctaaatataggggttttcttagaaagtaagaggaaattagcaagcgttattagtgattgactactgctatcaagtgaattcaaaggaaacaggtttttatgccatatttaagttacagaaaccaggcatgcttagaatagtttctagaggttattggagaatagaaagctaagaaaacttggtatacatttacaatggaaatataattacactttttactctcagaatattgttcacattagacttcctgtttatcttttatattcttgcatttatataatgcctcatcctttcaaagttctttcacatattatatgatcttctttatgaaaaaaatagatgtttcattctgatatattcagtttcccactttaggcaaaagtagattaatagaatgacgaattcaaagtagatgaggaaaatcaggcacagagaagtaaaggtagggatagacccaaatttacacaacaagataatgacatctccagcttttaagttgatcatcaaaggctgggctggatttgtcttgctgtatgtgtcaggaaatttatacctattacattttccattttctcaaaatttaagtcacatgactaatatttagctgcaactttcctcataacaaatagtgtcatgaagaatgttgtagtgtgaagtttgtacatttcagggtcagatatacaatatgaactcttaatctacaggaatgagaatggaggatcattgaaggccatgatataaacaaatttgcatgttgaagcctgtataaaacatggtacagtgagtgaatatacccccatccccaagaacactttatacatat

SEQ ID NO: 14446 - DNA, 1164 bp, Homo sapiens
ttccaatttatcatagcctcactacttactagatgtgtgactttcagcaagtcatacttaacctctctgaattacagtctctttatgaacagagtggggttaatactttcttctttttgtaccccaatatgattttatcgtcaagggaaaactcctaaaactatagagtatagagaaatataagagtccaacctttgctgctgattagttatatgttctctgtacctcatccttcacatgagaaaatagtttcctagagcatctggatgacttgtgtaatgtcttagaaccatcagatagaggaagcagaactagaactcagatttccttatgtctttcaattggaagtagtaacaaaggacagaagtaatgaatcgtagcgctccagtctgtgtgttatggtgctgcttaagtggttataaagtgatacaacaactttgaagagaaaaaaactcagtttatagtcttttgttgataattaataattagaattcagctgtgaataatatggttaattagagaaaagccctaagcagagagattcctgccataaagtttttgagctttagtcataatacaggctgtttggacttacatgttattagtgtacagttttaataagcttggttatctagtttactgactttatcaaattaaaaacatggtggagcttaggaagtcctgaaacaggctggaaataactatagaaacttcttaaaaaaaaataaatacagggtctcactctgttgcctaggctagagtatggtggcatgatcatggctgactgcagccttcaactcccaggctgaagtgacccttctgcctcatcctctggagtatctgggactacaggcacatgctgccacactcagctaattttatttttttgtagagagggaatctcactgtgttgcaaaggctgatctccaacacctggcctcaagcgattcttttacctcaaactcccaaagtgctggtattacaggcgtgaaccactgctcagagccaatagaaactttttaaagcagcagccgatgcggtggctcacgcctgtaattccagcactttgggaggctgaggcgggcaaatcacctgaggtcgggagttcgagaccagcctgaccaatgtggataaactccgtctctactaaaacaaaatcagcta

SEQ ID NO: 14447 - DNA, 1154 bp, Homo sapiens
cacccagactttactgttttggcatttgcttttcttccaacgagtttgggaaagcaataagaagagaaatataaatgaatcattttggcttctacttagttgcctcttacaaacatatgtatatattacttttaaaaatatacttaatggagaaatcagttgatatttttttccagttataaatgaaagttgattttacatagaaaattaatgtgaaacaaaccagttgatgacagttaggatggatgtatatatattacttcctgaaaagaagtgtaagagttgggatagaaaagaaattgtcatcagcctttcattgtgtccatactttttgcttgggtttgatttttttcatctaatttagatcgcaaatgccttgggtagtatataaattgcataatatttgtggatataaagctttctgaaagatgctaattaatcccttttagtgcctccagaaaaacctaaaaatttgagttgcattgtgaacgaggggaagaaaatgaggtgtgagtgggatggtggaagggaaacacacttggagacaaacttcactttaaaatctgaatggtacgttattttaaatttgtttcatgttagatttattaaagttagtcatttttgctggaatttttattttaccaagtaataatattaaatgctattttaaaacatttaattttttattctgtaacatttcaaatatatgtaaaagtagaggccaggcgcggtggctcatgcctgtaatcccccaggcgcggcggcccatgcctgtaactccagcacttacggaggctgaggtgggcagataacttgaggtcaggagttcgagaccagcctggccaaccagagcaaaaccctgtctctaccaaaactacaaaaattagccaggcatggtggcgggtgcctgtaatcccagtgactcggaggttgaggcaggagaatcacttaaatccaggaggcggaggttgcagtgagcccggattgcaccactacactccagcctgggtaacagagtgagactccatctcaaaaaaaataaataaataaaaaataaaagtagaaagaatagtagaatacccatacatacccatcactcagcttcaacactggtcagctcatgaccagtcttatttcaaaggtactctttgcct

SEQ ID NO: 14448 - DNA, 1236 bp, Homo sapiens
cctgcctcagtctcccaaagtcacataccctttctttaaaaaaaaaaaaaatgctatttgaggcactgcactgaatgtattctgaagctctgttcagtgaatgccatgattgttaagtaatgtctgccactggtagaagataaaatgatgtcacatatgtcacatacttgccatctgtcatccaatcctgttttctcatgacagttttaaaaatattaaataaaatagcaaaatttcctgtcttagcctctcatccaggctaaagcacctagtagaaatactgaagtctgtaaattctggttgatatcaaaagatgacccctcaaggcatccttgaagtggccttaaaattagagcaagaaagagcattttattttttcatttattaccttttattagatacctctggctcttcccttttgcggctatcaccgaagcaggagtggccaaaatgaagtttaatccctttgtgacttccgaccgaagcaagaatcgcaaaaggcatttcaatgcaccttcccacattcgaaggaagactatgtcttcccctctttccaaagagctgagacagaagtacaacgtgtgatccatgcccatccgaaaggatgatgaagttcaggttgtacgtggacactataaaggtcagcaaattggcaaagtagtccaggtttacaggaagaaatatgttatctacattgaacgggtgcagcgggaaaaggctaatggcacaactgtccacgtaggcattcaccccagcaaggtggttatcactaggctaaaactggacaaagactgtgaaaagatccttgaacggaaagccaaatcttgccaagtaggaaaggaaaagggcaaatacaaggaagaaacaattgagaagatgcaggaataaagtaatcttatatacaagcttcgattaaaacttgaaacaaagaaaaaaaaatacctgtgaatacccaagagtgccataattatttggaatctctctaaaaacactgatttttcacaacttaataatgaaattagtattctcctaccacccattgcacacacattgctgttggtgtgtagtgtgttgctgtggagagaacattagatggggagttagggagtgttatggcccgaattatgtctcaccaaatttcatatgttgaggccctaacccctagtcagactctatttagagacagggtctttaaggaggtaattaagcttgaatgaggtgataaggatggcactg

SEQ ID NO: 14449 - DNA, 2345 bp, Homo sapiens
ccttacctaagtatgtgattgacaaatcatgatctgtacctaagctcagtatgcaaaagcccaaactagtgcagaaactgtaaactgtgcctttcaaagaactggccctaggtgaacaggaaaacaatgaagtttgcatgactaaattgcagaagcataattttatttttttggagcactttttcagcaatattagcggctgaggggctcaggatctattttaatatttcaattattcttccatttcatatagtgatcacaagcagggggttctgcaattccgttcaaattttttgtcactggctataaaatcagtatctgcctcttttaggtcagagtatgctatgagtagcaatacatacatatatttttaaaagttgatacttctttatgacccacagttgacctttattttcttaaataccagggcagttgtggctcattgtgcattttactgttggcccattcatttcgtttttggaaattatggttttgtattttcatgtttatttacattcatttttgtttattcagggaaagctgatctttttttcaaaccagaaaaaaaaaatgaactagatatgaagtagagttcattaaatatcttgctattgtcagagtttttaaaatatagacttaattttgtttttttaaattggaatacaataaagtactacctacatttgagtcagtcaccactcttattgtgcaggttaagtacaagttaactaaaaataaactgtcctctctggtgcaactcacaaccaagatcaagattaccttaaaatttatttgaattttttagatgttttggttgtcaaactgtaggaaacttcacaacatttaagtcttactctgtatgtaacaatccatcattcaccttcactactggtagtaacatagagctgccattttccttttaccatgcatcatctctttacagtaggcctggcagatcattttttaaaaagattattcaactaccaatcagtaatgtttttaaacagtacatttgctttgaacttggaaaatgtgttcagaaagaaaaatggaattgaatttcatttatacactaattccttggattttgcacagttacctaacggttttagtctggagttaaattcagatgcatggaatcctgaaggaaaatggtagctttttaatctttttgtgtgtgtgtgagtcttttaaatcaagtactgattaactattaagtacaactttgagattttagttttaactcttcagaagccagtgtgaaatagaattggttattctcaaagactcaggataaactaaataagctatatatagagtacatttaaaatgtacaacacaaattggaaataaaataagttacaagataagtttacagggatatattgcttacaatttttaaaaggcagtttgttttttatgtgaatatgtttcttagtgaaattttacattcctttgttttggaagattggcgatatttgaagagttaaaaatagtacagaaatgtgaagtttggtatctctaaatgtgttgtacttgactttcttttttattttgtttttttttttttttgactacttagaattttcacaattctaataagattgtttccaagtctctcatgtgcaagctttaaaggatgcactcttgccattttatgtactggaagatcattggtcagatgaatactgtgtctgacaaaaatgtaaactgtataaactgaggaacctcagctaatcagtattactttgtagatcaccatgcccaccacatttcaaactcaaactatctgtagatttcaaaatccattgtgtttgagtttgtttgcagttccctcagcttgctggtaattgtggtgttttgttttttgttttgttttcaatgcaaatgtgatgtaatattcttattttctttggatcaaagctggactggaaattgtatcgtgtaattatttttgtgttcttaatgttatttggtactcaagttgtaaataacgtctactactgtttattccagtttctactacctcaggtgtcctatagatttttcttctaccaaagttcactttcacaatgaaattatatttgctgtgtgactatgattcctaagatttccagggcttaagggctaacttctattagcaccttactgtgtaagcaaatgttacaaaaaaaaaaaaaaaaaatctctgggttaagaaaatttggcttaaatgtatcctttgttattttaaatatattgagatattttaattaaaatttttaccccattgaaccgattttatagtatttgtacctattttggtgtttttgtctttatagtaaataaaagtttttgaacaaatg

SEQ ID NO: 14450 - DNA, 2827 bp, Homo sapiens
cttaataaaagcaggggtaggtttctttaaactgcacaaacatgcaaggattttttaaaaatggaaacttctctcatgttattcaactagagcacttcagtttacaaaacagcaagtccatctttatggaagccagcacaaggaactgtgtgcaaataatgaagacgcttgcttggatcctgtttcaaaattctagaccagggctaccttacacagaattggtcatgttactgccaggagatttctgtgtaacttcatttattggctacagttttggcatttgaagatgtggtactcagatggggttttgtccaccattgtcaagattgtaatcttaaaaatcataccagtcattgataatttagtttatcctgaggcagtcgacttgcagaggcacagtctacaaagcctaggatgttgccactcaatggtttacattttgggacatcttttaagttgtttgtagcactgcagttcaaagtgttaatatttagagggacttctagattttatacctaatgcagtagaaccttgaagtatatttaagcttttttgttaagcttgaacagttggcaagaataatgtgagttcctatctgaaatagaatggtacattaccacttttaagttttaaaaattgatagatgttcagatgtatctcaaactcagttttatttttattccaaatattgtgaatgagaagccattgtcctaaactttggccatttttgtgctataaacatgcatttttaagttataaggtgaatcaaacaatatgtaatacagtattaggatgtaatctttgcttttgtagtactgttaaaatagagaattatgttgtttgcaccgtcttaattaaaattcttgatttttactagttgctttgcaaaaaacaaatgtttggctgcattgctaatatttgtaagtataagttgcttcaaggttgtgctgatgagtagataggatgtagtgatcttagtagtgattgaaagggagggtatttattatacaaactgtgaactgcaatgacatccttagttttggatgatgtgtattcttgtttttctttgcagcattttaatgaagattgctttgaagtgtttacgcagtagcacattagtataaaatttagtttagcacagtggacaaaaagtagttaaattaataacttaaaatcagtctctaatttatacatctgaagtatagcattcctgtatgcacacagtaaataatgggtagcctgggctctgtgttactttcttgtatttttatccaagttgtcagcttcttattgctgtgttgttgtgctaaactttgaaccttatttcttttattaaaaatcagtacactttctataatttagtaagatactggccataatcttccattgttataaccttaattttcactctgggtttacagtggctggtctgtataaataatttacacaaagatgactgaatgctaataccagttgcacttaaatgaacatgcccattctcagtagctgatgcagtaatatattcagtttatctatgcattgctggggtcttgatataagatggaaacagtgtttcttatctaaagttttgattatcagcaagttgaatggacactttagttatttaaataaagatttttgaccaaaatccagaaaatggtatgagagaaaaataaattccagctagtttaatagatttttaaatgtcaatctgattttagcctcttagagagtgctaactagctggtaatgtttacttttaattccttgttaaaatgaggcaataatttgcaagatttttgtatataagtgtaaattcttcatatctttttagatctaattcaatattttctgactacttctgccatgtataataccatttttgtgcatgcttgatgtgacattcataaattgtaccactatgactttatccatgtaaaatagctatttattgaattttcttttaaaagctggatttactgggttttttttttctctcagtttaaacatcttaacagagaatttgttactgtttattaaaagaattgcatttggaagcaagaaaacaaccggatttgcaatcatgtgaagaaacaataatgcctttattatcaagtgttaagcacaattcttataacaaactgtgataaattctttttgtttttttttcctttgccccattattttcttatgaacaaaccaaaaattcatggtgagcagttgcagtgttggctgatatatcttttatgtacagggaatttgaaaaggacagtggattcatttagaagtgtaactggtgctgtgattatagcaatacatttgttagttgtacttcatctttttcatgctagctttttaaatgtttagttttcctcttgtcatggtcagctgctgaatttacttgaaggatgtagaatactgtttaaaaaatactaaaatttgtacaattagatcaaagaattgtgcaatcatttcctttttaatttttaaaatgttgaggctcataaatatttgagaacatcagatctaatagagcatagtgatactatttaatttaaccaaagtctctagtgaatatttcaactttgaatgtaaactaacaaataaacctgaccaccaaggagattgtttgcccagagtttcaaagcacattgtctacaaatggaaattgaaataatttataaaatattgacgttactatgttttttaaaaagttcctaattttttcactaaatggaggaaactattagttttattgttaaatatggtagatattaatattcctcttagatgaccagtgattccaattgtcccagtttgaaataag

SEQ ID NO: 14451 - DNA, 1706 bp, Homo sapiens
ttaatggtttctgattatattctggtaagtccctgaaggtatttattacagttgtcacttgaggcaataaaaatgtgggaaagtttagtaccttaatcagtgtgacaattattactcacatctactttgtctggatccagaattttttcagaaatatcattacttgtgtagtttttgggttaggatacaattttattatattcatgcttatattattacagtaggtttgtaactcttgagggataatttatttattttgctgttaacattttagttacagaagaatggtctgagaaaaaatggtattttgaaaaatggcttgatctgtgacttcaagtttggaccgtggaagaacagcactttcaaacccacaactgagaatgatgacacagagacaagtagcagtgatacatcagatgacgacgatgtgtgaaggatttcctaacagctttagaaatcttagtgtgatacatctctcatacagtttggggtgaattgtaaaaatgaagaactataatttatgtagtgaaataccccattagaagaggattttttgggggacttcaatatgaagaaaaccaagaatgttttgttgggctgtgttgaacattatttctttgtaaatgaatgttgtaggaatgaggacttgggttggtccaacattgactttcttcatcactgcaacatttctctgactagcaatgtgacgatgtaacaaatgagattttctcatttaataataaaaaattgtgtaatgttttgcaaagcttctgtcttaaaatgtccaggtcttaagaaaaaaggcagcttacactgttttgcttgcagagtcatatctttttcgtacaatggaaatcctcaagtccactttgtgcggtctccctctccttcccccaaaaaacaacaacaacaaaacaaaaaccaaaaaggaaaatgtagcatgttggctaaaactggagcaaagtgcactaaaacaatttcctgaactcacctgttgtactattcaccttttaaaccataaattgctctttagccatttgtagtgcagtaaatgttacaggaaaagacttggcacattttcttccaaattttaagaggtgattttcaaaagctttattggggtatgttgtcagaccagggttttcagagttgatggaaaagagtcttgtgagaaaacttattttgataaattattacacacgcagaaaaactgatcacactgactggatctgtccacgacatggaaaataaactggattttcagaatattgttgttttctgtagtgttcaaggtattgtttctaaacataaacatactctaaacatgctttattcacttgttaaagtcatacttttaaaagtaataccttactaaagatggtgattacttttccgaggtcagaaaaggaaagctaagcgttttcattatcaaatacacaagcttattaaatgaatgactgttaactactttattttcatttgcacattaattttggaattgtttctgttttgctgctgacggaaatactattttggctctgtgtatatttgtattttgatttttctggtttgtttacccccatttgcttttagctcccccttatgtttaaatatattctaacttatgtaaagagcataatcttagagcaaaaatacttgaggttttatgtcagatctaatcttaagtgtttgttgttttttaaaaa

SEQ ID NO: 14452 - DNA, 1207 bp, Homo sapiens
agacaaggaaagaaaaaacttgaatgaaatggattttacagaaagctttatgataatttttgaatgcattatttattttttgtgccatgcattttttttctcaccaaatgaccttacctgtaatacagtcttgtttgtctgtttacaaccatgtatttattgcaatgtacatactgtaatgttaattgtaaattatctgttcttattaaaacatcatcccatgatgggatggtgttgatatatttggaaactcttggtgagagaatgaatggtgtgtatacatactctgtacatttttcttttctcctgtaatatagtcttgtcaccttagagcttgtttatggaagattcaagaaaactataaaatacttaaagatatataaatttaaaaaaacatagctgcaggtctttggtcccagggctgtgccttaactttaaccaatattttcttctgttttgctgcatttgaaaggtaacagtggagctagggctgggcattttacatccaggcttttaattgattagaattctgccaataggtggattttacaaaaccacagacaacctctgaaagattctgagacccttttgagacagaagctcttaagtacttcttgccagggagcagcactgcatgtgtgatggttgtttgccatctgttgatcaggaactacttcagctacttgcatttgattatttcctttttttttttttttaactcggaaacacaactggggaaatatattctttcccagtgattataaacaatctttttcttttttttaagtccttttggcttctagagctcataggaaaatggacttgatttgaaattggagccagagtttactcgtgttggttatctattcatcagcttcctgacatgttaagagaatacattaaagagaaaatactgttttttaatcctaaaatttttcttccactaagataaaccaaatgtccttacatatatgtaaacccatctatttaaacgcaaaggtgggttgatgtcagtttacatagcagaaagcattcactatcctctaagatttgtttctgcaaaactttcattgctttagaattttaaaatttcaccttgtacaatggccagcccctaaagcaggaaacatttataatggattatatggaaacatcctcccagtacttgcccagcccttgaatcatgtggcttttcagtgaaaggaaa

SEQ ID NO: 14453 - DNA, 1450 bp, Homo sapiens
ttcactctttccagataagcagagttgctcttcaccagtgtttttcttcatgtgcaaagtgactatttgttctataatacttttatgtgtgttatatcaaatgtgtcttaagcttcatgcaaactcagtcatcagttcgtgttgtctgaagcaagtgggagatatataaatacccagtagctaaaatggtcagtcttttttagatgttttcctacttagtatctcctaataacgttttgctgtgtcactagatgttcatttcacaagtgcatgtctttctaataatccacacatttcatgctctaataatccacacatttcatgctcatttttattgtttttacagccagttatagtaagaaaaaggtttttccccttgtgctgctttataatttagcgtgtgtctgaaccttatccatgtttgctagatgaggtcttgtcaaatatatcactaccattgtcaccggtgaaaagaaacaggtagttaagttagggttaacattcatttcaaccacgaggttgtatatcatgactagcttttactcttggtttacagagaaaagttaaacagccaactaggcagtttttaagaatattaacaatatattaacaaacaccaatacaactaatcctatttggttttaatgatttcaccatgggattaagaactatatcaggaacatccctgagaaacggttttaagtgtagcaactactcttccttaatggacagccacataacgtgtaggaagtcctttatcacttatcctcgatccataagcatatcttgcagaggggaactacttctttaaacacatggagggaaagaagatgatgccactggcaccagagggttagtactgtgatgcatcctaaaatatttattatattggtaaaaattctggttaaataaaaaattagagatcactcttggctgatttcagcaccaggaactgtattacagttttagagattaattcctagtgtttacctgattatagcagttggcatcatggggcatttaattctgactttatccccacgtcagccttaataaagtcttctttaccttctctatgaagactttaaagcccaaataatcatttttcacattgatattcaagaattgagatagatagaagccaaagtgggtatctgacaagtggaaaatcaaacgtttaagaagaattacaactctgaaaagcatttatatgtggaacttctcaaggagcctcctggggactggaaagtaagtcatcagccaggcaaatgactcatgctgaagagagtccccatttcagtcccctgagatctagctgatgcttagatcctttgaaataaaaattatgtctttataactctgatcttttacataaagcagaagaggaatcaactagttaattgcaaggtttctactctgtttcctctgtaaagatcagatggtaatcttt

SEQ ID NO: 14454 - DNA, 1261 bp, Homo sapiens
gtgtttctcatgctgctcacattttatttgccaaagtaaggttaccatgcctaacttcaaaggggcaagaaagtgcaatcttgccatgtgccttaaagagggagaactgagaatggtgacgaatagcaccaatgatgagtacaccttcttccttgaagttttgcatctatatccttctacttcccatccaatcctgccttttatgacatatctctctacatatgatcttcaatcatgtaaattgctcagtatttctctatattaattagtggttctggctaagggtctctcacgagttgttggcttgggctacagtcatctcaaggctcagctgcttcctcagtgactcatatagttgttggaaagcctcaactccttgccatgtgggcctctctatagggctaaccacagtattatagcttgtatcccccagagtgagagatgagagagacagataggcagacagagacggagacaaaagacagagacatcccaagacagaagtcaaacacagtctttcataatctcttcttgaaagtgacatgtcatcactgctgtctgataaccaatcctgggatagagtgggagggggactctacaaagatgtatgttaaatgccaggaggtgggagacttcatggaagctggctgccactctcattcaagaaggctacttactcttatgtaaatcttggctgccaaaaattgctgtctaaatcatagcttcttccaagtagcatacccaggacagggtaaatgcaatttaaaacttctctcaagggggttacttcatttagactagtgttggtgttctcctatgcaattaaatggttcttgtgtcttatcattttcaatgtccaatatccaaggaaatacatgcactcatccacagaatattttctttatttttaaagttttaatgctgtttttaagtcccttgtgtttaggtggttgttatacttgaaatgttagcagacataatacacagcaaataaattcttgatggttttgcttatcctcttctctagaagcatgcgctgtgtgagctaagtgtgactttaaataggacatagggaggaattagaaatagaggcaaagtggcagaaaccccacattaaaatccatccttgtcagcactctctgatttcacataccagggttcttttcggattaatcaaaaaattgttgaaacgtgttaaaggagaaatgcaattctgtaaggggaacacagttcctatttggagggaaggaatatgtatggc

SEQ ID NO: 14455 - DNA, 1236 bp, Homo sapiens
ataacacctattattgacccttttgtagagatagcgttgcgtgtgtttgtgttgcgcggacgcagaaatctgggaagggcgctgcacagcgttttccagcgctggggagacgcccccggccccttagtcgcacctgcctaggtgtgctcgcacggtgggaccagggtgggcaacagatttcgccccgggcaagttcgcacgcggagctcccagcgccgcgggtctcggagaagacgcctgcctccccgcgcatttccggtgacgtgctgccgcgccgcccaatcagcgcccgcagcccgcgggcttgggattcaaactgctgctcctccggctggcggggatcagcgctggcgcggctgcggccgctgctgcctacgcgccatggagcatcgcatcgtggggcccgggccgtaccgagctaccaggctggtgagtgagtgtgctggggcctgggcggagcacccggtgccgcgagcccccactcagcgcgcggacagagtgcttgtcagtcttcgcttccgcaggccagcggggctcgggtgtggagcatttcagctgggactactggggctgccttttagtggacgagcctcaaagaaaggctaacggggcccagagctcagccggccgggggttagtgcagctttgtccatgagatgttgactgggttctcggcagtagatggcgcctctctgtttaaagaccccaagaccaggctgttccctgccttttgtcctctggaatctaaccgacccggtcggtaacctgaggggccaccacgtaccccgtaacgctcagcgttcgcggcagtccaggcagggcgtgtctccttcctgagtgacacctgatgatacctgacggggtattcgaataaacggtgcccagaacagaggggcatcgcgctggccgcatttccggcccctggcgtttctgtttctgtcagcaccgatccagatgaagagctggccaggacagatgttttaggagagtctttgccgactctgagttcctgtttttttttttttttttttctgggagaaaagctttggtattgaggtgtacttggtctgctttgacttggaacaataaagggtgacagtttggtaatgtctgtggcaagtttttagaggactttctgtggaagtgtaatggtaatttgggaggacagtaacttgctccttggtctgccgacctctctggccacatttaacatgggaattactctcatagttccat

SEQ ID NO: 14456 - DNA, 1220 bp, Homo sapiens
tgagatggagtctcactctgtagcccaagctggagtgcagtggctcgatctcggttcactgcagcctctgcctcccgggctcaagtgattctcgtgctttagcctcctgagtagagtagctgggactacaggtgtgtgccaccatgcctggctaattttttgtattttagtagagatggggtttcaccatgttgcccaggttgatcttgaactcctgagctcaggcgatccacccacctcggcctcccaaagtgctgggattacaggcgtgagccactgcggctggcctacctttaatttttgtaggctgtggtaaataattataaatttttacagtagtttagaatttgccttttgtaatatacctaattcaaaatggaaatctattctcgttttcctgttaatttaattcttttactatataaggggttatgcaatattcaaagattaattgtagaactactgtatcataggttcatttaaaaatgtattaatgacttttgtcttataggacaaactattcgagagaaaagaattgtagaagcagcaaataaaaaagaagtagactatgaagcaggggatattccaacagaatgggaaggtaagtttctgcttttagtagaatctcatgggaggtaagttatataacagtatacaaattcaataagagcatatatagttatatactgtttctctttgcaaaaaagttttagtgtctgaatgtttgaaactttgtttttttaacattgcatttctttgaaagttgtgaaggtgctgaattttagtaagcagatgcatgtatagcaaaaagaactattaagcattatcagagctgagactaaggtgaggcaagccaaaatcctaagatgcaaaatttaagcaggcactcactttcatgtagtgacccagcacttgcacaatcctaggatttgaatcctgtttctggcactcattacacacatgaacttgcaaagtaacttaaacttttagttttttcttttataaattatgcataatacttgctgtagataccatttggagtattttttcaactcacaataactctatgataactgactgcctgttaagacaaggatggatgctcgatccctttcctaagactttgaagttaaaataaaagatcaaagggagacaaacagcagcagttggtctctcagtgtggctctaacagtaacatatgaacttagtagcttgtaagt

SEQ ID NO: 14457 - DNA, 1601 bp, Homo sapiens
cgcctcccccagccccagttttcataagactgctgtgaagatgtttgatataaaggcttgggctgagtatgttgtggaatgggctgcaaaggacccctatggcttccttacaaccgttattttggcccttactccactgttcctagcaagtgctgtactgtcttggaaattggccaagatgattgaggccagggagaaggagcaaaagaagaagcaaaaacgccaagaaaacattgcaaaagctaaacgactaaaaaaggattgaaggactgaacaggctttgcaaccagaggaaaatcatttggaaaattacacagctttggaagaatccactaaagtttcttctttggatttcttgacagtatgatttagtaaatgaaatttgaccaaatggaagaatcatgttagttctgacctcaatactatagtaacttttaggcgtgggtgtagaagtttataggtttctattgacagttattgtaaattagcatttactgtggtacaaattctttataactgacttagtcatttgccgcttagcagtttatatactgaaatgaaaacatcttgtggggaaaagtgactttagattatgaactcaattcaaatgaactctatttaaaatggggtcctattttggacaaaggaaattaagaatgtaaaagtcagaacagtcttgaggtaaaaagtgtgctttggcttaaaagggatacagtatattaattacatcttttattattattgtttatttcttagaatcatttctggctttctcaaaacaaaataatattaatgagtacttctatttgctgcatttttcttattacagcctttgagacagctggtaattataagtcattttccattttttaaaacataattttataaagaattctcttatctcgactatgtagaataccacctactggacagaacaatttttgtactcacaaacactgccattttcttagagatggcttgagaggagtaacactatggtttaaagcttgcagtaaaaatgccaaacactgtagtaccttggaacccagtttattcttgtgctaagcagaactgtaaaatagttaaaatgtcttatcaagtaattcgccgattacaaagacaccatttgttttttatttcattctttgttttaactcatgtggtagtgatatttaatactttctgatcaaacaggttcaaagtaaaacgttaaatttcacatttcttttaaagaactcttaaagtgtaacagttacgccatacttcataagtggtaaagaaaggtataaaatttggaaacattttgttgggcatagtagtgattgggtgaaaaggataaattatatcaaaatgagaatgtgctgtaattggaagtagggagctaaaggatgtttctttcagtttagtagaactggaacgttttactattaaacatggcttttataaatgcatggtccaataattttattcactgttagtatttaattcactgtcagcttattaatgttttctgtacccattaatgaattttaaattacaaaaaattgtctagcagctacagtttaaaaatgaaactagacattaaaataaatttgataatt

SEQ ID NO: 14458 - DNA, 1161 bp, Homo sapiens
tcagagactgacagcgcgaggggcggggttgggagtcaggatggggcgaggcctgcgtgtgactgatggcgcgggggcggggcggcgtgtgtgtgactgacccgaccgcgcagaggcggggtggcacaagatttgcgtttccttgatgacttctaaattatgattatagattttctttgtaatgaggggaaaggtttttttttttttttttttttttcccgtttttgaaatccaggcctctgtattgcttcactttaggtattaagtataagcacaaaattaaatgtaacacataccaaattgtccaacttcaaaggccattttgtttttgtttttgtttctgagaacgagggggccacagtaaaaactttggtgatttttaccagtggaggggctagggaggtgatttttgctgtttaaggaggttctcaaatttacttacctgcagtccattttcatttcagaattgctaccagaaagaaattgtaaaagttttcaagcatgattttgtaaagcaaaagatcaaaaaaggagagaaattatgtggaaaattggcaagattaattatatctctattaagaccacctttgcgcaagatagttttgggttattactgctgattttcagcctttaaagaaaaatgtgggttcttggtagcaacttacaaggatggtgtttagagctatagttcccccttctccaccataccctgttttcttgatggttaattttacttttaaaaacatttgtatttcttgactatttattaattagatcattttgcttagtcatacctaagagttttgttagtcttcggtttcttagttgtatgagtcagagtcaggaatgcaaatttattagctttttgtggagagggatatgtgggatggtgagagctgcgggtgggtaagcatggagtgcaataccagttcatagacaaggatctaaaaggagccattaagctccatggaaaacattgttacttgatcaggccagtaaaggaagactattttgagtagctactgaagttatctgatagttaatttaattgatttgagtaactctttcagggaccccagatttgtaaaagtggcactgttgtgacttttgataaagggagttttagcctttcatgagaggaagccttggacttatttgtcc

SEQ ID NO: 14459 - DNA, 1537 bp, Homo sapiens
tgtaaattacctttgtgtgtacatttttactgtatttgagacattttttgtgtgtgactagttaattttgcaggatgtgccatatcattgaacggaactaaagtctgtgacagtggatatagctgctggaccattccatcttatatgtaaagaaatctggaattattattttaaaaccatataacatgtgattataatttttcttagcattttctttgtaaagaactacaatataaactagttggtgtataataaaaagtaatgaaattctgagaagagttttatcttaggaaaatacatatatatgcagtgtgtgtgccagtgtggtattaacaagactaatagtgcagtttgatccttaccaatatcattacttaatttgaagtgttcattagcaccccaaaatataccttttctatgtactgttaaaagaaattggcttctgatgcatgaacatttacatgtacattgaaagtagtccataatagaagttagtttaagccaagtgtagacagtacattactcccttgaaaaagaattaagttgaaagagttgactttgccttaaaaggcagatctaacccaagctccatccagtaccaaatgtgaaacttcattgttgtttggtgagaatcgccaaattctcactaatacattggtatggtgtagggcatgctactttttaaacagcagcacttatttttacagattgctactccaaggaagaaaactggccacttttcatgtaaatattttgttcaaagatttgtatatctctctaggagttttccctcagttcccaggatggggtccaggagtagattaacagctaaaaatctcccaaggatatcttgttttgatttatttactccagggaactatcagctccttcacaggagccaaaggggagctatgaatagagggtcacatgagccagattctttactgttcataaaacccagagagtagttgtgaaagatcctaatacaattgtgaaaagctctgtaaacatgaaatctaaaacaaatgtagattttcacaatatgcttattaataaatgaagtctatggaataagttttagagataatttacttcagtcacctttgttttggaaaggactcaggttttcttgcagctgtaagatatattctatttgtgtttatttcaaagggaagaggaaggatggagaactgttacaattgaccttgcaaaggatatttaaaaaaaaggtagtttttgagattaaccaactttcaaagggcaataaagacatgtgaatttgctcattttaaagcacaacagatgattagcttcaaatttattatttgcattggatgggtactgtctttggaaagtctccttatagacaaatatgctgccttacactatgatggcttcattctgatcaggtattttaaaaattagtaccagaaaagatactggaggtaatataatacagtccttcagctttacagatagtgaaaactgaaggccagaaaaggaactaaaactcagcagttcataggggtagagggaa

SEQ ID NO: 14460 - DNA, 1185 bp, Homo sapiens
ctgctaaaattgaagaccttaaagagttatatctgttgatatttactgtattataaattaaaactgagaaacttaaaaatattcgtgtaaaaaataaaatactcatcaacatagcagttttggaaatgagcaatagtagctatttccaaaacaataaaaattagtgagaaaggtggcattggcttgcatttttagggtctggctatttaagggaagacatctaggttttcatatctgcttcttcatttactctgttgtgatacatggtggacattatatgaagaaaacctcgtttcacactgacagataattgggtaaaggaggacctcataggtcccagaaagggtcctagctctaccaggggtccatgggccacactttgagaaccactgtttaagcagtcattcagtgaaatcgtattcatttttgtcaagtgtataattaacaaggtgatttgtcaccgtgaatgcattccttatctattgccttgattccatttgtttaattttttcctttcagattgcaactcagattgcagtgctcattgcaaaagttgctagattggattgtcccagacagtggcctgaactaattcccactcttatagagtctgttaaagtccaggatgatcttcgacagcacagagcattacttaccttctatcatgttaccaagacactggcatctaaacgacttgctgctgatagaaaactattttatgatgtaagtgatttcacatagttaaatttgattatgaaaattgtgcggccgggcgtggtggcttatgcctgtaatctcagcactttgggaggccgaggcgggtggatcacgaggtcaggcctggccaatatggtgaaaccccatctctactaaaaactacaaaaattagccgggcgtggtggcacacgcctgtggttccagctactcaggaggctgaagcagaacgatcacttgaacccaggaggtggaggttgcaatgagccgtgattgtgtcactgcactccagcctgggcgacagggcgagactccgtctcaaaaaaaataaaataaaataaaaaaagaaaattgtgctacttgtaaaaaaaaatgactatagttttacttctgttgatgttttttgaaagacttaattctttctcattttaagctgggcagtgatatgaataaaaagatcacttagttgcc

SEQ ID NO: 14461 - DNA, 1178 bp, Homo sapiens
ggccatccttgtgggcgtagcagaaggaagaataaaagcccttccaggagagaataagacaaattaacaaacagaatatgaagagtattattagagagcagattagctgatgagctggtggacattgttctgaatgtacaaaaaaaaatcgccagggaaattatcagaataaatttgtcagaagatataggaaaaatgataatgagtgtgttactccttgactactttattttacacatgtatgttgcttgaaaaatacttcaactgtgacatttagtttttaaatgttatccatgattcattgctaaaacgactattcttttactataaaagtgagttcagttcatatattagggttaattttatataatatggcacagagggctactgtgtctgttactcagtgtaaatcttggtattgctttttaaataatgaattcataatgcaaaatatgcaaaaataaaaccagcaatattatttttgtaaaaattttgatgttgtcttggttgtgaacttattaacttctaatatttgaaatgtatttttaacaggtagaagtataggtacagataatgtgtgtagagatagactggaaaagaccatcattctttttactaaagtggtaagttttttaaaaacttgttttctcaaatataatacacatattcagatttacaaaggaaaatgatatttttataaccatacattttcactttagtgtaaggaaacctatgttctgactccttataggaaagctaaaaattgcttttatatgtactttagaatgcatataataattaaatttacataccatgtgtcatagtgtaagtcaccttggtacatgaaaaataaattctaataaatattagagtatttgattcctctaaagctcattattctttgacccactggagaaagtggagataaagaagatagcagtgcagttcagctagaagtagatcaaatgtagcagacaggaagtcagtatattcagaatgaccatcagactatcttcgtccatactaagcatcttttgagtggaattatagggggtgcgctgtggtaggcagtgtgtataattacattttataaaacattaacttttaatgatattttggtcttgaaggattgggagaagtgcaaataattgggttacagcagttagaaagacctagct

SEQ ID NO: 14462 - DNA, 1215 bp, Homo sapiens
gactaattgaatgaaattttctttgacagatttttccaccatgagattagtacagaatctgtgtgagaagagaggcagaagcaattttgttactgtagaagagattacaaagaacttttgtaaattgcaggtaggagagacttgttttgcttttttgacagtcttgctcctctctgtatcccacagctggccctgaaggaccctgttcatacagtgtcactgcagcagttcatctacgagaagctcaaggcacagcaggagatgctaggagaacaaggtttccagtccctcatggaaacagtggatacggagattgtcacccagctacaggagtttttgcaaggattctaagagcacatgacatgtggctgcctcccctttcagaaacaagctgagtaacccagcctgccgtttgtatgtgagagcctgctgagatgaagaaatcacttcatgaaaataagcaaagaccacacattttttactacaaaatgtaaaggataaatgtaaatcctgcataactaaaatcacaaacctattcctcaaaagaatttaattttatatttatgagggggcccttcactaaaaagtacatgtaaaagtacatttgatgacaatagctgcttagtttcctgttaagagaagaaactttatcttttaattatgtgctcttaatatttgaagatgagagttaatacctgagatgtttttctgcaaccaaaattcattaaatttggctgccttatcctttttttaagctaatgaaactacaggtttgaaaaatgacaaagctgttcagatgatgctattaaagaaatgtgtgtactaagcaaaaatatataaatagtgacaaatacacattaccaagcttatcttgcaagggagttattttcatctaacatagaaagtgtgttttatcagacaaatgcttttattttcattctaataatttgatacagaaattagtaaaggcatttttttctttttttttccagtaaatacattgggtctataaatgtgcatttgtaagggccacaaaagtgaacgtgtggtactgtagtaccacgtgggagacctctggttatggtttagtcctagttcctttgttactcctgtgagcaccgagaagaactgggcgactcccagtcccacctgtgctgtgacagtcccacgtggctatgacagactgtttagtacttacccttctcaggttcctca

SEQ ID NO: 14463 - DNA, 1815 bp, Homo sapiens
tcagtatgtattattatccataggtcttactcatccagttccactgaagaggacacttcaaaacaaaagaaacaaaaatatcagaagaaagaaaagaaaaaagaaaaaaagagtaaatcaaaaaaagggaaacatcacaaaaaggaaaaaaagaagagaaaaaaggaaaagcattcttctacacctaatagttctgaattctccagaaagtaactgagactttggcttaagccgttaaatttaaaaatttgtttttaaaacgtgtttgcccttccttggaatttgctatatattatgctttgcaataaatcacagccttttccatatagacatttttcgtatttgggaccattatccctctggcaatatatttttaatgtgctgtaactgtaaagtattaaatcagtcttgttacttgatagccatgccccaagtatagctatttgtgtatactaaacacatcatttttggtatttgtgtctctgtgtgtttggctagtgttactacttcataagttcattgtaaaatggctttactgccatcaacatgggtcatctacctagcagttaatgagtattgctggatcaggtgtccaccttccaatgatgaagcaaggtaaggggtaatgttttgctcttgacacagagaaatttaatagctttatgtactaaaatataatatcttttaaagatagtgaaattcttcagttttttaaatctctagggattttttttcaatgttgtagaagatgcagctgcttaatggtcttgactaggactttttaaatgaatggtgtctgcaggtagatgatcatgaaaatatctctaacaaagttttactcttctatgaaatgcagaatttctagtacctgcctcctttgtttttgtaataattaaaatacttcttgtataaagagattagttcagcctgttagtaagtctgcagagatgatgctgagttggttgtgatttttagaatagactcctgggttgttttacaaatgtgccatattggcatgtcttacagtgatacctcaaacacagaaatttttatttaggaagatagctaaatctttattagaactgatttttattgtattcagtataaattttatgaagcttgtttctatgagtactgtggaaaattttataaatgtgagcatatatatttattttgtctgacataatttgtagttttaaagcaagtttcacactgaacttaacgttttcataaatgaccagtttgggatgtttctctcttttactttagtggcaaactcaagagtaaaaagtgtcaaaaaaagaattgagaattttattctgtactttttaaaatttaagagccagggagttgcatcatgaaagcctttgtataataatggaaattttatatgggtaagcattttcaaacacatattagtagatacgttttttaaatttctattttcacattgatcagtgttactttgcttaatacttaggtagcccttatgtccactaaagtaaatgcttatgttgtagaagcatcgaacatcaaccaatgtcatggcacagcaccaaagattgcaaatacctcactatggtgcgcttagaaattttcaaattgataacctatagatacggctgcaggtgaattcatgatagtgaaatcagctaagtatacttaacctcacaggctagaaaggtttactgattcttgtttcacctggcacccaatgtggataccctcagtaagactcagggagccttataactcctcttaacatatgcttacccatgcttaaattctagggaagctgtatccacagccctctgc

SEQ ID NO: 14464 - DNA, 1176 bp, Homo sapiens
tggaaaactgtggctaatagaatatatttcttcaaaatttagctttactatttttaagtgtatgaaatgactggagccaaagccaaataagtgtctgttctaatgactaagaataatttgcagtttcagtggttgcatgaaattaaatatttctaaagggcttaaaaataattgtttcattcttcatttgtttatcaagtttcttttttcagtgactgcacagtattaatctttattccagaacctttctgcccgatcacaagttaataattggtaaagtctgaattgaggctttactttatgtgaaaggagaaataagattagagtcctctctggtttatggattatcagtgtgggattacagacaccccttcaccccactcacttattcatgacaaggtgcctctcccacatgggttagctttccttcattatttatttcagtatctttctactacctgataaaatctcttagaatcatagaattttatagctcaaagggattttgtccaacttcttttctttatagatgaggaaactgagcctctggttaagtgacttgccagactgacttcatttcctttttgataggattgcatgatagggagatgccataataatcgtatcttgagttcagaaaagcaaattgtgagactctctcatgatattcttgtagacaacaagaagaaatgtgatctgggagatagtacagtcagatagatttatagctaattgaatacttctgaccaaagggtgctttgttgtcaactcatgccaatttgaactagtaatttgaaatgtaataggagtacatgtaaattctgtacttgagttcaataaaatcagctgaataggtatgacataatagcctgtgagtcctagttgaattactaagaataagatctctggaataaggattttaacatcctctgcattgtttagatcatacttgcagcattttatccagttgtgaacgtacttaaggaagatcttgacaaactagatgcatccagaggaagggaaatggtggggaagacgggaatgatgccaaaaaccacctaacatagggaatgcaatgaggaactggatataataatactttagagaaataaaactaagtgaaaatatgatcctagacttcaaatatttgaaatatttttatctggaatattgctc

SEQ ID NO: 14465 - DNA, 1328 bp, Homo sapiens
attcagtgttgaataagaagttaaagtttctagcataactatcttgagtgcattaaaaatgcttttagagcaataagataagcttctagctgactgcctagaaaaacagaagatacaaattcagtgtcagaaatgaaagggaatacactacagacactatagttattaaaaggctaactagaaaacaccatgaccaactcaaggattgtatatttaacaacttagatgaaacagattccctataggatacaaactagaaagctcactgtagaaacagataacctaaacagaaccatatttattaaggaaattgagtttgtggttaagttaaaaaccttccagtaaagaaaactacaggcccagataacttccgtgatgaattttaccaaacacttaagggagaaataatatcaattctaaacaatctcttccaggaaacagaagaggaggaaatacttcccaactcattttatttgaccagtattacccagacaaagatactataagaaaaaaaactttaaaacaatgtcttcatgtgctaacatctgtagttaaattagccattctttttacatgaaataatgggaattggtatatttcttccatttcatttttctatttctttgctaatataccacctgtaacaaattcaatctagatgctatctgtccacttgcctacatttccattctattcaagccatttttgctcttcaagtaccttgatcactttggaatcatagcattgcaagctatttcaaaaaaagttgcgtggttggattgtgctagctacttttaaatttataaaaaatgccccatatattttcttgcttgtctgggaaatatagttgctatctaactagaaaaataagagggcattattaaagtaactctttaagcatcgtactaaatgtttgacttccattaaccatatttcttgtagtagctgtagctattatgatactgtgtaaaacagaacaggttctatatatgcaaatgacattttcatttaatgtaccaaattgtgtatctaacttttataatataggttaaacagatcctttctaagatggcattatttaatctttacttaaaactatgaaaaatatgtgtaagttattgtttataaacagaagagactataattaaaatatagagcagattccaagtgaccatcattttactttttagatttaaaacagaatgaaacagaagatttagtcataagaagatgcttgaaaaacaatccaagtatccaatgcagtggctataaaatattatttcatcatttaatcttaatcattttgaaacaaagacagacttcaattt

SEQ ID NO: 14466 - DNA, 1088 bp, Homo sapiens
atgctcaggttttctgcatagttcttaactaatcttgtctgcagtttggtattgataatattagcatggccacttatgctaaatacacaataagatacatttagaaatccttaatgtactggttaggtcagtggtacaactgtttgacttaattatcacaatttccccaatggtaaccttaccttggaaactatcaaatataaatatactttaactaagccagtgacctggtcctaagttaaggattttctaaatggtatttaattgtgtgcccataaacactgattttttttaaaaagaaaacttagtaattatttgatggataacaaaaagcatctatcactaacattgcttgttcatgtaatcttctgtgataatttggcttggcatgccagtcttataattaacataatttaaatttgatgcaatttaaatataacaggagacttaaaatattttattataaattagatgccatattagttagtggagaaaaggggcattaggtattaattgcatgggtctaactacattgatgatgagagtttaattccaactagagtatattttttgtttattaataatgaaattggtgctgacatgtaatgacttcacaagttttacgagggaaaactgaaaaaggaagtaatataaattttgtggggtttttttgagatggagtcttactcttttgccaggctagagtggtgttgcaatgtcagctcactgcaacctccacctcctggattcaagtgattctcgagccttaagctcccaagtagctgggattacgggcgcccaccaccacgcccagctaattttttttttttttttcttgagatggagtctctctctgtcgccaggctggagtgcagtggcgcaatcgcggctcactgcaacctctgcctcccgggttcaagtgattctcctgcctcagcctcctgagtagctgggattacaggcacgtgtcaccatgcccagctaatttttgtatttttagtagagacggggtttcaccatgtttgccaggattgtctcaatctcttgacctcgtgatccgcctgccttggcctcccaaatgctgggat

SEQ ID NO: 14467 - DNA, 1188 bp, Homo sapiens
ttgatccttcttgtatcttgaagttttgtacttgggatttctggactgataaatgaatcatcacattcttctggtaaatattttcttggagctctgtgtcaactttgatcctttgtctcccaggaaggtgtgacctctcctttgcctgcatacctcaaggccaggggaatatgcctcagtgatgcatttatctttgtatatcaggccgcatgattcccaactttctgccacacttaaattacgttcctccatttcagttttgtcttttctgtctaaagttcagtcaaagagtatcaaaaaattatgtttcagctagactggtgtaatgtataagtttttgtatcttgtattagaggatttcgtagcttttattagaggctcatttccacctcagcatacaagatcgttagtcttttggcatgtgtgccaattagaatactaaagcaagtccaagcacatttttctcttctcacgtttctaataagtgttagggactttgcctcttttacttaccacgtccccaaaagtgtcaggtagacatgtcacaaatggctctgtagagagccatgggaagagagaggaggtggatgtggaacataaagggttcagaaactccagaagaggagtgggttttggatagaagcatttgaggacagctgctccaaagccttatgtgtatgatgaaacttaaccacggggaagagactcttcagtagcctgttctgtctggtgatttttattttaagtgaacctttggatctatctttaactctctttattgtgagtctaaattccaattctgcagcagatcagtaaactcacagtatttttcctgtggaaatctattcaataaggaaaccaagacaggataataaaatttaaaaaaaaaacaactttgaattcccctgcctaggtcttccagttgttttccagcgcatacctcaggtatgactttgctagccggggacaaaattagcaccttccgattctctagtccaaatgaactttgtgctaaataaaaaattattatactacataataaagttacagatagcaggaaatgcaagagctaggagattcctagattatatctgccaagcaaataccttaaacatccacctgaaatcctactaccccctcttctgagataatttgcccagcccttctcttcccacacactcactcaat

SEQ ID NO: 14468 - DNA, 1242 bp, Homo sapiens
atggtgtgattaattttaatatgtaaaatgattgctgaagttgcagtgttagccctctttgtcacctaagttaatttttatccttattttgttaagtgcataacatttaaattttggtcgtgttttattttgtcagttttaagggttagagtttttccttaggaccgtgatttcagtttattaatagctttactaccaccaggtggcagcaagttgccatagtaacagctgtacaatgagaacaacttttgagatttaagattatctaaacccacatcctttacttcagatgataccatgactgtaaatggaagttcctaacttatactacactatcttaaaaatactaaatatatatattagcaaatttttgaagatttttaaagatggttttttaatagaaaataatttgagataaaggaatatatgtttcccatttttaaaacttgtgctttagtagtttatttttaataccagcctttgactagataataaaagataatcgtagacatttattgtgcactttactgtatgccagacatgatgtcagtagactttttcatgtctcaccttatttaatcctcacaacaggcctgggagaagattattatcatcactgttttaaaacatgaggaagctgacgctctgtatgagaagtatagtagcccttttcctttattttagagattaagtttgagaattctctagtacttgtacttacttttaaaaactacctcagaagcataaagttgaaagcagtagtatatgttaaaacaaggctcaaaataaacagatcactgctggatttcagcacattgaaccacagattgaagaattaatgtaacctcctttgctgtgggtactggtttgagccttgtaaccacacctttactgcaaagtgattttattgattctgtgtcacacatgcctttgtgtttctgtgattgtttagacattacctttcacagcaccaaatactattttcattcctttttaataacgaatttactttttttgatgacatgggaatgtttaactttttctcgggccattttaagttgtttggtgtagaggaaagttcaagtgttcacattcattcctaaatatatatgtatatattttttgaaacagagtcttgctcatcgcccaggctggagtgcagtgtcatgatcttgacccactgcaacctccccctcctcggttcacgtgattcttgtacctcagcctcccgagtagctggga

SEQ ID NO: 14469 - DNA, 1601 bp, Homo sapiens
atggatatttcatgcatacccatagagaagtgtgtaagtgatatgtcagaagagcttcttactgatttcacctaaaatgagaaggaagtcctgttttcaagaatgacattagagtcatgcagctttgggaccatcagttttatactgtgataattgaaaatgaaacatgttcttattttccttaaattgaagaaaaccctttagttgtctacattggatggccttattacctctcaatcatcttttcataaatgatgtgcagaaattgtacttaaggacttaggagtatatgggaggttattggttttatgtttaaggatacgtttacttgagtttaagatacaggtcatccatcattcttaggctcactttttacagaaagtatgcaaatagtaaagtgacagcactgctaatgtttttccccagtactataacttgtggtttctgaactcattattgttgtatttccaaaaaagtaataccttttaattagtgtattaaaagttaagtataattattttaatgcaatctaatacaatcagattactcagttgccttacctcatgggaagagttacttttttagatctaaaaagctgaatagcatgttagttacttggtttcaacttgagttttcttttaatgttaataagattgaaactttagtatttagtggggaatggaaagagttgcccttgttgcaagtaatgaagcctgatttgattatgaagctgcttaatcactcttcatgtgttcagaattactgttttttttgtttgtttttcctttttgtcactgtgtacattaaaattttggaagatgctttactatgtaaagtatagatggtcattttaatcattcagccacatacggttggctggtaaacagcttattctgatacaagaatgcttgggtgcatatggaaagattgtgaaagagtgtgtcttgcatcaacagctgtcttatttatgatatataagtagaaatagagcaaatgttggaatctgttatttttagtaccatgtctttaataaagctaagtattttagaggaaaatgtttgtttatgcatttcaaaaaagcattttagttttatcctgctcattttagttgtcatagagattgttgtgacgtggagagtgcatgtttgtgtggtgtctataaaacaagtcatttaaagtatgagtgttttcttgtactctggacctattacatgtttctttatgttggtaattaacatttaatttggttcttgctgctaattattttctctgctgatatttattaagctttaaaataatcgtactataatcttgaaacactgatttgtaaaaactaagaatgagtaggaatacaagagatctggaggaacaaatcagattgttattagggtttgactttttttttacatgggcttatggaagcaaggcattctagggtctagagggatgtgtgtgtgtgcttgtgtgtccatgtgtgcgcatgcgcacgtgtgtatctgtttgagacatactttctctgttcacttaaaagagctcatgttttcatttgtttattcttttctttcagggtattttgtttttttctttaagacttctttttt

SEQ ID NO: 14470 - DNA, 1194 bp, Homo sapiens
agactttaagactttaaattctctcatggtttttctttgagtttaaactcagatagtgggatagctcctgtagatgaggctttaaataattgccacatgtccttgttccagcggcgaccttacactcaagtgtgtgtttttaggggcctctttgtttttggaactcagacccacagagtttgtggacggatgtctgcatcatttcaatgtttttatttattatgctgcaagctgctggttttctctcctcttctctgcttcctctttctgtcctcctctcatgagagggttaatgctgcattgtggagttagtgcaatttgttcttctaagagatggcaaaggccccatcaaagtagtctatagtcaagttctagcaatgacagtgattccttcagagcctctcttgatatctctttagggatcttctgtggtgtttaaaaggaaggtgaaatatgggttttaaaaaatgataaagacagtcttaccagttgatttcataatgagaggtgtaagccattgctgggatacatcggaaggtgctcgctttgtactcctgaaaaacctgtaatcagatgggcactgtcttgaattgttaaaatactgttacctgcagtttttagaaatttattttgacatttaaggacatctgaaggtgtatatttaattactactgctgctttcttttcatttgaatgaaaagtggtggattatataacaattgccactaagataagttttcttaaatcagtgtcatggatgttcaaaattttgtttctaaatgtgtaatacagattaataacttaaactgttagatcttgggcagtcagaataatttgaattttgaggggaagctttaacagcttcccacttaggatgccctagaaaatgagggcttgattacagcaaggttttatgtgtatggcttgttttaacccaaattcacaggctggagctatatctctggcagtgtttaaagtactggggaggtgagtgggttgagccaaatcagcttctgaggtttaggcttcttttttgcagtgtttctttttctttcccttgcctgttcacttgaacttctgaagggcagaaaaggaggaaatattgttagagtactaggtgggtgaaatgtagggtcctggagagcaagggtattatctttgcactgcttcacataacgagtgctggtaaagact

SEQ ID NO: 14471 - DNA, 1297 bp, Homo sapiens
aaaccctatctctactaaaaatacaaaaattagccaggtgtggcagtgcgcgcctgtaatcccagctactcaggaggctgaggcaggagaatcacttgaacctgggggcggaggttgcagtgagccgagatcataccatgcactccagcctggagcgagactccatctcaaaaaaaaaaaaaattacaaagttggcctcaaggaagtggagtctagttttagggtgggcaagtcagcaattacaaaagtgcaattaggtttgagcagaggaagcatgagagcacctaggaaaggagtctttagctttgtcttaaatttcagttatattaattatacagtacccatctcttttccactcctgaataacatctaacatctagaaactttatgaaaatcattattgatttgagcatttttaacattaacttgttgccttagacaccaactctacaacattacctgtcatatactgaagaatctcttcttccagttatgcagcacctggctaagaatgtagtcatggtaaatcaaggacttacaaagcacatggtgagtcaatatagtggcattgtaagatgctgaaaagtgtaataattcaaacttaatgcctgcaaatgcctggtttatttttaatgagttaatgttttaaatgaatacctgtatcattgcatcttgtgattttttttcttttgcctctttaattgctatctttttgtcttccagactgtcaagaacaagtatgccacatcgaagcatgctaagatcagcactctaccacagctgaattctgcactagttcaagatttagccaaggctgtggcaaaggtgtaacttgtaaacttgagttggagtactatatttacaaataaaattggcaccatgtgccatctgtacatattactgttgcatttacttttaataaagcttgtggccccttttacttttttatagcttaactaatttgaatgtggttacttcctactgtagggtagcggaaaagttgtcttaaaaggtatggtggggatatttttaaaaactccttttggtttacctggggatccaattgatgtatatgtttatatactgggttcttgttttatatacctggcttttactttattaatatgagttactgaaggtgatggaggtatttgaaaattttacttccataggacatactgcatgtaagccaagtcatggagaatctgctgcatagctctattttaaagtaaaagtctaccaccgaatccctagtccccctgttttctgtttcttcttgtgattgctgccataattc

SEQ ID NO: 14472 - DNA, 1813 bp, Homo sapiens
atctcactcagccacccaggctggagtgcagtagcaagattttggctcactgcaaccccaacctcgtgggctcaagcgatcctcccacctcagcctcccgagtagctgggactacaggcatgcactattgtgcctggctaattttcagtagagacagtttcactatgttgcccaggctggtctcaaaaggttaatcatcattgagatgggctgtaaatgtaaaatacagacagaataatgtgaaatatgtcattagtaatgttaaactgactgcacattgaaataatatttttgatctattgggttaaataagtatattaaaattaaatttcactgtttcttttctgtaatgtgaaaacgacattttaaatgatgtcttttgcccttgtggcttacattatattccttttggacagcacctctctaaaatgttagtaacttcaaaaaattatttatttgcaggtgaagaaaaaactccagaacaaattatgcaagaaaagcaaatcgaagcgtatgttatatttaaaaattttgtttatggtctttactaagatttaatcatattttctattattttgttgttagatggagtctcactatcatgcaggctagagtgcagtggtgtgatcatagttcattgaagccacaacctcctgggctcaagggatccactggcctcagcctcctgagtagctggaactacaggctcattgtaccacacctgactttctttcttttttttttttttttttaaatattttagggccaggcacggtgactcatgcctgtaatcccagcactttgagaagccaaggtgggtggatcacccgaggtcgggagttcgaaaccagcctgaccaacatggagaaaccccatctctactgaaaatacaaaattagccgggcgtgatggcacatgcctgtaatcccagctactcgggaggctgaggcaggagaattgcttgaacccgggaggcggaggttgcggtgagccaagattgcgccattgcactccaacctgggcaatgagcgaaactccgcctcaaaaatatatatatattttgtagagatggggcctcattttgttgcccaggctgttctcaaactcctggcctcaagtaatcctccaccttggcctcctaaagttctgggattgtaggcaagagccactgagcctggtcataatctcatttttctatgctatagcattgtttttatttttcctttcctttatttttccaaataacttgtgatgcatatattgggaagttgttaatttgggatggagatttatatgtacacaagtgatcacattagaactttctggcctccctttttataagatactaagtgaagtagctgaggggcattagtttaccaaatgtgtaaatacacattggtatattgagcctgtagaatacttgtatttagatagaggtgttttacttttttaagggcttattttatacatttatttcaataatgtctttttctgatattgctgaaattcttttgctcatgtttctttgatagtaaaattgaagacctggaaaatgaaattgaagaggtaaaagttgcttttgagataaaaaagcttgcattagacaggtaattattacattttaaatataagcattgtgaactgactgcaaaatgggtatgaggggaaagtggagggaatcttttaactgggctgagtgaattagtcaagcacagtgatgattagataatggtcacacaaaatttttattttattattgttataattttttaatttgacaaggtctcactcttgcccacgctggagtacagcg

SEQ ID NO: 14473 - DNA, 1270 bp, Homo sapiens
tagttaaagggactagctaaacagcacaatgtaggtaaatgaaagatggcttcataatcatcacactcatggtgtaatttaaaaatcttctcctttggttcttattaatgcctgcactgtgaatctgacagattgaaaatggaagccctgactgacagggaacatggaatgatagaccctgacagcggagatgaagcccagcttaatggaggacattctgcagaggaatctctgggtgaacccactcaagccactgtgccggaaacctggtctcttcctttgagtcagaatagtgccagtgaactgcctgctagccagccccagcccttttcagcccaaggagacatggaagaaaacataataatagaagactacgagagtgatgggacatagaagccagcctgctaatcagattgctacttcacagcttcatttttgtttcattcagtggtacttcagcagagttaatatgcttttctgatgaattacacaacagtttgttaattcttcattcttgtagtatttcatcacaagaaacctactcttctgtcatcttgaagtaaatagaagatcaagccttcaaatctcttaattttttcggtatttattaaatctgtgagtggtttaaggagcggtcagtgtgtataaagtgtgtttgaacattatgccaaatatcaagatgtgaaggactaattcaggatgcaaaaacgttattggggggttgtaaatatcaactattcaacagtttaggatgcaattacgagtgtaaactgtgtgccttatttacactttattgtctcccgcttctcagatagttttgatgtgttgtacagtggaatatcttagatactttttggaaagtatttacataagttatatcacaattaaaatgttgaatttaattttgtttctcctgtcttttaacattatctagcacgcactcgctgccatgggtccttaagcacagtgcaccaatctccctcccccagtgtcaaacttttcaaaagatagggaagaggatggcaacgttgcgatgagaactgtaaactctttccaaaagagcccagtgtgtggtcattgccgcgacgtgccggctggtggcaccgagcagcctgggcccagagcggttgtcgggccgacagatccgggcggggcaaagccgggcggggaaagctgggctcgtcccgtcccggccccgcccccaccccgggagcccgataccggtttcagagtcctgggcagcgtgcgcgctcttcctggcggctgcgca

SEQ ID NO: 14474 - DNA, 1270 bp, Homo sapiens; identical to SEQ ID NO: 14473

SEQ ID NO: 14475 - DNA, 1240 bp, Homo sapiens
tctctgctcactgcaacctccgcctcccgggttcaagcgattctccagcctcagcttcctgagtagatgggattacaggcgcctgccaccacgcccagctaattttttgtattcttagtagagatggggtttcaccatgttggccaggctggtctccatctcctgacctcgtgattcacccgcctcggcctcccaaagtgctgggattacaggcgtgagtcacagcccccggccataatttagcactttaaaaaataatagccatgttgggccaggcgtggtggctcatgcctgtaatctgagcactttgggagaccaaggcgggtagatcccttgtgcccaggagttcaagaccagcctgggcaacatggcgaaaccccatttctactaaaaatacaaaaattagctggggcgaggggataggccgagttccgggtgtaagggggccattagggagagcagagcgaggcagctgatcttccggattgggggccttgcccggaagctggacctcacggagatgaaacggaagatgcacgaggatatgatctccatacagaactttctcatctacgtggccctgctgcgagtcactccatttatcttaaagaaattggacagcatatgaagattggacatcacatgtgaatgcatgatatgaagagcctggttacagtttctactgttctctgcaagtaaataggcccagaaaggtataagagactctttgaatggacataaaaattctgcttgttaagaacaagttgagctctggtaactgatcttaatagctaaaatataaaaatatttgggaagtctgaaatgaggtctcctggccctggtgtgcccttaatgcctgtgacagttggcctctgtgaatattggtataattgtaaataatgtcaaactccattttctagcaagtattaataattaagggaagtatgtctgaaatggcactgtcttgtcagtcatttctgtttacccttctgtctggagtgtatttgtgaagagtcccttataacttatgttttatggacatcagcacataaccacaatgacattgaagcacaggatcattagtctatattttattttattattttatttatttatttatttatttttgagatggagtcttgctctgtcgcccaggctggagtgcagtggcacaatctcggctcactgcaagctctgcttcccaggttcacgccattctcctgcctcagcctcccgagta

SEQ ID NO: 14476 - DNA, 1240 bp, Homo sapiens; identical to SEQ ID NO: 14475

SEQ ID NO: 14477 - DNA, 1189 bp, Homo sapiens
cgtgcccagctaatttttgtatttttagtggagatcaggtttcaccatgttggccaggctggtcttgaactcctgacctcaagtgatctgcctgcctcgtcctcccaaagtgctgggagtagaggcgtgagctactgcgcccagccggttctgtgtcttttatccctttttcttctaataattttcagttttgtgtttattttatcttcactttcatattacaggaaagaatggtccagaattaaaaacttactatgaaaaatttgtaggtagataactaagaattaactctgagtgagaaactagtagttaattccttttttattttcacagcataagattttaaaagaatgggtggtgggaattttcattttaatgactggaactggaatttcactctaaaagtttggttttcattaaaattatccttgcatgcatatgaccttattgttgttttgattaaatatctagctgtccacaaccgttaaacgaaacaagttactctaaaattgccctggatgggaaaacaactatctcttctacatctgagtatgagagaaatcgtggtgaaaggagaagtcataaaaagttcaaaccaaatgtcaccagaggtcgtggatcaaaacgagttcggggtaagacctctaagaaggaacctagagcttccaaggccatgctggtgactcttcgggcttcccaggaagaagatgatgatgctgacgattttgagtctgactatgaggaagaaagctatcatcttgctcccgaagaagtaaacaaagctccagtatttgtacctgttggtctcagatctcctgaacctgtttctgctcagattgaggaaacaatggaagaggttcggtttttttttaaaaccttggtactttatcttacttggttttcacctcttgtttcttttaggggatcattatttcttctcgtagtgattattaggatttgaagagttcattctctaaataacctctaccaaatataatttggggccttgtataaccttttgtgattgctcagtccctatggcccaggcccagcaagggagtcagtgtaacaacgagagaaatctgcttacacttgtacctggaagctgtttagtctactttctgataatctttctttttttttattttttattttttatttatttattttttatttatttttttttatt

SEQ ID NO: 14478 - DNA, 1166 bp, Homo sapiens
tgcttcctattttattattataactaatgctacaaaggttatcttagtcataaaactcctactatgtttaggattatttacttaatgtaacagcatagaagtgaaatttttgggtcagtgattgtgaacatatttaaagctcaatatttattgccacgttgcttttcaaacagatcatattggtttagactgctatatatacacacacatatatatataaatgttgtattacagttttatttttactttatttttattacctttttaggtttcttgtgatcagcccttactgaaagaaggatataaaagtgcccaaaagcgggcccctcaaggggaggcaaccacagtctctgaatatttcttcaatgatatcttcattgaagtggatgaaacagaataaaacaatcttttctctttttcttttttaaattaggtctaggatttccagagtcaattacatcaacaaaacagtatttagagcaaaatatcactgtcttatttttctttaggttgattttgaatacttaatgagcttgatttgaagcttttataatcagtggaaaacatttctgaggttcctttcattctgactgattcagcattttgcaaatagcaagcaattaagactgctttctcagacagaaataacaactcttgtttacattttgactcttcctgtgctaagcacacatggacatttgggaatgttgtggatatatgtctctgtatgaattgcagtgcagacagatttgggggttaattgtatcatatttaacatttagcaacttcttttgtgaagattttttatttttagggggagatgatgaaggatgaaggctttttcatttgcttctaagtacagtcatgtatcacataatgaagtttaagtcaatgatggaccacatatattacagtggtcccatgcaattaaaatggagataaattcctatcaactagtgacattatagccatcataacacagtgcattgcttttttatgtttagatatgtttagatacacaaatacttactattgtgttacaactgcctacagtattcagcatagtaacacattgtagaggtttgtagccgaggagcaataggctataccacatagcctcagtctgtacggtgtgtagcagcctgtaccatctcagtgtttgtaag

SEQ ID NO: 14479 - DNA, 1648 bp, Homo sapiens
attcatggtgatgtaacattagtcctaattgaaaaactagtatttaaacataattatttataaagatgacacatcaaagggcttatttatttttaaattttttatttaaaaggatattcagttttagctatttttacccctcagattgtagataaagaaggcattaaatttatgtttgtctcctttttctgtttaattttaaagatatttaaaatgatataactaaaaatgtttagctggtgtatatgttttgaatacctttttcccctcagtttagtatattgactttgtactgtaaatttttctgcttttcttggataatctcaggattttcatgaggatagggggaactcaactttatttatgagacaaaatttccatacaaagctcaatctcctttatacacccacagacataatattagtttttaaaaagccaatttcttcatagttttttcccattaaattctcaaggaacacttggatctttaagcacggaacataatcatgatgttaaaaacagagaaaataaggctttataaagttaatgattatcatcagtatgaatttaaggtttgttttaatttcaagatttgattttttatacgtgtaattctattatctacccaagcagatctgtagtggttccaattagacttctcaaacagcaaatttatcctgattttatttgaaaagcctcttggattgatagtatagtagctcaggcattggaaactttctgcaaactgttttgggtttgcaggccagatggtctctgtggcagctactcagctctgcaatttcagtgtgaaagaagccatagacagtacttgaatgaaggactgtggctggattggccttttagtttgaccccctacattaggccccaaattttcttaccctgaggtgctgatatctgtatggatgagttatttgtcactaaagttatgagttgtgcctaaaagttaaaactgttgactgtattatgtaatgatcagtatttcagttgggaagatattttagagtctagataattatgtttgtatattgaaaaaatggtggccagtttttaagttccttaatagaagagaattatgtctcagcacatataacagtaatgctaatttattgaaactactgctgttagagcacttcttattcattgtcttttagtgaaatttatggcgtaacactttgtcagagaggaggctatataattcggagcggaaattgtctataagtaggcatttatttcatgattgatatgtcacagaaatcatggtagtaaatcacattgctatttgaataccctgtttttgtaagtttttaaaactcatattctgaaaagatttcattctcttagtgttagcttgggagttagattgccatgattaaactattatttatccttgtgtaatattagtttttaactttaacatctgtttctttttaatctataatgagctagttttatggaaaatggaatttcttactatataaagaatacagagactcattgtattagagaatcaagtcagccagctaaagtatcctactgttaaatccttaaacctaattttggaaaagagaaagttaatcaatgtatttaccttacatgttggaaagaactatgttaggtctgattcatg

SEQ ID NO: 14480 - DNA, 1142 bp, Homo sapiens
atggggctgtaatgttgaagaacaagaatacaaaaaataaatcttagtactaaaggtcagttttcatttttgcaaaataccctcctaaaaggagactttgaaggtttattatgagggaattcttttcccttgagacttggattttttttttcattattattttcatcttattaggaccttttcattcaaagaaccattatgacacaaggcttaggttgttagttttttattactaatctaggactgatgacttttcaaaaaccaagtgtgagtttataaacttgttagaagtaattgttttgtattatataaattaatatgtgaactgtgattaaagtttgcatttatatcctaagactgctgtctgctaatggatgttaatagtgatacgtactagaagttgaaggttgtattggggtatcttgtaatgagtgtaattagttttgaagaaatctcttaaattctctctccaatgaaatttctgcctttcagagtagaatgcatgattattgccaatgatgccaccgtcaaaggaggtgcctactacccagtgactgtgaaaaaacaattacgggcccaagaaattgccatgcaaaacaggctcccctgcatctacttaggcaagtcaccagagtggtaaaataaactattattagctggtaaaatgcaagatagtttggaaggctgtatgtattacatttgggatgggtattttataaacctgttgatttctcctgtaattataaaggaaacacaggttctttgctgaaaactctgggggaaagtaaacaagaactgttcatagtactagtgcataatactcatacattttgacgcatgccagtttttttctctatgtgttgtgtggttttttttttttgttctctagatcctgtttttcttttaactttatggatcatactatgaaaaaaatagtagcaagtatttatagatctcttgagtgccaggtactgagttaaatgtgcaagtattatataatttgagcagatgtaatttaaagtaaatttaatttccagtgaaagtaaacttatatttgaaattaaaacacatttaaatcaaagaacctgaaagcaaagcagtttaaaatgggcctttcctccgggcgcggtggctcacgcctg

SEQ ID NO: 14481 - DNA, 1134 bp, Homo sapiens
gctaaaaaggaggacaaaacacctatcaagaaggaggaaaaaccaaaaaaggaagaggtgaaaaaagaagtcaaaaaagagatcaagaaagaagagaaaaaagaacccaagaaagaggttaagaaagaaacaccgccaaaggaagtcaagaaggaagttaagaaggaagagaagaaggaagtgaaaaaggaagaaaaggaacccaaaaaagaaattaagaagctccctaaagacgcaaagaaatcatctactcctctgtctgaagcaaaaaaaccagctgctttaaaaccaaaagtacccaagaaggaagagtctgtcaagaaagattctgttgctgccggaaagccaaaggagaaggggaaaataaaagtcattaagaaggaaggcaaggccgcagaggctgtcgctgcagctgtcggcactggagccaccacagcagctgtcatggcggcagctggaatagcagccattggccctgccaaagaactcgaagctgagaggtcccttatgtcatctcctgaggatctaaccaaggactttgaagagttaaaggctgaagaggtcgatgtaacaaaggacatcaagcctcagctggagctaatcgaagacgaagagaaactgaaggaaactgagccagtcgaagcctacgtcatccagaaggagagagaagtcaccaaaggtcctgccgagtcccctgatgagggaatcactaccactgaaggggagggcgaatgtgaacagacacctgaggagctggagcccgtcgagaagcagggagtagacgacattgaaaaatttgaagatgaaggagccggttttgaagaatcttcagagactggagactatgaagagaaggcagaaactgaggaggctgaggagccagaagaggatggggaggaacacgtatgtgtgagcgcctccaagcacagccccactgaggatgaggaaagtgccaaggcggaggctgatgcatacatcagggagaagagggagtctgtggccagtggggatgaccgagccgaagaagacatggatgaggccattgagaaaggagaggctgaacaatctgaagaggaggctgatgaggaggacaaagctgaagatgccagagaggaggaatatgagccggaaaaa

SEQ ID NO: 14482 - DNA, 3276 bp, Homo sapiens
ttaagatatgtgagaacttttcatagatgaactttttaacaaatgttttcatttacaggaaattgcaaagaaaattctcaagtgatagtctttttttttaagtgtttcgtaagacaaaaattgaataatgttttttgaagttctggcaagattgaagtctgatattgcagtaatgatatttattaaaaacccataactaccaggaataatgatacctcccaccccttgattcccataacataaaagtgctacttgagagtgggggagaatggcatggtaggctacttttcagggccttgacaagtacatcacccagtggtatcctacatacttctttcaagatcttcaaccatgaggtaaaagagccaagttcaaagaaccctagcacaaatttgctttgggattttcttttctggaaaaaaaaaataaaagaaatagtacattgaaaacaaatgaattctcaactcctacggttcatgtagagtttagagaaaatttccatcattgtcatcattgaactgtgaacctgggaagccagatcatgattaacactgacatcaagtttcaagttgcagatcaatgcacccagtgttcagatgaggcaaacttctccgtgacaactgtgctgtgctctgtcacattacatttcctgcagactctaagatctacggagtagagaacaatgacctcattttattttctatgttagttatttatttcaaaattaacattttagttgatttttgtctgataagtctatgttttgcactgctaactatgatgagggtttaaaaaaatgcttcttcagggtcctttcactgaggacctatgcagtctacttaatgctgtgaattacatttttcaaatgtttaattttttaaagaaaattaatattctatttttgttaggcttctctagaaatgcagcttttatttattaccccatttctttcaagtccttggaaaataacatattaagggtacaagaaattaacacatgatggaaaagtcattgtgacgccaatgaatttcattgagtataaactcatctacttcaaatttattttataacacaacctaagatactcaagataattatttaatggttagctcttaagttgaattggtctacataatgcgtgggaagaaaaccagatttttagccttcttgccaaatccagacctctggttgatttttctttgacagaagatgcaagttattttccaatttcacaattaaatgtatttaacctgaacattattttgctttaaaaactataaacattgtaggagaattatagccagtcttcagttataaccactccaccctcctcactttctctctctctctctctttttttttttttttttttttgctatgggatttaatgggaaaaatatgtaaaaactgtcactagtcagctggctctttttcctatgaaatctatcagtacctttctccatccgttgttctcaatatgaccacagagcctgagtataccaagaaaaccaatattcgcattacaggttgctcctgtccttccagacacctttcctgcctgtgtgactaacctaattttgctagttccataaatacacgattagtttagtaacagccatcacaatgtaccatgtacattcatggtgagagctaaagatcgacacagacttctaggagctttgttcatactgattacttaatccaattgtatagattgaatatttgagtggaaggaatttacactctgtttaaatgatgggattctatcgagatagcactcatgatcatgacctttttggtagtattcttaaacaaaattctacagagactaaatgttagcgatgatcctccattttcaattttaaccaattctgtcccctttctcaaaaccctgagccctgtgcatgctttctcagtcttgtggtgggactggatacaatgactaacttcccctcctcccctctttaaacaccattttccatggagttcaaaaaaattttttttcttaacgttacatatcatagtgaatggtttccccagtgtatatgaatgttttaagtgtctccaatagcttatgcagtctaggagctttccaatactcatttaattaagatttaatcatttgctaatggaaatcttaccacctttcattttccctctgttaccaaatttcagctcttaggagctgctctacaattctgaatttgcttttcttgcctctctttagtcacctgtcacaggaggttcctgctcagtaatgatattgtgagttaggataataactttttttttttgtgcttcagatttagaagaaaagatcctgtttccatttgaaaggaactgtaagcttttatcttttaaccaactgaacaatacaccaaaagcagcctagggatgagcatttctttgaaagcaattaggttattcacctggtattaaaactatttactgttaaaaaatctgtgacttcatgaagttgatttttaaaggcagcatcaaaaactgaaaaggaagggaaaaaataggcagcttctctgcacttgtttggagctccccaaaacaggagccatggagaagtggcatcaagaccgggctgccctttcgagaacaccctgtggcagttcagagacacgcttttcctacactgcatgcagcccctctttccagcactggaaagaagtggtcttgagcccagctgagaagcacttcacactcctctctcttgttctgaatggtgtttgtgtcagtctgcagctgtgtatggtattatgtcttataatcctgcatcacttctatcctatccagtcatatctaatgtagaaaattagtttccagtgaaagtaatatgtagtgcttttatgatatttgtgtgcaatatcccctcttccattgaggatatttgatgtaaaggaaaaaaaaaaactcagttccacaataaaatacaaaagtggcaaaagttcatgtgtgtgctgtgctgtcttttgctttgtgttcctgagttgggctttgccactcacgcagaatgctgggcagtcagggcatgacggcagggggtgactacgttcttttcaagatgggctccctggcttttggcaaactgccgaaagcatcttgctaatgcttgcaactgctacctcgttaacttttatagccaagctctagaggatgtgagcgtgtaaggacagaaactgggaggtgaagggaaggaacaattaaaattattgcttaaaaaaaagaaaaaaaaaaggatagctgggtgcagtgctacatgcctgt

SEQ ID NO: 14483 - DNA, 1191 bp, Homo sapiens
cgcggtggcgggcgcctgtagtcccagctactcgggaggctgaggcaggagaatggcgtgaacccgggaagcggagcttgcagtgagccgagattgcgccactgcagtccgcagtccggcctgggcgacagagcgagactccgtctcaaaaaaaaaaaaaaaaaaatgattcttatatccctgataagtggctgaattctggagaccttaggaagtttgaaaacattgcattgcatgtcatcccttaaactaaatatcccagattttacttatgctaaaattgtgaagcagcttttaaaacattagttcttcctgtttgacttgatagtttatttcaacatttagttaattgctaaatgactttgaggaatagcttttattttgttgaaatacacttttctgtagatggtgctgaacagatgagagctttgggggccaacagtagaggaactctaacactgcgatccactcttcacttttggcaggtgctttgcaagtattgatagagatgaaaaaccaagatgtgaagttcaccaaagatacctatgttcttgcttttgcaatttgctacaaactggtaagactctttcctcttaactttgagagcattgtgtgtagtctttgagagaggatttttcttctctctacaaataaaattcagttcctctgaaatctgttttccatctggtgcaaatgttttaattttaaatgtttttatttttagaaaactcaagttagccatatcaggcagttttatgggaaaagtaattttttcatctttcactcttctctggtgattgtgtagatagtgagaacaagaggcaatgtgttgggttcaggctctgctttaaagtcatcacgcatgctggactctgctagatccatcttccctgttgtccttgtctatggaaatcttagcttccttcattggtgagctcaaggactactttgtcctcatatgtgaaggcttttgcaatcaccgaaactggaagtgatgtttgtcacctccagatatcccttaattttgctctatttgtgtcacctccctggtacttctgacacagcttaatgtacttagcagatgcacgttccattctctccacttgagtgtgagctccttgaggtttctttgtatcccaccacctaacacagtgcctggtatccagtagttctttaataaacgtatgtgac

SEQ ID NO: 14484 - DNA, 1152 bp, Homo sapiens
cctaagtggtatatggagagagatagctcaaaggggtgttttgttttgttttgttttgtttgtttttgctaagctgatttccattgatatcaaaagtcaggactggtagaaacagaaaaacaaaacagtttcatcttaagagaaatacctgaagaaatggtggcaaaaccagtatcattttaattaattaattaatcacaataattcttaattcttaataattattcttaagtctatttacaagactacagagattcttctacactcggtgttggattaatggaaattttctactaagaaccagctccatttactaatgctcatttgtgcatctggtacatgaagcctgcactgaagtagaagttcaagacctttctaattcattagtcagtgacttattgattctgaaagctacagaccctgcgccttgtcatcattttcataaagcaatcctcagggtagtgttcactgtaaaatattgagcttattaagagtttttgggcctcggattaactttcacagcaaaagctatgttaagtaaattaggtaccaaataaatctaaaatgattgtagaaagtcatcagctaaattaagacgctgacagctcacataacaagatgcaaagcaatagtaattaagaaaaataatcacctctgctgctgagaggatacgtttggccccaggtgaagtagctcccaaggcatctgctttctaaaaggaaagtcttgctgttttgttctgctgtgaaggggtgaggggcaagagatccttttctgtattgcagcattcaccacatactctaaaggagagcattatctttgggaaataatcttatgtggggcagaaaaacagatttgcagaattacccaagatctcttatagccctagtgtggcaaacattgtgaactggccccactggcacacacaactcctttctccctgctttcctctaatggagaagtaagaagatgaaaacattcacctcttagactccttcgccaggagtagtggtcatgtgacccagttctcgtcaatgagatgggcgtgggagttgctgggtagagcttctaggaaagcttttaaaacggacagatgagactggatgcccattctgccttttgcattcttgtctttctcccttcttcctgctt

SEQ ID NO: 14485 - DNA, 1267 bp, Homo sapiens
gggggctcccgtcgcctccgcctctgcccctcccccatcctccgagaccggcctcctccctgggtccgggcgcgggggaagccgccgctgcccctgccgggcgactcgcgcacgcggccctggtgcctgggccgggggcgccgccgcgtggggctcacgccgccaaggccaccggcttccggcgcgcaggaggcgggggcccccggccgccgcccgggatcgcgacatgtgcgcgggccgggccgccacgtccccgcccgccgctgacctgccgcgggggtagggagcgggcgggcgggagcggcccgggcccacacaatgcgccccgtgggtgggggtggcaggccgagcgggaggccgggtggagggcgctctgtgcgcggcggagctcgccgcctgactggccagaaatgggtggagctggcgcggggtttgaactgcagctgtgtgggtcttgggggtttttccacgtccttgccctaaaaaggctggggacctacaggtgggggaaaggggtctctgtgcctcaccctggggttactggtgttaacacctgttgcgaactccttgtcacccaagtgagattttctttttaaagctttggctcaaggctgactgcacaattatgtaggtctttaccgagtgtgctggtgtagtgatcctgttgctacggttttagagacaggaaaggttaagagaaccaaaactctaccacgtatgctttctgtagtgccctaaaccgtgctcaaatggagagctcttactggatgcagtaaaggaaacattcactctatatcatgaataaccttttaacccccgttttaagcctaaagaagttagttaagtctactattttttgcagaaaagcctcttgatttttattgtcaaaaagcagcaaaattacttaatatggagtttggtaagtaagctcttcgtgtttgagtttatttacatttaaaacatctgtaaagatgaagttatttaccccgagggtttcgcagaaatactgcattgccgtaatttaaaaccttcaatagatgacaaaattagtacttaccttcttggttaatgtagtacttcccatttaaaagtggaagggataatgatttagatctgcttggattttttaaagccattttgtttggatacttctagtactgaggaaagaacacttttggaatgtattgccgtttgtatcttgtaaacagtgctatggctcagtcttaatttgtgttgtcatagttctagggatgatagaagttgatag

SEQ ID NO: 14486 - DNA, 1239 bp, Homo sapiens
tattcttggtattatggcagaaaaagaagttgcattcttatacttggtaaatttaactcaaaaaaccttagagggtgaaatgttgaaaaacactattagaaacagatctggtttatgtgaggttttttttccacaaggtacggaatggtgatatgggtgttggtggtgagtgttactaattttttgagacagggtctcactctgcccaggcatgagtgtggtctcatagtcatggctcactgcagcctcgacctccttgactcaggtgatcctctcacttcagcctcctgaatagctgggatcacaggcgcataccatcacgcccagctgattttcttgtatttttagtagtgagagggtttcatcatgttgcccaggctggtctggaattcctgggctcaagagatctgcccgcctcggcctcccagaatgctgggattacagcatgagccaccatgcctggccaaatgttattatttacataaaatgtgtttgtgcacacagttgctcacatggcaatgcctgacataatgctgttggatttcctaaagaagtgtgtttttgttcaaggtattttgatcacaactatagcctccaagggagaattgcagaattggcctgacctcttaccaaaactctgtagcctgttggattctgaagattataatacctgtgaggtaaggatatttgtttcatacataattgggtgttttctgtttttcttgtcatgttgtgtattagcagcttttgggaaaaatagttcctctgaaacatacagcttctcaaaacttagaaacctaaagttacctttgtgttatattacatttgtaaatcatttatttttctataaaaactgttacattataaacctcttttactgtatttcacacaaggacgtatcttgcttttctgttctaaaattattcttggatgtatatgtatgtaatatacagtttttgtcaagcctaatcagttaaagatagaatgaaatttaccaaattcctggaccatgagtacttttttagcttctctaaattgtttttatgcctcttatatgagatatctaagggatgctgaacttgtgttttttgtttttgtttttgttttttgagacagggtctcactctgtttcccaggctggagtgcagtggcaccatcatagctcacctcaacctcctgggctcaaacaatcctcctacgtcagcctcccaaagtagtggggactacaggcatgtacta

SEQ ID NO: 14487 - DNA, 1160 bp, Homo sapiens
atctttggatttggccaataaaacattcattgagaatagatctcctgtaaatagacttcctattatccataataggatagaagcataagtttaagtaatgataaattcttgcttaatttggtactagatggtgacattggtagggttattattaatttccccttaattacttggagttattttaaaaacattcttatatatgctgctctgaatttgattcaggtaacttagattataccagccagtggaggccatgtagttggctgaaagggccgtataacctaacaggtgtgttaggtcagtctattcgcccctccataaggaatatgttctgtacatgggcgtggttcttaatcactctggaagtatatttcagaattctgtgcatgaccccatctctggatattctgtttctcttactcatgtacatactattagcctataatgaatgccaccaaaaatttctcttaaaaaaacaacagggtgatgttgaagaagacgaaacgattcctgatagtgaacaggatatacggccacgttttcaccgatcgaggacggtggctcagcagcatgatgaagatggaattgaagaggaagatgatgatgatgatgaaattgatgatgatgatacaatttctgactggaatctaagtaagtcagaaagggaaaagcacagttgcctactttgatgataactttattggggtataattcatctactgtacagtttactacccattaaagtatacatttcattggtttttagtatattcagagagctgttcaaccattaccacaatcagttgtagactatgttttcatcacccataccctttagcagtaactccctattgttcactggctctgggcaactactagtcaatattctgtctctgggtttgcctattctagacatttcatgtaaatggagtcatacaatgcattgtcctttgtgaccatcttctttaacttagcataaagttttcacggttcattttgtagcattcacttgtattgtgaaataatatttcattgtaatatgccacatattctccattcattggttggtggacatttgtgtttctctttttgtagctgttgagttgtgatgctataaatactcatgtataatttttgtgtgtagactttttttgtttgtt

SEQ ID NO: 14488 - DNA, 1352 bp, Homo sapiens
cagaaatccagcgatgctcaagtcccttatataaaatgatgtggtatttgcatatggcctatgcacctcctcccaatatactttaaatcattttaattgtttttctaaatacttttgattcaagattggttgaatccatagatacagagggccaactgtatatatattactttccggcaggatctcagaatgtgcccagtaaagtccattcacaacattgaccaggatgggagcatgaaatgaatctcttcaatttgagggaaaaatatgaacacataatactcaatctgtcctttaaagataatgtttcttgtagaaacgcttcctctgagtaaacctgacctgattggctggcaaactaacaacaatgaatggcttccaaaagagagggttggggtggggggaggggaacctgctactgtagaaactagtagagcaagctcataaatgatcaggatcctgttgagcgcagtttcaagcattcatcataatcttcagtatacccagaaagtttagcatgtgtactttattcttcctagtgcctatcttcagttgccacagcactgcagtctggattccttccgtactgtgaacctgtgtatcagcgttgtgtaaacctagtacagaagactcttgcacaagccatggtaatttttttaaaatgtcttcctcttcttgacatggtggacatttttctaaagataggtataatgtatacagactttttaagtagttaattaaaaccaaacttacaaaaaacattgtgtctaatttcagctaaacaatgctcaaccagatcaatatgaagctccagataaagattttatgatagtggctcttgatttactgagtggcctggctgaaggacttggaggcaacattgaacagctggtagcccgaagtaacatcctgacactaatgtatcagtgcatgcaggtgagacttgaaaggtgaaaatgaattgaagcctgtttctctgtgtcacattggggttaatttcttcttatttcttgtaggataaaatgccagaagttcgacagagttcttttgccctgttaggtgacctcacaaaagcttgctttcagcatgttaagccttgtataggtatgaatattttctactgctatgaatatggttttttaaagttaacatttacatcagctttgtttttttattattaaactgaaattgcatggaatcccaacatttataaatgtacactttattggttaaagtaaacttgctgtgattgaaacaggcaagatggcaggaacccctaatatttccttgagcttgccatcatctcagctttttaggtactcctgtgactggaggaaagcttagtaatatac

SEQ ID NO: 14489 - DNA, 2462 bp, Homo sapiens
ttttttttttaatttaaagtttttttatgtaagttttcccacatgatggggccttgttttgcatgttgatgaagaactacacaaagaaaactaatatagttaaaagtcagcttgccttcccgtagtagaagcaggttcttggaagttacaatttaaggtaccccaaaaaagttggaaataaaacaaaacaaacataaacaatgaagcaccctgtgaaatgccaaatgagtcactccttttaccttttttggggtgggcagggagggaggaataaatggggttgggcatatcaaactaaagatgacatcttaattttgcattgaacattaatgtagcggatataatttgatgattatacttcattagatttaatttctaggccaagatgttactttttaaagtgcagtttaaggttcaggcatgcattctggctcatagtggttgaaagtaatttaaattagtgggaaagtagcatgcttgcatcacatagagtgagattggtattcatttacctatgttgcgccagtttgtgttgcagtttaccaattcaatatagccctgcatttaaagttcctttttaagatttgtggattttatttttattaagaacatagatatataaagtactgtagtttacaggtaggccttgaaatatcttttttaggatctgttaggaataagattgatattgtattgtgtgtaacctgcacaatgtggaaagctgatatacctgtgcaaaatctttgcctctgtgctgtcagtgtgatgtgctttctgcatggttatatactactagtgattttatcaaaacttctaaaatttaaattacgtggtaaaagatctgtaaaaggctgcataaatgttagttggcacataaagacaattgtagaagttgaaaaatgattgctatatttcaatgtttattcccactcaacatactgccttctaagcttccctttttttgttcaaagcatgatcttaaagatatgtttaagttaatggatgtaatgcagggttcctacactgtattttggcgcatgttggtggccctctgtgccctagatatatgcacacagggtgcaagttaaaagctacagagtgaaagttggtttggatcctcttcatttcatttgtttagcttttctgttatttttctctacttacatgtattcctgtgaataaatccttgttaagttaaccctttacttttccttccatgtgtattttcttatatactgtgaatgtgaaaacctaactggtacacttgatcttgtgttcatatgaaagtgcaagtctttattaatttggattgcctgaacagtgtatcccatgatgatgaaggaaaatggagagatttttctttttaactctgctggtcagagatgaagccacgcctttccatttttcaatgctgcatatttaatctgcaacaaaaatgttaagccataacagcctttttatattttagtttgtcacctttgcattgcagaataaatactgaataaccatttttataagcagttgctcctctttgcatggttctattctctaaaagtgttgaatgatacagccattgcactgaagtttgagctgtgtgcgtgtgaatttatactgtttcaaaaatttcaaatgcatggtagcatgtagaaaggtttttgttactatgtgtgtgtgtgtgttttgttttgttttgttctgttttttaacgttctttcacctttcctctactttggctttgcaaatttcagtctgtagagcctgaaattaaattattttatagtgcctgatatttttaatattataagttggattcaaagggtatacagcattttgttttctagtaccattgcttcactgggagctcaaaatttgcctccctgttagtctttaataactgagtagagtagcttttttattcttagattatagtgatattctgtagtgcttcaaatacttagaattctaatatgagagatagtttaatattctggaatagagagtattttaaattgaaatgaccaaattcgatttaaaacaaacacataacaatcttcagtaaagttatttgaacctgtggttgacaattctgtattgactaaaggcaatattgtcacctgtctcattaaaaattagtttccagttaggcagatgaataacactattaaaaatgcacccagttttgtagtcacttgactttttttttttatttaaatgaaatttaatttgaaaatagaaaataaaattaggtaaatatgactggcaacctgaatttgagttgggattctttgtgtatttttcccccttgaggttattgtttcttcctaatttatatttcagatacatagtgtagaacaggaatttgcagaagccatttaagttatcttttgaggtaagctctgatttagcatttattctgataaaatctaatacatcatgggatatatataaagcaacttaattct

SEQ ID NO: 14490 - DNA, 2373 bp, Homo sapiens
ggtcatcctagttacattctttgttttttaagtgtatttcattgagaatctttccatttagtctgatttttttcctaatattctagcaggctggggtggtataaagccctcctgacaagccttttgcctacaggtttacctgaaaatgagctacatatggtcgtcattttcttcaaactctcaaaataggaaagtggaaatttttctcccctatataaaattattctgcctagcagaaatgccagaaataaattaattgcatcttagtctaaatttaagtcctttgccatgaggaaaaagtggttttttgcttcatatggtaaatctatattattcatattgaatgtattaacagataatggtgcaaaagcattcttcccaggggaagagtgtatcatgcataactgcaatttaagtccttcctttgataatacttcaaaacatacacagctttgcttactgaattatttttgcaaataatacaaggaggggaaactaacttgctactagtgttgttaatgaagtataggccttggaacatttaagaaaactggtcttcagatagttaagggcttgggataatttaagtgaaaagtgagatcagtaatgagctgtgttgttaacaatattatctggtaataataccatgcaatatagcgttgtataccaacttagtgcattttatactgtattaaatatggagatacttctaatgcctctctaaaattaaattttacataaaagttagttttattcacctttaggctttccaagtgaattgtgactaattttttcaatcttacatagatctttcacccattagcattacttacgtagataattctttatgcctagttattatacatattaatttttaaggtatacatttaaattacacaattgttcattgtggtttgtatcccagaatgtgttgtgttttttaaaagatgcataatagctgaatgtatgcatgactttgaaagaagttaaaatggtgattttttttcacctcttgtacattttaaaaccaggccaaatctatttgccaagcagtgtatcactaataagaaaagcagtttttccttttattgcagtttttgtttatctgccatagaatttccttatactgtggcttggtattattcaagattagctatttcgctggtattacatctttttaaaagcctattataacatggttagcctataaggcagtgttggtccccttctaatattggcctcataaaggggttccactgtactttccgcatattactgtgttgttgttttcctttgtggatatataagcaaattgagcttgggtgatttttatggagacaataattagacaatactgtataattagttttacttaatagattatcatcttgtgagaagagatgtttaaacgtggtaaatcacttcatattacaaaacagttttacacttaatatgttaacattgggtgcaataatttagtagcattagctttagttacaaatataactggatctttctgctgacaacttaggttgtatgagttatgcttaaaagctttaaatctgatgtttcctgtacctgccacactatgttagaatgtgtccttcaaacatatcctcctgcaacttctcaaactgtactaaattgatatttcttgaagtctaactctgtgctaacagatctccattttaaatagaatacggttttaatttttgataagctgctgaattttaaagagagttttttggggccaccaaatattttggatcatgcagagaatatatattgtactgtagtaattttgtatttacatttgtatgatgtgacataatagatgtgaatgttaatcactgcttgactatgttaataaagttgtttaactatagatgttgcactctgatttttaatgaaaggaaatgagttttctttttccctcttaccccattttggatctagataagccttatgttttttgggatttttttccttgtttttagtttgaggttttgttttgttttttccttagcttacacattagtacacttttgttgttgaacatcatttatttcttaaaacaagtgttttcttatttgtatagtatagtaaaaacctgtttttccacattttaacttaactccttgatgtgttttaaacagttgattataggttctgctgtttgaggataggggacatactattctgtaaaaggaattaaaggcgaaattgtgaatataaaaagttgatgtaaggagagattgcatgagtgtgtatgaatgtatgtcctattaaggcttcctctttatccttcaaacagttaagatttgtaatttggggaattaacatttataagagtaattttttcttcaggttgta

SEQ ID NO: 14491 - DNA, 1508 bp, Homo sapiens
ctcccagctagattatttttatctttttattttgaagaattctaaacaaattgtgtgtgtgtgtgtctgtgtgtatacacacatatacatatatatacacatagatatatacatacatatacatatacatataaataccatcatggtctctcattttggggtctcatcagtcagccccagcagcttgccccagccaatcctgcccatccatttcctctgcccaaattctagaatattataatttcatctgaatttacattatatatatctttacacttgatcttagccaaaaggccaagaagcgatacatcatatatatctttaaaacataatcacaatatcatcacatctagaaataatttattactccttagtattttgaaataaccattcagtatttatcatctttgatgtccattttattatgctttgtttgaatttgttgatatgtcttaagtctctcttgatctacaggttccccttccctccctccctctctgtttagctttctgctatttatttatttatttatttatttatttatttatttatttattttgacagagctcgctcttttgccaggctggagtgcagtggcgtgatctcggctgactgcaacctctgcctcctgggttcaagcaattctccagcctcagcctccagagtaactgggattacaagcatgcaccaccatgcccagctaatttttgtatttttagtagagatggagtttcaccattttggccaggatgatcttgatctcttgacctcatgatccacccgcttcagcctccaaaagtgctggaactacaggcgtgagccactgcaccgggcccgctttctgtgtttttattggcaagactaagtggtttgttttatagtttcctttagtctggattttgccgattatattgccatactgtattatgttttacttctttatattatttaaattggcatttggatctagaggcttgatcagatccaggttcaagttttttttggtcttgttttattttgtcagggctgcctctctcatgacacacatggtgtctggttgtcactctttatggcatgttggcagacattgatggtttgtcttagatagttttactagttcacccagacttaaactgcataaggaggtgctagatcttatatttccatacagcttatagcaataagaatatttagcttgataatagctttcaaatcacatgtactttttaaactaacttattcttcctcatttataacagaaactgtagattttgagcaatctgaattggtccccacctcagtgatttcttgccctgaaattatgagttgtgtttctcctgtttcattttgcaggtctttcctctttcaggtagccagagcatggagtgtgatttgaagctaattaactaaaaaggtgtaatttttcttcggtgttcatcatttcattaacctgttgatatctgagaagcggtttggttcctaagtaatacctgaggctactttgataa

SEQ ID NO: 14492 - DNA, 1247 bp, Homo sapiens
ttagctgtagaaataaatgatcttttctcatcatgagccctactgcgtggctagaaggataattattttaaatagaaaacagcgtatctatattatttcctgtagagctgagagacatgctttaaacttcaatacatggctacaacatttttcagaaatcaccaaagccaaaaagtaacttctgattcagaatgttaaacggtttcactggcattctctgtcttattaaccagaaagcgtttataagatgagtaatattgaattttacctatttttaagttgtgtcacaattacaaattctattataatttaattatactaaaaattatactaaaaacttttctaaggtgctaataccttttgcagaatcatgcattaaaaataacaagggttgtgggaaaaacagttgaagcagcccactcaaaagctatgtaattttgttaacagaagacttaacagaaactttaacatcagttttattaaaaattctaacagagtttaagagacctagtaaatgaataataaataccaaaataaaagtaaggattttatctttaaagaaatgttgattgtagcttaatgatagggggtgtgaggaaaatgaggataaatgcagggtgctgagttgtggagatgagagcaaaatgcagaaatattgaagaatagcacaataaacactgaggcaaaacaaccaaccaaactgagccaagtgaagaatgtagagtgaatggttatcatgtactgtgatactcctccatagtttgtggaagttactcatattgatgtactttgcattcatcaggtattgcttggtgatgcaaagaaaacatgaaggtgcagcaaaaattgcttatgcaccaacatgagtttttcattaatgatgctattcccctgtttaccacttgcttgtgaaatgaggcacattacaaatccaaaaggtagcaaaacaaactatcttataaagagacttgctccaggttgctgtaagattcttaatttttcaaaatatgacatcctcaagagttaataactactttttgtcaatacaataatcactaataatattcttagaacttgaaaaatgcattcatgattcatcagttaaaattcttaactagaatttatgtatttaaacatttttctaatttttaaagttgcaacccatagtttctcttttctaaacagcaattttaatgaatatcatagtttaattgacttaagtcatttcttactaaagatattagaag

SEQ ID NO: 14493 - DNA, 2379 bp, Homo sapiens
attgagctatgtgccataaggtaatcagaccagagtccaagttgtatgcaaaaaatctataatttgattctcataaacatattaataaagtataagtgatgttttatatgatttttaaaaaaaattctcaagtgcaatgtgttttaaaataagcttgcaaatgacagcagagacatttacttctgcagttagttaactttataggagttgtgatttttttgatgaattaatgctgtagatttaatttatttttatatggaattgcataatgtgtgccttttaaaacaataacaaaaaccagagatgtgcctatacaatttgtgttcattaatgtgcctcactttttttctcagtctgaatcttctgttcagaatcttacagtgatcaagcatttttataagatatttgcaatttttgtaaatatttttggcctgcaactgggaaggggattcagagtcataaagcctaacttaagaatcctggctcacttctttggtgatacactgtagccactagaaagagaaataaacccaatggcatgtgtttacaggaagaaagattaccttcagatacttgacattaacctcatcaaaagtgtgtgaattttaaaacaaattctaaaaaaactatagtgctaaattggtaactggtattttaactctcaatttagcattttccttgatactttatcattgaaaatttatgcatttatttactgattgtgttgtgaacatgagttttatggtattttgtgagggatgcattttttaaaagattaattttggaaacagaaggagaagcactgccatttgtttttatttcaacaattggaaaaattaccaatttgtacattttaattattcaatttctactttgtaaaaatagggaaattatttgaagtgatatatttggttaaacatttctaaaaataaactaccaatactaaatagtaagaaacctaactttagtagcaaatcttgattaattgaagaaataaaatatttcggataaggtttcataatttacaaatgggaatttcatttataataataaatatgagtgtcctttatttgcctagtagaagtgataaattgtgttatatatgataatttatataaaaccactaattgttccgttaagcttcacagaaaataaaacctctattactagacatttatgtaacatcttgctgtactaaatacagcagaaaatctactctttagcaatatataacacagtatatgcttttttatatattcaatgttagcccaagtctgaatttacatttgactaaagcagcacataagataatttgctaaaatgctaatctttactaaatagtgagctaaattagaatttctaactcttatattgtgctcttttaaatgccaattacagtcccttactggaattctaactgtaatttgctttgcaatcaaactgcttttagggcagccaatattttattattggaattcagacactgttcttaccgtgtttgtttttaatcaaatattacctaaaaatgtacaaattagtgaaatggttaaacttctgcactttcttagttaccacagtcttcataccaagtattgggtacaggttacaattttgaagccatatgagtttatattgattttttttttccatttaaaaatccactaatggtgtaaaagagaccagtagattttcaatgggaaatgtacctagcaagctggttcttgcttatatatagtgataaactttgtagctgcctctttaaccaagaatttgtaaacacaactctaataaatgtgagttttaaaggattgttatttactactttggattgtaattagaacaatgcacatctgtcttccaagattttgtaaatatttttgatttttttcattaaatgtaaattttacataaaagttgtgctcttaataaacatgtaatatataatttatcaattggtttatgtgtctttgtacttgatagtaatagctatatcataatgttaggacaaggcaagctggccaagtaattggtttttaactttgtactactgtttgaacaggcgtacagatcgaactgttatttattggttatatagaaagcttcatttggagtatatcccaaagtgtcaaaattgtttaacaagggattatttttaatatattttaagatatatttaaattgatgttaaatttttgcagactttcttcctaaccagttgctcaggaacacagtctcagacagttcaaaaatcataatgttccaaagaattagttaagacaatcaagcctcccaaaatggtaaatttaggaaggagcaaaagaaggaaattagaaaagaaagaatttatcctaactattgaaaattttgggctgggtgcag

SEQ ID NO: 14494 - DNA, 1285 bp, Homo sapiens
ggtttcacagttgctacctctcctgcttttctctaattattacgccaactcaagtagttaaaaatcagtaagaaaaatgtcttgagctagaagaacccatagaggaagattttgtaatgcgaatctcctctcataattttagttctgtaaattcagggtttttttttgtttttttgttttttttaagccgaaaaaatgcttaatatgttccagtaagggtattaagtaaaaattaaataaacgtattaagtttaacatattaaattaatttaacatttagactaacattaacatttaaattaatatgttaagtgaatatacttaatatattctagtacaggtatgcttggaaatagggcgtttccttttcatgaattgatttcgtacagcacagtggcttataaggaaccagcagtgtttttccctgagtaattatgaacttagtcaagatcagaagctgggttttggggttgagaagagttcatttatttaaataaagtttctatttaaaaacctttttaaaaagttaacatcataaatattctgataatttgcatagtagtaaaaattagaagttgaaattctacctaaagctgtagttgccgtcaattgtgtaacatgtgacaaaggttttcccatatgtcatttcatttgattctcaccacaaccatccaaggttgatgttattctcatttaacattgagttaacgaaagtagttgattcactctcgaagtccctgagtgtgagctcttcatcctagcactgtgaagtggtttgcctgctggggcctaaactcctcattccctttaacaaagcttcactgagtgctgcagttctcaaaatatgtaacagttaacacatttttcaaacaggttaggaagcaattcccatagccatcaatacttaaattcaggagtacttttttgtttgtttgttttgttttgtttttagagacaaggtctctttctgttgtccaggctggagtgtagtggtgtgatcatagctcactgcagcttctgtctcctaggctgaagctatcctcccacctcagcctcctgagaagctggggctacagggatgagccaccatgcccagctaattttttattttgattttttgagataagaggtctcaccatgttgcccaggcctgaggcaatctcctggtttcaagcaatcttcccacctcagcctccttaatgactgggattaaaggcatgagccactgcgcccagcaggaatggttattatattcattgagataaactgtagtatttgctgtttg

SEQ ID NO: 14495 - DNA, 1234 bp, Homo sapiens
aaatgggtactgaggccgggtgttcatgcctgtaatcctagcactttgggagcccaaggtgggtggatcacctgaggtcaggagttcgagacgaacctggccaagatggcaaaaccccgtctctactaaaaatacaaaaaattagctggtggcagccacctctaatcccagctactcgggaggctgaggcaggagaattgcttgaacccgggagttggaggttgcagtgagccaagaccacgccattgcactccagcctgggtgacagagcaagactgtctcaaaaaaagaaatgggtactgagtaaatggatgagatggatgagagatgcagccaagcctgtgaatggaagtcacaactagagctccaaaaccacaaaatgggtccctatcatagcccattgtcactgaaaggcatttaataaatgtggttgcagtaggaggagaaattctggtgactacaacagataggtaagtcaatctccaggcttcctgaggttttcagcatctcaatttttgctcaaagggacctttcctgggaagtctcatggagaagactcagctccattgcattacagaattaatgtgtgaggaagggatattgtggaattcaacccatctcacttcaggaaagatttaggcgcagagtgttaaggatgatattcttccgaggtttccctgccatccctatgaaaaagttaggcgacagttgattggaggcaggactagaggcatacagtgaggtgtgtcttcaacgtaaggccaaaggctagctgccacattttaaggcccttttcagggggaaggttcttaaaagggctgcctcagcacacaggcactggcatatgtcaccgtggcaggtagacacatattaaaacaaacctcacaaacacaattcaaaacacaccgagtctgtaaggactggttccttacatgagctcatgagttcatccccttgtcaagaagaatcgactctctaggtagaaggcaaaacacttgatcctctccagaaggccacgagaatttaacttctttccctttcagaactgataagatctcacatcaccacgtcagtctggctcacaggaggagtgagacctggctctgctaagaagctggtagttgttagtgggagcttgagacccacaaacaaagggattttcaactacctggctgtacttacatttggttttacttcaggctttcacactccatgcttacctcactgacttgtt

SEQ ID NO: 14496 - DNA, 1229 bp, Homo sapiens
agatgtcaagacagcacgtaatattgggtgttgactttaggtcttatatcacaccttcttcttttgtcttcatcctttcccccacttcctgtgctttccttttgtctcctctcattcttaggcaatgggtttaaggtcaaagacacaggcctgggctcagattcttgccctatcactgaccagctgtgcagttataggtgaggttctcaagatctcttggcttctgccttcttattcctagaaatcagaaaatataagtctctttaaaatgcatctgttttgagatctaaatgaaagcctgaaaagccttttatcacagtgaaaagtgctcaataaatgtcagccatgctcatttaaatggcctaactctggtagtgacatttggggccaaaggatagctcttgatggctgggtctgaaagcccgtttcaggatgaggtagtgtcagctctgttaaggtaacaggattgggcctgagctgttagaaacttggcctcaataagactctagctgaggtatcttttctttctcaagaatctcaagggcttaggccagcacagcctgtgcactcatgcttttaaaaaaaccaaaaacccaaaaccaaacagaaaaatgcagcaacaatagctgcttgggcccacatgtcactctattatctcccaccgttggcctgtgccagtacaatcaattgttccacggtcccatttggtaacttggaaactgtttgcgctgaggatctatgataagcactttggctggaactaacgtccctttggaggtgaggagggagaaaaggaaagcaagatgacctggctggggacaggcaattctctaaatgctggcctaaagggactgagttcttgaaagcaggtgactagaaagagaatattgttctacttccttcttttttctttattctctgggctcacatttctaagatctttaattttcaaaacttaaacaagaaagtgtattaatcttaaatgtctcccattaatcatcaagtccagcccagcgacgagagatagatgactcacttccacaggtgatttcttggtaatggtgggtcaaggtttgcccctccatttcccctactgtctcactaatggagaaagcgtccccttaggaagtacctgtcttggagcaatttgtcaagggaaaattgcaggtgggaatagccactgacaagaaaatatttctcttagggaaacaaggtgagtagcatagcat

SEQ ID NO: 14497 - DNA, 2230 bp, Homo sapiens
aaactgatactatactagttaaataacttggaattctcaagttgactttgtcttcctctttatggtttttcctctccccttcccctcaccctccactgtactacattggattaggtcatgctatggagccagattggtcaactcaaagctctgccatttactagtcgtgtgtccataagcaatttgtgcctttgtttctccatctataaaatgggaataataagagtaacaccttcttcttagaataaaggtaataattgatgtaagtcacctaaaacagtgcctgccttgaatggcagaagttcccaatcactgtgcacaatccaagtatgtagatgtcaagtttactgagtgcctactctggacaaatccagtggtgtcagtactgaaggaatagattccagattaatagaagacattgtttctgtttagcttttcactcctgggatttatgatgtaattggagacatgagacacttagaggaaacagttcacaatgcaaggcatgatgtgatcacaggatcgcaggatcagcgtgctggctcccgaaagcgtttctgaccctaacagcacctgagaaccactgagggtgctttgaaaacagaccactgcctgggccctttccctagaccagttaaacagaatttctgaaacttgaattaattggtgaacccctctgtgcctccatttcctcatctgcaaaattagggcaatactttacctcaaatctattgctgtgaaaataaaaagagtgaatgcacgtaaatgcttgtaatagtgcctgccacacaataaacactcaataaatgtgagctctcattggtgaataaatattcaaacatgaatacctagtagactctgctgaagcttttcagaatgttgatgcctattcacttggaaaactctaagaacgactttctctgctgtccttgttgtgtgaaggctatggcagttttagagtgcttgaaactagcgctccttgttgggcagcataggaggactaggtccttcagttatttacttaagttggtgcacacaatttagagacattttaaaggaatattgcagtcaacagctccacaaataatgctgcagaaacacaaagatgagctggctgggccagtggaggaaaggcaaatgggttctctggtagattcaggaggaaaagtgatcccagagcatgaaggtttaggatattaaagataacgggcctttgctaagtgctaggccttctccaatgggctatacatgcatgattttatttaattcttacaccaaatggatggtggctattatccattcccacattacagataagggatgaaggcccagaggggttaagtaacttgcctgaaggtggtagagaaatgatttaaatccaggctgtctccagatctgctctcttaaccacagcatcacagcctctggacccacatggaagaccctgtggctgaatctgcaggtgggtcacctcagattcatccttcatcctttcctctttaactatttttcttctgttttgatcacctcctcttgaagagtgagggattcccatcctagggatgcaggcatggctgaatgaaacatgatacctgacactggacagatggtatgaacggtggtttattggtacatatgtctgctcaaagccccgggaggaggacacctcatgccgtgcaaggccacatggctgctgcgcttggaaacggagggaacaagcagagagaggcaagctttgtagcatcaggagagtggtgtgccccctggtttgtgagggagaatgtatttaccttgtttgaataattccttggtctggcagggaactgaagccactgctcaggggtaagcaggaactgtgtctggctgctgctttttttttttttttttttgagatggagtcttgctcttatcacccaggctggagtgcaatggcacgatctcagctcactgcaacctctgcctcccgggttcaagtgattctcctgcctcagcctcccaagtagctgggactacaggtgcccaccagtacgcctggctaatttttgtatttttggtagagatggggttttgccatgttggctaggctgatctcgaactcctgaccttgtgatctgcctgcctcagcctcccaaagtgctggattacaggtgtgagccaccacgcctggtctctgtctctctctcttttttttttttagagatgatgtcacccaggctggagtgcagtggta

SEQ ID NO: 14498 - DNA, 1137 bp, Homo sapiens
ccccgtctcttccaagcaataaatgtattaatatggttcacgatgagaaatgtgaaactcacaggagtgaggctcgtaacaccatttcccagcccctccggcgtggatcctttgttggtggctgctgcctgccctgtgctctcgggtcttggtctggagggtgagccctgccctttcttatgtgtctccagtgaagccttctgctcatgctgaaaacagcaaaggtggctggctcagcctatcccttcactctcaatgtctggacaattaatatgtcatttcctaatcagtgtatgttgatgcgttatttattctagcatgatgattgtggccaaagatcacctctggcattggctctctattgttttgtacatattatttctcagcacaggcttgagaacaatgggctcattgattccacctgactcttgggaaggatggactttgccagactaaggctctctgaatgccagcctggaagttcatgaatccccttttaggagtaagctgagcctttgcggttgggagtggtgaggaagggaatgtgcctctattttccttgctatttattgctctgcattaaaaaaaaaatctctttgcttctctgaccagaaagatggtgtttcattgaggtagagcccatagtaattaggccagcaatcagcttgtccacaccaaagtgcatcacttgcattctctgtgcacactctctctgcctgctccaccccgccacatccctcctctgcctccctgtttacgcgtttggttcagaatgcagaaacaatgaaggtgtttagggatcctagcctcacggggtagcaattggtacagagaggctgtgacacagagtgacctggaattccaagtggaagattgaggtacgaggacagctgagattgtgctgtggtcctttcttagctgtattcttgtcctgtgagggtccagtggtccagtctttaactgaactgttgtcctgggatgtgaagattactattgggtggcattgaaaggccccttatagagggtctttgatatttcttggccactgccagacttgaaacgttagttttggggatgtgtctccttagcagtcactaccgaggggatacaatcaacccagtgctctcttttggtggc

SEQ ID NO: 14499 - DNA, 1115 bp, Homo sapiens
tgaggtacgtgtagtggttaatgctggttgagtgcttaactcccgggtcacggcctgacccagagccagcactggataactgttagttacccttctctaacagtctattcttccctttgcacctgattcaacctcactgcagtaattttcaactttatcatatgagaatccagaatccttgatatttggcactagaagccccttgacttctttctcttctagtaatgcactgctttcctgtgcactgctcatgatagctttagtgtcttgtccaggagtgtgcatgtcttaaactcacaaaaggaaagctgggtcacacagcaagggaggctgagattgtcctgtacaaggtgttttgcctgaacaaagccacgggccattccttatgcatggggtaccatgcttttcacgatgaccctgttctattctgaccttagcagtctggaccagaggatggtgcctgactcaaaaggcagccagtgagaggctgcagtgagatttctgtccaataagagaggtccatagagagtagtaattaatggaactaatcagtctctctgtcttagtgtcactaagtgtcattcaaatatgccagattttagagatgtgcataagctaagaggcacgtagagaggagacaagcaagtagatggcacaagaaacggaagctgtgagaaggcagaagccatgagatggatgcatttgttgaagaggccttagcatctgaacagagaatggctgacttgccattatgggaggaacagcacatgctgttgagggacaagatcagatctctggagctgctgctttgcctagggtgttgctatggccatcctgtatcctggagcatgccccagttctcccctggctgggctgccatctttcttgctcctccgggccccctctatgaaccccttattctgaaggaatgtgcaaagatctctgatcttggtaactatggagccccatttacaaaggaattcaaataatttaggcacaactgagttgtcctgttactaattagagtaagagagggtggctgatgtgcagacttcttccacctggctgcccctcatggagcagccaccctcatggtaggagaaacctactcagca

SEQ ID NO: 14500 - DNA, 3207 bp, Homo sapiens
ggtttcatacttttttcataggccctctatttagtttggtgtttactaatccttagattagacaagttccctctgcattcagtgtttgccaacacacagattttgtggctctgctgtagagaaataagatctcactctcttgcttgattctttgacactttgaactgagggagttggtggaaatttagaagcccggcacacactgctgttggatatcttagagtcttttttcttgcttatgtagcttcaatatgagggctacatccactaggatgtagagcatgattctagaccccgacaacttcctgctcgttgctttcagttcacagatgcaatagaaaatgtgagtggggtggggttagtgggagaggatgcggtggagaacaggtgattggtgttttactctggtaccttagaaataagcacttgcacaatagaacttactgttcagcactgacctaggcctttgagacagggcagacaggggaaggaccagaggccatctcactttctttgccatgtgtgggtttccctgcttcaggagaacacctgtagcttggccactcactgtttctctgaatccaccttctgctgtcttggagttggtgaaaatgtttctccacattttggcaatttgtattcacgctaattttgaatttcattctttaaaacatgtagtggggaatgtatgtatatttactgggaaattgagagaggttgagtcatggactgctagccaggtgtcattgtaaactggaagttcttcacactgatatttttttgtttgacagtttactcccagacactgagctttgtctggatgtgcattagtggcaccatcagcatctgatcatttcttgacacctcattcacccacttatccattgccaggtctttttgccatgggtcttgtgtccgtggtcttctttccatccccaccacttccaccgtggctcaggccttcactgtttgccatggtgtcatgtggttgctggctgcctggactggcaatcaccagccttgcctccttttccatgcttcgtattactgttaaacacactctttttactgccgtgggacagtatcatgggttcctaaaactgctcagtggctcctctttgtgattctaataagttccaggttaacatagacattctaggtacctcatgacctgtacccaacctacgttaccagtcctaacacctttactctattcctgtaccctttgctcttactcaactggcttatcctccattcacaagcatgttctacatttccctgccaccacccttctacttacgtcattccttctactgtgctgggatctgcttctcttttatttctctttgcagtaatcttaatcatcttctagaaccccattaaatgcaatcttttccgtgaggcctgaatgcaatatcttctttctctgagctctgaaactggatcatctattgaatacattctgctttgtgttggagtttgtgtgtgtgtgtgtgtgtgtgtgtgtgtgtgtgtactacctgctacctccccttctagattgtaagttttttgaagtcccccatcacattttacattggttaagctattctattttgctaagccctaatttcctgattaaactgagtgcaatagtagtgcttaacttctaagtttgcagcattgttaaatggaataaatcatctagagtgctgagcagagagcttgacatacaacaggtcctcaacatttattggtggaacaaataaatgaatgagtcttctcgttttctcttgaatcctatattattgcaaatgcaaaatgttttcctatcctaaactttgctaaatttgcagggccctcagtactagttgcattccacatttttcttgagcattgccagaaagtttaggggcaagaagggaatgatcaaatgtaactaccattagtgaaaaccacaggcactgaacagctggataatgtgaacagacaagttcagctgaatctccagaaatgcatcaatcataggatgatggcagcttttggggagagttaagagatgcttgaaaaggagccagagtgtggaagaaaaaagatgtttagagttgggttttcaaaaccaaagtcttcatcatggccaacaaactatgggaaggtggcaaatgtgtgtaaaaagaccttttcattttcttgagttctttagaaaattggagagttttgtttggtttatttatttatttatttttgagcagcttaataatagaaattgcctcagggatggcgtctgccattgcttttcaaatgcaatactgttctccctccggggattgtgctgcagaggctcctggagtgaatattgcaaaagccactaataatactccttctcaggtaacattttctggtataaaatatcttggcttaatatagtctaaaaacattgaagtgtaatgtggccaacacgataactttctgaaatacaatactattgtccttacttctgtcttggtttctgtggtgtcagaggcccaaaatgaatcaagatgacaaatccttagctaaggcaatgtagaagccaccatggtactgtacaggaattatagtctcttatttttcccgggagagaaagcatggagtaatgtaaagaacactggatgagtgtcaggattcagcttcaggaggggaaagccaatagacttgggcccagcacttaaccactgtgcgccttatctcttaattggaaggaattgggctacagggtcttaggggtccttctaaataagaagttttcaattctaaggtttcttctgtctggagaggagcatatcatgatggattggtctctggaatcaacaggcttggttttgaactaagagatcttcgaccagttgcttacccacccgtggcctcatttttcttatataaaagatggggatagtgatattacttgtatcagtttggatatgcagctgctgttgatttgttgattcagctgctccacaggaacccacgctctttttgatgacttcaccatctttaatttcatcttcatgtttgttgcctcatcttataaaaaggcaccagcctctccaggtattaagtcttcattcccatcagaaagcagggggtgggagtgggaggtgatagcaggattttttttcaagtatatgcatggggaaagggtctatgttctagggctgcttcttccttttctctgaaaaggaacaactt

SEQ ID NO: 14501 - DNA, 1093 bp, Homo sapiens
ccctgtgattgtccatagtaaaaccacacagggtgtatttgggggtggccttttttgttgtgggggtgattctgtgagtgttgctgtagctcaccctaaattactcatgtccatcctaaagcacagcggaagagatgtacatgactgtcagaccagagcttctgccaagcagaggcaggatgcaacaagacacttgaaagcagaaatcttcctgtttctgtaacatttccagctggaaaaccaatcagagccacacattccagctacacttgggaaacactgaaatatccaagtagtaatcacctaggtatgctgctaactgcagctcaaaataattctggggttgccagtgccatgtaccttgtaggcttccaattacctgtgctcacttctctcttttctccaaggaccaattattgggggaatttggcatttctcctcctctctgcttcagccattcaaagaaagattgttatacaccagaatgtctgaccattttaattaagccagtcaaaggtaggtgctgaaacagtttagcccccgaagcaaggattaaacacttaaggttgaggaacatagaggttagttagtgtcaaagagttggaagagaccctagagtaggatgaccatacatttcagtttaacctgaaagcccctgtctcggtgtaattattatcacttcttttctctcaaaagtgctcagttgggacaaaaatgatatagctactttgccttaaagattatctagtctgcctttcagtttggttcaaatttaatgtagaaattatctttctgtgaatgatggagacttgggagatgtaaaaaaataaaaaaaagcttttattttatttaaaccttaaataaacctatttatttttattaaaatctttctgttttctcttcctttcaaacacatggtcatctgtttgctattaaccaccagtaatgggggactcatactttgcaaggaatctctaattaatgagttctcagttctgcatcaaaatcttccttcctctggcttcaccctttgattctagttccttcttctgaaacaatctagagtaaatttcttctctcttccacaaaatat

SEQ ID NO: 14502 - DNA, 1103 bp, Homo sapiens
tcctcctcatccaccctgcttcatgctgttccataattgcacgttaaaatgctgtaatgaacagatgcttctagtgtgtagtctctttgtaatttctgctatcatcctccattttcatgcaaaattaatgtatttccagatgctgattcctgagtctttctacccgatagtggcagtgcatgagatttgaaactgggcaagggggtatgaagatgtgtttggggcagaggtaaaagagtaaagaggtcttgcctattaaaaaaaatgtaagaatgcagcaaacaccttgtagtgcctgtttgttttatcatgaatatgcagttctgtgctaccctgtatttatgtggttgggaggagagactgcagatgcaggggaaatcttcattccattcttatcattcagactctaaagtggcttgtcattgaaaatttgggctttgaaaattcaaggctgtcataatttaggctatggagcaagatttcttgtccaagcaggagtcttgctggtcagtgggctggggagtgatttgtgtgaatttatctcagcacgagtcccctgaggctggtttctaggctgccttggttaaaaatagcctgttgatgaaatcacatcctagctcaaacctagcccaaggaaatggctcaaggcccgagcaccttactggaatatgaagcagagacagattcaccaagaagtcatcagattgtccctttactacaatttgcactgcagtgaaaaatctgtgtcaacctctccctcctctttcaaaaattagctggttagattctcacaggactgcgttatttgactccagtcagggtaatttggacaaatcttactgagccctgaattgatggtctagagtgaattgagtcaggattaaagtcaggattctctgagtctgacgaccagaggccaagactcttcctttgggaagctgccaagacatctaagagacaggctggagatcatgttgagagcaccaaggccaggaaggactgctgatgaagttttgtccttctgttcagtatttaacgtacttcctatttgtaagacattccttaaaaattgctacaggcacagtttttgttaattggcttat

SEQ ID NO: 14503 - DNA, 1142 bp, Homo sapiens
ccctgaggtgcaggggaagaccaaagtttgcaactcgaactgctttcgtccatgtttctcacattgctgtattttagaaaataggggttaagactgataacaaccttttacattgtgactgtgtttgcattgtctaatgacagataaatccttaacatttctctccaccttagtactttagactaattgtgtttgtccgtccatgccatgaatgagtgggctgtagttgggcctaaataaatgagctgttggaagaaaagaatcacagtactttccagcagtcagtccctggttcctagatgtgttctaagcaatgcaaatgtctaattgtcccccagtgggcatagtcagtgtcgtttatattgtagcagttacagctctgtagtttatgatgcaaatctgccaagagagatgtatgtgtcactgcatggcttctgaaagcaggatgaattttctgcagctgtttcaaagttggggtctgttcttgaatcctctattaattactgtgtgtgagccagagggagctgtggtaagggttgggcccccagcctgtagggaactttctggactcccactctttgaatcgatataggcatttggtctcactacttgaccattctcaccctgtgaaacgtcccacactttgaagcaaatacaattcacagcacagtacacacaaaaaccttggcataagacagagaaggttcttcttattttgtgggctggttgctgtagaaacacataacaaagggcagccctccacttctggtataattgtgtagccccttttctttgggcttgacacctgtcttgaataagagtgattagagctgcataatgtccctctcttggctattgaccatgtggttcacgtacaaaactctgtataagttgaaggaaaatgttcatgttcatatgtacttgtttgctatgactacattttgaggttttgtaaaactgttatttttttttttttcacaatgtgaaactgaaggtcaataaattattagagattttctcttcattatgtgtgtgggtcttcatttgaataagacacaatttgaggcattgtaaacgtgtgccttttctcgtttatccaaagaaggatcatttcagatattccgaacgtgttttatttcacc

SEQ ID NO: 14504 - DNA, 1110 bp, Homo sapiens
cctccctaattctacagtcttatttatattcccccacagctttcatctacttctgtaactcatggagtgattctccaatcaacagatcttcctgcctgccggcttatgcccttgatgtccatttttgggtaggtttggaggtgcaccccacaatgttagacctatatggcaggagtaaaactgcccccagtgttagacctatatggcaggggtaaactgcctttgggggagctgtggttacaagggcttcaatcatattggaggcttcaatcatcctttgatttgtactgagtactggttgcaagctggcctgttaagtatatattgtgttgccataacaaaggcctaggaaaatttgaagaaaaaaaacactgaactgttattttttgtaatttatttaaaaatggacaaaatggttattagaatccaaagataatctaaaaacagttctactctttggaaatattatgtgtactcaaatttgcacttaagttggagaatgttttgagaccatttaaattgttttaaaaatagcttgatcttgatccttatgcaaaagaaactaagactttgtgtcattatttgaggtagctaaggactgatgttgaaagtgtattcagtctatagtaagctgatgtcaggtcagtaaattttgtttggggatgttggtattttcgatcaagttaaaatcttaaagcagacaaaaatagtaaacgctcctatttgtgttagattttgaacaattgtattaccctatattttctttaattagtcaaaggtaagccagattatttcattctaaatgaaaattaaagcactttggccatttattttttcaacaaatgctaatactaagtaaaaaaaaaaaagtatgactactattagtgaatctaccaaacatttatgctgttttatacattttatgagaaacttctgtcaatatcacaaagggaaatactctgttaagattcagtaaattcttaatctttacatgtttcatttcttagatttgaaaacacttgtagatattttatttttacttggatttgtttaaaatactttcttttcaaattattttaaacatggaaacgcttcatgaatttgtgtcat

SEQ ID NO: 14505 - DNA, 1164 bp, Homo sapiens
agtgaaactccatctcaaaaaaaaaaaaaaaaaaattaaaaattgactcacagttccgcatggctggggaggccaccaggaaacttgcaatcatggcagaaggggaagcaggcacgtcttacatggttgcaggcaagagagagtgtgtgcgcacgtgtgtgaaggaggaacagtcaaacattatgaaaccatcagatcttgtgataatgggacccccccaccctgacccatgatcgaatcacctctcaccaggtccctccctctacatgtaggaattgtggggattacagttcaagatgagatttgggtggggatgtagccaaaccatatcagtgaaataaaaatggtataaatgaggctacaaagtacaatattactatttggtaaggtttatatagatactcttaaatataaagtatatggatactttatagtacaatatggccttattaagtctaaaagtgtactttaaaactcaagtgttaatgattatttattctattttagctgtggcactttaccttgctgatcagtggtgggctattgatgatattgtgaaaacatctgttccttcaagagaggggcttaagcaggtaacaagatcctctaattttgagtgtttcttttgaggccatttcacagtgtttcctgtaaacagtgatagtttttgagctcttccccatttaaaaataatcaggttatattaaaccctagaatttcattcttacgatgaagccagcattcgggttgggcttcctccatttttatgtgattctataagtatctgagattgggtgaggaagaatgaatacctatgggttagttgagctttggctacctttatccaagttagcttctgattttcttatttgatagaggaaaagctagttccctttgtgtgattgtttagcttctgtctctaggagagactgaccaggaaacttgtttattagtagggcctcttcaggtggtctatatagtgttcctaacagtggaatgaccaggttcaggagagagcaagcttccaacctcggcagggttatagtagaaggcagccagctgaagaacgttgcaggaaggaagctggttttcatgctagagatgaaagggtttaagagacatctctggtgctctagttattggaggataaataggacaggatat

SEQ ID NO: 14506 - DNA, 1107 bp, Homo sapiens
tttgaaatttatagggttgtgcagctatcatcacaatccaattgtagaacattttcattattccaacaagttctcgtgtccttttacagtgacttttatgttgagtggtttatgagagtatatttatatgtgtatttttgtgtgtatgtacatataaatatgtcttatgcctatgtgaccatatttattatgtaaggacgtatctgttaatttatttcattgcctgtttttaatacaaatgaataatgtttgaaagttttctttttgacatgcatggttaaatcagcaggttcaagttgtattctgcgggcaaagtgaaacagaaaaatcttgttataacaaaatatggcaacattgtagtaaaatttattttctgtgagtaaaggaagatggcgtttcatattctgaattgtttgttccatgttgtttgttaaagaggatggcattccctgtggatatgctggaaaattgcagccatgaggaattggaaaattctgctgaagattacatgtcagatttaaggtgtggggaccctgaaaatccagagtgtttttctcttctcaatattacggtaaggtgttctgcagtgattgtcatcaatcttttcagttcagtttatacatgaaataaatatccttttttaaaaaaatcattttaagtgttaatcattaatttttgaaatctttacagaaatctattcagtaaaatggataaatattggttgatcagtttttaaaaagagaaactccacaggttattgctatttgactttatggctttaaaattatatgtgagaataccaccagttttgctaagactgtttactatatttgagctgcttcagatttactttagatttggaatttgtgagtttagaaaattttttaattaaaaaatcagcaaaacactaaattacatattttttgtgccatgaatcttttcttcctttttctaaaaaagtaaaatcaaattttctagtcagtaaattataatattttgtgatagatcattagacttggaaccattagggtttcactgtgaactgtggtggacaaattccttaacctctctaggccttagatttttcttctggaggtgacttaaaga

SEQ ID NO: 14507 - DNA, 1210 bp, Homo sapiens
ttataggccgtcctaacccatacataattaaatgtttttactttcccagaaaacagaaaaggattgctgaacagtgttgaggcccatctgagattttgatagttgtagcagttattttgtcatattcaaaaactcggctctcatagtagaaaaagatgagtggttagaggaatctagcgtttaggaccttgtgtagggcaggagtgatggaagaaaaagtaaggtaaagggattagttgagctgatgtagtacagggcccaggttaattagggaaggaaatgatgttagaaaacagaaaagggagggatcaagagaggaatcataataaggttcagaaataaggttgagagcattgctgattatgttgcctggatacctaacctattctcggtgttggagagaccattgtgagagttaggatcatgaattggattggttgagataattatttttttccctgagaattctttcagctctatagtgtacatacttctttttgggtctgcctctctccacaaagcccccaaataatagcagtaacctgtaagaatcatgaaataacttacgagctgaacatgtagaatatgttcccatcttttcagaatatagttggcatccagtaatcaacaataaatagggaaaaaatcacaataatataaatttgttttctaactcttttcatgcttttcttaaggttatccattctgtcaaatacataatttttttgggaaaaaggaattattaaaaggtagatacaatatagcagatgctcatgatcttagatctcttatataagaggtcttggtattatgtttttatacagcttaccctggattaatgagcataccattcgcttaatttgtaaattagtttggacactttttacacttcgctgtccattctgtgtcagttttttgatgagttcacttaaggctacattaagctttctcattcatgtagaatctagttaggccttttggtttatctcatggacagagcataaagtacttgacagaatttgatctgacagctttacagttacataacatagaacagaagcttaaaaacaacaaaaaagagagagaagcaagggatttatcatagcaacctatatttctctctggaactttaccacccttccgctgcctctctaaactatagtagcagaaccactgttaggcttgcaatttacatagtcttaaattaacc

SEQ ID NO: 14508 - DNA, 1149 bp, Homo sapiens
gtagtctcttgaatttccacatttgagggtaatcgtggaattaaaaaaatacaatatatgcttgttctagtcagtcaaatgatatcttaaaatttaggtaataaaatacaactttgagtttttgtgagcagtttttataggacaatttaaatttatgtttcaaagcattgggaattaaaaaaatacaatatatgcttgttctagtcagtcaaattatatcttaaaatgtaggtaataaaataaaactttgagtttttgtgagcagtttttataggacaattcaaatttgtgtttcaaagcattgttatgtttgagcgacatcagaaatatgttttatattatactcaagtttatttgtaaagtgagggagaaggatttggtggtcatctaaggtctcttctagcctctataattctgttttctatttgagatcaccaaatgataccttaaacagttgtagtacaatatgtttgttaatttttagtcttaagttggcattttgtattatatcattttccaaacagatcaatgaaataaccaaaattataagaacttcagtaggcatcatagaggttatattgaaattagagtttgttggtacacaaaaaatattattttgaccttatatcaggactggcataactggcaggatattctacttatataaaaaatccttggttaattggcaaattgcttttctcctaacaagtgggattagatcaatagtgtcactggggttttgctctgttagagtagcctgtcctctccttatttaataataaggcactactgcttgacaaaaaggaattggaaacacatatgttttatcaattgtgtattaaacactaccattctgcctggcattgtgatatggggacatgagagaaggcaagagctttgctcttgagggacttagagttctgttgttattcctgctgtttcctaaggcttggcatcacctctaagttgctaattctatttccagtaagtggcaaggagcttaatgtactaatattttcatgttttgtccacctgcaggaagacaaatatatccttgtgatatatgcagcataaaaaataacgtagactttactagttgtatctttaatttttctctaaccaggggtacgtcagcttgaaattatgtgc

SEQ ID NO: 14509 - DNA, 2443 bp, Homo sapiens
tcatgattttaagggtgaatcttgttgtgtctctccctggctacagatgctaggtgttcaaggagcatgcaaagataatcctggggaaaatgcccggcagcttgcccgaattgtgtgtgggaccgtaatggctggggaattgtcacttatggcagcattggcagcaggacatcttgtcaaaagtcacatgattcacaacaggtaagactcaaagatatatttaacatgttccccctatacttcaaaaaatatgcagtgtaaaaacttactattcatctactgtagttccaagttaaaattctacactcctgatatttatatattgctactttgtcattttctaccataggtcgaagatcaatttacaagacctccaaggagcttgcaccaagaagacagcctgaatagcccgacagttctgaactggaacatgggcattgggttctaaaggactaacataaaatctgtgaattaaaaaagctcaatgcattgtcttgtggaggatgaatagatgtgatcactgagacagccacttggtttttggctctttcagagaggtctcaggttctttccatgcagactcctcagatctgaacacagtttagtgctttacatgctgtgctctttgaagagatttcaacaagaatattgtatgttaaagcatcagagatggtaatctacagctcacctctgaaggcaaatataagctgggaaaaaagttttgatgaaattcttgaagttcatggtgatcagtgcaattgaccttctccctcactcctgccagttgaaaatggatttttaaattatactgtagctgatgaaactcctgattttgtagttaatttattaagtctgggatgtagaacttcaagaagtaagagctaagttctaagttcatgtttgtaaattaatacttcatttggtgctggtctattttgattttggggggtaatcagcattattcttcagaaggggacctgttttcttcaagggaagaaacactcttattcccaaactacagaataatgtgttaaacatgctaaatagttctatcaggaaaacaaatcactgtatttatctccgcaggctatttgttcagagaggccttttgtttaaatataaatgtttaaatataaatgtttgtctggattggctataacatgtctttcagcattaggcttttaagaaacacagggttttgtattctttactaaagatatcagagctcttaatgttgcttagatgagggtgactgtcaagtacaagcaagactgggaccttagaaatcattgtagaaacacagttttgaaagaaaaataccatgtctctaagccaactttaattgcttaaaagacatttttatttagttgaaaaatctagttttttttgtaaactgtatcaaatctgtatatgttgtaataaaacttatgctagtttattggaagtgttcaagaaataaaaatcaacttgtgtactgataaaatactctagcctgggccagagaagataatgttctttaatgttgtccaggaaaccctggcttgcttgccgagcctaatgaaagggaaagtcagctttcagagccagtgaaggagccacgtgaatggccctagaactgtgcctagttcctgtggccaggaggttggtgactgaaacattcacacagggctctttgatggacccacgaacgctcttagctttctcagggggtcagcagagttattgaatcttaattttttttaatgtacaagttttgtataaataataaagaactccttattttgtattacatctaatgcttcaagtgttgctcttggaaagctgatgatgtctcttgtagaagatggactctgaaaaacattccaggaaaccatggcagcatggagagcctcttagtgattgtgtctgcattgttattgtggaagatttaccttttctgttgtacgtaaagcttaaattgcttttgttgtgactttttagccagtgactttttctgagcttttcatggaagtggcagtgaaaaatatgttgagtgttcattttagtgactgtaattaatatcttgctggattaatgttttgtacaattactaaattgtatacattttgttatagaatacttttttctagtttcagtaaataatgaaaaggaagttaataccaataagtgtaagcagtaaccttttttctttggattaaccctagccctgaggtctggaagcttgtaaagtctggtcatagtagtaacctgtaattcatgctaggactcacatgaccatttattctcaaattctacaacattgattgatagcagtattctattacattaaaatgagctctcttagagggtttgattagttcagatttatcatctcaactagacatcttttggatagtgagagtgggagggctagttaaggagaagaggggcagccacaaccaaa

SEQ ID NO: 14510 - DNA, 1931 bp, Homo sapiens
ttacttgcatcagatatagtgatatttattattctgtacagagagaaaaatacatataaaacatatgcttacattacatgcacgcggatttcatgctccataatcttttctattttttaatttacctttctgtaaatgatgtgcatggaatatgccttatagaaaaatgctgttcataatttgactacgtggaaaagtgcctatatggtggtaatgctagtaaggcaaataagacaaattatcatgttggtttactacatcaccagttaacattttatattgtgatgtttaaaaaagaaaaatttatacctcaaatgtgtattttattttacaatcagctgtggggtatggggttgggatgggagaatgggggggttggggagggcaggtttattcaccatagccgctgataagaatcttcaaaaaaattctatatgcgcactataaatgtttctctgtttgccatttctggtaactatcatgaacacagacagttaactctttcataactgaattggatagctttattttacagaagtatggcaagtttacaaagcaatatctaaatctaattatcattagttgcatttggactaaatgtgatgatatacttttgcaattgattctgtaaataaaaggattacactaaaatatttgtattaaaagaagaaaagataacattttacctttagataactgcacttgtacctcactagagttaatcccacccaatcagattgagaaataaattggggaatgtggaaagagtccaaaagaggtcagaatttggagaggtactggccttctggacaacatttagaccctctacaattattttcattaagctgattcctacatcctgaatattcatgttttctcatctacagatatttgtcttcccccaaactaaaagaaaaaaaactaccctttactctcttttctactcagttactcttttgtgctatgttagaaacttgaaatatattggtgatgtggggattttgtccctgactgcccactgtacaggacaagagagtacagtgtttcagttggaattcaggactcctggttttgaggtagaggatgatcactgcagtacttggtttggaattgccacaggggtagctaaaccaaaggagggttatatctgcaagggaggtgtaagaaggcaaaataaggaaaaggaggaatgggttttctatttgttcagtttcatcaactaatttatacacttaatacaacttcagtgtcaattgctattaagaaatttttagttgggctgagctggttctcttgtgaaattgtgctggttatctttaagcttatcagttatttgtccaattaaacacttttcaccagtatttagtccgagttgtacagacgatgtatttggattttgtcatggttcatctacagactcaaaacataatcattttaaagtaccttgggagtgtgtagagtaacttctataatagctttatgatcctgatgatgttttttaaacacaataaagttggatcttccatgttacaatcacagaattaaaaccagtatttaaagtggaaaagtattaaaatattatggacaaatatgctggcttgatttgttttccttaaccctgagatattgccctactctgaatagttaagagcttgaaattcagtgttcttcccgtaacccagttagggatcaagaaaactactgagttgcagcctaaatttttttttttttttttttttttggagacagagtcttgctttgtcacccaggctggagtgcagtggtgggatcttggctcactgcaacctccacttcccaggttcaagtgattcttgtgcctcagcctcctgagtggctgggattacaggcatgaggcactatgcccggctaatttttgtatttttagtagagacagggtttcgccatgttgg

SEQ ID NO: 14511 - DNA, 1238 bp, Homo sapiens
atgccattgcactccagcctgggtgacagagtgagactccatctacaaaaaaaaaaaaaagaacaactcttagaggcaagctaaggtgtcttctgcatagaaggcacccttatagtcctgttcagcccttctggtcctcttacagagtggaaatggccccacggaagggagcaagagataggaagactacagggtgaaataattcataactcagtaaccttcccttacacaaatgagagtgaatatggtttaaaaataatgtatctaaagacattccacatatttgggtggcaaaaataaatagatggctgatactgtaatcatctcggggagctttaaaaagaaataattgtatcatacccttctccatagtctcactaaatgagaatattcaggggttgaggggagagagagagattaagattttgttctttaaaagttccttgataggtagatatttattgagcataccttgattaccagtgaaaatacaaagatgagtaagacttcatactcagaatcagaatccagagtaaaatgactcagttgaacataagaatagacattaatttctatttcttttcatcctaatttccttaaatatattttatttagtggtagaagatgatgaagatgactttcctacaacgcgttctgatggtgacttcttgcatagtaccaacggcaataaagaaaagtgtaagtaatacatttttcccctcagctggataaaatatactttcagaagttatgtaacaactcacaagaaataattacctgattaattttttaaaaagcagtagaactggtggaatccaagtgaaaatatcttccaaggcatgcaggtaaaaatcacattctgacattatgtaataatggtaacttttacataaggatgtccagctgtcccagcatcatttgctgaaaagacaatttttttcccttgtcttggcaccttcgtgaaaatctgatagactgtaaatgcgagggtttatttctggattctcagttctgttgagttgatgtacgtgcgtattcttattaagaaaatataagctttaaaaaagctttattgagatacaattgacataccatttaaagtgtataatttgataaatttggatattttcgtgaaactatcaacacaatcaagatagttaacatttatatcaccttcaaaagttttctccatcccctttgtcattcctctctcccccattcctgaatagccactgatc

SEQ ID NO: 14512 - DNA, 1387 bp, Homo sapiens
tgacggtgttattccaagggaatattgccaatgctacagtaataaatgaatgtcacttctggatatagctaggtgacatatacatacttacatgtgtgtatatgtagatgtatgcacacacatatattatttgcagtgcagtatagaataggcactttaaaacactctttccccgcaccccagcaattatgaaaataatctctgattccctgatttaatatgcaaagtctaggttggtagagtttagccctgaacatttcatggtgttcatcaacagtgagagactccatagtttgggcttgtaccacttttgcaaataagtgtattttgaaattgtttgacggcaaggtttaagttattaagaggtaagacttagtactatctgtgcgtagaagttctagtgttttcaattttaaacatatccaagtttgaattcctaaaattatggaaacagatgaaaagcctctgttttgatatgggtagtattttttacattttacacactgtacacataagccaaaactgagcataagtcctctagtgaatgtaggctggctttcagagtaggctattcctgagagctgcatgtgtccgcccccgatggaggactccaggcagcagacacatgccagggccatgtcagacacagattggccagaaaccttcctgctgagcctcacagcagtgagactggggccactacatttgctccatcctcctgggattggctgtgaactgatcatgtttatgagaaactggcaaagcagaatgtgatatcctaggaggtaatgaccatgaaagacttctctacccatcttaaaaacaacgaaagaaggcatggacttctggatgcccatccactgggtgtaaacacatctagtagttgttctgaaatgtcagttctgatatggaagcacccattatgcgctgtggccactccaataggtgctgagtgtacagagtggaataagacagagacctgccctcaagagcaaagtagatcatgcatagagtgtgatgtatgtgtaataaatatgtttcacacaaacaaggcctgtcagctaaagaagtttgaacatttgggttactatttcttgtggttataacttaatgaaaacaatgcagtacaggacatatattttttaaaataagtctgatttaattgggcactatttatttacaaatgttttgctcaatagattgctcaaatcaggttttcttttaagaatcaatcatgtcagtctgcttagaaataacagaagaaaatagaattgacattgaaatctaggaaaattattctataatttccatttacttaagacttaatgagactttaaaagcattttttaacctcctaagtatcaagtatagaaaatcttcatggaat

SEQ ID NO: 14513 - DNA, 1642 bp, Homo sapiens
gtactgttccattctcttcatgacctgcctcagtgtgcagaggtattgggtcatcgtgaaccccatggggcactccaggaagaaggcaaacattgccattggcatctccctggcaatatggctgctgattctgctggtcaccattcctttgtatgtcgtgaagcagaccatcttcattcctgccctgaacatcacgacctgtcatgatgttttgcctgagcagctcttggtgggagacatgttcaattacttcctctctctggccattggggtctttctgttcccagccttcctcacagcctctgcctatgtgctgatgatcagaatgctgcgatcttctgccatggatgaaaactcagagaagaaaaggaagagggccatcaaactcattgtcactgtcctggccatgtacctgatctgcttcactcctagtaaccttctgcttgtggtgcattattttctgattaagagccagggccagagccatgtctatgccctgtacattgtagccctctgcctctctacccttaacagctgcatcgacccctttgtctattactttgtttcacatgatttcagggatcatgcaaagaacgctctcctttgccgaagtgtccgcactgtaaagcagatgcaagtatccctcacctcaaagaaacactccaggaaatccagctcttactcttcaagttcaaccactgttaagacctcctattgagttttccaggtcctcagatgggaattgcacagtaggatgtggaacctgtttaatgttatgaggacgtgtctgttatttcctaatcaaaaaggtctcaccacataccatgtggatgcagcacctctcaggattgctaggagctcccctgtttgcatgagaaaagtagtcccccaaattaacatcagtgtctgtttcagaatctctctactcagatgaccccagaaactgaaccaacagaagcagacttttcagaagatggtgaagacagaaacccagtaacttgcaaaaagtagacttggtgtgaagactcacttctcagctgaaattatatatatacacatatatatattttacatctgggatcatgatagacttgttagggcttcaaggccctcagagatgatcagtccaactgaacgaccttacaaatgaggaaaccaagataaatgagctgccagaatcaggtttccaatcaacagcagtgagttgggattggacagtagaatttcaatgtccagtgagtgaggttcttgtaccacttcatcaaaatcatggatcttggctgggtgcggtgcctcatgcctgtaatcctagcactttgggaggctgaggcaggcaatcacttgaggtcaggagttcgagaccagcctggccatcatggcgaaacctcatctctactaaaaatacaaaagttaaccaggtgtgtggtgcacgtttgtaatcccagttactcaggaggctgaggcacaagaattgagtatcactttaactcaggaggcagaggttgcagtgagccgagattgcaccactgcactccagcttgggtgataaaataaaataaaatagtcgtgaatcttgttcaaaatgcagattcctcagattcaataatgagagctcagactgggaacagggcccaggaatctg

SEQ ID NO: 14514 - DNA, 1330 bp, Homo sapiens
aaatagaatttggaaacttattttttctccccaaaagaatcagcagcacaggggaactatgtcacagtttacctcttcctgattcagaaatgtgtatggtttgcagcttttaaaaaccatttttttaaaactaataaatagtgactgaaccaatttatgcagtaaatagactaaagttcacagggcacggatgagtttatcaaacttcgttattttatcttgtcatttacaacatccatataagcaactagccatataagcaaaattcatagaactactaatgacttaagtgtacatctgttcttgtctccatatattcatgtaagatgcacaacaaaagaaacatcagaagtttataaaaataaatctgactatatgcatcctcatttattccctttagaacctaggtaaaaaatgttgcgaaaacatgggtagtggcgcatacattttgttatccttgaaatagcctaagtaatgttattgaagaactaatgaacaggtaacatattgtagaaaattagtctttcattgttttcttctgtgaagaatctgttgctatgtactgtatattcagcatttatatttggtttgtttcatagctaatgaggtatttagatatgaacaactgaatacatattgaaatagtgtgctggcttttgtagttttgataaagaccattgcaggcaatggaattgtgccagagaaatctgatttctagtacaaaaggaatacttagccagggcctcaagctcaagatacttattgaaaacatcctcaattgcaataaaaacattataacatgaaaaagagtgattttttgaaccggtgatttaaatgtattgatctgctttgaattttcaagcagccagaattttctagtttaaattggcagagttataacaaaggagagcctcaaatattagacaattgcagtgcggctttctgggcacaggtgtcactgctctgccacctatcactattctttttctgttcagtttttctctcaggtgtttgctgggaaattaacactggaactgacccttttctggcagtgaatgtaagctctagctcccccatctactataaagaaatgtcttcgagatgtagaaataaggaatattctgaaaataaaaattatacagtagtaaagataattcagaaagaaaaagctacctgttagaatttccagtctaaatggcacagggtagttacggagaaaaggggatggagaaggagaaactatgactaaagatgagaggtatgaacgagttgtcaggttcctatgggcttaagctaggacaatcaggccctaaactccaaatttggataa

SEQ ID NO: 14515 - DNA, 1563 bp, Homo sapiens
agctccatcagctttacatttcatgatcattctttccagattctggcaaagattggatgttaaaattcatttttgaggttgttttgagttcccttacttccttatgtctataggtattttagtgctaagttcaaagaggtggcctccagggacttaaaggcaaataccacttgcaactggaatcaaatatatgtattgtaaatgtaaaccataatctaacctgtgttaactatctcgttaataattttacttatttaaaaacaaagctaattaggaaattagaaatacttgtaattgcagtgagtaacaatcaccaccagagtgaatgggcaccttctctgttcttattcagttctcagaactaacttatgtggcactgttctttcactcttagagcccagaaactgtaggccaaagaggtgaaataccttgttcaaagaccactgtaaccaactggaggagctgggatttgaaccctggtagcttccctctagaggccccatttttaaccagtataccataggcctggtcttttggttgttttggggggattgttttggctttgttttagacagggtctcactctgttgcccagctggagtgcagtggtgcaatcatggttcactgcagcttctacctcccaggctcaagtgatcttttcatctcagcctcctgagtagtggagaccacaggcatgtgctactgtgcctggctaatttttttgtattttttgtagaggcagagttttgccatgttgccctggctggtcttgaacacctgggcttaagtagtccactgcctcagcctcccaaagagctgggattacaggcatgagccactgcgcctggccactaggcttgtttttaatagtctctatggatgatgatttatttcaagatgccctttttgttgtgtttcaggttttgctgatctttgcaaaggaagatagtcagagcgatggcttctggtgggcctgcgacagagctggttatagatgcaatattgctcggactccagagtcagcccttgaatgctttcttgataagcatcatgaaattattgtaattgatcatagacaaactcagaacttcgatgcagaagcagtgtgcaggtaccttctctaatttaatatgcttagtaaatgttcactttacatcttaaaacgaatatcatttatagatatctttagtttatttcaaatatttttaaaatatgcgttgatgtttttaagcagtgtatacagatgtctgtggtgaaagctatagctccttcctgtagatttctctctcctcttctacttttccacatttgagttgtactaaatttagaggtgtgagctgggctcccctgataacttcagggtattccccccaccctgtgtattgctcataaaaaacattaaaattcacacagttcgcattacacagatacggtttggatttaaactagctattttaatcttcattattctctcccaaaatgaacatcggaaatgtgtgaaatataaattttttcctgcctgacacagatgggtagatcccatagcaggcttcccagtcatgg

SEQ ID NO: 14516 - DNA, 1212 bp, Homo sapiens
aaaaattagaggagaatggtgacttataccttgctgtctagtttaaggaattaaaaatacacatgcatgaaccttgaacatcaaatatcgggtactactctgaaaaccattaatatattgatcacttaaattggtaattttttttgtcagtccataaaattctacatgtttaaattttttgtggacctaccaaccaggaacatgttgcttctcaggtcctagtatatcctccaaagaatataccacaagtttttccatttgactttgagctgctgttgaagtggtgagtgctgtgttttgagcttattttgaacctagatccttgtgaaaggtacaaatagaggtaatagttaagttatggcatttattagaagttttattatttggcttcctttagaattattgtgaagtttaaaaatagcctttctcctgcaaattttcctagtctttagtaactgttagtgttctatatagcacaaacttgaatctctcagccaaaaaagggaacatatatactgtttaagtatggcaagttttctttggtaccaatttgtttagataattttaaaaatgttttttagttctagctactaaaacctgtatgaactcaaatggataggcatcttgtgagggtgtgtttttcccagtgtgaattggcttgaagagccatgggctaaatgggtactagaacaacaactgcccctcatgtacgccaaggatgagctctagatcatttgagaggcacagtgtttccggagtcagggactgcagctgagcgcaactgccccatctgaccactgactcaaatacgaactgcttgagacagacttcttttatgtagttctttgcagtgtccattgagacactataaccagccttgtaacaatatgttttctccttttggtgctaaaaaatgaaaatattagaaagtagtctacacattaaagattgaaattcttaaactactgatgaagaaagggcaacgtgacagatgttagcagactgacccttcttacagaaaacctacagatttatttgttcattatacaaatatactacaaatataccctaaagggaatctccataagttcttttactagttttagctttgacagttgcttccacaactacctacaaagactggaagagttaaggtcatctgagtagaccagtggcataatgttacaaatgaggaaactgaggcccagtgca

SEQ ID NO: 14517 - DNA, 1176 bp, Homo sapiens
aaatgaaagatgtattttgtttcctttagtgtagggtatgtaatacccattagcaagcaggcaattcatttgtttaattcaaagattatatttaactctgttgtgacatcagaagccttctttgtcattgtgaatagtcagtggattattttggcctgaatgctgtcatatatgtaacatgttagtaaatcttcctttttacttttctcttttgtatgatgatgatgggtcaacaaaatgagaataaactttttctgaggtttttatttaattaatgctggtagctttagaagactgttattcacttattttatgagaatatatacagtgaaacaaaaccaccagttatttcttcctttccttgtaaagaaggaacagaatgtgggaaacctgtggaattacaatatatttagatgaggcttgggattttttacttttaattttttagttattaacattaatggtttgtaatatttgagtaaataacaaagtactgaaacttgaaaaggataaacttaatttttattgtatttcattttaggaaaatgaaaaagacttggaagaagctgaggaatataaagaagcacgtttagtactggattcagtgaagttagaagcctgaaacttttctcgtatggggtggtttttgcattaaatcctggggtccattttacaatccattatttttgaccactgctatgtgttcaagtagtatgagaatgtgattgtttttatctggttacatatatatttctttgtctaatttaatatgtcaaataaatgagttcatctaataaaattgtttattttatactttacaaaatttttaaattaaccttttatcattaaaccacatagactttatgacagagaactataatctgttaggttctattcgaagtctacatattttgcttcacaagcatggattgagttttaaaaaatagaataccattttttcaaataacaatccaaattttagttgggtgtagtggtacatatctgtattcccaactactggggaggctgaggtgggaggattgcttgagcccagtagtatgaggatgcagtaaggtatgattatgccaatgtactccagcctacggaacatagcaagaccctatctctaaaagattgaattgtaagcagtttatttggaatagaatacaactgata

SEQ ID NO: 14518 - DNA, 1106 bp, Homo sapiens
atggagggccagactcctcatactcctgcttgctgatccacatctgctggaaggtggacagcgaggccaggatggagcctccaatccacacagagtacttgcgctcaggaggagcaatgatcttgatcttcgtcctgctgggcgccagggcggtaatctccttctgcatcctgtcagcaatgccagggtacatagtggtgccaccagacagcactgtgctggtgtacaggtctttgcggatgtccaagtcacacttcatgatggagttgaaggtagtttcgtggatgccacaggactccatgcccaggaaggaaggctggaagagcgcctcggggcagcagaaccactcgttgccaatggtgatgacctggctgttgggcagctggtagctcttctccagggaggagctggaagccgcggtagccatctcctgctcgaagtccaggacgaggtagcacagcttctccttgatgttacgcatgatttcccgctccgcgtggtgatgaagctgtagcggcgctcggtgaggatcttcatgaggtagtcaggtcccggccagccaggtccagaagcaggatggcgttggggagggcatacccctcgtagatgggcacagtgtgggtgaccccatcactggagtccaacacgatgccagtggtacggccagaggcgtacagggacagcatagtctggatggccaagtacatggctggggtgttgaaggtctcaaatatgatctgggtcatcttcttgcagttggccctggggttcaggggggcctcaaacagcagcatgggttgctcctcgggagccacgcgcagctcattgtagaaggtgtggtgccagatcttctccatgtcgtcccagttggtgacaatgccgtgctcaatggggtacttcagggtgaggatgcctctcttgctctgggcctcgtcgcccacataggaatccttctgacccatgcccaccatcacgccctggtgcctggggtgcccaacgatggaggggaagactgcccgggcggcattgtcgcccgtgaagctggccttgcacatgccggagccgttgtcaatgacgagcgcggtgatatcatcatccatggtgag

SEQ ID NO: 14519 - DNA, 1257 bp, Homo sapiens
ctaaaactgtgcacagtgggtcattgatgctagtcacagtggaactgaaggaaggctctacagcccagcttatcataaacactgagaaaactgtgattggctctgttctgctgcgggaactgaagcctgtcctgtctcaggggtaacctgcttacatctggactttagaatctggcacacaacaaaagtgcctggcatccactactgctgcctttcatttataataatagcccttccatctggcagtgggggtagaatacactcttgacattcttgtctcctgctttagaatgctagtgtgtatctatcatgtatgcaatactttccccctttttgctttgctaaccaaagagcatatattttactgtcagttgtctcaactcttgaatccatgtggcgttttctctgtcctgctgcttcttttggcctcctcgttttccttctctttttcgacaatggtagacatgaatgagatatttaaagttcattggaaatcttcttccctacagcagtaagcaaaaattagcaaagagatagtctaaatggcctctcagcttggtatgtgaaaatgagatcacatactttttaaatccaaatacaaaagcatagtctctgcaagattttgttctttgaatttcttgatattgtaattgattattgataactgtcatcatgaaattatctctcaataataagataaataaactagcatatgaatcatatttgtctttgcatttttaatgagaaactattaataatcctgaagttcatatgctaaagttttcttattttaaagcaagtattttgagtgttacattatgcagagaagcaatgtggtttagttagcgaaagaaaaaccacttccaaaccaagtaaattttctacttatagtttactccaaggaaaaaaaattggtgtatttaataacaaaaacaaaaatcttcatattgcaaaataaacatcttctaggtagttttgatctattagtagatatctgattatgtggcctgctgaataaattctttgaatctcatttttccttatgcccaactttggaaactaactagcataaacttatagaaatgtttaaaactagttatatgatcaacctattagcatcttttcctagagtatttgttttatttgctaccttaagttactgttttcaaggttgttctataatcagagaacttttctaatactttcgtacctttttaaaaccagctgaaattttacttcctttttgaagcaaggtaa

SEQ ID NO: 14520 - DNA, 1182 bp, Homo sapiens
attaccagaaagtttaaaatgttattgaaaataaagagagttacaaatcgacagtaaatacaacccagagtaagaagtattttttaaaaatgacagaacaagaaatcagtgagtgtcaagtggtagaagttattcttaggaaattttgtaacagttgaaaaattatagacttcagtgcctctgtagtattagaagcagagctttaggatcccattaaaaagccacagtggttgaacatcatgttgtgttgtaccccttcctccccctgaaaaaaacaaaagaagataaaaaccacaggggcactccaggtcagtgattctgtttgtttcttctttgtcaaagactttcagtgatcagattaaatctcttgatagttaaaaatattttcctatagaacgtcagtataaaaaacctcaaactattgcagtgaaccaaggcctttgagaaattcgggtttcgctcacattgttgatagttttgtgttcatgtgtttcccttaggtggcttattttctttatattagaatgccttttcccatctataataggcatacaggactgtggagttttttgctttagtttagcaactggaataagtactctccaccttggagctaccataactacttatttatttctgtttctttctgaatgatttggtgtataccatgcaattacagaatatacctattttctaataataggtgactataattgtggaaaagtcctccttgcaccaagtgttgtggcttctgccctaaattatgagtaatgaaggcagatggtgggtactttactttaatttagcatgacaatatgttagtgctgaaaattcatatgccttatatctgcagcctaactaaatctatatttttactctttcttttcttttttttcatccagacaatgtgttttgagggcactgagcatgaaaatgcgacctaggagttaccttgaatatatggctttcaaaacagttaatttttatggtagtcctatgagataagcatagtgttctacttgttgggagagaatatctttgtttcagtttcctcatctgtaaagcagacatgctagtacctaccttacttctttcaagtgttatgttaaaaataaaatatgaaagatcaatgtaacacactatgtaactataaaacaacagttttaacatttttaaaaattc

SEQ ID NO: 14521 - DNA, 1152 bp, Homo sapiens
cagcaagtgcacctatattcaccattaacttatatcccaagtccattttttcctgtacactacaaacaaaagatatattagagacttttgaaaaatgctgaaatactttgcttcagaattggaatgtttatattatgtagaaatcttcaaaggtagcattattaaatagcaaagaataattagaacccacatatctttttttgtgtggatggggaaaatgttttaaaatccagttatttaatatgagtttgagagagaaaattgttttttaaaaatatatgtgcattgaaatgatggcaatgcttatagtatgatcaagtatgaaaggaactttaaattcttatatttacttttctctcagtaaattgttaaattttcactcagcaaaagattggcatttgttaagtgttctatatttagtactaaaatcacagtcatgaaatcatagtcataaaatggtcttcacacagcagtcatccgtgtcatttatcattttgtaatattaaattatggcaattttatttcaaactaaagtttgaacaccggaaagtcattactcagtgatttgtaatttgggacttggattatttatctagagatgtttgtatattttgtcagtaactaatactgcgctgccatcatggtgactgtcatggttctacagaaatgccctccatgtgtccctctaatgttgcatgtttcagtgggttggaagttttgtatatttattgtattaacacagagtgtcataaaataaaatgctgtttactggatgtttgtttgtataattttgaacactataatagcaattcagagacagacattgttaaaggtttgatgtatatagaaattccatgtttgattttttaaaatatgtgtataagtctgtcatgtgctaaacaaaataatatgaaagacctagttaaaaattctaaccaatgtaaaatgaccatttttctgttgcattagacctttacaggtaatggaacatgagcttcacccatattaaatattttggcccctttaaggtcaaaatacagatcatctagaagttagattcaaaatggaaaacctattcatggctcagatttttcattgtgggttaaaaatgggtgtctctgtactagtattgtatttattcaattgaacttg

SEQ ID NO: 14522 - DNA, 1215 bp, Homo sapiens
ctgggaacttaacttgaaataggaagttctcactgaatcctggaggctggaacagctggctcttttagactcacaagtcagacgttcgattcccctctgccaatagccagttttattggagtgaatcacatttcttacgcaaatgaagggagcagacagtgattaatggttctgttggccaaggcttctccctgtcggtgaaggatcatgttcaggcactccaagtgaaccacccctcttggttcaccccttactcacttatctcatcacagagcataaggcccattttgttgttcaggtcaacagcaaaatgcctgcaccatgactgtggcttttaaaataaagaaatgtgtttttatcgtaatttatttccccccagccattgctcactctgtctagacttcctgccacttccaattcttctgtggcttttcctgcctttccttttgacctcagtagtcctatccctgggaaggccactttgcttctctacctgagcacccctgatttctggaacgctgctgagccctgccttacttttgcccctagggctgaagctagaggcctccccgtaataggcggtggagttgctctgtgaggatgttcatggtagacactaagagggctgggtgggagatgcttggctctgtggcatctgttcagcgaggcttttcctatattgcatggagttagtcattgtgattgtagctttatttcataatatattaagacttgcactgctatttactagcagtgagaagaaacctcaggaaaggatatgaaaaagcaagtggccagtgtctgggatactgggccttggtaaagcagaggagggcacacccacagtcctcttattctctgttttactgcttgttttgaggttctggggtctggcaaagaggatgcagtttgacacctgcagccctttctcaatcccactaatgtcttactaatgtggaacagtccatattagctccagagagtgtcaaacccagagaaatgtgtgcaaaaatgatactcttttctgcattagccccaccattgtgttcaccaatgcttggaacactgcctgaaggcactcattttttaatttttattttatttttaattttttatatctttatgagacgatctcactctgtcaccaggttggagtacagtggtacaatcacaactcaccgtagcctcaaactcctgggctcaagtgattctccc

SEQ ID NO: 14523 - DNA, 1324 bp, Homo sapiens
catttccagttccaaactcgcccgtactttttatgtgcttcaaaatattggacacatttctgttaatatatgatttctgtatccacaaaccgctgtttgcttatgctgagtcaatttagaagttaatttccaatctagtctcaactgcaatgcatttaaaataggtaaaacaagtaaatgagtttgggacattttgagattaatgttactgcccacttgactgtcaatttcaaatggctcctaatgcaaccaaaattataaccaatgtagcatgtgtaggaaaggtatttttaattatttaaaatcattgtgtatattacagcagtatgaggaatgcctggctaaagaggattttttaaaagatgaagaatggttttgcttgtattatataggcttactgagtttgtgagcagcataaaaacaatcattccttaattcttcattgtggaactgaaatatttctgtaatgcattttttaaaaggagactcctagacacagctgtaatagtgggaatagaaatgtagagcttttctcataacacaaaaccagaaaataattttcagcactttgacttactctatgtaataaggaaaaaaattgtttccacaaagttgaactatgtagtaatatttggtaacatatggcatggccactttatatcacagaatgtgtgtcaagttgcaaagcatacttgggccatagtagacactaagaattaaaactcttaaatcagtgaaacaaaaactaatgggcagcattctctctgtttggaatgggatcagtatacaattaatacaatttaattttacacattccctaagacaccatttttaagttacagtcacatgagtgtttgtataaatttaagtcaatgcttttagcctaggcaaagctaaatacaaggtttttggggttttcttttttcagctttattattgaagtattacaaacttaacatcagataccaatgtgtaaaaagtactattgggtccttaagggctctatcagggagttgaaatttcatacgctttaccaggttacttgtaaaaaatgaacagctgtaagacatttcaaaaccattgcagacacattgttaaaatgcagccatttgataatgaaagcagaaaccttaagttttacctaattattgcactaaatgtaaatgataacataaaattaagtgtgcattttaaacagattctatttcccacttactgcttagcatagaaaaagagctatggttagaggagtgaccagcaagatttatttcagatggaaaaggggtgagaaagtggaagcaccttactgttagagcatgttgca

SEQ ID NO: 14524 - DNA, 1190 bp, Homo sapiens
aacaaattattccagcttttcccaatactaattatattggttttaaaaagtctgcataatcactaggtggcattttcccttcatttgtgaaccaagaggggtaaatgatgctacccatacagtgacttctgagttctttaactttgacagaatctccattgtttcattgaatttctcattgtattatatgtctttccaagtgtgcaaactataatatgtagttaatgaaaaatggaaggctgcagattattttgcatgaataattaattgcccattagggctaaggagactgacatgatttttatcggttctgggtaaatgaaaattttaatggaaaactcattcaccatttactagctttgtgcaatattataaaaggtagaagcaaaacactagcacattgtgctttgcttggcttgtaaggatggctttagtaccattacattaaatggacagtgtgcacagtgtattgtaaatgccaactcttgcaaatttacaatacttaaatatgttcaattaacatcctaaagtattaaaagtacagaggaaaaactaagcaagcatttatagcaataccatgaaatctccagtaatcgttttgactgttgccttttgctctttagtgcagcttttctgcattgtaattgtattgctttgtatttcatgttttttacactcatgacttcagagttaagtacttgtacaccaagtattgcaatcacctttctcttgttgtacatgcaatgtaacaacctacagttttggtgcttttaacaatattcctctttttctttaataaaggatatttatttgaattaattaacctgattttgtttgtttaaaatatcagtggtacatattttcacttcatttcaaataggaggaccatagcaagttgtatatctgttatgacaaaagttataacatggagaacaggatccagagaccatccatgcctgtatttctgcctcttcctgagcgctgtttgttgtgacatattttgatggcaactttctttgtgctattaatgaactttctcattgtttataaatattcacaaagtttggaagtgctgacttccaaattggaaaatttttaaatgggggtggggagaggcagaaaaatatttataaagttacacactcagatcaaatagatcaaaatctcaaaaatagaacagaaaagaaaag

SEQ ID NO: 14525 - DNA, 1198 bp, Homo sapiens
cagcctggccaacatggtgaaaccctgcctctactgaaaaatacaaaaattagctgggcatggtagtgggcccctgtaatcccagctactcgggaggtcgaagcaggaggatcgcttgagcccgggaggcagaggttgcagtgagccaagatcatgccaccgcactccagcctgggcggcacagtgagacttcatctcaaaagaaaaaaaaattataaaaaataatatggtttataaatcaggcagctatgtaaatcacaatccctgttgagaggctgcattatggcagtagcggtgggaatggattcagagtctataggtggtagaaccggtaggacttcttgactaatttagatggcaaggaaaagaggaatgcaggatgcttctagatctcgtggacaaccagatgaataatctcatttccccagagagtgaattcagaagggcagaaactcagttttgtgagttctgttttgcattttacatgcctatcgaatatccaagtggaactgtgggtctagatggagctcgagagataactatgagctggagataaatatttgggagttgccactttatgtagtggtaattgagagcataagaaatggagagaatgcagggtgaaaatgtcatcttggggcagatgcaggacaagagcttgtgaaaggaatggccaagaggaataggtggacaaccagaggagtgggagctcacaggagccttgagtggagtttcagaaacccagatttcacacagaaacatcaacaaatcaacttcgcgtctcgaggtgatggtatttaaactgtgttctattgagacccttcattaatatttggttttgaaatatattttaacataagttaaaaatagcaaactcaaatatggtgtttctaacattttaaaactgaaatccagcaaacatcagtgccacgttaactgtttttttgtgcaggtgccagaataaggccatttctggtaaattgaagagcttcctggtatttcaaggtgagctgttgaaagaactggtaccatttctcagtgtgaatcagggctttctcaatgctctgtcactgaaacaaaatacagaaatagggtctacataagataacttctgtcttctgtaaacctagtctcaaatgtttgtttatgaaaataattttattttgaatgacttaactgcttaagtgtgacatcccat

SEQ ID NO: 14526 - DNA, 1134 bp, Homo sapiens
aatatgcagttacatttatttatatattttgcaagaaatcttttctgaatgatcaatgcatttcaatttacgaataataatggttattggggaactgtttattatagataattttaaggtgtatagctattttaaagggggtccatttacatcaaacagctgatcagaggactctatctaaattgtgatcgtggcagatagagatggagtcatgtactctatctggctctacacatcaatcacatcttgattcaaacctcacaaggcaatattctgaattgttaactaggtatttcaaaacaggaattaaattcaataggctcttctcagtgaacaggttttaatgttgttttgatgtaattttaaaagacttttagcaaacatgcatttctttatatgatatatttcttttacgaagctattttaaaagtaagccaagtgctgtctagtctgcttataaagtaggaattgcatcagagtacatatattcttgctgtacaatgcctgtgatgttgaggagggttcttttttaaagtgtatgcttgagtaactgactctatggagtctataaatgcactgacttcttgtttgtaccccaaaatgatcgaattgttaagtacaaaattaagctaattaaccaatttgtaaccattttttcactcataaacagctactcaatactagacaattttgttttttatgtatgtgtatgtacgtaaatacatacatattaatttacattagagtgaaaaataaatggtttgtttctgaagttagtttcttaagtgagttttcaggtgtctctgaaaaatttataacaatcatgtattatatgtgctgtaacatcatgtacgttacctccatctattttaggatattttcctcacctatatattatagggagaataatttagatacacatgctcagagctgagatatttctctgataaatcaggtaacaaaatgtatttgattgatggaattttgaagtaaatgtgtttttatccatcagtttctgagtaacaaagagcaccaagttttaatttaaataggagatttaacactagggatcagggagtttagtatgaagagttaaaaaaatttaaaaaacagtgtaagctgttgaaatggcaa

SEQ ID NO: 14527 - DNA, 1119 bp, Homo sapiens
acaaatggggaagggcagattaagaatgcatatgtcccaatccacttctataggagtttaatcatattcacatgagtaaaatgatggaagaactctttaaggtaatcctttgggataaaggatcctgggaagttctctcaggtaaagaaagcttacagcagatttgtaatatatgtctggagagctatttataagaaatttaagaggattgttttgttttcctttattaaagatttaagcctttttactttgcaaaaagaaaactacaaaagttttatagatataactttgctaattttttaaacttttctgaaacgattagctgtagccaaattatgtggttacgttttgctacattagaatttgaaaatgcaatatgtgtggtaaatctactgtttgaaatttataatggtctctgatatgattcgaattttggtaacttttgaaagttattttccccctttagtcatggatttctatttgttttttaatgttaatttttctagaaagcatctgaattgactaggcttttcctatataaaaaactcaaaacttgttaactctgtactttaataaaatttaaaattaaaactgtgttgtttttttctcttctgctagatacatatataattaaagtactcaagttagttgttttgcagagatgttgccttcagatgttaatcaggtctctcaagtttcatggagtctatgctgatcctttaattgacaaataaaagatatatatctgtggtgtgcaacatgatgttttgaaatatgtatatattcaggaatagccaaatcatgctaattagcatatgcattacctcatgtttttgtgctgagaacatttaaaatctactcacagtaattttttttttctgtttttttggagacagagtcttgctctgtcacccaggctggggtacagtggcgcgatctcggctcactgcaaccaccgcctcccaggctcaagcgattctcttgcctcaacctcccgagtagctgggattacaggcatgtgctatcatgcccaggtaatttttgtatttttagtagagatggggttttgccatgttggccaggctggtcttgaactcctgactacaggtgatctgccca

SEQ ID NO: 14528 - DNA, 1198 bp, Homo sapiens
ccagatatattgttgtaggactttttccttagttcagttaaagacagcgaggttgggggagggtggtcctcatcacacagccatgtaaaattaggcccgcagacaattcgaaggaggagaaaaatggaatttattgggcaaagagcaataaaaagggaaacaaagactctccaacaagacagaacgagaatcttgctagtatgcttcccgcctcacagactgtaatcccaggttccacccaggaggaggaggggccaggctcctccctgctgccaaaggcgtgaacttctgtgtctccaccccagtgcaccctcctctcaatgcatacgcccattggagttttgtcagggagtccttcccacatgactatctcagtatgaaggaggagtttcctttgtgcctaataagtggctgtgtcacattcctgggcattagagtgggaaatgtctatattctgaattcctaacatatctgattattgctattactcttttctcacagggaaataaatgcccggcttgatgctgtatcggaagttctccattcagaatctagtgtgtttggtcagatagaaaatcatctacgtaaattgcccgacatagagaggggactctgtagcatttatcacaaaaaagtaagtgtgatagaaatctattaaagctgacagtgttcttcagcttgaggacactatatattaaaagaaaacttttgagagctctattattattttattttgtaaaatcttacaaatagcatgcgagagtagctgaatcctcagaaattttaatagtacaaattagagttattccaatttttccattgtagaaaataaagttttctcatgtgccttaactacagcaacatagaggcccttctgttataatatagggtattctcctgtttcatcctgaaagtacagactattatcaaaataggaaatttatgtagacttgttattttagaaaaaaaaaaccttatttcttttgatcttagaacaacttattgtttcttaaactatggaaaaatctgctagtataacatctgtggtggtagttagtatgcaaacaagcttggatattgaaggtgagtaaaggattattttgatttttatcacttaagctttacagtttgagtcatagcaaaaatgagtcattttccacggttagggaaataatttaggttatcttcaaaatatgcc

SEQ ID NO: 14529 - DNA, 1205 bp, Homo sapiens
ttagttatgatccagccttggactaaatttaccaaaggtttttacaagtgcctgcaaaacataaatctgtctggatggagggaggcagagggactgggtaatgatgagcctctgggtgcagggagaggataggacttgatgctttccaggggaaatatttaaaatttcagtactaagttaagtctgtatcattttactttttttatagtttcttattttatgttgtatgagatgaaaagcttgcacataaaagatgataagaaattagaattcatcgtttctgttgtaccaagaagaaccttagtgatctctaaaagaattgttgttaaaatatggattcttctttccttctagtactcccctagcatgacaatgagcgtgtgatccattaccaagtctcctcatgaaaaccacagtgagtcagcccttcacagaactactacggaagaaaattattcatcacagtgtacagttaaacaaaggaatctcagtcacaccaaaccaacctttttatttcctgctctctcccctcttttgtgaagaaagcgggtccaaatgtgattcaaacaactgtacggagtggcatattagaattgccctaaactgaactgcaaataattatgtgtgtatgtatatgtgtgggaaagagaatgtactgtatatgtgtatgttatacagacatatacacatacatacattgacccacaggacattgtaaaatattatcacatgacatcttaagtagaaataagtagggacttttattccatcctttttttcacgtttacattttaattattacaagttgctcctgccccctccctgaactattttgtgctgtgtatatcactgctttatataagttattttttaaggtgaactcagatgttatggttttgtaaatgtctgcaatcatggataggaataaaatcgcttatttgagagctttcattaaattgcgtctgatgcaagttatcctgtgaatcacaaagtgtactgtctcaaaaaatagaagaaaatgtgtcttcgtctttatgttgaatcaaacaatttctcagttaccttcagtgaaaagtatttttttaatttttatttgagaaaaacacttcaaatcagtaaaagcttaactggggcctcacacagtatatttctgcaataactgctttaaacggagttcttgatttgtttgtcttagatgatacaga

SEQ ID NO: 14530 - DNA, 1276 bp, Homo sapiens
ttttggacagcacaaagaacagttctatcattgcaaatgattttattgaacaataacattcttacttgtccgcttctccatgtctgccacatcaaaagtgggaactcatttcctagtaacttcttactcctcagttttgctaacttctcattggccccactgattctgtctttcctcatatggcaaaagatagtgataccagaaaataatatattattttggtgatcattagttgctggttcatacaagatttcctttcttaaaacagttctgcagtactattgaccttgctctccttaccttttcctgcaagtataacaattaccaactaaattctatataatccctacgtgacagcctgtcacatttgggctcttgttgaacttgatagcatctgtagctcttgtgtcttaaaattgtgtgttactgttaagcaagagctcctgtttttgtgtagttggatattttttagcctacatttaggtttttatttttattcatgataggtatcatctcatttttgcttgtgactttttaaaaaattaaatcttaaattgtttacctcacaatcattattattattattatcatcatcgttttatacccagctttgataaacaacattcctttgtaggttggtcaaaactaacttcttattttatttttattttttgagagaattaccagatgggcagcatgctatagaagtggtgagtttgatctcaaccaaatcatttagaatgctttcagaggtgggcagtcatgtgagtaaggactccagaaatcatatcaaatttgaagaacctgacaatattgaatgtggagaaaaatagactattttagatattcgaaggactgtgttgaatgagcagtgttgatcagaaggaaaatttattatattgggagcaaatttatcaaggttaattataaaaaaaaatgtgttgctagtgtatccagagcaacacacataggttatcaagaccttggagcaacaccagataagaagggtaactgtaggatgtttccattcttggggccacagaggtgaagtgagccaaaaaaacacagtgggaattaaacaaagtagggttaagttttcattaaaggctgtgcctgcattcaccactcctggttgccctggcaacggggctcccttgcatgctaatgacattataatgtgaaaaaacacatgcaaatgcagtaaatagtaattagagtcagaggcatacatggagtagtgagctccaccttgggaaggtctgcgaagagctggtga

SEQ ID NO: 14531 - DNA, 1235 bp, Homo sapiens
ttacctggccagccctggctttaataggactgataccatggaatatttcatctcaccaagatgtgacatggattatttttcccttggacacaaatgtctacagcaactggtgtttgataggctgaatgtttagaagaaacacttcaaagggatacatcatggccaggcatggtggctcacacctgtaatccaagcactttgggaggccaaggtgggagcatcacttgatcctgggagttcgagaccagcctgggcaacatggtgaaaccctgtcggtacaaaaaaatacaaaaatttgcctgtttatggtggtgtgttcctgtagtcccagctccccaggaggctgaggtgggaggttggctttaacccaggaggcagaggttgcagtgagctgagactgtgccactgcagtccagcctgggtgacagagccagacactgtctcggggaaaaaaaaaaaaaaaaaaagacacatcactataaatagcaaaaaaacaaatctaacttattaatactaggaataccaacattattagggcacttgcaggttattcttttctaggccaagtacttcacttccatttgtctgacatggagattgagggagaaatgtatttgtgtgttcattttaatgtaagatatataaaaattaaattactggatttacctgtccctgaaactggtgttataaacatgacctatcttaagtgattttcccacaatcaaactcaggaacaatagattatttctgttttactccaaaagagagagagagagtgagtgtgagtgtgtgtgtgtgtgtgtgtgtatgtgtgggtgtttgtgtagatagttgtaaaacaaagaaaaaacacaatattttactgtgagataatatgttttaccagcaaagtgtggcatagtaattagaagttttctaaaaagctataggagatatttaaacattaaaatttctttttgacctatagtaataaaacaatggtcattttacccctctgcttctcaaccccacagctgctctgctgtactctttgagggctcttgagcgagtcttcatgtccctgagacttattttcctcatctttaatttgaaactaacaagctacctcatagggttgctgtgagaaccacatgagatcattaatgcatgataagatattgtaaagtattatacgaatattcattaaatgctcacctttcttgtatataattggtattcactaaggctgtaaataa

SEQ ID NO: 14532 - DNA, 1227 bp, Homo sapiens
ttagtaataagatgatcagtctagttaggacaaaatagagattgaataaattaacttttccaagtttacagagtaaaaatgagcagatctctgcctggttttgtgaaaaagagttagcactggtaaatagaatatttctactcctacaccattctttcagtatatcatcactgaagacaggaagataggcacacagattcttcctcgtagtaattcatagtgcactaggtgaaagagatgaagtatgtattaaaagtacaatgtgatggcatttattattcagataatcccaggattctagaagaaaataaagaagagtgacagttcagttagggtgtgaacttccagaggagcactgcttaagctgaacttgagagcattgtgcaaaagcacagtagtctgttaagaactagaaataacctagcttgtgccacttcgggagtattaagacataagcctagaaaggtaggcaaaggttagatcttagactgtcttgtatttttctcattcctgttgattacctacctcaaaattgaatatgtttttcctcctgcctaacacaaaactactcaagggcagaaatttaaattcttccttggtgtatgtgcaaagaaggttgaatatattcatgcctaccttattttggactaggaatacagtagtatactttccgaagacttgcctgaatagtatataaggtggaggcaactgactagttaggtcagtatttttagaaactcttaatagctcatactcttgataccaaaagcagccctgattgttaaagcacacacctgcacaagaagcagtgatggttgcatttacatttcctgggtgcacaaaaaaaaattctcaaaaagcaaggacttacgctttttgcaaagcctttgagaagttactggatcataggaagcttataacaagaatggaagattcttaaataactcactttctttggtatccagtaacagtagatgttcaaaatatgtagctgattaataccagcattgtgaacgctgtacaaccttgtggttattactaagcaagttactactagcttctgaaaagtagcttcataattaatgttatttatacactgccttccatgacttttactttgccctaagctaatctccaaaatctgaaatgctactccaatatcagaaaaaaagggggaggtggaattatatttcctgtgattttaagagtacagagaatcatgcacat

SEQ ID NO: 14533 - DNA, 1177 bp, Homo sapiens
atgtattcataattataacgaagctaagtcaccattatcttttctgctttaaagtatcagaagctgctaccttgccatgaaaaagtattacatgctcctccaattccttccccaccatatttatccaacaggaaaggaatgaataataaaactttgggctttttttcccttcttttttttccaggtgatgtgttccacctcactgtccccagtaaattcaccttcgaggaggctgcaaaagagtgtgaaaaccaggatgccaggctggcaacagtgggggaactccaggcggcatggaggaacggctttgaccagtgcgattacgggtggctgtcggatgccagcgtgcgccaccctgtgactgtggccagggcccagtgtggaggtggtctacttggggtgagaaccctgtatcgttttgagaaccagacaggcttccctccccctgatagcagatttgatgcctactgctttaaacgtaagtgtttgatacctttttaaaaattacagttttaaaaaaaatgcttcgaagcatgcattgatgttcaactagccgttggagtggattccatgtcttgcagtgtgtgcacggaatggaaacagttcagtgattttcaaaagcaagcaaactgaacagcagtgatatggttaaaaccacaggaattttggcaaatggatttttagaggggtgaggaaatatcaggttaagctgtaactgtgctctgttgtgtccagagccacagagcatttttctaagtattttatattaattgcagtccttaagttttgcaatttgtttattggtgttacaatgccaaggccaactgaggctgagttaaatccttaagattgttgattttgtcttcggtatcactctgtttctttgagatggcaaagaatttaaatttcagtaattacaggtgagtatttgaagctgacatggatactcaaaatgttcaagtcataactaaaaatgaaccatactatcaataaaaatctccatttatgtcaagtaatggaaatacatgccttctaatcattaattctgtagtatcatattgacgtacaatatgtgttctttgcaacctataacagagtatctttagttaggtttactaattaacatttttttttaaataacatttctcaacattcatgatataattattttaatttt

SEQ ID NO: 14534 - DNA, 1142 bp, Homo sapiens
tcattcaacgtcaccttccaactatccggtgcttaggaaatggaagatgggctatacctaaaattacctgcatgaaccgtaagtggtcctttagaaagaatggactaccgtgctataacaactactagacaccttcattttacggctgtggtatcggcagtttagggtatggagcaagtaatattgtgtgttttctttttttctttctttccttccatgtagcatctgcataccaaaggacttattctatgaaatactttaaaaattcctcatcagcaaaggacaattcaataaatacatccaaacatgatcatcgttggagccggaggtggcaggagtcgaggcgctgatccctaaaatggcgaacatgtgttttcatcatttcagccaaagtcctaacttcctgtgcctttcctatcacctcgagaagtaattatcagttggtttggatttttggaccaccgttcagtcattttgggttgccgtgctcccaaaacattttaaatgaaagtattggcattcaaaaagacagcagacaaaatgaaagaaaatgagagcagaaagtaagcatttccagcctatctaatttctttagttttctatttgcctccagtgcagtccatttcctaatgtataccagcctactgtactatttaaaatgctcaatttcagcaccgatggccatgtaaataagatgatttaatgttgattttaatcctgtatataaaataaaaagtcacaatgagtttgggcatatttaatgatgattatggagccttagaggtctttaatcattggttcggctgcttttatgtagtttaggctggaaatggtttcacttgctctttgactgtcagcaagactgaagatggcttttcctggacagctagaaaacacaaaatcttgtaggtcattgcacctatctcagccataggtgcagtttgcttctacatgatgctaaaggctgcgaatgggatcctgatggaactaaggactccaatgtcgaactcttctttgctgcattcctttttcttcacttacaagaaaggcctgaatggaggacttttctgtaaccaggaacattttttaggggtcaaagtgctaataattaactcaaccaggtctactttttaatggctttc

SEQ ID NO: 14535 - DNA, 1056 bp, Homo sapiens
catagtatgctagttatttttcagtgttagccttttactttcctcacacaatttggaatcatataatataggtactttgtccctgattaaataatgtgacggatagaatgcatcaagtgtttattatgaaaagagtggaaaagtatatagcttttagcaaaaggtgtttgcccattctaagaaatgagcgaatatatagaaatagtgtgggcatttcttcctgttaggtggagtgtatgtgttgacatttctccccatctcttcccactctgttttctccccattatttgaataaagtgactgctgaagatgactttgaatccttatccacttaatttaatgtttaaagaaaaacctgtaatggaaagtaagactccttccctaatttcagtttagagcaacttgaagaagagtagacaaaaaataaaatgcacatagaaaaagagaaaaagggcacaaagggattggcccaatattgattctttttttataaaacctcctttggcttagaaggaatgactctagctacaataatacacagtatgtttaagcaggttcccttggttgttgcattaaatgtaatccacctttaggtattttagagcacagaacaacactgtgttgatctagtaggtttctatttttcctttctctttacaatgcacataatactttcctgtatttatatcataacgtgtatagtgtaaaatgtgaatgactttttttgtgaatgaaaatctaaaatctttgtaactttttatatctgcttttgtttcaccaaagaaacctaaaatccttcttttactacactgtgactggtctggttatttacaactttaaatccttatgtgcaccaacatttttacattctggttccatcatggagagcaagcttctaacctggatgaaatgattttgtggcaagcaaagaaatgattatatatttacccgtaaaagttgcgataataattctgataatgttttcatctgaatactatgtattaatttcaaatatggaaactatgcaatgggaaaagtgatagctcacatcacaga

SEQ ID NO: 14536 - DNA, 1204 bp, Homo sapiens
atatctgaacaatgtacttatttaagacttttcccgttgtgtcaaataaaatgttggtattttaaaattatttttcttctaaggtaataaagttttagaagacacaaaactgaattttgtaaaaaagaagtagaccttacaatgtagataaaatgtcctgcaattatttggttatattttagaaaatgtgctgctattttgttttaaaatatgcattattatagtgatagtaactgtgtaggaattgttcagatttatagtgtgtgacttagaatggaggatttaagtacaagaatttaggtgacggctttttaagcactaaagcacttttgaatgtggttgttactatggagaaagaagattgacttagctttgccttttatcttttccaaaacaggtttgtatcaaaatgattgatctcttaaaataatttaatatgatataatatttcataaatgggaagaccaaggttttaatctcttgttagatgatatatgcttgatttgaagatgataatctctaaatggggttaggccaccatgcattccttaaggtttgtgcttggtatttaacaaagtggtatattttgggaatgcaaaataatcctttaaatcccctcttgtattttaggtcaggggaaccatttagattttactgattctggggattatttgaggtcagccaggatgaaatgggctcatgacacaatcaggaaagtccaaaacaattgagtggaaacattggagaatattttttatttgaaataaatggacagatccctctctgtaatgtagagcagtctcccacctacaggcctgagccttaggtctgtgctcacatctctgcttcactctttttttttttttttttttgagacggagtctcgctacccaggctgcagtgcagtggcgcgatctcaactcactgcaagctccgcctcccgggttcacaccattctcctgcctcagcctcctgaatagctgggactacaggctcggctaatttttctgtatttttagtagagacggggtttcaccgtgttagccagggtggtctcaatctcctgacctcgtgatccacccgccttggcctcccaaagtgctgggattacaggcgtgagccaccgcgcccggcctctgctgcactctttatcacattttctttccaaatactatatgaactttaattttaactatgctatttt

SEQ ID NO: 14537 - DNA, 1223 bp, Homo sapiens
caaagcaatgatggaaagaacatctgtgttcaccagaacgtactttcttcctttggctgtgaataaattggataggactattttattctaagttctggctattgggagatatggggataagattgacattgctgtcgcagtattgcaaaaacatgactaatttggttaattatgtctaccatttatgtttaagagatcctttcactaacttaaattgttaacttttaatttcactaacttaagttgttgtgatattgagaaagaattttaacctaaacagtcactttacaacaatcatgtaaagacgagtgtgcctgcagttgaggtttttttgcatttctgagcccactttgtattcatgagaaacaaaaacataatgggagaaaagttttaaataaccagtattgtaagttttcataaagtttgggacttcaaagtattaacgaaggatactgaaaacatactggacttttactttggtcaaattactttctatgatctgatttcttaattttctgtatttgaagtcttgccaattaggaatatctatatctatatataaacagataactaaaacttaatggtaaaaataagtgtaattcagtaaaatgattcaacagtttttatttttagaataagttatcgcttattgcattgatatcatatttatatattgccttgcaatgctaaatgctctaaaaagaatatttaggctacttccattctatgaccttcttccccctcccccaggatatacaaaagatcttatattaactaattctctatgtgaattttgccatatcaaacattgtgccttattttattaaaactgttttgttggaatccaattctgtattaaagtctctataatgttaaaaaaaaaaaaagaaaagaaaaacatctcatgctcatagattggaagaatccatatcattaaaataaccatattgcccggagaaatctacaaattcaacacaatttctatcaaatcacctatgtcagcgtcacataattagaaaaaaacaattctaaaattcatatggaaccaaaaaagagcccaaatagccaaagccattctaacaacaacaagaaaaacaaagccagaggcatcacattacctgactcaaaaaaagttactataaaaagttatactaattaaatcagcatggtactggtacaaaaatagacacacagatcaatggaacagaatagagaaccccaaa

SEQ ID NO: 14538 - DNA, 1099 bp, Homo sapiens
aaaaaaattagccggacgtggtggtgtgtgcctctaatcccagctactcgggaggctgaggcaggagaatcgcttgaacccgggaggtggaggttgcagtgagccgagatcgggccactgcactccagcctggacagagcgggactccgtctcaaaaaaaaaaaaaaagaaaaaaaaagagctgtattgcacttaacattgccatgtatcttctaaggtgactacttaggacagtagttttttcgattttctaaagtaagaaacttctcactatttgacgtttgagtcctcaagaccattcattgcctagtgcttagtaaagccagattatttcttgccatgtagtgttttgtgatgaaggtcataggatttgaaagataaatgtttaaaacgatgttatgatttatggcatatgttaacctgatgatgtaaaatataactagcatttcctgtatacttgtattttgattattaagcagatgatttgagattcaatttcgattactttttctctttttttccaacagaatttgccattttcagtggaaaacaagtggtcgttactagctaagatgtgtttgtactttggatctgcatttgctacacccttccttgtagtaagacaccaactgcttaaaacataaggatgtttcagttcctccatttaacaggtagttagtggatttctaatcatgttaaagcaggcctttttattaagtagcctcttccccatcacccagaacacacacacaaatacattgttgtgtagggctgattcctgaggttatgtgtagatgtggcattggtggagactagttgtaaacctatataaaaatatttcaataatggccagtgtttattgaatactactgcttatcaggtacactttacatcgatatctcatgttctctagcaagcttgtgaggcggatgatagtaaccccatctgagacacagagatgttaagttgttcaacatctcataactagtataatggtggaccaggactcttgcccaggcagtttcttgttgcagaactcacacttttaaccaggtaaaactgataaactgattaatgttactctatcttgaacactgtt

SEQ ID NO: 14539 - DNA, 1240 bp, Homo sapiens
gtttaagttgtgaaaaatccctgaagataaaacccttctagtgctccttgatacataagtcccagataattatgcaattgtaaatctgtgcctcaccaactcagccatgttgggaaactcaaacttttaaatatactttcctcattaaggcagtggttcttaaatgaggatgattttacaacacaatggggcatttggcaatgtgagacatttttgatcgttccaacttgggggcaaaattaccagtggtgctgaggttgagaagccttgtgtcaaggggatatgttaatatatgctcaaaggagtcgttcatattggaaggttagcagatttgctgtgtgtggataaaatatttagcttaattgtcatcagagtttctcagagtaatactatagaacactaggatgattggaaagagtgtcatagtttagagggggaataacttatccaagctactaatgcggaaaggttgcggtgcatgtgatgaagcaaatcagtatgaatgaattcatgatactgtaaacgctttctgatgtactactcaaactgatagaaaatattttcatgaaactacatgatttctgttaaatgaatgggatttttaaaatgccattaatttctgtttttattttgcagatatgaagagcattttaagaggtgcagcctctggaagtggatcaaactagaactcatatgccatactagatatgtttgtcaataaacttatgacgtgaatgcttaatgcctcttttttgaaatagggaatgtaataattggccatttgcctactttattatttgggtaacattccagtattactctctgtgatttagcttatttaatggtgttaaactgaggttatattaaatttttgattcccaggtcaggattttgttggtaatttatataataaaagggaaatacaaatcgatcttaggtttatttctatgatttttttttttatcgttaacttggaaaaaatacttttgctcttgccctttgacatagtaaattttttttcccatgattgattaatcatcaagaaaacttaatttattcaaattgaagttgtggttaatcagatatttaggagcttcatttttgttttttttcctctaggtctgtaacctaaaacagaagtgtttgcctcagtaagtgttttggtgaccagtattggtcttatttagaatgaataaaagaatatttgaaattgaatataataccatgaaatttgtagtat

SEQ ID NO: 14540 - DNA, 1240 bp, Homo sapiens; identical to SEQ ID NO: 14539

SEQ ID NO: 14541 - DNA, 1152 bp, Homo sapiens
taatagagacttatgttttgaggggaattgtggtaatattttatgcatccttttgctttgatacagtttttttcaaatccaggttcccatcctgaaattgctgaccgagctttcatttattttcataccatttttcctctgtctagcacgtattgaaaaagcttctggctataacagaactgcttcaacaaaaacaaaaccagtatacaaaaaccaatgatgtcaggtagcagccttcgccccagtgttctgcatggattcagcatgtccaacatggtaattcacttcagtttaatgtctcctttgctcttgccaaaaaatagcacacttttccacattccagtgatgtgtgagctatgcaaacaaaatccaagattctgctggtgaataactatgccagcaaccttgtaagctatctgtgcaggatatttgcactatttccacatggaatcaatctttaacaacctctgagccttggtgtacagaccacctttcacaaaacgaaatgctatgactgtatcttgatatctcgaactttcaaaatatattttcagtacacccagttgccaaagttttgctgtctcttagagaaagaactatgaaatcaactgacaagaaacacattcttattgacaattgtgtataactggattgcagactgttcttactgtaactacttcctgattaggaatatgaccatttgactgttcaatgattatttgtatttacagtttccagagtttgtcattataataggaacaatctttgctgtatacttttaaaaaatactctgctatttctcttgctggaactgttgaaagaaaatatatagaatgatctattgctcatcagctttattttttaaacatacgacttattttgttgaaattgtcaaagactgtatttagatctcataatgctttgttaaatgtttacaagtaaatagtttgaattcagtaaatattattggttgttgtattgatcaatgcatgttacccattcaaccattttatagactaccaatttcttttatgttaactagaatgcttttgttaaaagttatttgttcattatttgtgctacccctttgattatgcagacaacctcatcagctgcctaacttatccatctttgaacttctgactacttgtt

SEQ ID NO: 14542 - DNA, 1105 bp, Homo sapiens
aacctacttttcttcccatacttacatggtacatatgtgggtactgctttatttttaactcttccatctacattatacaaagtactcttattcctcagttaatttgtttttccagatatttaggttgtactgcataacactgtcattgagtcagtgatgtttgaatgccatggcaatattggtttgacctaattttatagttgtcttacgtctcctaatgaagtgtgaacaggaagtgtcttttaaaaaacaattcttgcaatgtctagcagtcgcttttgaatattaggcaattatagaatatacttttagaaataaattatttagatacttctcaaagtatatgcatgttcttccaccccacccaccccctgcctcctgcctccttattttttcctctaggctcacttgtgcatttttggcctgcaaagtagatgaattcaatgtatctagtcctcagtttgttggaaacctccgggagagtcctcttggacaggagaaggcacttgaacagatactggaatatgaactacttcttatacagcaacttaatttccaccttattgtccacaatccttacagaccatttgagggcttcctcatcgacttaaaggtaaacttgatgtaaaataaactaatactacattctcctttcctattctttaacaaaagaatccaaaattttaaaactcataatcatcctcgttgttatagcatggatacaacctgtgggtctggcctggtcatctagggcagttgttttcaaacttcagtgggcatcatcagtcatctggagaaattgttaactgagattgttgggtgggacttacagagtttctgatttaagtgatctgcaatctcatttaagtgatcttcattacatccagggatgtaatgaagaccattgagagtttagaacggtgcttactataaaggcttaagataactcttctaactttgaattatattgtcatggatctgggcctgatttaaaccataaaaaattcttaaactagaagattgctaagtgacttatatttttagaggtttgtgaacttaagtcactatgtaggcatcaataatatacgtaaacaaacattgacaa

SEQ ID NO: 14543 - DNA, 1139 bp, Homo sapiens
ttctaggtaatcattcctggggtatttatccagaatctatctctaccttaccagtggataatagtctactgtccaattctgtttactctgaattaccatcagctgaagggaaaatgaaggtaactgttacacaaataacagtggcactgagcagcttaaaaaatatttttactcctcttctttttcgaggacttctgtcttttctgacctggtggattgctgcttgcctcttttctacaagcctttttgggcttttctatcaccagtatctgactgtggcatgaatctcagttaacaaaaaagcatatccaaatcaccctttaaattaaaatatctgtgcccttaaagggctgatgaaaaccagaagaaagcaaatacaatgggaaaaaaaaaacatatcagaatgtcttgtattaaatgtttcctctgtattctcagggtgaattaatgtagtaatatttaaaattacaaaatagattgttaactgttacactgtggcattggaattttaactctttgtatttactggtatgagagggctatctacaagggtaatatttctgattaccctggtttacagaaacctccagcagtctttgaaacatctcacatgactctagttattgattgcttttaatggttttatggtactgttgatagtcatagtggctgcctatagaacaatcttcaaactgagccatgctttaggggagggaaaggggctaaagtctcttctgttggtaatttattagttactcttgaaacaataaaatccaacagaaaggaagagatagctactgtatattacagtaaagaaagctgcatagttattttaaatttaatggagatgaatatggttaaaatatataactactgctgcttgagaatagcaagagtattgttttaaaacatattccacccaacttgagagttcttttaaaatgattggccatatgaacatttgtaatcttgccattaggtttggacctgccatattttgttttattctgtgatcctaactagttccttttaataggctaaaatatttatcaatactgatcagactttaaagaaattactttgtaaacctgctgactacctgtatgtattgtatatatattatatattaaatatataat

SEQ ID NO: 14544 - DNA, 2778 bp, Homo sapiens
aatattttcttactactcattcattttaacgtttacaaaggaatatatcatttcacttaggaaaatgactacattaattcatactttgaagatggagatgattttggcgcagacagtgatgacaacatggatgaggcaacctattaggcatgaaatttttcaaaaaatatttttatgatgcagcttctgaacatttggacagacttgatttgtattttatttctgataaggaataagtacttgtttctgttgttttggacaaatagttgttaccaaaatattcaaaaccactttgagtttacatactagttaccttaaaaattattccctgacactctgacattccttctaaacacctctgccatctctcttatgtactctcatgggtttttttgtatgatttgaatatgaatgtgcctaaagaatttttgctctcttaatctatgtatacatacttgaacaaatcattcttgcttaactgctgatcttttgtaaaactattgctagtcataatggatttctataacctgaaagttgatataatacagcacgtggagcactttaaaaacaaagaaacttgaaaataattttattttttacctttacatggtgtgttctagactactgcattatgactacataaacctacctgagctcttacaagtacagaattgtgagacagaggttttgtgatggaaaacatacacatagggaaaaataccaaactgagcaatataaatttcacagctcacatcttagccagtacaaagaaactttcacatggggtgaatattataatacttgaatttgagacttaatactgtatatgaattaatcatcccactgtaataactgacatcttcaaatagttgggcttatgaaaaatttgactaagacattttattttatactttatgtaaatgtgaaataagttctggtcatataaatatgtagaatgcatgtgtgtgaactctatgaagtgaagtgtggtggccttttatgtttcagagtactcaagtgtacaattgatttatataaaaatgcaaaatgaactcaggtcattttgaaattaatattaatatttttgttgtttaactttaaagctagctcccctaactttatatattttttgggaaaaaatacctaaaaacctcagcctacaaagactctcagaaatgccaaagattttcaaggaaattcatattatatatttcaaaaatgatttatcaatgttatctaccaaaagaaataattttatttttcccctttggggagatattatcctctaatatgagaatcagatccctagattctatttctacctatactattaaactcaaccttgaacctgagcttggttgtttctgtgccttagtttctccactcgtaaacaatttcctataaaaattgtttaaacaccaaccaaaatttaccatatgtattcattctcttgccttaaagatcacttcttaacttacatttggctctcaccctctaaaaatttgtagtttggagagtaactgaaagcacaattttaagaaacatgttttcctcacaaaatatattgtaatctgattttcctatcttgtattcatgcagaaaattggagaaaatgtgtattgtcttgtgccattctgcaatatgaatttctcaggaaaaagatgtttcaatggcaatactttcttaaataattcaagatgggtgtgaggacctatcttattagtttagtgctgtgttaaccatttgtgaattacttcttgtttaaaggaagttgtcaaaaaattttaagattctaaatggaatacacgaataaagtaagccttagaatagaaacctcacaaaaagttgtcatttgcggttgataattaacataggtgttttattctctcaactccttagtaccagagccaaatacaatttagttttcagaaatcttatcaatattgttctatttacctacttataaatctgcagataaccacttgaaccaggcaaatacactgaagataaaggttatttctttttttagctttgaatttgtcatgaccattttagtcttgcagatagcagggcagccccttggggcaaggatttactctgggaggtaccgttaagagccttctttccccctttgaaagatccttttacaatgttaaagtatactagttgcaagaacaagcaggatttgcaggttgctttaccagcatgagtctcatttttctggcttaaaatctgggactgtgaaattattccataggaaagtgaatgttattttgcagaattagcctcttacataaaagtatttgttgaagtgtctttaaaattgctatcatgagcaaaactggttgctgtaatgcttgtttttctgtatttatttacacattaaattcttacaaaacaaaatgtgttcgtttgttttatagtaagatgttttattttgaacttatttaaatgtttatttgttagagaaaactaatttgttaatatagatcttaactagtaactattaagcagggatgtttgttccaaatattcttgaataaacaatcaccacaaacaacaaaactctggttaatgattattcaaaaaagttgttgtgagatgggcatgctggtctgtgcctatagtcccagctactcgggaggctgaggttggagaattatttgagctcaggaggtcaaggcttcaatgggccaagaggaggctgaggtgggaggactgcttgagcccaggaggtcgaggcttcagtgagccaagatggcaacacacacacacaca

SEQ ID NO: 14545 - DNA, 1105 bp, Homo sapiens
tggttgggaagtcagtagaacactggaataggtgaagacctgacagtaatttttgtcttaagaatgctttctttaggacagaccctttaacctcacctctgtgcatctgtttttaaaatgattatatttgcctctgatatttgaaagcacttttgtagttttgatgatgaaaaatatattaaacgtgcatattaccattatttaggaaataattccttatatactgtgataaatcattgctgttacatacagtaacatgccttaattacatttaatgccttactgctttatgtaagtaaatccaagtttcagaattaaaaataagcattatttcatatggtccaatcagattcgttacataggctatataaatttgtctccattttcaccatcaagcacaaataattgggtcaaaactgcctttgaggtctgttgaagaaaatggttcattaagcaaaaaagagtagaggtattttatattagcagtaacagacaaattatttagtaatcccttaacctctgtttttcaaagagaaaatatccaatttagacttttttcctgatctctatatatagcatcaaattgggaaacaaaggccaaaggtgtatagattgcttgaaagggggtggtagtgcctctttttaagatctgttgagtcggctacagtctggctaagtaagaagcatttgcatactgattccatcatttaatctttaaaagtatgtgttttaaaaatgtaaccagaatgattcttcaatagaaatgagatttggtggagtctggattgcctgttttgtatataatatatacttaagatatataataccacctcattttctgggcattatttcctaattgttgatgtttcaggcttttgataagtcattttatatatttcaaatttaactcagaataagtaaatatttatggcaaatgcagttttatgtactttcaggagaagaccatcaggaaaagacaggacaaagaagtcaaacattaaagcccttgcaaatattagaggaccttagacaattaccaaaaagtgtttaatagggaagttgcaaatgattctcttagtaaattaaacatttaaaaagtagtttt

SEQ ID NO: 14546 - DNA, 2226 bp, Homo sapiens
aagcaatttattgcttatatctcagagccgtatacagaacttttcagaatttgcatttcacttaagggtagcatattttaagaaagtttaaaaataaatttgtttaatgttcagaatggatttttatattttgcattctgatccagttttttctttcctagcttatgtggatataagaaattttaattaatgaggatattgatataaatgatggacaaatttggtatgaaaattatgactgttttaacaatataaaataactctcctattatttagactattctgtggccactagcatgctaagtattatcagatttctaaaaactagggaaggatgacaattcagattctctgttaaataggaagtgagctttttttctacatatttctacatatgaattgtggtttcattgtgatttgaagtctgagcatgaatatatttttggttcaataggacgtgacatttcgcaaggtttagagcagcttgcaggattgataattcttaagagcctgctggcttttaaactctcagaacattgcagtccaagtccctttgatcattctaattatgctttgaacgttaaaaccagaaatttaaaaaacatgttgttttaatatgttcttttggagatacgtaggaattggtataacatgtcatgcatctcagatctattctattcttttttttcttatattccctacattttcttttatactaaaagacaaaaaagcacaggtttaaaattaaggagaatagaaggcatttgaaaccacaacatattcctaaaatgtaatcacaattgtgtttattttttatcagcgtggcttgctttagtccatttagttatccagctattatgtgctctattcagttagtataatcttatgtaatgagttttaaaaataaattcaagtgtatgtaaaattgaaacacaattttgttttaagctatcttctaactacatgttacaaattaaatttttctaaaactggaatcaaatctgcaaattttgatgctttatataaataaaatatattgataacatttggttacagtattcttggtgtacatatgtagtgtttggtttttgtcaaataaaaaaagatgtaatgaattcagaaatagaagttctttcataactgttatgagtaaaactgttttgatcttaaatgatttcaacacacgtgaattcacttaaggtctaattcctcatagccttccttttcattatctggaagagttgtaaatattgccttaaaagcctgcaaaattcagaagtaaaactggaagtagcgggtgccatttgtctctctgacttctctagggttaacgtggaaaaccaagtgctgaaatctggatatactagccgtgacctaattattttggaaaatgatgaccctgggggagtttttgaattttctcctgcttccagaggaccctatgttataaaagtaagtacgaaaaaaacttccatttattctgtgctcacaactttagaagaatgatctcaaagggtttcaacttttgtggatttgtttttaaaggaaggagaatctgtagagctccacatcatccgatcaagggggtcccttgttaagcagtttctacactaccgagtagagccaagagatagcaatgaattctatggaaacacgggagtactagaatttaaacctggagaaagggagatagtgatcaccttgctagcaagattggatgggataccagaggtatgggattttatattttctttgtgtttctctgtaagattgatagtatttggtatattatgaatataaatattttgaatattggcaaagagacaggaaagaggtgggcaagaaaagactgagaagtacatagatttggaaaatttttaacaaaaggtttaaaaatgaagactcattcatattagaatggtgtatttttgctccacatgaagaaataacaaacaatcttagactttcagtgtgtgatcagttttcatctccttttagctttattcatgttaaggcttcctttaggtaatatgtattgactgaacttttaatgatgtggttttaaactgaagaaattttgctatagaattactttgttcaaaaaaagaaatttgagttttatattaatggaaccaggtatagttctattatgcttactcaccaatacatatgtaactctaattttattttattcacttttgtaagtttaagtgactagatcatcag

SEQ ID NO: 14547 - DNA, 1115 bp, Homo sapiens
tgggggactgcatcttttagggcattctagatacataataacgtagtggaaggctccacatggtcagagaatgcatgtgagagggcaagagagggctgaacttgcttttacaagaaacccattcttgcaataatgaacccactcccaggataacaacattaatttattcatgagggcagaggtgtcatgacctgatcaccccttacaggtcccaattctcaacacggttgcatttgcgattaaatttcccacatgtgaactttggggaacacattcaacccatagcaacaacatttctataataaaagacagcatctttcataggtgaggaaactgagataccaagaagtttagtgacttgctgaaatttttacagctggcatctttcacaaccaggaaagcagaattgttaggtgacttgtctaggactctttccacaatgccagtggccagagggtgatcaagtttgagaatggtaaataaatgtggtggggatttgaatgtgtggatggaaggaaaggttagatgcatttctcaatattgaactggttgttgtgaatggtaaggtgattatcacaggcatattaggcctaagtgtatgattatataatcagataaatatattttaaatatctaagatattagaaaataatttacgttggtgtaaaaaaatgaaaatttaaaaataatactagattgacagaattgggaagtaacagttacagtctacatggagtatttcatgaaactgaatgaaattttgataatttggtagcttgactggtgctataattctactatttaaaatgatccatttcttatggaagaatgcatgttattgggtgaatattactgcattttcctctttgcttgatatgttttaagacctctcaattttctcattgtgtcaatgtgtgttgtgtgggttgtgtctctgtgtctccttgtgaagtagctgaactctttagggttgatggaagtggtagtggtgatggggacatggaattcttccttccaactattcacaaacgtggtaagcagtttttccaaggtcctttactattataggtttttattttaacttctcattttagagacaatactaaccacttatt

SEQ ID NO: 14548 - DNA, 1168 bp, Homo sapiens
cctgattttttttttccattctggaggggtgagtggggtttcatttatctgtgtgttcccccgtggtggcttaggggttggatgacactttcttgaccttgccagggttggggccctggagtcaggcctagctccggcggggctgacgtggccaggggctcaggcagtggctggacacactgagctgtggagctggagggcctcaccccagatctcctagcggtgtggactgtgagagcgagccggagaagatgcgcggggcgcgtgtggctgcgggaagagcttctgcattgtgttgggtacgctgcggcgcggcaatgttcgcaagctccctggatgcacattgcctcttttctctctttctttttgtcagcggttcagcgaggaagaatgcctccaacccagcccaatccaggccagtacgcactcaccaacggggaccccctcaacggccactgctacctgtccggctacatctcgctgctgctgcgcgccgagccctaccccacgtcgcgctacggcagccagtgcatgcagcccaacaacattatgggcatcgagaacatctgcgagctggccgcgcgcctgctcttcagcgccgtcgagtgggcccgcaacatccccttcttcccggatctgcagatcaccgaccaggtgtccctgctacgcctcacctggagcgagctgttcgtgctcaacgcggcccagtgctctatgccgctgcacgtggcgccgttgctggccgccgccggcctgcatgcctcgcccatgtctgccgaccgcgtcgtggccttcatggaccacatccgcatcttccaggagcaggtggagaagctcaaggcgctacacgtcgactcagccgagtacagctgcctcaaagccatcgtgctgttcacgtcaggtgaggctgcggtcgcggggagggcaggccgcgccggcagcgagcgcaggccccgcgccgcccgggcctggccttcggagcctcccgcgcggccggtgcggggcgggccgggccctcgctggacactgagcctggcccgggtctgtgacccccgcgcggtgaccggctggccgcgccgctgccatcttgggagcgcggcggtgcgggaaccgaggcggcgcgggtgcggccggcgggcggccgggcctagtcgcccggacccctacg

SEQ ID NO: 14549 - DNA, 2595 bp, Homo sapiens
ccgctgctgcttccccctccttaatcatgtccatctttccccgctctcaactggagcaaacttctattccagacttcagatttccattttcactaggtttttccctgagggcatcttattacccacctctttttttttttttttaaggaagttccacacacactccaaagccgatttcaaattcagaacctgaatgccatgatgtaccatgtagtttggggaatgcaaattgttctctccctgttttcatttcgggaccagaaaaaaaaacaactctgcataaaaatctataaagtactgaatccgcattactgctgaaaatccttttgccagctaattgtgagagtttacacaagtctctgatttcagaagagactgttaaaaccaaaacaatgatgggcagctcttttaagtgtaggtgtgaaggtcccattttcaatggaatttccaactgttatcactgggattgactttactttttaaacacataatgtgtactgtgtggcattgtaatttagatataacacacttaagttttgctttttaaatctctctgtggagaaaggttgttgttaatcctttccagaatgatctattctgagctttcctggagttaggcccttctagggagagaatttttttattgtcatcaggaaacgaaacctttgtgctctgcagcctttttcttctgaaaggctaagtggggctaaaattatccttttagttttctgctttaacaagaagagaaggacttggtgtgaaagaatttcttctctcagtccaatggtataatttttagcactccgcttcctctgtagggtttagccctacagtttgaacaattattttaatccagctaagatgtggccaacactgtgaaatacaggagatgttaaggttttgctgacttttagattaaaatcttaaaatttcacattatattttaattacttgaaaagtttaattacctagtaaagattgtttctaatagatgagaacataaatttaatagttttcatccttttttaaagtgtgtgcaacaattaatatgcctgccttatttgaggacatgataaaatgtacccaaaatgacttcgaactgtctaatgcctcagaaaagtaacttaaaatcaaccacttcgtgcttaaatgtttttatattatgaaccgatttcaacaagttttaaagctgttaatatctcattgctgtgtttgacatacaagtacattcattggttctatagtcttaatgatgacaaattaaagatgttttttcagtgctcaggtatgcatatattttcgtgttacttaagcaaaatcaactatataggaggaaaaatcaaaatggcattttattcagctaccagatggcttaaaatgagtaaaccccaacaacatcaagcacatttgtctgtgatattgaccctttttatccaatcattactattttagaagtagtggtgaactgtgtaaaataatggtatcttcagcagtgttccggaatcttagttgagggacaaacattccttccagtgagagattcaagaattgatgtgaattgaatatatttttcaaggtattataaattgtgttgtgttttcagtataagaaaatgttgacaggaaacaattttatagcatttataaaaaaccaacacttgtgcaatgctaaattggcgaagcttctgcacctgaattagagcacaataaatatgctgtttataaaccaaatcactgctattccttctctgaaatcatctctcctctttttaaacctttacttatagctagaataaatcactatttaattgcctctaatactttaaaactactggatggttaggcctggtttaactatttatggagagctatttgcaaacttaagttgtgtaaatgtaatttctacttgtgaatctgagctgtagcagcccagagggagctaggcaaactattccagaccaccaactgataagtgatcagattctttgtaatgtaggattttttaacctgttgattatgggtttgttgatataaatgtaataatgttcacctcgattttcctggagtaacaaccagcgttggtagtagcccacctgcatgaggacggccagtgttaacaatatttttgttctgatcttcttccccatttttgtttcctcaaacaggtttttaggagagtggagatttaaagtcaggatgtggcctttttattttaattatatacttaattcttagaacaagtagaatgggaaaggagtgactgataaatctaagattcaaaatagtcccgtcgaaacttaaaggccagattattgctttggagctttctataggtactagccatcccgtcgttaaatgttttcatggatatttgaaaagaagaccatgtacctttaataactgttcttttctcgagtttctgcctcgtgctttgacctggattgcattattattgtttatgcgaagtaaaaaaaaaaaaggaaagcacaagcttttcctgtatattatatttccatttccattttaaaataaaaacaattttcccaacaacagcggtgttattattcttgctcagaagaattcttgcttattcacc

SEQ ID NO: 14550 - DNA, 2132 bp, Homo sapiens
tgctatgtgccaggcacagtcctaggccctgagttacagagaaaaagagtttgacacggtcattgctatcatggcttacaccttccagagcctctaatagaggttttgtaaaaagggagaaagtatgcacgtattaatgcaagtactagacataattaaagtaattaataacattgacaagaattactaaactattgaaatataatacagtttctttaaaaatacatactgtatattcagaaagggtaatgttatttttacatcttaaaaagaattcattttcatctctggttcaaaatatatatctttaaaaaaaaaactttttgcctggtgtgattccgtcctgcgcggctgttctctgcagcagcgttgttttatctccgtccgccttctctcctacctaagtgcgtgccgccacccgatggaagattcgatggacatggacatgagccccctgaggccccagaactatcttttcggttgtgaactaaaggccgacaaagatgatcactttaaggtggataatgatgaaaatgagcgccagttatccttaagaacggccagtttagggctggtgcaaaggatgaactgcacattgttgaagcagaggccatgaattacgaaggcagtccaattaaagtaacactggcaactttgaaaatgtctgtacagccaacagtttcccttgggggctttgaaataacaccaccagtggtcttaaggttgaagtgtggttcagggccagtgcatattagtggacagcacttagtagctgtggaggaagatgcagagtcagaagatgaagaggaggaggatgtgaaactctgaagtatatctggaaagcggtctgcccctggaggtggtagcaaggttccacagaaaaaagtaaaacttgctgctgatgaagatgatgacgatgatgatgaagaggatgatgatgaagatgatgatgatgatgattttgatgatgaggaagctgaagaaaaagcgccagtgaagaaatctatacgagatactccagccaaaaatgcacaaaagtcaaatcagaatggaaaagactcaaaaccatcaacaccaagatcaaaaggacaagaatccttcaaaaaacaggaaaaaactcctaaaacaccaaaaggacctagttctgtagaagacattaaagcaaaaatgcaagcaagtatagaaaaaggtggttctcttcccaaagtggaagccaaattcatcaattatgtgaagaattgcttccggatgactaaccaagaggctattcaagatctctggcagtggaggaagtctctttaagaaaatagtttaaacaatttgttaaaaattttccgtcttatttcatttctgttaacagttgatatctggctgtcctttttataatgcagagtgagaactttctctaccgtgtttgataaatgttgtccaggttctattgccaagaatgtgttgtccaaaatgcctgtttagtttttaaagatcaactccaccctttgcttggttttaagtatgtatggaatgttatgataggacatagtactagcggtggtcagacatggaaatggtggggagacaaaaatatacatgtgaaataaaactcagtattttaataaagtaaaaaaaaaaaaaaaactttttgcctaatcaaaatttattcaagagctgttcctttctttcagttactagaaaaagagaaattcagggaaattttatatctaaaaactgggactttttacaaggtgggaagtcaccaagaccttgtgttatctgaagttaaattttatccaaatttcaggactaatattgcaatgacaaatattagtaagccacacacattttttccagtgggcaagatcaaatggcttgtgagaaatgttttttttttttttttttaagttagactgtatcctaaaattaagggacaaactatttagtactttgatgttttgccaaatttattaattataacaggtaatattttagagtatttgttactgaatcatcctcctaatttaaaccttctgcattgggataaaaatctcattttgaattaaagctatttctttatgtgaaataagctgaagccacttaagagaatttaaatgaagaaaacattaaataatggaatt

SEQ ID NO: 14551 - DNA, 1180 bp, Homo sapiens
cttccattctgcctcttattgattcgcaaaaaccattagtgatctcacataaatatctaaacactttttcagtgcactaagaaagagaaagcattaagttagctattttttccacaaatgtgtgaaggtaagaagggaactaaccctgtttgcatccctgctttgtgccattcactttatgtgcatcttatttgctcccaacagcttacctttatagtgggtgttatgatctttttttacagatgagtaaacagaggttcatgtggtttgtaagtgggggagttgagattctaatccagatctgatagttgcaaaccacactacttcgccgacactcgccagagaacggcagcaccagaggcagttcctgaaggtttgccatggtagcagcctctggaagaggaacagggaatttgtcttcaagctgtattgtatacttacaaatatattgtgtatgtgtttagggtaatttggggaaaactaataaaattcatgaggaggccaaagtccctgcacatttgcaagttataccttggtgcttttccagaaggactatatgggagtgattgtggtagaaatgaaataagcagctgataaatgggtcatttttaattttcattttttatttaaactatcgatctttttattgcaataaaatgtcacaagtaaaaataaagaatttatgacagttttaacgtggtggaaggtagagcaaacaaatggagaaaaaatccaggtgaaggattaataattaaataatgaaactcttaaacttgaaaatatctgtgaactttaacaaaaatatgtataatagatatggatgcaaattccctttgatgcttacatctgagaacccagggaagtgaaaggaacatattaagaaggagacttcatagcaacactggactgagagttaagagaatcaagcccacttcacccctacccaacccaacccttccattagtggatctggctccttctttccttcatttattcagaaatgcttattgagccccctgtatgtcagatacttttctgaatactagggatttggctatgaaaaggataagcaaaattccttttcatagccaaatgtaagctctgttgcatagagcttacatttcagaagagaaaatagatactaggtagacaaatcgacatataaagtttatgttttaga

SEQ ID NO: 14552 - DNA, 1097 bp, Homo sapiens
gtttgagaccagcctctggccaacatggtgaaaccccatctctactaaaaatacaaaaattagccaggtgtggtggtgggcgcctgtaatcccagctgcttggaaggctgaggtgggagaatctctcaaacccaggaggtggaggttgcagtgagccaccaagatcagacgattacactccagcctgggtgacagagagagattccgtccaaaaaaaaaaaaaaaaaaagcaatcagaatgttggcatctatactaatttgaatgaattgtgcatctctctgatgttagcttcgtttaaacaatttatatctgcaaaagtgactgaaagattgcacagagtcacttttcctagtatagtttgatgttgccttttcaagactgccgcccttggattacttggcttcaatgaatcaaaatatagatattgttaataaacaaaatactgacgttcctgtatgtgatttcccataggtgctggtaaacaatgccaaaactcatggagatacaagagcattggaactgaatcagagattgtcctcacaataacattggattattttatagtaaggaagcaaagaaaaagctgtaagaatgaagcaatgaatcaagacttctacccaaagcaacatttttttaaactatatttattccttttctaaaggaatctagagaagttgaagtttttaagttaggaatgcaattttctgttaactccaaacctgattttaatctgaaaaaaaaaaaatttaatttgggaaaaccagaatgaaaggaaaaccattattgccttggttgcttaacattatttgtaaaccattattttctgcatcttgcatggtgcacaatagaatatcttttactgtaatcccttacaataaagccttaatagccattttctatgtaatatgcaaaagtagattagcacaatgcacaattttcttttgttaaaaatcaaattcaaagatttaattcttgctatgaattctaaagttcggcaaaccaattcatcataaaatccaaataatcttgtaacctatttatctagtgattcatctccaattctgttgaaaaagcataatataaatgttgatgagac

SEQ ID NO: 14553 - DNA, 1710 bp, Homo sapiens
aagacttgtgtttgttaatagaaataatttttttaggtattggggatccattgtctatatttcaaatcagttttttttcctcaaaaacttgtgtttgttattagaaatgattttttagatattggggatccagtgtccacacttaaaagttgtatgtgtttaaaaaacaacaacagtaatgtgcaaggtgaaatgcttttggataaacgtaagcctattttctgacgtttcttaatgcaaactctttgccttaaatggtagaatatttagaaatttgcacaaaattaaaaaaataaacattgtcttggagggttaaaaaatagaaaggtgtatgtgtatagattcacatacacatatgtatatacaggctgacttgatctagaacattaaatccgccctgcaagttaaccccccattgcaatggttgccttaaggtgtttgctagttgtgtacatagtgtggttaatcattagctacactgcttcccacttgattagagcaatgggaagcatactgtggcctaccagcatctggaagtgtgtgctcgatctgtatgtgtgcagaggtggtgtggatgtgagcgtgcatgaaggaaaaaaagctgctactcctagtaggccaaacgctcaggttaaacaactgacgagtgttactgtagggtgtttttttgtttttttgttttttttcttctatcaaattgctacttttgttgtggaagacaaaagcatttccatttcaacgagtttgtcagctttattaatgttgggcaaaaattgatatgtcatgaaaatgaaacagatctatagttttgggacaaaattataaaatgaaatgtgtaggtaacctatttatatactgctataaagtattttttgaagagagatatgcaaagaagctattacctacataagaggtatatttaaagattttttttttcatcctggtgccaggaatataaaaaagagtggatatatttaaccataacatactgtgattcatcaaacagcacaaactttcatttcatggagtttatctgttgacattgatttaaactgtcacttgttttatcatgtgggaacataagttatgtggtcaaaaatataaggattttgaattaatgttgattcaagttgtattgtcttattgtattgtcttttcaaagtgctgccagttgaaaagggaagcattatgtttacaaatctgttttgaaatgtttgccaaaattttggtagtgtctttaataaagatgtttgtctccagcatccagaaaaataaatgaataactttgttgtgtatcactgtaaaccagaaaaatgttggttatctagaaaacttgagagagcatgtagattaacttttctctttggagttctaaaacattaactggaaagattagataatatactaaatgtatacagaagtatacagactatacaaagactgaaacaagtcccttttgcactacaactctataacattaccgcagaaattttggttctatgtagcatggacctcctaaggaattctgtttcttttagcattgagatccctggtgctctttttttacctcagaattggtacaatcattattaaacgttaatttatttcaaactttttaattgaaaaaaggaaagggaaacttaattggggataaattcaggcatcatattattatgatagagtctcctgagtggttcgtctataggtaat

SEQ ID NO: 14554 - DNA, 1148 bp, Homo sapiens
ttcaccatgttcactgtattatagtttgcttttcagaaatggcatatatttatttaagatataagttatcaagtctgttgttacagtttgtgttactagttattatctttctgtagcaaaatgaccaaaatacatgcattatacatattatttccaagaaatgattttattaaaataatttctaattcaaattttagaccatttatttaaaatgctttctgtttgcatgccttcttaaagattgaaataaagtggcctttattattatttcctctagaaatgaagaggtacctaaatcagaattgtggaaactgaggtgctcatattgtaacccacaaatgtgtaacaatgtcatttccactggactttagggaaaagagtgcaaattcggaaagcacctcaagctgtttcagatacagttcctgagaggaaaaggtcaacccccatgaaccctgcaaatacaattcgaaagacacatagcagcagcaccatctctcagaggccatacagggacagggtgattcacttactggccctgaaggcctacaagaaaccggagctacttgctagactccagaaagatggtgtcaatcaaaaagacaagaactccctgggagcaattctgcaacaggtgaggacagctggagagaggtccttcctgcttaccttcttgttaaaatgttcatttaaaaaagcttgttgtcattattatcattattattgagatagagaaattttaggattattttgatcagtggtatgtgaaatacaactcctgaatattaagttaaatcatctcattttaagcacttaattaaaaactagttgaaatgtgagcattgtctttatttgggaccaacaaattttgttctcaaattccattaaaaagaaagtaagaagtgtttgttatctgtttttagtgttgaatacactaaagtattgccttaatttgtattgattattgtcggtgaaattgtgcaatgtattctattggcctttgattggtataagccagaacattttttgcctactaaatagtttaaaatgtatcttgccccacatactttgtgctgcccttattactctatctttttctgccactaagtgtgccaagatcagtcatttgtctgcataaaagcatatgaaat

SEQ ID NO: 14555 - DNA, 1222 bp, Homo sapiens
caccaagttccacagcttccgcagccgtcggggaacaaagtccttatttggtcacggccatccccttacatagtggaggtggagatcctcctctccaaggaccacccgcgtagggcgagattccccaattctgacttttcactactatcccccacaggggcggggctccaactccaggtaaccagaccaggcaacctggacttccaattagcaggggagtccccaagccagcctggccaatctcggccggctagccaagacgaccagacgtgacgtcagacatgattaagttggcgcgtcacctagacgtcagcctcttacctctcggacgtcccgtcccaggagcaaaactctagtgactttgggcccgcccccgtgagagtggagggcggccgatgagggcggttctgaagggaacaagaccaatgagacgagcccggggcggggcgcggggccggagggtggggcgggtggcggcggtggcagtccgaggtctggctccgcgcagtatatgacagtacgtcagcagcgggatggccctagcagtggcggcggctgcagaagcccaagcagccgcggccgcagtggaggctagagccggagcggcggcggcggcggcaccccggggagtttaagatggcggcgggggggacagggggcctgcgggaggagcagcgctatgggctgtcgtgcggacggctggggcaggacaacatcaccgtactgcatgtgaagctcaccgagacggcgatccgggcgctcgagacttaccagagccacaaggtgagcgggccggccggcaggctgggctcagagaggcagagcgcacccctcacggcctggccgcgcccgggtgcggggccggcggagccgtggctggcagctgctaccgtcagcgcccgcagcggccaggcagggcagggccgggcagggtggctgacgccgcggtcccgggctagcctgggcgttggggaagcgggcagtcgggcggcccctggcggcggggccgaggcagccgcagccctgggtcggctgcgctgccgctgcgggactttccgacggcccccgaggatttcctggcttgttgggtcccaaggagggagagaggccccgataagagaagtgagatgaccacgctaccctcggcggggaaggagggtagcgagcagcgtatgggcaaggaaccagggacgactcgcgggcaccagctgcccgcgttttc

SEQ ID NO: 14556 - DNA, 1119 bp, Homo sapiens
ccagccctgaaactcctttggtcagtagaagccctgtggagaaaacaggcttccgagcctcctcttctgagacaagccaggctgtcccacaggaaatggagaggaatggcctcttgtgggctctctgaaaatctttcctgtgccgtctatggaatgatctccataaagaccacgtctttcttttttcctggtatgcaacttatctgtgatacacctcagtccattgtctttcttatttctaaaccaactctgggtcaggtctcgtaagtttcacattatcaacatataatttgcacacaatgtttaatataagaaatttgctcgaatgttaaacgttttgttttttaaacatagattctaattcagttgataactcgagttattaaaagatagcgtgtgccttttatctgaaataatgatatgcctttctgaattgatagcatatgttttaaagggagtgattaaccacctacttaatatatccactaatgcactttcagaagggcacagtgccagatgatgctgtagaagccttggctgatagcctggggaaaaaggaagcagatccagaagatggaaaacctgtgatggataaagtcaaggtaatggcaactgagatgcttctggaaaataaatatcattgatcaccttctccccctgcaaataagttagtcatttgttttgttttttatatttcctgtaaaacatgaccagctggctttttctattattgtgcatatcctgtttaataagctaaacctgaataagctgcagtgttgaacccccacagtggatggtcgacatgcacagaccggaggcctctgagtctcatctttgcccacctgcattgacattgctgggacttgggaaggaaggggcagctgcctgctgctcctcacagctgtcttgcatcccagcaggctttctgctggtgcctgagtctgccagatgaagttgctgtaggagcactaagcatacggtcatatgtacttcctaacctaatgatagatttgtttacctcaaatctagtcactcaggcatgaattttatggagagaaaaaaacatgctaacaatgaaaatggtataatttttctcaggagaaggccaaagaagaagac

SEQ ID NO: 14557 - DNA, 2154 bp, Homo sapiens
tccattttgtgggacattagccaccacaggaacacaagagttgtcagaagactcctgggtgtacagagcaaatcaagctgcatcagtattataggataccaaacagaatcctttctattaggaaataagaaatcagttaagtgttggctgggcgcggtggcttatgcctgtaatcccagcattttgggatgccaaggtgggcagaccatttgaggccaggagttctaaaccagtttggccgacatggcaaaaccccatctctactaaaaatataaaaattagctgggcatggtggtgcacacctgtaatcccagctacctgggaggcacgagaatcacttgaacccaggaggcggaggttgcagtgagccaaggttgtgccactgcactccagcctgggtgacaaagcgagactgtctcaaaaaacaaaaaacaaaaaaaaaagagttaagtgttgattttgttggattactgacagtttgttgagatggattttaaaaagagtctatttaaaccaaagtacctggaaccataatctgccatcagattgctaaacattcacataatccccatgtttcatggggcttcagggaaggcaaatacatctgagatgagccacctccaaggacagcatttcctgggctgcaaaactagatgtggattttgttacttaggcctctctaaaaactgaggccatggatatgacatagcttttcttctcacctatgcctttgttacttttgtatttattggaattaaatctctttttaaagagcttccttcccccttcatcccatttgtatttttaaaaactaagttatatatatatttgcttgtttttgcattcttttattttgtgctccattccctgctttgccagttaagtactacctgaaaagtagcggttcaaaagtatggtaaatctcctcccttaaccttattgcctgtgtgggtgacagctaatggaaaagttgatcgatttttttcagtggtttttttgggagtatatactttaaaaatgtacatacatgtttttgatagtttttatattatttcattttgtatatttttttcctgatgaagagtgatatatcatcctatgaaaatttcatctacccttcccattttacctgtatgggcagtagctacagactagttatttggtttccttctttggaagaaggtggtgatgttgagaggagagcaagctatattcttttaaaagtgtgtacagatgtttttgctattttgtgttatttcattttgtatttcattcatccattttgtggacgtgtagataaaacgcggtggtccaaaagcatgacagatgtcccctttgcgtttctccttattgttcgcatggacaataactgacagagtagtcctagttgctgttgttttgatctagtcttggggctggggttgtatattattctttcaagtgtgtataaatattgtgccacctttttatacttcattttatacttgtttccttgtatggatgcatatatacttaatgaaaattgaggttcagagtatgacaaatctcttttcccttttccttactgcctatttaggcaatagctaatagagtagtttgttttgttttggggtgtgggggagagtggagtatgtacttaatgtatataaataaacttgctactacattgtattactaatttggttcacactgtgtccttctcatggatgtgaaagtaccaatgaaatgtggagatctcgatgtataacagtctcccattctcctcatcccttattgactgctgggcagtagctaacagagtagttgtcaagtggcgtatttgaggtgagggggagggacggggaaggtaggaaaatgcacttaatgtatatacatgtttttactactacattgtattaattcatcgggtgcccagactgaaaggtacctaatgaaccatggagttccggatgtataacagtctcctcttttccctttcccttattgcccatgtgggcaatacttaagagtagtttgggtttattgaagattttttgctaggagagagaaaattttttgctaggagaggtttcaaggtaagagtatatactttaaacatgtatataaatgtttttgctacttttctgtcactacctttcttaccttgtcctttac

SEQ ID NO: 14558 - DNA, 2527 bp, Homo sapiens
tatgttttcatatctttatttcattttgtagtcttttgcatggctatgtagggacctaatgaaagtcgagtttcataatatgacagctcacttcttttcctacatatttcctcacttagcagtagctagtgtagttattttgtggttattttatttcattctctaggatctattccattaaggatgcaagtgtgtagatgcatatatatcatttgcttctttcttccgccattattttcctttaacacttagtcccttgcaaggggtctgactatacctaacaaaaataaagacctactaaatccctgccatctggctggaaggtgtagcagtgtattaatgtaactaatagcaacaggtgtgcagcagataagacaggagaagacactcagctatggttgagttgtgaaagctaattagatccagcatttcttatgttgattcagattgaatgaggtagtgaaaagggacctgtgcttttgtaaattctagaaaggcaagaggacaatattgaataaagctgtgtttaaacttcattgctcatatatcttttagtaactggtaaaccggcgaagctgataagccaataagagtgctgtctagaacgcatttgcaaaccgttaagagtagcttctttttgaggcctggacttctgattcatctatagaagtctattatgattccatcaattgcatagcttgtgtacctggtagaaattgtgtcttggaatgaccctttcgagttattgacatggctctgatgaatagaacatgagccccaaaactaaatccaaaaggaattttctatctttcatcccccacatgtggcaagacaagttggccctttcttacccagaggtcttttgtgtgactgcatctttctcctccgttctccattgtgtgctttccattttgtctttagtgcctatactgttaggtgttttcttcactggcattcacaaatttaagccattgctgcctcattagccttgtattttgtgtgcatatcatgtatccagacctgtatgttcgctttaagcattcttatatcacactgtctcctcatctaccatatggtaaatgttaaaactccacatttgtctgcatcagggaaaatgcatgggcacacatcctccctccctccctctctgctctcctcccttccttcaggcctcttagcattgtttgttttcccatttctgatactactactccatgctgaagatttgccatattactattttggaaacattgagtgatagaactcctagaaaatttgcaaagaaatgttacatactgtatatcaaactctcagattctagtgttgaaaaagtagcctatactttgctattacttatacctgctgccatagaaaaaaataagtttattcatgacacatttacatttgatcataaataaaagaaaaaagggcacctttttggagttagtcatggtagtcattagtgatatttctgaacagttcttaatttaaaatacttcaaaggaagtaaaggtcatggcttagctgaaggaaatgctccagaaattggactgtgtaaaccatcagtacaataatacgctgtgtatgtatgtgtatataaaatgagaattatggcataattggagcatttgcattaatcaacaaactcacattgagacaaaacttagttttacagctgtcttgattaaagccaagtgttccatgttgctgtgaagaatagcctctttcaaatactttggaaagtagttacttggaaacttgtaaaggtattacatttttatatttaaacacctatagagatcttcaattccttgagtctgagcttgtgggtggaattctaaatttgtatcataatctgtcttttgtgaaacattttgaaaatatgtatatataatattgtatatgcaaattgtgttgtttcacttgtaaagggaaaaggcttatttttctttatatttctgataacttgttttgcatatgaccagcactgactgaaaggcatgtgtagctgcaaacactgttgctttttttgtgaaatgaaaataaaagtatttaaatacaaacattgtgtggactctttggattaatgtatatataaagtggtatctcttcttaggttatgacctctaccagggcagctcctgtactcattgtcttctgtggttagttttttatttcaccagtatccagtgtctttattgcatatacctcagttgacatttgacattcggaggtggctaattctttgttgtgggggctgttctgtgtatcataggacatttagcaggatccctcccatgccaattgcaactagttgccaatagtaactcttgtccccagctgtgacaactaaaacctctcctccagacattgccaaatgtcccctgaggttagggttaaaactttgagtggatgcatagggcggatagctaacagtcacgggagctccatcaggaccattatttactttttggactaaagcagttcttgtaaacactcaggtcacctaagtagccaactgatgcag

SEQ ID NO: 14559 - DNA, 1124 bp, Homo sapiens
ttccatcagttttcatgatggacactaggtggcactatggtaattttttaaaaattctgcctatacactatattttttgctatataatctgtatttctgtttggaatttaatttctcctatataacagtttctatatagtactgtcagtgtttggaatcttaaaattcatggtgtcaatatataaatagaacagatattagcagtgtactttttgaaatggttcattatcagtaatactaatttatgaaatctttccaggaactggtgaaacagaaggtgaaacgtcagttgacaaaacagcaaaaatcagctgtcagacgtcgattgcagaaaggagaagcaaatatatttaccaagcaacgtagggaaaacatgcaaaatatcaaatcaagtttggaagcagccagcttttggggagaataatatatttaggatcttggatatgtttaatatattttttaaagttactgtaattcctttttgagccctcatttgtcttttttgagccaaggctatcatatattaataaataaaccctctttcatctataaatttggtcattcagtatgtgtcttgcaaagaataattacctgccaaagcagtccatttttttcaaagtaatttgggtaactacagttacgtaactttattagagacatttgcatatttttaaaaatctaaataacatttttgttgttttctgtttgttgaggatgatatgctacaatgcacataaagcaattagaacaatgtttagcacattcttaagcattcaataaaacatggctattagaatcataatgattctgaaattctgctgacaatttggttgcattttatttggcaactggaggacttcactgtcttatttttctttagaagtaaagataagcctttggaagtaaagataagccagtgatgcacaatttgcttaattaattgattaataatctgttttgtgccacttacattggtaatgtggtcatgagaatggaaacttacttgagatagtctaccacaatttttacagttggcagcttgtaagcaggcctgagtagcagaagagttaggggttggggaaggtggagtagaatgaggaatgaaatgttctttctcatatgct

SEQ ID NO: 14560 - DNA, 1249 bp, Homo sapiens
ttatattgttgcttttcagttattttattcttaaaatgacagccagcatatacctttcatatttgtttacctgtgtcatttaaatattacattttagggaaggaaaatttatttttaacatataagctattaaactcacttgaatcataatttatcagagtagtagatatttgctcctcttagataaacattttttctctctttctatgcttgacgccttttttttctaggagagaagacactcttgatgtggaggtttctgccagtggctacacaaaggaaatgcaggcagatgatgaactgcttcatccattaggtccagatgataaaaatattgaaacaaaagagggatctgaattctcattttcagatggagaagtggcagaaaaagcagaggtttacgggtcagaaaatgaaagtgaacggaactgtctagaagaatcagagggctgctattgcagatcatctggagaccctgaacaaataaaggaagacagtttatcagaagagagtgctgatgcacggagttttgaaatgactgaattcaatcaagctttagaagaaataaaagggcaggttgttgaaaacaactctgtaactgaattttctgaggagaaaaacagaactgaaaattacaacaggcaagatggtcagagagttcaaggaggagtccctgctggctctgacgagtatgaagatgaatgccctcatctaattgccttgtcgtcattaaatagagaattcaggcctttcaggtatagacttctgtcgattgctttttaactttagtcttgagactgatactttgttagattctagtaaaagaatgtttttttcaaatgatgtgacaaaattgtattctgccaccttgatgtataaaatgaaagccaaataattttttgttgttaaaaactcaaaatagcttccttttcaattgacctgattctaggcagcctattgactaaatttcaagtaattctgccttaaaatacaaactgatggctgggcacagtggctcgctcatgcctgtaatctcagcacttctgggaggccaaggcaggcaaatcacctgaggtcaggagtttgagaccagccaggccaacatggcaaaaccctgtctctactaaaaatataaaaattaaccgggcatggtggcctgtgcttgtaatcccagctacttgggagactgaggcaggagaatcacttgaacctgggaggcagaggttgcagtaagccaaagatcgtacca

SEQ ID NO: 14561 - DNA, 1479 bp, Homo sapiens
tctcctgctgactccattctctgaagttgtgtatcatattacctgtgcaagcaggtagaattttcgactattttctattgttatataatattttaatctgtaaagctaatttctggaattttgtattttttttttttactggggtttttccccttctctctttatacacacacactctttctctctgccatccatttttttttatcctctcttttggaaaaagaacaaatgcccagaatggacagaagcagaatgatggcaccattcaaaggcaggaagagccgggagagatctgatggagtcaggatagagatctggttctggctttcatccactaacttcctactctgtgcagggtatataatggaagtaaacaccacccacgtgtatcccttgtccctggcatgcggaatcatccatacctgttaaaatactgaaggggtttcctttgatctctaggggattacgtatcatttgagggaggaagcacgtgttctgtgaggttgtgaggcttaggtctaagcactgtcatttactaatgtacccctgcttttgcttttggtaatataatcttatgttctccctgccaaccttaaccatgcccctgagggtggcagggcagcagcaccccagagagatgtgcttaggaccccagaggtggcctgggtgagtgaggatggggcagtggacatgggtcttgaaagagtcagtagaggcgagggtaaagagcatgaactgctagtggcacgaaggattctaaggtttaaagacctggctgggagctaaaacagagatgatggagttcaagaaaacactccctctctggtgaatggggagttttttcagtggactcttggcactagctcttagggccctaacccctgtttcctgctgcagtatgggtcagatatattctttatcacatgaagagggtgcttacatgtacaattttgtggatatcctatcaaataaatatattccttttctaatttaaacaaaaaaaaatgcctgcttgacaattgatctataaactggcgtatttgacataaaattaatatctatcatgtttacaaacctaatcctgcacatagctggacatagaaaaactaaaaataacattttttcagaatttgaaagtaacatactgtaaacacataaaatagaatttacaatttaagagaaaaaaattacaatatacattttagtttataccatttcagtacatatatgtgtgtaaatatatacgtactcatgtatttatacaggaatatatgcatatatgtttgtaacctgtgtttttaactagagagtgtatgagaaactttttgtgccattaattattcatactaatattggcaagactgcatagtactacacagtataacaagatgatttatttcactatattccaatttgagcatatgtaatataattttcctaaatttttaccattataaataacacagcagtaaatatcct

SEQ ID NO: 14562 - DNA, 1239 bp, Homo sapiens
aaaaatacggaggataaccactatttttgtgcaaataatatgaaagtgaagtaaaagcaatagaagaaatttctataggatctgggtttagagtgtgtatcattaataaatatacctttgctcttttcagggaaaataacaaccacccttactgatagttgggaaaagaagattgggttattttgccatatcatttagctggaagtgacatttaaaagcaccctgcatcactagtaatagtgtattttgctattctgcccttgtaatcggtgtccctgtaaaacaatccccacagattactttcagaaatagatgtatttctctacgtaagggccaggtttattttctccttttttgagatttctagaaaaaatgctgcttgcacatgttggttcttgaaaccttagctagaagaatttcaggtcataccaacatgtggataggctatagctgttcagaggtctcctgggggagcttaaaacgggggaaacactggttttcacagatgctccacatggctgtctttaaaagactcaaaacttttttttgtcctctttgttatgcttggaagctcccccccccccaacagtgtgtcgagtctttgcaaagaaacctttagatgtggttcatagatatatgaatacgtatctgtgtaaaacagtgagtgtgcagtgtgtaaatactttaaattattatgctagaaaaataaagttacataccttgctgtggaatgtctgttctgtgattatagggacacctgctggaagaactgagagctgcagaagaaagggagtcgggggagggggaattgtataaaatccctaaaggttactgataagtcatgccacctgcccacaaattcgctgattttcaaaactatagcattactgtcattttttttcttttgaaattttaagcagttacaaatccgtatcagtgagattggtccactagtattgtcccaaagttctgtctttagtaacagttttggtcccttgaagacatacagcctgcactctagttctttttaaggtgatgtgaacagtaacgacttcctcctggtggggaggatttgggaaggcaggattttctggctttgaaaacaaatcctcacttcttgggttttaaaaagagacatcaagagatcacaagttggtctttgttcaagaaacacaccaaagggtagaaaagttaggaaaataactgaaacaaaaggcacagagaagcactgttacttgt

SEQ ID NO: 14563 - DNA, 1174 bp, Homo sapiens
attgtaaatattaaaggaactttccttacttccttccctttctcaggctttttttgactgttcctttccctaccaactcaggccttcttattaaaaaaaaaaaaatcagtgtaataacactttttaatgatttgtcttgatggaatcattgtttagaatgtaaaaatggggaaaggggccacttaattccattagtcctctttttatactgaatattttattagatacatgttattcccttttttttccttttttagtcaatattgtgtttgtagttttaaaaaatggcgagatatgtaaaatctaaactgcatgctctggaaacacttttttcagatgcatctggtttaaaagggtaggtgtataaacacttttcagaatccaaaacggccaaaagttattgtaaatccgtttgttttcccgttttatgtgggcaataatgtcaaatgtgctatgcagccaggttaacattttagataaacttgattgacttttaatataaactgttacaatgcacactgattgtatataaaaacgttatatatgacaaattaaatttaagaaaaaggatatgtgggctcctgtaattttctgctgcattcttactccctcaagcacttaccaccaccaccaccgccccctacccccgtttttaagtaacattttgctgccagaaaaagtattttggtaagcagttgaatatttgtaatgtgtagcattacaactaaatctgttttggagactatgaatattcctatgaagtaaaacttaggtcatagacatttttgttggccccttttggcttcctacagatattattatgggatgctttatatttattcacagatttttattttgttttatattcagcgggaagtttttaagtcatgtggcacacattcttgcatgtatgctttgatgtaacaaatttgaatctttgacgaatataagtatgtggacataatttctatagtattgctatgtgtgtcactgttaattagctgtgggagcaacctacagatatttgtccataggtgtattttttaatattttcctttgtccaattaggtttatgtgtataaaagcttgtgggtttttttgctttttgttttgttttttgcagtaatttctctttctgatacagttaccctgaagaataataatgctttgtttc

SEQ ID NO: 14564 - DNA, 1105 bp, Homo sapiens
tgagtaggaattgggtggttctgcttttgggtatttgttataactgaacaaaacaagtttggtgtctaatctttgcatgttatttatttatcgctaaactgcttagactacacaattttttttattaatttgactcaatagtgatcctttcgaataataaaagtagttttgatgcatttgatttttaaaaattctcacggtgtttatgactcccaaagttactaattttttgtggaaattctgtatttttctagtttcttaacaacagggtaatttcctttttgaaagtaaccctgttaaaagcatttctgatatgttcaagtaggaattgagatgaggtaagattggccaggcaggatatatttattgtagtgtccattcagaatatgtttatatatacacatttatttaagaggaatgggataacagcttacttttgtttatgtaatagttttggatatgacatttattaaaatcttattcagttttgtattttgaaagtttctttgaagccattgtaacttttttcttttaaaatcttagacctgacaaaattcttccttattctttctaccagaaaatttaatacattgttagtctttttaaaaggcactttcatgaccacctgaattgctgtacttttcgtctttagttgaggaagcatttcgacttctactttacctggatatttttcctcatttattaaccacttacgtagctttcttaagtaaaattttaattttgcattgttggtgtaatacacatctgaattaaagctattcagtgaatttttatcagcacttggaatgtgaggaagtgtaatataattgataattattgtggagacacttcctgtggtagcttcagaccttcttttggtcttatgaaaataatgaagtaatttttaaaacaaaatttagcttctattgttttatttatactgatatctaaacatcatcttggatgttaatttaccttgtcttacctggtgtatcttaatgttttaacatttttgtttttagcatagtttattcattcttcttagataacagtgccttgaatttttatactaacaagtattttcttatatctgtaaatatcagaa

SEQ ID NO: 14565 - DNA, 1052 bp, Homo sapiens
acatacttcaaatacctggtttcatcgctacagatttgtaattttaggggtaatctctttcacttctatgcttcaagttccttattttaaaataaatatactgcactaggcaacatagtgaaaccccacctctgcaaaaaataaaaaacttagctgggcatggtgacacacaactgtagtcccagctactcaggaggctgaggtgggaggatcagttgagcccgggaggcggaggttgcagtgagctaagattgtgccagtgcacttcagcctgggtgacagaaggagacactgtctccaaaaaaaaaaaaaaggattctaatacttgatttgtctaacttcttcatgtaactgttgtaaaggtgaaaatgtcagtaattaataaaagtgctgtgtaactgttatatttttaactgttaatgttaagcatttttgtttttcctgttttagttctactcctttcaataaagaagagttatcagccattttaaagtttggtgctgaagaactttttaaggaacctgaaggagaagaacaagagccccaggtaaaaaaaaaaaaaaaaaaaaaaaaggcctgcctcagaatatgtgtcatatatttgacaggatgaaaggattcaagtatatttaaatattgtctttttaattataggaaatggatatagatgaaatcttgaagagagctgaaactcatgaaaatgaaccaggtcctttaactgtaggagatgaattgctttcccagttcaaggtagatttaaacaaaattttccttgtaattacataaattgagaggaattgagttatgtcatttagtggtttgttaatctttctttaagcataatcaggaagattgctgtgttatgtaaaaactactctctcttgttcagacaaaccagtagcaaactgatttgaaagagaccaaacccatttatgaagttacatttagttgggtggaaagagctgttgtttcctaattagcaactagaatagtgtttggcaaatagcatgtccttaaatacttaggtaaataaatgaatcagtgtgatctct

SEQ ID NO: 14566 - DNA, 1299 bp, Homo sapiens
atgaggataaactttattatgaatataacctagtctttactcacagtagttaaatataaaattcctttaaatagttagaatttctgtttaatagataatttctgaaataatttagacaaaataagcatgtgttattggtgttctttttaataatttttaagactaagtacttttattatattcttccttcccctccaaatctttctgaatagttttaaatgtttttaaaattgttctagaaaggatatttatggtatttttttctttttcttgcagataagaatgtgccttttgatgaaagaactttatctttctacaatgaagagtggaatttctatgtttaaggaataagaagccactatatcaatgttgggggggtatttaagttacatatattttaacaacctttaatttgctgttgcaataaataccgtatccttttattatatctttatatgtatagaagtactctgttaatgggctcagagatgttggggataaagtatactgtaataatttatctgtttgaaaattactataaaacggtgttttctgatcggtttttgtttcctgcttaccatatgattgtaaattgttttatgtattaatcagttaatgctaattatttttgctgatgtcatatgttaaagagctataaattccaacaaccaactggtgtgtaaaaataatttaaaatttcctttactgaaaggtatttcccatttttgtggggaaaagaagccaaatttattactttgtgttggggtttttaaaatattaagaaatgtctaagttattgtttgcaaaacaataaatatgattttaaattctcttaaagtggtccaaattatgtgtttataaaataaacataagactatagaattaaaaattaatatatgtatttgtaatttgtcggaaaatctatcaaaatgttattctattttagcaactactatgtaacatatctgctttgattagatatttcagaaatctgtgaattttacagccatttaatatctttactgtatagtaagatgtagaaatggcaataatggcatagttcaaatacttcattgtgttatggaacaggggattgaggaattaaacacatagactttggagtcagatctatattcagagactgacttcacgatctctgaacaaattatttaacctcactgagattcaatttttcacattctagaagttagaggagaacttataggaaaagcatgggtcatgaactcagttgcttactgagaccagggacgtaatttaaatgtgcatgtaagtcaggat

SEQ ID NO: 14567 - DNA, 1294 bp, Homo sapiens
gagtgaacatcaacaaacataacttctaccatggttaagaattttacttaggaaaagtattgaagttcaaatccagatagtattacatttgaaattgttataagggttattaatttaataaaattcatcatcaggtttcccctataagctttctcctaggttaattttccacaagcattgttttatatacactgtaatcaggataacacaagcttagtgttagatcttgtaggaaaccaagattagaaacattagaaatttgcagaatttaagaaattatgttttgtggtaatctatggccaacgatgttagaacctagcgcaattgtaaagtgaaattcaaggagaaggaatgaggagttagggaagcagcatacttgaatattagagaaggagaggagctgtgggtcaggaatcagagagacctgctaaaaccagacagatataaacaccaaagacggaagccaaataggtagccaaaaatccagatatttgagaagcaggaaatttatagcaaccaaagaaatagggcaagagaggcaggtgaacacacatgatacctcaattgacaatcttcctcccaccaagccagacacgttgtaaatgctgcttcctattggagcccagaaaaaaggaaaaggaaagtttaggctttctttgtcctttgtgtggaagcagggaattggattgaagactttcatagttgtaacataaaggcaaatcctgaggaactcactgatggagatgtgaaatggcagtaaggaagaaaacagaataactgaacaaatatattagtctagggccacttaatttagaggaagaaaaaaaatcaacccatccatagaaatagtttgataaacaggtcactaaatcattggcgtttataaagattcttagctatcaagggctgcattgtattttatatactcagttttataaggtgatactttttaaataagcgctttaatgaaaatggttagactgaaaataattttggtccttaaaaggagtcaggagcttttatatataaggtacatattttaaaagaatacctcctttataacagggttttacagacactaccataatttataatcattattttttacttttgggttcacctagatcatatgagttgatgtgatacttctagaacaaaattattcatagtgcgttttttgtaatttatgattgttaagtaagcttgacttataaattgacattgtaattgtgtacataattggatatatgtgttaaaatttaacatttagatttacttaattgtagaaaataca

SEQ ID NO: 14568 - DNA, 1183 bp, Homo sapiens
ctttagcaccaaaaaaaaaaaaaaaaaaaaaaaagtttctggcctttggaacaatgaaagcactgcttctctttgatttctctggctctgctctgattcgttgaggccttaatgtctaaaaaagatttatagtaaggataaaggatatggaaggatggagttgagatgtaaaatgactttaagaaataattactgttgaaagaagtgtagaatgtgcaaggtcatgtaacttatattcccattaaattgttttgtaagtcaataatcactgtagcaggttacaaactgaagtaatggccacaaaagtcaaatacagataattccacatcataaatatggtttgtttccacttgcttaatttcttaagggttaaatattctctcagcataatttgttgaatatggattaagacagtatgagagtgtttgccatgtctagagaatacctaatttacaataatttattttctaaatgatcactttcattgtttttatgtctaatatttttaggtatattacaactgttcctgtattgaaaggaaaacagaaataacatccactgcagaaacttttggttttgaagctaaagctggaaaatgtgaaactcattgtgcgaaactgcccatattcctttgcattttctttattgtaattatttttacctttatggccggtactcctataactgtgtctatcctaaggtatgtagcacgttgagaaattttcattccctaaggcaacatgttgatggaaaacaaatggactcggggttcatttggggttcatattgaccattggttcaataccaatcagcccttacaagatcattagttctgtggcattggacaagctcctctgtagaaccccagatgtaggagatttaaatgatatgcaggtgaaagtgtcttcacattgcctgcctggcttgtgcttggtgttttctctgcttctttcatgaagcttcaggtgtgagctggagaaacgttcagttttgagtatcatagaaataaaatgcattccaatatgccagaatcagaatggcatgcattctaccttatgcattaggcactgtgacgttaaatcttccttaagcagtgctaatcaataagaaactggctattacctgtgttgttcacctgtgttttatgtttccagttgctcttcctccttgtatcccactgcac

SEQ ID NO: 14569 - DNA, 1102 bp, Homo sapiens
gtggcaggaaataaatgaggaaattctattttcttagtcactattcttaaaaacgcacaaatttgccagtgtgtgttttaatatattttttctgtttcattttaatgctattagttcatcctatttaatgaaagtattcagcactttagcagagatatgagagtcagaaataagtgagtttaagtttttgctcacacactgtgatagaactacagtgatcctggagataagtttctttgactataaattatgttgataataatcaataccacatagaagagtatacatatgtggtgataaggcagtgcctggtgtgtggtgagtgctcattaaatagtagcaatgaataataaagtctttttttttttgtggatgtcacttggtgttgacatatccccaaagtctgaccaaacacttttgaactagtacattagaaagggttttaattagatatatttctaagatcatattgttacgagataagaaaataattcatttggtgtagctcagcttaattgggtccacttagaataacacattaaaatattgccttttaaatagccaagttgccatttgaaaatatcttgaattttttgactttgaacatgatatgtactttgtaaaatgttcagaaaataggaacacacaaacaaaaatggaataaagaaagaaagaaagagttttcatggtaacacaccttggttattcaccgttaacactgttcagtcttttaaaaatgtatatacacattcatacgtatattgtcatacataaactacactacacagtcattaacacacattcatgcacacattcacactcacataattttattaacattcacacatctttacatcacattctcacaaacacattcaaaatccttgtttgaaggaaacaagatttttaatctaggaacgttgacttctttttacttggaagatgtgttggacacattttatattagtaaagatggagttgcagaatctttttgcttttctattatttcattttataaatgacttatttaaccaaccctcctttgttatattttttattaatacatttaatttttctggttagagaggttctatgggtcatg

SEQ ID NO: 14570 - DNA, 1725 bp, Homo sapiens
agtaaaatgagaaattaattttgtgaacacagcccattgtcattacctttctatatttgtgttgaattctgaaaagtaaaaggttaaaaatgctatattaaatttttacatttcatttacatcacaattataacaagaattgttttgtcaatcagcagtattatttgaacttggattgtttgtgtaaatttaagcaatagttttttttttttgtttttgttttatgtagctacaagtggaccttctagtgcagttgttcctaatacctcatctcggaaaaagaatataactagcaaaacagaaacgcatgaacacaaaaaaaacactgggaaaaagaaatgaaatcttagcagaagctggaactttttatacttataaaaatagtatgttcttatgtttctccttatgcatttatgtgttcacttaaaaatgtttttaaatctaaggttttctttgtttatgttcaggtaaggaactgttgtcatgatctggaaatgtttaaaacaatgtttgttagcattctgtgagcagcaaaacttatagtgataaaaatcgattgttgttaatatgatgtttaccatgtgcacatagtaatgaaaaggaacataaaagcccagcaggctcgtaccaaagtcacagcagtaatgctatgtactgcagagtctgatgagctggcctttgtgcacacttttattttcatgggattgcatcttagctgttaaaacttctagattgaaatttgacagccagggttacatattggggacttttaaagtgtctttccaaagagatttcattaaccgtttagattagaatatctttcccaattgttacagtgacatatatgctgcaatatttaacaactggagtattagccacatgggttattttttcaatctgtgttttgaatttttttattgtgtgttatttaaaatattacatatgcagctgggagaactacacctttgtgcacatagatttatatattaatttgtagaaaatattttctttatatatttccttaccatacaaggtgccttgttcatcaggaaaacttttgttttgtattttgacaagaaaggcaccttcagagtttctttttaagtatagttgacaagtgtataaatgttacacttactttcagagttctttttagatctaaagaagtcagttcaaaaatggaaatcaacaatgttaggagaaatctgaattctgttaagttagtaagtattatgtatagcatctgtttttaaccatttccattcttatccctagtgtatcagttgatcacactaagaaagcttaaagattgagcatttgaaataaatgctctttataaatgattagatttttgaagggatattgaaatcattgcgctgtgatttcatctgtgatgtgaaaaatcaatttattatccttggtgctttcccccccaccaatgcacaaataattgtgaacagcttgaaatgacttaaactgtaatccaaatgggacaatctgataagaatttcatgcattggtagttaaataacttaaattgctaaagctttagcttgaaatttatgtttagaaaaactattgatttcccatggtatgaatataactattgtaattcttcaaatgagactcttctcaccttaaatagtcatatattaattaacttataggaaataagcatactatatgttagctgttttaaaaggtaccagatgtaagagtcataaa

SEQ ID NO: 14571 - DNA, 2061 bp, Homo sapiens
gactggcgaggaactcctgaagttagctcagaagtgcacaggaggtgaagagagcaaagcagaagccatgccatccttacgctccaaacagctagatgcaggacttgcccgttcctctcgtttgtataaaaccagaagtaggtactaccagccatacgagattccagctgtcaatggcaggaggcgaaggcggatgccaagctcaggagacaagtgcactaaatctttaccttatgaaccttacaaggccctccatgggcctctgcctctttgtcttcttaaaggtaagagggctcactccaaatctctggactacctcaatctagataaaatgatcaaggagccagctgatacagaagtgctacagtaccagcttcaacacctaaccctccgaggggaccgtgtgtttgctaggaataatacatgaatgacttggagagagcttaaaccaatttaggtcagcctacgcttggctagaaaaaacccactgctgtactctgtacatgactcttcacactatagatggttatatcagctaagtgttcctggaacataaaaattgtttgggtcaaatttgaatacaggaatgaaatcacaggtacttgggggggggatatcattctagagcacgcaactgcaaagaaaacagaatgttgactgttagtttgtatagctttttagctaggaaaaaaaggctttggtacagtaatttcatctttatgattctgacactcaaattgggaatgttacctgcttggttgttgctgacttgatatgattcattagaaatttatatcttcagtactcaagtacttcttgaatctctgtattttactataaaatgtatgtaatgatttgttttatgaaatttagaacttgaacattgctgaattggaccactttttatttttaaatattgagtttaaatattttataactggttttgcactgaaaaaattaacatttcagattgacaagagagtaatctttcttcacttgcctcaataatgttattgagcaatgaattttttatttccgcatggaaagttattgatctctatggctgtaaaatatttctttatagcgttattaaagtgtgtcttaataaaattaaatttgggatacaaagtatttattttacaatgggtgggcgggggaaacttttccagaaagtttccaatatgacgttttcataagttgaaaaaactctccttagtgcttattttctaacttaaaattcacctggaactttaaatgggaaaggattcttttaattgtggattataggcataatactgtttgcatctgaattttctgtaagtgaataatagtttaatagaggaactcatgatttgtactattgaatgattaaactaagtatgaagtgataccattcagcatggcatcaggtcattgcagttttagttctgtgtaacacaagcactcactgaaattccagtttctaggattagtgtaggagcctaacgtgcttctactgttttaatgggttaatcctggattacttaacaatttatgtcaattgcactggtttaatttgttgctaaagaaataatgccctgggtttagtaacaaatacagctcaactattcttgaatatattttgaaaaaaaaatgtatgtaacttaccttttgtaaacgttccatttcttttttccctcatttttgactcttaaaggtgcaatttattactgaattgggatttctggcagcacagaactgctttttattttggggtctgtgagtttcttaggtattagcaatcttgcttataaaataagaacaccttttaattaatgagtgggtcattcctggtgcaattgtgatttttctttagccagaatgaatggcaaactctatttagagcaaagtaagtattagaaaaccctaggaactcttaatcaacgtttattacactttcattaaggcaaactacgtgaaagagccttggggaagttggcccatatcttactaagttgatcagatttctcgttgggctggaaatgtttcgctgttgtatattttaaagtaaattgcaccttt

SEQ ID NO: 14572 - DNA, 1198 bp, Homo sapiens
tatctgtgggagataaacaagatggagtcccaaagactttaacaaaatatttttttaaaaatccactagaatagaaaatacattatttagatatactttatgctgagagtgagtatatatgcttgtcctatttaaacttgtgagaaaaagtggtatcccttgatacatttagaaatatgggggctatcttgtttcattgtgggggtggggcagaaggagaataaatgcaggatgaccctgttgaaggaatcttagcatggccaacaggggacgtttccagtcgattaccaggaaatgcaagccttggggtttctactggtggtggggctgtcatgaactttaaaatccaaagcctagacaaggaaaagtgttagaccaattgaaaagcaatccagccctttttttttttttttttttggctttgcacgacatgtcaacagaaaccatgcctttcaatataagaaataaatgtgatgatcatgtaaaatgtgaaaaattgaaagcattccagcaaaataagaattttttatatatttgttttttaagatgtatatgttaaaaaaagagaaggtcgcattatggacagacttcgtgaatgggaatttgcttagaattgtgagtagttctgaattagaaaagtatgtgaaggaaaggcagctgtaaacgtattgtgccctggagagttgtacacatgttgaaatgtaatctgggcttacctgatccatttggagtggatgtcactgccgagtctgttctcacatggaaccatgtgtgtggggttgccagcctcacagatacaatcaatcctattcccctctgacataaggaactcctctggagtggcagagtcttatcacagaaggcagccaccatttcaccaaaacaaaagttcacggcattcaattcctttttcctttagctatttatatatgcagtactctcagtcatatgcagaaatacttttttttttttaattaatagttacaggcttgttggtccagtgggatttgggtagggggagaaagataccttctaaaatggatcaatagaaccaaaataatacagcatgttctataaccacaaggaaatcaaatgatcctgtcatgattccagttagtcataactatgttagcagtgctaaatgcattttagaaatggtgacttctgtggttttcctagcatttgtctctaacaaatg

SEQ ID NO: 14573 - DNA, 1119 bp, Homo sapiens
cctcaccaatgtcctacctggacatcctccctcactcctcctccttctcacactctcctccctatgaccagtcctttaatatcccctctcctttgacagctcttcaccaccttttgctcagattctggtccttccccagggtgaaggctctctccaatttcttctattggagagtgttcttctcaatgcagtagctcttacagaatttacataagagattcatatcctccttgctctcatttggtttgggctgtacaatgtgttggtgtttctgtctcctttatagactcttagagctacaggataagccctcttctaagaacagagacatggaatgctcagtctctgtcttgattgctgggtcagcaggtaaagtgatggcagtgctgccacctgaagagtgtccaccgacacaacgtatgatgagagagacccttggcagggctgtgctgccattgatgttgtggagtttgttcctcactaacaatgtttttttctggttaatttgagagaatgtctgtatttgctgtttctgtaatcttattttgtgtttcagttgagtaagtgttgctgaatatctgtagaatgtgtgataattttttgtaaaaaaaaactcaataaaagaaacattagcatagaaaaatattttatgttgtgtaaaacacttggctgaggaaatgttttaatgcattatatcaaaatgctacagactctcagcagttagattacaggagacagctctgtttggcactgaaggagaccccactcagcactgccaggttgggagaagggcactgagggagcgaggatcagaaataggattgagtatcaaagggttcccttcaaggaaaccagcatttggtcagcaccttcaatgcaaatcattgctctaggttccttggaagacacattaattaaaaagacatccaatctatcttccagtagcctacaagctagagatgatctgggtataaacattaattcatttggcctgtctttatgagagttactatgagcaagggactgtgcaggatgtcaagaaacaaagataaaacagatgtggaccatgcccttagttcagtagtggtgaaaaggcactttcacgagtcatcctaagat

SEQ ID NO: 14574 - DNA, 1234 bp, Homo sapiens
tgtgaccccagtcagagtctatgttcccactcatcttcatttgttgaccttatgtttcgaatggaaagacatcaattttttcaaggtacctctctgctcacaaagatttccctaattttttaagaggctggaagcagtcaatggtacaaataaaacacattttcgacagtgctgaggctcagaactgtggttgagatgataaaatggttttattttctagatgactatttttcaaactagaaatatgttttgcatcagtgatgtgttaaggtcaagtcaagaaaagagacaatatgtcccatgtcacggagaccaggataatgagagtgttctctgggagatggctcagaatctgttcatttcaccggcaaaaggttataccagacagattgtttctcatttgatgtctaaattaaactgctgacatggcctgcctcaaagtaagaagcatacgtgtttgccaaacagaccctaaagaaaatccctgtttgagagatttggttcctttttctgcaacctttgaggcttttctgtgtttaaggtatgcttaggaattaaaccaggttttcagctacagagcagctccctaaatgttcatgaaggaggcttggtgaatctgagacttgctgttttgtcaaagtgctgtgggatagaagcgagataaatgctagttcctatttggagtttagaaacatcacacatgcaagatgcacaagatcatagaggaattactgaagatagaaaggacctatggaagattcgctttagccattgccctccactctggccctgctttccctcaatggccattttcacctacctcagagctcaaagaagaccaaattggccaatgtcatggtgaatggtctgcagaccagcaacatcagcctcacatgccctatcccaggcatcagaatctgcaccagaacaaaatctgcagacgattcagcaggactgatcctcagtcaaaagaggatcagctagacacagttctaggtttgggggatacagtagggaatagaacagacaagtcctgcttgtgttgcatttacattttaatgggaaaaggagaaaaagcaataaacaagcagacaggtaagtatttgagtttctgatggtcatagtgttaaggcagggaaagaagggaaggaagcctggatgtggattgagggttactacttgtacatggtaatcagggaaaccctcaccaagagggtaaaatgtgaacagagat

SEQ ID NO: 14575 - DNA, 1198 bp, Homo sapiens
gagttgctattgtattttttaaaagctgcagataaggagatgctatgatagctctctataatttttcagttataagttttttccattaggttaagttttttgagttttgttttgttttttaaatcaaaatctctaccagcttactgggacatagactaagaaattaaagaatgtgagttgtgttttccttgccaaaatggagtcttttctcaaatttacatggagccaaattgcagacacatccacagacaggatgagtatcagtctaagaatgcagtcttgggtccttttttttttttttttttttttttcccatgaaaacaagcaagttcacaagtatgaagaatatagaagcacctttacctcagctaaggggctcaaggaaggtttattggatgtgactttcttggagctatctgggcttcaaaatatacttaaatattcatatgcataaaagaaggtgggggaattttagctgcagatgttggtaaagcagaagagagaagagagcaaggtagaatcagaagactgagtgttccattgtgaccaaacatctgttgtagaaaatctggtcatgaagagataccttgggttacacttcatgttctttataaaatactacagcagatgaataaatacattaatagcatgttatttgtatatgtgtgtgtgtgtgtgtgtgtgtgtgtgagaatgctgttcttctggtaaaacttgttaattgtctatgttcatttattgaagaatgtgtttagtatctgaataattttgcatggtgggatctgtaatgttatattttctcctttaagcattgaaattcatcatgtaaggcagtggtccccaacctttttggcaccagggactggttttgtggaagacagttcttccgtggactcggggtcggggagcggttggtttcagaatggaaccgtttcaccttagatcatcaggtgttaagttcttataaggggcatgcaacctagatccctcacttgagcagttcataacagggttcatgctcctgtgagaatcttttattattattattattattattatactttatgttctggggtacatgtgcagaacgtgcaggtttgttacataggtataaacatgccatggtggtttgctgcacccatcaacccgtcatctacattaggtattcatcctaatgctatccgtccactgtaagaat

SEQ ID NO: 14576 - DNA, 1190 bp, Homo sapiens
tcatttgagtttttataacccaatctccagcttccttcctctcctgtaagtagtgttgaaagttatcaccctctaatcaagggtttagtttttctggtaaccagcccccattctgaagccatctaggcgccccactctaagtcacttcattagtatgaactcagatatggtctaaagggcttgttatgaataactaaagaaattctattgcttaggaaattccaagagttttgggaaatatgtggcaagaattcaggacaaagaccaattacaatattattattataccaaattcttgttatgcttcaatgttaagacggtttctcttttgattatatcgttcatgctataatctaattagtatattgtttattgtggaacatttaattaaaaaatggaaaatacgtttttatttttagcaaaagtttaaatttattgctttttctcttacaggtcactgatgaattgttggaaaaaattgcatcaagaagtcagaatataattgaaatcaacatttctgattgtcgcagtatgtctgataatggcgtatgtgttttagcatttaaatgtcctggacttcttaggtatacagcctacaggtgtaaacagctttctgacacctctattattgcggttgcctctcactgtcctttacttcagaaagtgcatgtaggcaaccaggacaaactcactgatgaaggactcaagcaggtaaattttagcatttataaagtgattttacttgaattaattaaaaatgttttctagcaacaacattttaaatggttacgttaaaaatagttcccagagactcaagtgaatcatcttttttacctattaatgaatatttgtttagattagttaactagagtgccatggttataatcagtaaattaactgctttgttttatagtgagagcctgaacttctgtgaccagccattttataaatttatgcttttgttacttaaattttttaccacattttgctttgggcaactgcgtagttttggtcagcatgaggttttaaaaattaacattttaattccccttttattatactagatgacatacatgcttaaatatctgaatgtttaagggataaatggacgtccaaattgaagattataaaagttagaacaaaggcctaattacctctatttggtacaataactgggttaaaaatagtat

SEQ ID NO: 14577 - DNA, 1120 bp, Homo sapiens
ttactaaatgttaagtcactgctgaaatgggaaataggcttttagaatggcccaacaacaggtttaaaatcagaaatcaaacagtaggaatagatgtttatttgactagaaaagtataaagagagtgccccagcaattgatgatcacatctgttatggtttgaattatgtgcccccaaaagatatctttaagttgtaatactaaatacctgtgtatgtgacctactttggaaatagggtctgtagttgtaaactagttaatatgaagttgttagggtgagctctaatccagtgtgactggtgcccttataagaagagaagagaggctgacatacagggaagacagccatgagaagacagaggcagatattggaattatgctatcacaagcaaaggaatgcctggggctaccagaagctataggaagtaaggaagggttatcccctagaaattttggagggagcatggccttggctaacaccttgatttcagacttctggcctccagaactgtaggagagtaagtttctgttgttagaagtcacccgatttctggtactgtgttacagcagccctagggaattagtacaacatctgttgtgattattgtctttataaatgatctgaaagaggagggtcttcctagtgaggtatctagatgacattaaagtcttctagttgtgaagagcaaaaccagtgagtacagatgatgaacaaagaaacaccaaaattagcttctctctgtgctagaacaagtaacaaatccagcatcttaagattttatattctttgactgtaagcactgatttcaacacatttaatgttgaaaattgcttccagatttaatgttttatgattttatgagcctgggtaagtgcctggcacctaattaatgcttaatgaatatttaaaaaataaataagtgaaaccaatcagggaataaaatataggaaaatataattttattttaatgaaaatataaacttattctggtataaaattcaaattatggttacagttagggaaaaatgagtgcagggagtgaatactgggaaactatacgcattgtttactgaatatatcaacacttaagtagaaaaacaaaattaataaattgttaat

SEQ ID NO: 14578 - DNA, 1185 bp, Homo sapiens
tgaggtgggctagagagagacagggccagatgcagcagaaaaagagttgccaaactctctggtacctcagccactttccaacctttgggaagccctaagaattgtcttatcagagtctactcagtatctactaggcacatgcagctatttaatgtaactaaaagtatataaaatgaaaaattcagtttcttggtcacactagccacattgcaggtgtccagcagcacatgtggcagatggctactttattggacaatgctgctctaggaaagccaaaggagaaataatgccaactttgcttagcctcttctctgtaattttctcttttaaagctagaatcggtgtttttctatttaaatggaaatatatgtggtacctagaaaactagcatgtggcctactccatatgcatatgttctcatggatgttttttacctatgacagaaaagatgaggactggtaaatcacaagcattcttaacctcattataaatacattgcaaatgtaaaaatgcaaagtgtggaaatcataaatgtgaaagtggctttcaatttgttttaataggcgttttctgtgtcttactgtaacctagggaccttgctgcaagaaactgcctggtaggtgaaaataatgttctgaaaatcagtgactttggaatgtctcgtcaagaggatggtggagtgtattcatcttctggcttaaagcagattcccattaaatggacagcaccggaagctcttaattatggtaagaatagaccacattttttttttaatggtaaaaatgaacggcatcagcataaaacattcacaagcaatatttacaggggtagcacagaatgcaagttagaatgatttgaggatcaacacaaataagtgaatttcatacttttaatttgttgaaattattgatcagatttctatatgtaacattgctatattaaaaaggtagatataagtacttttaaatatgactatacatctgagaaagagtttttataccaaaaaaaaatgactttgtaatagattatacagagtaagcgttgttgtggctctggaccatttctttcgaatgtcttataattggtccaataacctcatctgatgttaggttcctaaaatattaagtcaatcagttctttagtttctcactctgaaatcgacatggtttcttagcatctcagtct

SEQ ID NO: 14579 - DNA, 3002 bp, Homo sapiens
taaaactcactaaattaaggaggatgaatgaccttaaagatacgaacatgaataagagacatcatttaccctcaaagaaactagagtctgattgggcagggaggaaaaggtattaaaattatgtctttctgcattgtgtggatttgaagtttgttttttgttgttaagagtcttattattaggataatgacactgttttttctttattaagttacttgtgtggcagttaagatgattctggtggctcttaacattttttttttctccagtcgggaacatgccctgtgtgccgccgtcatttcccacctgcggttattgaagcatctgcagctccttcctctgagcctgatcctgatgccccaccttcaaatgacagtattgcagaagcaccctaaaccttgacagttgaaatgagatcagtgtatcaaagtaaatctgcaaattccttctaaatttcatgtgcaaataattatatataaatatatttaaaaatgctatatatagtatatgccatagtttagaaagaatattaacctttctaaactaaatttaggtttgcagaaagtattaaacatttttaagctgaatgttgagacagtgcatccattttctttagttgaatatgtttgtattaattgtaaagccaagcttatcagttgactctctccagaataaataatcatctgtgtggcatacgttattggctttgtctgtaatactgccactaagtgattataattaagctgtcctgtttgcatcaaatgtaaagactgtgttcacaaccgtagtaaaatttggtttcattggaaatgaaacaaattctaaagtatgctttttcactagtccctttgattttgctatatcataacctcttggttcatatgctgagaaatttttcagaaagtccatttttgtttaaaattagaacttttcagaatgccaaatgaaggctaaaattttggccagaacattacaaaagttttaaatcgtagacgtaactccccctgaaataaagttaggtagtaaaatccttaatgaaaccagtggatgtgcttaacgtaaggttagtaaagcatacaaagaatctagtgtgctcagggcttggtacaatgagctgaattagatggccttatgaaactctttctaacctcttacccaacctgtttctccttggttaaaattatacttgaaggcccagaacactcatggcacatttgtttaatattgcttatagttagtttaaggtaattttgcttctacagtattttggaaggtctgaaaacttgcacagggtcatctttgtaattatataaccccaaactaagatgcacaatgtctccttcaggtgatcacacacagtggacgagtatgtgcaaacatggacataatagttcacttacaaatgtgatttgatgttaacactagagaatgatgactgtagaacatttgagcaagtaaaatagtaaagcacatagtgagtgtatgtccgtctaactggtacattgataatttagtttgggcacataaaaggaatatttatatggcttcccaaatgcagagttacatcttattcgtgtatttctctgagtatttatatcccgtctccttttttcattcttaaaaataaatgaattttcactgttggcacatatgaggcttaaatataaggaacataacacttgcattctaatttttgcatatattgtaaatgtgtctggtatttacagcaaaatactgtgtatccttttatgggtaaaacaaaagtgaacattgcatgcatgtaatgtgatgaatttgtaatttaggagttctttggggcttctgtgacttgggaaatgcttacattcaggccttaatgttgcattagctagcatgttttccctctgatgtatatagtcactgttgtataaactaatctttgcttgttttctactctgtgatctttccatatcatatttcattaatgatcagttagtgtcaaggagtcaaaacagattaaaattaatttcatgtgtatatggtggaaatttgtggctagtgtgatttttgtttgtttccttttaagtactgttgatcagttgtgacacttactggttaaacttacgttgctaaagatttctctataataagccacacattatatttagactatattaagggaccttggttttcttctagatagcagctgtcccaaagaaaatatttcttctttgtctgttaagatttagctattatctgccagttgttaagaggttttggttccaaactcaaccagcaatgttgagagctgaacttaagatagctgttgtactttttgctttccatctgttactgtccttcattcttggctccctactatctataaacagctgctgtgaagaagaaaagttgaataagagttggcttaaattttaaaaaagaaaaagaaaattgaggttttaggattttcatggtaacaagctctggtataagctaaggctggcaagttcagatactaaaatattatttgatcatatcttggatccttttgaaaaagttaagactatatgaaggtaaattagaaataagtatgaatattaataaaatagcatttatcttatttctctattttatgttgtgacttaacctaattttatttttttaacattttcttatttcttataatatgaatgctgatatttaaaggtagatctatgtggtattctttgtgtttcttaattgtttaactcttaagattatttgtgatctggatttatgtatttgttagatacatacgaattgttaaaatggaatgcaagtttttcaaaagcccaggtctaaatgtaatggttggtttattgttctataaccccagcccatcattttctgtgtaaatcataaacaataaacagaatatactcggtggtcatttctaatatttaattgtgtaattgtatcacttctataatgtaacccctgaaggatttagagttaatgacagataacactactgagcatgtgat

SEQ ID NO: 14580 - DNA, 1215 bp, Homo sapiens
agtgctcaattacagtgcaattgcaagattttattagctagtggaaataattgtgtggtttttttttagttagaaagtactataaaggaagaaatttaccattttgaatatgaatgcattttaattcatgtcataaaacaattcatttgattttctttggacatatgaattaagctactataatacagattgtgtaatttattatagaaaatatttaaaatataatttctgctgctctgtcaaagtctgtaaactttaagggttagtaagtaatttttgtatgatatactgtttttaagctaaaggtaaagtttttttcagttcaagcccacagtgttttattcagtatccacacttctaaaaacagaaattggccacaaagcctgacctgatgttaacttcctggataagcagatctggatctgaattgaaatgagggtattttttcaaatatttgtatattttactgcagaaatatagttatgtttgattactgtgtgtggcctggaccatgttggggtttgttaagtagtagttctaaatctgggaaatatatatcaaaattccaaaacacatttagccctaagattttgaaatagattgcaagtctctaatattatacctctaggttactatttttaaaaaaagacaaaacttacagtctttgataatttatttttttgaaagtgtaaggtgcttgtattttttttcccccagttacactttttcttctttaaggagaatcatttaatttggctatacctttgtcattttgggcaaaataaatacttctcttctgcttgctttttatagtcagttataatgtcttatgatgaagttgatgaaattgttacattgtttgccaacccctagagaaaggtagtcttcctggctccttgattttaaattgattttctttgttttgggggtggtcagtggtggaagtgtattctttgccttgaaggaccctggacttttcatagttataaggtattttcttagttatttgtaattcttattcttatttttaatttttttcttaagtgatgtcaatattctgaacaatgatagttttttttttttttttttacaaacaatatatagatgggaaaaaacatttacagttaatagaaactgtccttttaaattgctagtaatgtattgactacagagcctgtggttagggtatgccaaaatgatggaactactttagga

SEQ ID NO: 14581 - DNA, 1161 bp, Homo sapiens
aaattgcggtgaaactgggtattgtgtagtgtgtagtgtgctctgtaacgaatgaacctgaagaactcaaaccctgacagggcaatctaactattcctacttgacttacgagaaagagaagcctagacgtgaagttgatatatatttttttctcttttgtgataacttaaatgaccaaagaatatccttgccattttttttgtgttatgctagagcaaatggcttgaatttaattgagattaaagtaaaaactttactggaattattgtgaaagtgaaaaaagacccttttatggatgctgtcatcaatacagagcactcaacatgttttgtcggtgagaggttttaaaaatcttgctgcagagagatgtatcaaaattttaaaagcctctgcttcccctaggtagtatgacagagaaaatagaaacaagcactgagggcatctttaaatcttgagctcagagcttgtccagtgcttcttgatgaggttgaagaaaacagttggaaaaaggtaaggagttttaagcttagcttgatatgttgtgtaattttggggttgaaattactgtaatttttttccctccagtaacctcattttcagattttcctccattacaggaaaatcataaaaagtgatatttttacttaaagtgttttctaaaataatgtcctttggctttggcttgatgatcacttgaaaatggtttatgcaaacatctggacctgggttttctggcaaccttgacattttctctgttcagaatctaaagacatgagtgactcattcagttactgagaaatcttaggcaaagctaattccagtattgtaatatctatccttagtcctcaatgagaggctgaagttctgctttaagcgtaaagcatttgatgaaaggtcaaagtggctgctggaggggaaggctgttggtactcaactgggaggtggaacattttgcatttaagattgcctttctcagattttctgtactggattttcactgcagaaagaaggtattctttaagtgcttggacggccactgaatcctcaagcagatagacattctaagacccctctgtaagcttaaccgttatgtgtgtgacattagccttcgtatcttacagggtaaaacttaagtggcgaggggactgaggcactgaggca

SEQ ID NO: 14582 - DNA, 1146 bp, Homo sapiens
atgtgtgtgttgctcttggagagaagaaaggacagagaaatttatccaatttttcagatttttttcactgtgctattcataaataagcctgtcttgctgccaacaggttctggcttctttttcaggatcatctagaacaaggactcctgataccagtgtagacatggtattctttgatgattgagaacgtaaatgtgttatacgggatacattggttgttttatatgaactattattaccaatatctttttcataaattgcttgtactgcaattatggattaaaaaatttgtaaagtatcaatgtcacaagttttagattataagctaaagtgtttgttttaaaataaaaatatgacttttatgcaattagggctgctgaaattctttactatttcgccctgagacaagctcacaaatacaagataaataaatttctctcatcatcactttacacggcactgacagaagccagaaggaatttgggactgtttcaacatcatgatgctatcacaggaactgcaaaagactgggtggttgtggattatggtaccaggtaatctaattatagaaaaatcatctttaaaaaaatcattaaaattatgggtaataagattatatcttttggtgaagttgttagtgtatatcaaaccacattaacaatgatatccctcataagtattactgtatcaaaacagcactgatattcaaatattaagaaatctgttgacagagtcccagctgcaccaactttttattgcaatgcatttctgcaaatagggtagtaaaatattattactactgtttaaagctgatcctattttcttctaaataacagtgtggagactggagttatcttcttgaccaaggacttggcatcaaataaaacatagttataatgtagagagataaagattcctacttcattgtatgtcagtttaatctcatcctatttcatatccaattgttcttgtatacttctttttttttttttaagaggcatattgacataataagctgagaagcatagccaggaaggaaaaagacctataaaccttatcatatgtggatgatataagccattgggaatgagaaaggatgacctgggtgttggtatcaaagccatctttaactcattgaagggctct

SEQ ID NO: 14583 - DNA, 2266 bp, Homo sapiens
gtaccataaacctattttaggtaccacaaggtgtctttttacacagctcatttgaatacaggtgttctgagaaggggtttctattttaaaattaccatatcaaaataaatgtgccttatttttttataagtcttgttaaatcagtgtccatattactgtttggggaagggggaatgttgtggggtctgggagagggtgggtactttctatgacacataaattgtgtaatttttgcctgacaatgctggccacattctgatctgtttcattaaatttgtggtgatgttactctaaacattttgactatttgaatgtactgagatgtcagaaaacaaaacaaggaaggaaaatattgttaattaaaatgtgctgctgccaaggaaactgcaacttgaagcaaggattttgtaaaatgcaaaatccagctactgtttccatttcacagtagttaactatattaaagagagaatgctttaaaattgatcttgttttgaaacccacttttatgtagctcatcatggtttatcttactaaggaatatgtttgttcattcagttctcaacttttgtatgtgctaaccttaaagtgaagttctgagcccgtgtgccattacagtgcttttaataaaatttatttgggattattgtttccttaacattaaaataatagcgacatttagactatgcaattttagcatagaaaggagtctttgagtatgtacagttttgaaaattctctttgagataattgatttcatattctgtggctttcaacctccatttacctcttgtcattccaacatctttatagagaaataaaaacccaatttctctttcaccatttagtttgattatcatctggattttcactcaagatgcagctcctaagattattgttatgttaaattcataaactccttcacctttaataattaaggaaacaataccagtgttgataaagatattacaaggggtaatttcatgcaataaacatgtaccgtaagttttcttccacatattttgggaaaaaactaaaaaaagaaaaaggacttcctttttgtggacatctacagatgttagggttgccagaagcaaatcccaggaatgagatcagtattttcattgcatcttaaatgtataaccttcctgtgggagttcagtttgtctgtggttaagtgggtgtgcttaatcattctcgaaattgtgatcagatgaaataaaaaaaaaatcttgatgcaataacagtggttttgccacttctggttgtttgcgatggatctgtcccatgtcagtctggggttttattcagcttgtgttgctaccagcagttcacaggtaaagcagaaattctctttaaccagcaagtttctgctttttaaggttacttttagaataaatcatcagggaaacagagaggatgctttgctttgggttgtagtcaaaaactgattaaataatttaatgtctctggcacacactaaaaaccatacacttcagttgtgatctcagtggcatatttatttggttaggtttcgttacatttattattacagatgttcagttgaccaagtagttcagtgttttctttcctttttttggaaattttagtttgagtttgtgactgcagtgttcaagaactcagcatccttgttttctacaaatactgattaaaataaaatgctgtaaaatgtgatgtaaaacattatcatgatcttcccatgcctttgttgtacttgtgccgaagtgttttgatattcctttgtctggaagaaaatgtttgctttcattttgatcattttgttcaccttggaatcaacaggttttgatattttctcttggaagattttatatctttttgggaatatgtaatataagatctctaataaaagataatcttatcatgtacatggtcctctagagtagttcttaatcctattttgtaaacatgtattaaaacataatgaaggggtagggggagtagtgagggtctgttctttgttccttcatgatggattgggtttttttttttttttttttggacacagagtctcgctctgtcacccaggctggagtgcagtggtgcaatctcagctcactgcaacctccgcctcctgggtccaagcgattctctgcctcagcctcccaagtggctgggattacaggcacccaccaccactcctggctaatttttgtatttttagtagagacagggtttcaccatcttggccaggctggtcttgaactcctgacctcgtgatccacccacc

SEQ ID NO: 14584 - DNA, 1257 bp, Homo sapiens
tttcccttttatttctgaatggcttgtctgagaggaaacaaaattaaaattcatctgggaatttgtgcctcttgtctagtatatagtcaccactaaataatggcttccgtttttattttctttcaggttttgctttaaattttgttttccaaaatagatgtacgtggagggaaaagcaattattcttatcaccttttatttaaacttctttagatgaatactgaagaaaaatccaaaccttaaaggaaatgtgcccttgtattttatgggtgaggggaaaaagtacatttgtacatttcaacatataataagcaaaaaaattactaatcagtttaataaaaacattttgtctattcctaaatgtaatttggtgggttaagcactttgtgtagtaaaatgatatgtgtctgctctatcattagacattttaaagtttcatgtcttcacgtgaataatcacagttgtatcatgaaccatttagcgctctgaagcacagtgactttgcactgatattgtccaaccaagaatgcatacgaatagaaattcattttacttgctaaatgtcacagaaatggttactttttgcaaatagtagtgttggaacaaaaaagtgatatccaaaaagtgtaaaaacagtaataagtagcaaatctctcgtgtgtgtgtgtgtgtagttactgaaacacctacattttccatttttaaattccaccaaaagggggaaaataaaattaaacaccactgatcacattttatattttatggtgactattttagattaaggtttactttgtccaaccaatagcatttaaattgttttcaattaggatagtttcagataagagtaaaccagaaaatttcaagtttgaaaaatttctagaaaagaatctgaatagaatcaagtatttactagtgaaaatctgtaggatcctttgtttagctaaaaattaaatatttcaggatattttttggaagttagcatgaaaatagttagttacataaattcattttattgtagaataattataagactgataggctgaaccatacacaaataaggttgatcttgttttcctttttggagaaagagaatacaaattaacattaaaattgaaatgtagaaagtaaaatatgaataattttttacaaccactccaaattagttgaaacaaaatcttgaacggtcacgcacttaaatttaagctagccaaatatgttgcactgaattttgaaaagaatgagtgagataactgtaag

SEQ ID NO: 14585 - DNA, 1194 bp, Homo sapiens
aataagggatggggtcttccccctctgattttatatattctgtactgttagtaatatagttcctaatgattatgtacttttataactttataacaatagaaaagaaaaattattttacctcatcagattcccaatgctaaccactattaatacttttgtatgtatcgttataggcttcttaattaggatttactctgagagaagatatatgagcattttaaaattctaacgtgcctgttgcaaggcattagattttctttattaacaggaaaaaggtttaaattacagaaaaaaaatgtgttttgagtactttctcttatattggtgtcatcgtttgtactgattttcaattattttgggtttcattctactacataatatgaaaaaattaacccacaggaagaatttcctgtaccatttaaatatatcctatttggggtataaaaggaaaactgtaattttctaagttaaatgattataatcaagtcataactggattaaaatttaatgcagatgacactgctctcaaccttctgaaagaatcaggcccatcaggaattgaaacagagctgcgaagcttgtctcctgattgtggtgggtccatagaagttatgcagagcttcttgaaaatgattgggatgatgctggacagaaagcgtgattttgagttagcccaggcataccttgcattgtttctaaaggtaagtctaatgtaagacagtactgcccagcttgtcttcttctggggcagtgctatctaacagaactttctgcaaagatgggtatgctgtatatccatcctttccagtatcatagccacttgccacatgtagctattgagttcttgaaatgtaaatagtgtgatcaagaaactggatttttaattttatagaattttaattaatttaaatttaaataaccgcatgtggctagtgactaccacattggacagctagacagtgcagcttgggagtcttgttttgtttttttactcaactgcacaataattttgactttaccccctgacatttttatgctatctgcttgatccaatgtgctgaaccattaacttttctttttttagtggttagttacattttggaagttttttgtgattatgaatagaaagttgggtttgtttgtttttttttctactactgaaatcaaaatgttcacttctatcattattaaagg

SEQ ID NO: 14586 - DNA, 1234 bp, Homo sapiens
aggacatctaaactttagatataaatcagttgtcaatgagataaaattattgccagcaaatattttccttcaaagataagtaacttttgatatggcagttggtgaaatgaaagaatataatctgccttcttgttaaatggttgactattctgtagcttgtaggtagtacgtattagaaacttgtgtatgtgggaaatatttggcataatactgttttcagtatatagtagctattttttaaggaaattagtttcatacaagaaaaagattattataaaagtgatacttttgcatgaaatattagtttgtgttgataactcttagttaacccttaaagtttaaaacagtactcaaaaaaaaataatgagaatctagtattctgtagttaactaatctataagataaattgctaaagtactagggagcttgtaaatcttaaaaatctttttatttcagtgttcattcaggttggatatatttgaaattgtagatttctatctgtacaacatctcctagttaatagaatttttttccttcccctcccttctctctcctcctccttttctaaccaaagggcattttatcaacaatcatgctgaattcaattaatatctcaagctaaaaaactatgtaattgaggttgtatctggagaagatgggaaaacattgtataatttaagcccttaattgtctgttgagcttttagggctgagtaattgcctttcatacaaataaaagctttaactcttttctcaagagtgtaccaccgtccttagaatcaggtgttttaaatccagtttcttttaattaaatgggactgtagtgatccctaccctgtagagaaatcaacagaactagagaagctaagggcttgatcaggtttcccctagaacctgtgttgcctgcctgctgtatcttccatgtctttcttattcaacttctagaagtagagaaggttgggacttgagtgtagaagaaacatcagaataatttcaaaaaacaggaagttggaactataatttttaaattattgtattgtttttacggattttacatgtatagttaaatattaaaattcatctcttgcagttcaataaaagctatagtatagattttatttttaagaagtttatataattcttttgtgaaccaatatgtaaaactagaatatttattaaactaataatatgtattagtatcaataaaatatgtatttatttttaaattggtatga

SEQ ID NO: 14587 - DNA, 1115 bp, Homo sapiens
aggtatccaggcaaatctttgtatatatttttttgtgtacatgcacacatctcgaaatccatttccgtgtttaatgttagttgtttatgtgttagtattcctgtgtctactgttttgttgttgttaatatgggtaaagtgagccctgaaatacatgctaaacaagacatgaaatgcagaaaggtacatagtgtttcaagtgcatggtagtttgatctgtgttttactttattgtgttttcttgagtgtaaagaaagaataaatcaaagttcttcatacccattttgacaaagtggaacagtggagctgttttttgcttttgtttttatttattttttgccactggtgatgatagatttcaaaaaacaaaaggtggcagcagcacaatgttcatggtgaattatctcatagtatctagattgatcaagatctgacagaaggaatgcacaaaggattctatattcttaatgatttattaattaccaggatccttttctaaattgaatgtacttttgaattactaggtttcttctttttttttgttctgcaatagtgaaagaaaactcagtagtttagtttcagtttctcatggaaattggtaaatgttagttttgacttcatctattttttatttgtttttattagcgtagagtaggaagtctcatattctactgttctatctaggatggtgaaattccaaaggtgcctaacttgagtaagggatttgtgacaagatagtacacattactataagggctattatttcctgaactggatgtccctaaaagcaaataaactgcccactatctctactctagtgctctctttgtccttatcaacatatacctccaataagtaattacataattcaccgttaaacatggacccactctaggtaaaattaccctcatggaaacattttcactgtgagaatgatgaatttaaaaattatgtttgaatcacctaaaatgtatgtgcagcttctagatggccccttagatctgctgggctctagctgtgtactttaaaaaaacaaaaacagctttattgatatataatttacatattatgtaatttacccacttttaagtatctaattcagtgatgttttaatac

SEQ ID NO: 14588 - DNA, 1170 bp, Homo sapiens
gttggttactctacttttttttaaaaaaaagtcaaaaaatggaaactgctgtgagtgacaaataatgaagcttatatatgcatgaatagagtttagtatagttataaaatcttacagtaaaatgactacaacagttgtattcatagtcatagtattcatagtatgaataattgcattcataattaggaataaagggtaaggggattgcataaagcattataattgccatttataattattgctaccgttacatagcagaacaagcattctgccctcaactgaggggaaggaaagtggggaactgcgccagcgcatgagtgctggatggaacgtggctcaaagtgggtcagctcctacctcgctgtggtgggaattgccccttcttcattaaggagcacgaggaaatggaaactgagtggcttggccctgggggtccccagcatctggctaggagagtgtgggagcgattccatctctgccctcccctgaccctccagggcagcccttatccctttgactctgcttttgtgggaactccagtgccctctgtgcttccttggcttctgccctgctcttcccacagatggagaggcgaagctagaggcttacctcatctctttccttcgataattctacttaataattgtgagatttaaaggaaggcctctccccaggaccccgaattctcctgccaccacttgaaattctgttcattaactgttaatttgaattaataagtaggtatcttagactggccaaaggcagttattagaggtaacctaatcattcttagcatgtgtagcctgagctaggggctattctaaagactttacctggattaacttatttaatctgcacaggaaccttatgaggaaggtccagtggtgtccagttgcttgtcctaagttacatggcaatgacatggggagagtcagaacagactctctatgggtctgccctgggattcaggccctcagccactgtgctgaactgctctcctggatccttaatgacgatttgattgctttcttcctaacacctagcagcaatacctgtagggatgagactggaagcaaagatggtgaggacgtattaggaagagacatggctctaaggggagcagtgcttgggatgatggagactttggaaagagacttggaggacattttt

SEQ ID NO: 14589 - DNA, 1180 bp, Homo sapiens
ctccatggggctgcttgaatgtcttcatgacatagcagctggcttccctcaatgattctaacagaaaggccatttatgacctagactcagaagccacacaccattgcttctgctgtattctctttattagatatgagtcactaagtccagcccaccaaagagaggaattaggatccacctcttaaaggagtagggtcaaagaatttatgatatattttaagatcattacatcgaccagtgaaacagtttcactggatttatccctaggagagggatcactggataataagggcattgtttcctattgctgttgtaacaaattaacacaaacttagtggtttaagagaacacaaatgtattatcttgcagtcctggagatcagacacggttttcactggaccaaaatcaagatatcagtggctctgcgtctcctctagagattctattgaagaatccattttcttgcttttcttcagcttcttgcattccttgtctcatggcctctttctccatcttcagtgccagcagcattctaaatctctctctgaatctgaccctctgctgctcttgtcacatattcttctctgacccttctgcctccttcttaaaagaacctttgtgattacattgggtccacccagataatccaggaaaatcagcttcaagatctttaacttaatcacatctgcaaagttcctttagccacataaggtaacacattcataagttttggggactaggatttggccatctttgtggggccatacacaggcatactcatctggttctccattttttttaagctgaaggatttttttagttatttttacttttgcgaatgtgtgttactttcttttggtaatttcagattttcatttaccaagtttatttaaagcatagtataatatataatgatcaccaagatggtaagcagatattcattgttcaattagattcttgattttatcatcacttaatttatatcagtgtatcagctacttctgacatagtctgtaatagaaactgagaaacgttaaagcaacacagccttattaaatttctctttgtatcttttagactcgttataacaccagttctgtgggcgctttgttgaaacttgatctgtcattgtcttaccagtcattgaacttagggccactctaatccagtatgacctcat

SEQ ID NO: 14590 - DNA, 1247 bp, Homo sapiens
ttaaaattgttgcagaaatgttttctgtttattgcttataggtatagattaaaagaaataagataaagttttaaattatgtaaagatttagataaactacattctctatgtgtgtgaaatccgttgtttttcactgattatagtcagtggattagcaccaacttatctaggcaaacagcactaacagtttgttagtgagtatgcaaaaacctacttttgcttttaatactgtatattaccactcatactatttactcacataaacaaattggtgatgatacatagattttgaaataacactgattacttcatcctggaaaggttttccggttttttgttttttttttggcggggggggttgttttgtttttttagagttatagtaaatatcccattcatcacttaattggtttttggcttttggatattaaagtcgtaattttgtttctaaactcatttggcccacaggtggaaatggtgtattcattgttgtcaatgcttggtactcatgataaggatgatatgtcgcgaactttgctagctatgtctagctcccaagacagctgtatatccatgcgacagtctggatgtcttcctctcctcatccagcttttacatggcaatgacaaagactctgtattgttgggaaattcccggggcagtaaagaggctcgggccagggccagtgcagcactccacaacatcattcactcacagcctgatgacaagagaggcaggcgtgaaatccgagtccttcatcttttggaacagatacgcgcttactgtgaaacctgttgggagtggcaggaagctcatgaaccaggcatggaccaggacaaaaatccaagtatgttctctatagtgtacatcgtagtgcatgtttcaaagcaaatgtgaaatttttaaacagaaaacatgtttagttaatatgctgtctttatgactaagaggagaaaattcatatcagccatttgtgctactcatatttaaaagattaagtctgtatttccctagaaaaatttagcaaaggaaaatgttatgtgcactactataagaacagtaagtcaagagaaatttatacaatcatagcatagtagggccttagtagagctagaaagaacttgagcaattatgttgcccatctttcacttcatagctgaagctcatttcatagatgaaagtgactttacgtaagttcctatagccattagtgtccaaaccataatcttttacatttgcatatcatt

SEQ ID NO: 14591 - DNA, 1087 bp, Homo sapiens
tctgaagatgacctgttgcaggaatgtataagctccgcaatgccaaaaaagaaaaagccttcaagactcaagggtgataatgaaaaacatagtcccagaaatatgggtggcatattaggtgaagatctgacacttgatttgaaagatatacagagaccagattcagaacatggtctatcccctgattcagaaaattttgattggaaagctattcaggaaggtgcaaattccatagtaagtagtttacatcaagctgctgctgctgcatgtttatctagacaagcttcgtctgattcagattccatcctttccctgaaatcaggaatctctctgggatcaccatttcatcttacacctgatcaagaagaaaaaccctttacaagtaataaaggcccacgaattctaaaaccaggggagaaaagtacattggaaactaaaaagatagaatctgaaagtaaaggaatcaaaggaggaaaaaaagtttataaaagtttgattactggaaaagttcgatctaattcagaaatttcaggccaaatgaaacagccccttcaagcaaacatgccttcaatctctcgaggcaggacaatgattcatattccaggagttcgaaatagctcctcaagtacaagtcctgtttctaaaaaaggcccaccccttaagactccagcctccaaaagccctagtgaaggtcaaacagccaccacttctcctagaggagccaagccatctgtgaaatcagaattaagccctgttgccaggcagacatcccaaataggtgggtcaagtaaagcaccttctagatcaggatctagagattcgaccccttcaagacctgcccagcaaccattaagtagacctatacagtctcctggccgaaactcaatttcccctggtagaaatggaataagtcctcctaacaaattatctcaacttccaaggacatcatcccctagtactgcttcaactaagtcctcaggttctggaaaaatgtcatatacatctccaggtagacagatgagccaacagaaccttaccaaacaaacaggtttatccaagaatgccagtagtattccaagaagtgagt

SEQ ID NO: 14592 - DNA, 1440 bp, Homo sapiens
gagggtttttgttctggaagccatatttgatagtatactttgtcttcactggtcttattttgggaggcactcttgatggttaggaaaaaaatagtaaagccaagtatgtttgtacagtatgttttacatgtatttaaagtagcatcccatcccaacttcctttaattattgcttgtcttaaaataatgaacactacagatagaaaatatgatatattgctgttatcaatcatttctagattataaactgactaaacttacatcagggaaaaattggtatttatgcaaaaaaaaatgtttttgtccttgtgagtccatctaacatcataattaatcatgtggctgtgaaattcacagtaatatggttcccgatgaacaagtttacccagcctgctttgctttactgcatgaatgaaactgatggttcaatttcagaagtaatgattaacagttatgtggtcacatgatgtgcatagagatagctacagtgtaataatttacactattttgtgctccaaacaaaacaaaaatctgtgtaactgtaaaacattgaatgaaactattttacctgaactagattttatctgaaagtaggtagaatttttgctatgctgtaatttgttgtatattctggtatttgaggtgagatggctgctcttttattaatgagacatgaattgtgtctcaacagaaactaaatgaacatttcagaataaattattgctgtatgtaaactgttactgaaattggtatttgtttgaagggtcttgtttcacatttgtattaataattgtttaaaatgcctcttttaaaagcttatataaatttttttcttcagcttctatgcattaagagtaaaattcctcttactgtaataaaaacaattgaagaagactgttgccacttaaccattccatgcgttggcacttatctattcctgaaatttcttttatgtgattagctcatcttgatttttaatatttttccacttaaacttttttttcttactccactggagctcagtaaaagtaaattcatgtaatagcaatgcaagcagcctagcacagactaagcattgagcataataggcccacataatttcctctttcttaatattatagaattctgtacttgaaattgattcttagacattgcagtctcttcgaggctttacagtgtaaactgtcttgccccttcatcttcttgttgcaactgggtctgacatgaacactttttatcaccctgtatgttagggcaagatctcagcagtgaagtataatcagcactttgccatgctcagaaaattcaaatcacatggaactttagaggtagatttaatacgattaagatattcagaagtatattttagaatccctgcctgttaaggaaactttatttgtggtaggtacagttctggggtacatgttaagtgtccccttat

SEQ ID NO: 14593 - DNA, 1884 bp, Homo sapiens
tacctgtgtttataacttccaggtaatgagaatgattttttttaaagctaaaatgccagtaaataaaagtgctatgacttgagctaagatatttgactccaatgcctgtactgtgtctactgcaccactttgtaaacacttcaatttactatctttgaaatgattgacctttaaatttttgccaaatgttatctgaaattgtctatgaataccatctacttctgttgttttcccaggcttccataaacaatggagatacatgcatataggtcatactggtttcctttcattttttgattttctatttctaattttctgaattactgcatgccagttgttgcaaaccacttcaagtacttctatggaaagagatggatgttagtcaattagataaacttgccttttaattcaaataaggaagaaaatataaatgctgaaaatgaacattccacatgccagaaaagtggaatttttgtaggcaacacttgagtggggggagacgggccagtctatactacccattgaagtaaagactgctggatgaggccctctgttagagatagtggttctgaattagtaaaggggcaaatctcaattctaattatagatgttcacagggtgctgctataatcgatagcaggccaaatattcccagtttatgcttgttaacaaatggcatactaagcccagcgttgggaattagtcaggagttacgatgcctgtttagagaggagtgggggagggagagttacctaacgtaaggcacttcaaaggagtgcgttgggatcaccaggagtgcttaacaagacatagctgggccatacccccagtttgattcaggatgtttggaatggggcctaagaacttgcatatctaacaagttcaaaggtgaggctaatgctgctggtctggagaccacactttttgagaattactgccctaagatcacagtgaagctccttgagtggttgccttcagctctagcgattcctcccaacaactggacccttaatctgacaaagtatagcaacagataaaagacttcccctaggcataaaagatttcaatattaagccatccaatttcataatgctcatctcaactcctgacagcagacaaacttagccagacatgaacaaacaagtaattctaaagacagtgattatatttgaaggatcagttaatgttccctttgagactgtcattataaaaagcagtaacttcagcaaagatctaatttgaattttcaataagattaaaagactatgaaaagggaactttgagatgagagaaggttgatttcagatgaaaatatccagttttttaatatacagtggaagtgatcaataattagcaaataagatatttgaggacaactttacagattaccagggtaatgaaaaggaagtaatcaaagataagccccataaggatcaaatagcactgtaagtacagtaaaatgtttcttgattaaaatatggatcatgttgccacaggttaattacatgaaagaatgaatctcttgcagaggatgggagccagttgcacaatatctgaatatatgttatcccagggtttcttggaatctaaggaaaaaagcagagcaccagaaatgcaaaaagtaaattgcccatagttaaaggaacatctgagtagtcagatcattaaaatttatgaaacaattatttttcacaagtcatggtggctgaaatagagtgtataatttttttcctttcaaataagcgtattttcctcatattacactgacttaaaatttaaaaattactttgtaatgttgaaacctatagactgtggctcctgtaaaccccaggtcattttcctgccattcttacaactctgtctaagatctataaaagtatattc

SEQ ID NO: 14594 - DNA, 1104 bp, Homo sapiens
tctacttcctgtaatgtacaattttatataattctgaaatgtttttaatgtatttgtgcacatgtacatatggaaatgttactgtctgactacaacatgcatcatgctcatggggagggagcaggggaaggttgtatgtgtcatttataacttctgtacagtaagaccacctgccaaaagctggaggaaccattgtgctggtgtggtctactaaataatactttaggaaatacgtgattaatatgcaagtgaacaaagtgagaaatgaaatcgaatggagattggcctggttgtttccgtagtatatggcatatgaataccaggatagctttataaagcagttagttagttagttactcactctagtgataaatcgggaaatttacacacacacacacacacacacacacacacacacacacacagagtaacctgtaactctcaattccctgaaaaactagtaatactgtcttatctgctataaactttacatatttgtctattgtcaagatgctacaatggaaaccatttctggttttatcttcaaagcggagaaacatgttgatttagtcttctttcccaatcttcttttttaaaccagtttaaggaacttctgaagatttgtccacctctgattacatgtatgttcttgtttgtatcattagcaacaacatgctaatgacgacacctagctctaagagcaattctgggagaatgaaaggaagtataaagtaacccataatctgcttggcaatagttaagtcaatctatcttcagtttttctctggcctttaaggtcaaacacaagaggcttccctagtttacaagtcagagtcacttgtagtccatttaaatgccctcatccgtattctttgtgttgataagctgcacatgactacatagtaagtacagaacagtaaagttaaaacggatgtctccattgatctgccaaatcgttatagagagcaatttgtctggactagaaaatctgagttttacaccatactgttaagagtccttttgaattaaactcgactaaaacaagtgtataactaaactaacaagattaaatatccagccagtacagtattttttaaggcaaat

SEQ ID NO: 14595 - DNA, 1108 bp, Homo sapiens
gtctttacaaggcaacgattgtctgtaggtgagaaaaactgccaagttaaggcaaagagggagaaagcaggactgcttccaaagagttctttcacgatgctcaaacatttcaattttttaggtcaaaaatgccttaggtttagcacagcaatgtaggtgccaaactcatcgcagtgaattgcaggcgggagcaacaaggacgcctgcctcctttctgcctgctttttgcaatagtccgatttgagaaggggacccacgagagacacaaaatgcacgcccccacgccacatcctttttaccccgcaatgggttaagactgtcaacaggcaggccacctcgcagcgtccgcggagttgcaggcccgcccccgccagggtgtggcgctgtccccctggcgctgggcgggggaggaggggcgcgcggcggccgaggaggggcgcgcggcggccgggcggggcgagcggaggcgagtggaggacgcgtagacgcgccgcggtccccgcctgccgctgctccgccgcagtcgccgctccagtctatccggcactaggaacagccccgagcggcgagacggtccccgccatgtctgcggccatgagggagaggttcgaccggttcctgcacgagaagaactgcatgactgaccttctggccaagctcgaggccaaaaccggcgtgaacaggagcttcatcgctcttggtgggtggccgggggtcgccgccgctggtagggccacgggagccgccgctgccccagctgctggggaaggaagcagggagaggactcgggaaaggtggagtcggagacagacgggacaagcagcatattcagggatcaggctggcctcccggaaagcgtgggcatcggaggaccccgcgggggctgcccaggctgagggtcgcggggctggagggcagctgcggcgccgggcgctggcagctggaagggccagcgctgacgtatgtctgccccgcggcccggcgccctattcctgctgtcctgcgcggtgggcgcggacggcggggcccctgcgggcgggcgcgttgacggaggtacccggtcctacccgaccctccgtggagctccgcccggagagggcgcctctcg

SEQ ID NO: 14596 - DNA, 2884 bp, Homo sapiens
aaacacgagtttgcactgtaaatgcagttataaccttttatacagatttaccttttcagtgttcagtacaagtttaagttgctttctttgagggcatttattctgtgtgactgtgggttttattttgtattctggttaagaaaataatgtattgagttactgtcaagtagccaagttaatgggaatgctccatctacctgttacagtgattgcaataatagtatattggagtttttcaaagaaacttaaagtaatgcccaattattaaatgaacacaagagctgagatgtcacattcgtcagcattacaggtgatctattttggtggcattttgtacttctctctgcttctaaccactgaggctctctaatcttcctctggagttttagtgaaaggatttattgagcagcttctggaatataatgtgcatgtccaaaatgaactcagcgcttcaaaaggacaaagtctgtagcctggaggggcttgagtggatgggagctgatgctgtgattttgagctgtggttacatgcagtcagtaaacctgtgagactgctggaggaaatgtagcagacagcatggaggctgggacccagcagctactttgggtcatgtctttactgtcctgcctccaaccctttagtctcgtagacttttgttcttgtggaaatttcttctgtattccagttgtgtaaatatgtatggaaaactgatattactaggttttacgttgcatctccagtattgatctttggaaactgatgttacattaggttccaattcgcaatagtagcagagactgacatgcttttattgacctgctaagcccctggatgatggagcgagaagggaaggggtatgcagtttacccaagtccaaataaagcatttcactaggttacacgttatgtatatgtgttacataacagtaacatacataactcactcctaggaatgtattttgcttcaggatttttaaattcaaataaggatggcagtgcccattttaaggaggatttcagctataactgaggacaatcaccagggcgttaagggggctttagtgttttggctgcatctgacctcattgaaggaatttcttgggagtcgggggtgtttgagtatatgtgtgtgtgtgtaactatcatgtgggttttaaaaatccttttttacagtggtatccacaaaatacttctctgcttataaatgttattgtagaaatctttattctgtgtaggtagcctatttaattgggttccactgaacctcatgggacttttaaaagaagggctatttaaggaattcacttggtagtactttgctttagcttttaaatggcttgattttaaaggagaaattctatttattaatgaaagtgtcacccttttggtgctaagcaggagaattcacaattaaagcagtgtgtatagaattatgatattcagaatcctgcatcttttaatgtgacaaatttttgaatcctgtgacttttgctttttaatgcattatatgattgtgtttggaagcttttactgttcttttcagaaatacggctgctttgcttgggtctcttcgagccatatttatagttggtcccagcattccagacttctggtaaattgttaaaggagtgaaaatgtagtttgcctggcagatgaataattttcactcatttattgtcttctggaaaccatttaacttttactgttttttatttttttggtatgtgtttttttttttctttttaagtgcatactttggccagtcttcctggtgcctgtagagttggatttttcagctctcaatactgaagcaaaagagattatagttaccagaagtatggcctctaatggtgttgagccttttcaagaaccaacaaattatctttgtgattacagtagtttaactatggttaaatgttactgctgttgcgctgctttatttaatgcactgtggaacaaaatataagggtactgttggggtgtgattatgataacttcaggcttttagctctcctcaaagtttgaggttaaaaaaatgttaaaagatgtgagttaaagtttatgtgtgtgatgtgacttaactatgcagaaaatatttaagttggatgtacttgttttaggtacatctactatacttattctctcaaacctgggtaatagtttctcagtgttcaggttaccttgagaaaggccatgcttagcgaactggatttctcctttgagaaattttagtatggtttgaggaaatcaagtgataaaggagtatgctgaatatgcaatcatttacttctactgagtgctgcattttaagatgctagatgagaagagtagttggttttgcttcattatgttttatgtctttgagagagatacaggtcttggaattcactttttaaatgttacgttccaaccttatatgttccaaggtgcagtgcactgtgaatcttttatttttaaaaaaatttgtaggtgcttttatgtataactttaatgatttataagatgctaaatgaattgtttttgtacctaaccattgtaatccaaaagataagggtgtggtttacatgcttttcaaaaatttttgttaagaagtagcaaatgaatggtttaggatttcaaatagtgataccctcctgagacatgagcatttggagaggcctgagaacctaatagaactcatatagtgtgagtgaaatttgattaaagatgttggaaaatgaagttggatttttgtattcatgtataaaggaaagtctcccagtgctgtcaaaggaattgtggttactacttgctgttctgagctttgaatatcgttatttttctattaaatatcaattagtaagtatagctaatgaagacatataatgaaagtaattttatgctgt

SEQ ID NO: 14597 - DNA, 2072 bp, Homo sapiens
taaagttaatttttttgaagtttgattgccaagcaatccagtgaatctaaagtaatttttctcactttaaagaccagtgatgaggagtctggtccttcctgtactgatactgtagaactccagtcaaacttcagtgcactgctttcttacaggaagacaactcagaacacacagccataatctgctttggtgtcagtcacatcacagtggttatacatttgtcctgaatggtgattcattcctttccatctaacttccttgtgacaaatagcatttactattgaaatagtcttaaaatagggaaaagagtgaaagttactcttatgcatgggagtgggcttaaagggttgacttccaccagctgagtacaaacaagtgtaaagaaaaactatgataaagtatggaggtcttgagaattgttcataatgaaatctttaatctgggttatcagagtaatgaaatcaccaataaaaacattccatttatcttggatcttctgtggttagcagaggagtatggtctagctatgttagcagcttgaaggcacaacgtaaaaggaatgagctttcacaaggtgcttacgttagctgggtagtattggtcaaaggtactctgaagagtgaatgcagaaatcagttggctgtgtttgtaatcttgtcccacatggaccctaacctttagtagacttcagtcttttagtccagtagaagacaatggccctgaatatgtgttttctgctttttggtggaaggtttcctgcaggtggttgggtggtttttgggttattggctactgttcgttcagtgccatttgaagacctgttgtttcttaatcctttttcttggtgtgactggccaggaaaaagtccattgagtcctttttttctccctggtgtcttaccccttctgtagaataatccatattttaaaatttgtttcacatctttatagcaaacctgccacagacttgcaagcagtgattttatctttccttcctgagaaggtgatctcacttttgatgtttgggtcacctgtggacacctgtgctcttttgagtctcaaggcttatagctttcacattggcttgggaacaacagacttgtgtgtggttctagagtgaaatgggcagtgttctgctggtcctcagtctttgagaggtcttaggcaacatccttagtatagtggaatttctgaggtcaaatttaacatttaatatattctccttttagttcattgaatctgaggttctaaatctgtagcttcattttgagcacaagtctgcattgtcattttttaagagattggcaggcatatccttttgtgatacttaggaaaagactatggatggcagcaaatgaaagtaaaggttctcaactgtgaatgaaatttagaaagataattcttcagcagttggttgattagatgggttagtgcttttggaatatataacagtagacttgtattctttatgcactatacatatgatacgcactgacagaaaagcacagaagacatactgctaagagtttctttgtgcatttcactactgttctaggggactgctgtctctttggttccttttaggtttgtgttaggatgttgcacaagtaatcatttaatgttaaatgcaagtgtccaaagaaatgagtcttaaagttctttggtcatatttcactttagagttaggacaggagacagctaacctgacttccattttacaaatattagaaactttttcttcagtaacaaaaacagggaaggacaataaaaccatgaactattttgctttatgtctgtttttaaaaaataattgttttgaagtttgcttattagcttaataccttatagtacttttaaaaaatcatccttggtaattattgacttatcctagatccatgtacaattcagacttttatctgttagctttaataaaaatttaaaaccatctcatttcagaataaaataaacggaattacagttcatgcattagcatttttaagtgaagttctcttaataagattgccttttgtctaaccgaaatagggcatacagattagtttggatgggaaagtg

SEQ ID NO: 14598 - DNA, 1224 bp, Homo sapiens
ccttatagggcattttaatgcttggagaaagactataagtgaatctacttcaagggattctgttcatggtggtatacagttcttggtgctcttttggaaattgtcaaacatttactgatagcagaaaaggaaccccaaaacacctgtagtgttcaccttgttataagaacagaaacatttggaacaggtttcattctgtttctagatttatgttgttgtagttgaacagcaactgtttttttccctcagtgttaacgaaaggataaagactacctgtattgttgggtatgactatcaaaggatttccggtgattcatgtttgtgaattggagtttaaatgtttgcaggattactgtacttccaaagacccactagaatgtcagctgtactctgtactctccactgagaaaatgaacaaaatcctatgtcttaacagttatgctctaactttttgaaagctttttgatgtaaataataggttagaaactaaaagccttttaatcttacaaaatacaatttgaacgatggaaggttgttcagatactggctttctgtaaaaacatcattgtgttagattgtttgtaatgtactatcaataaaattggctgcttgggcggttttagttaccaccttagcctggttttctgctactgttatttatcatcgtaggttctgagttgctcattgtggttgctctttggaccaataaaaatggcaagtatgagatgaacatgataaaagtatgtttatataacaggaagaagctgggcgcggtgctcatacctgtaatcccagcactttgggaggctgagttgggtggatcacgaggtcaggagttcgagaccagcctgaccaacatggtgaaactaaaaattcaaaaattagctgggcgtggtggtgcgtgtctgtagtcccagctacttgggaggctgaggcaggagaatctcttgaccccgggaggcagaggtcgcagtgagctgagatcacaccactgcactccagcctgggtgaacagagcaagactctgtctggaaaaaacaaaaaacaaccaaaaaaaaaaaaaaaaaacccccaggaagaaatattgtcgagagtctctgcaaaaatgaaaatacctcaaacaattaagtttgttgctttaaagcaagattatagtgtagggcttgagatgtgaattcattagatatttaaaatccagcaattcttaagtttgtgctagaatca

SEQ ID NO: 14599 - DNA, 1222 bp, Homo sapiens
gttaatgaggaggtgctctggaatcagatgacctgggtttaaatcccagatttgccagttcagcagcatgatcttggaccctaactctgccgtggataaaataagggtaaaacctaacacacagggtttaggattaaatgagataatacagataaagcacttaggatagtacctggaatacagcaaatttcaaattataggttctttataatgatcataaaattatttttgtaattaaaacctctcttctacaacagaaagaggtcttaacagtttaacctcagggaaaatgatgacaacagtgttgttttctaatctccccataagaatacagagcaactaggatagccacagacactattacaacgctagatgacaaggtatctctatgaacttcaaaatacaactaagtgaggacaaaccactgaaccacatagtttcagtatctgtgggaggaagtagaaggaaggcagctggtttctgacagctctgcaaattggagaactacaacactgcccacagtttctcaactacaaagtgcagcgggccaatctaagaacagacactgaaactgggaagtgactacagaatctcatttgcagatgaatgttaaagcaatatgataaggtctgctgattgcattagagctgtctgggttttacgctgtgtacctcttgaagcttatgagacaaagcccagcactgaggacaaacttctagaattagaatccaaatgggcaggatgggtaaaataggacaaaggaaagaagatctagataagtattgggaagaaaggccaagacacagagacattatatatgtgtattttcatatatatatatattcttttaaatcactgtgaaaatgggagctctaaggctgtgaagtcatcctagagccactccttcctcctaaaagtacagaaaaactcatttcagttaaggggaaaaaaagagtaagtgagccaggattacagtccaactccagtcaaagttagtataagaaataagagaataaatagatcaacatcctcacagacaatgaaagcacaccggaaggacatgaccacaagacagataaaaacctaatatttgccaaaaaataaaatgcaaatatgacaggaaatttatattaattagtacagttatcaataaaagtaggaaaaggggaaaattaaccaagtaccaaacacttggagtaaaaagcaaaataaagcagaagga

SEQ ID NO: 14600 - DNA, 1383 bp, Homo sapiens
ttgaactgcaaatcacttttagttacaaaaagagctaaagcatgtcagtggcatgatgcttgccaagccagatctaggcatctaggataattaaggtattttagtatgcaatttactgccataatatcaaaggtcagtaacagtgttctttctttcttcaagcttatgtatacctttaaagataacttgcatgaattactttgattactttggtctcaattatttgtcaccccagttaaacatgaaaggttgcagtgcttcctgttcccttactggaagttagctttttcttttctctttcttcctttctttctctcactctttctttctctttctctttctctctctctctctctctcactcactcactcacagatttgctaatgccacagaaagggctcttttaacttaagataagtgaaaagtactaaaaaagattcaggtaattatcattcagcactttattgtaattcagaataaaatttatgatggcatatttgccctgcaaatgtcttaatgaagttgttctcaataaaaagctccttattgatttgagaaaaactcagtttacctgtgagttcaatgagctggatcactcacttggatttttgtgttgacattttattctgagggttgatgttacactatttaaggagtcatcaatgcaaacagtcacattaggtatgtcatcatctttagtcagtaaaaaccttgtaatgaggagtagtaaataaacaagagaacattagactttttggttaaataattgagatttaatttttaaaagatattcttactcatttgctaggttgtaaatttgatttcaccattaagaaaaggtaaattggatataaatgaacgatctccaactttttgatgaagaggttttactatctctcactgtgggaaaatttgatgaaatatttgaactgtcacatatattaagaatactttatgatttagaccaatattctagaaatatcaaatgtcagtatcttgaaatcatctgcctctaactttgtggtataagaattatatatgaataagctattatttttataaaggaaaactttgccattatagtaaattacattagttgatctcgataatttgaggataacagatgacaattgaatttttaattgatttagtatttcctcctcctctttgggggctgggtgggagggcttacatgctcttatagtgaggcacatctcactgttttgcagcagaatttgaattgtgcaactcctgtgtaaagtaaggatttctttaaatagcatttttgcaccagtaaaaatagataacttagaactcagtcttgataactgaaatgacttatttcacttagaatacatttctcccttctctgccatctccaca

SEQ ID NO: 14601 - DNA, 1117 bp, Homo sapiens
ctgctacaagatgactttggtatcaaacccggaataatctttgctgagatgccatgtggcagacagcatttacagaatttagatgatgctgtaaatgggtctgcatggacaatcttattactgactgaaaactttttaagagatacttggtgtaatttccagttctatacgtccctaatgaactccgttaacaggcagcataaatacaactctgttatacccatgcggcccctgaacaatccccttccccgagaaaggactccctttgccctccaaaccatcaatgccttagaggaagaaagtcgtggatttcctacacaagtagaaagaatttttcaggagtctgtgtataagacacaacaaactatatggaaagagacaagaaatatggtacaaagacaatttattgcctgagatgaaacatataacatgtggctggctcttgttttgtaaaccaaatgattaatcttcacttgagaaagcagtttctaggaaatgtttaaataaaagagagtcttcaccttaaagaaacctatggagcacaagaaagataaatttctgcaggacagcctataaaattgtggtactttttgatgtttcagtaaacttgacattgtcagagtttcaaggacttttctttcacaattttcctagttcatggatatgaaaaaggaattctcaatccatattccttgtattgaaccttgaacaaaaacttgtatgacagacatttttaaaaatgtgacaacacttttattctctgaattttgatctcaaaggacacagaaaaaaaatggccccaggagatctgatcacacttcctcctgaggcacctctcatggatgttgcaataagcattcgggtactatcacccagaaatatgaattgccagaatagaacatttagcatgttaagcgttgatgcatataaaatcagaaatagatgtgagaatggtggaactttttaaaagaacccagtcaaatgtattttctgctgaaatctgcatatttggaggcatttcccaccaccgattcacagcccatttgatagtgtggtagttagggacttcgtggagtggtgttcagacgtcccctggggcttaaatctcttcatatta

SEQ ID NO: 14602 - DNA, 1117 bp, Homo sapiens; identical to SEQ ID NO: 14601

SEQ ID NO: 14603 - DNA, 2916 bp, Homo sapiens
attcatgttaaatattcaacaccaatgatctactctgttcgcagttgtttatatctactcttcgcacactaaactttggtattttgattccttttaaccatttaagactacttttcttataggtagttgatattttaaaaactttagatttaatgtctacatgtgttagggaggaagaaaattgccttttaattgttaataagaaaaccaaatgtgatgaactgtagcccaagccctattctgcactgttcagttttatggaggaaaaataaatctaccataggaatgttagttaatattgatatatcatggtaaaattgatttctcactagcttagaaaatgtcagacttttgtttttggggtttataatttaaaccagctatgctattttttcataaaggcatttgtagtacacagaaaacagtagtttcagtagtgtaaaagagtttatacaggccttaaatatcagactttgtaacaggtagaaatattacagaataatttaagacactacaatgggggcaaatgaaataggaaaatttttagtgagttacacgtactcattacattttcagtgcttttacaaggaaaaaaggtgatatgtttaattttaaaattttaattggctagctcttgcccttatatgactttaatgtctgtgagtcattcccagcttaaattaacaattgttagtattagtctcacacataagtgccatacattttatcctcatggatgtgatgcactgaaaagttagttgctctccttttttcttttttttgtcgtgcatattttatttctgtagtttctggttagctaccctaaagtgatttaaaaatttagaatgctttgtgtttcctatttggtaatcttcattgacttttctttagttaatgagtattaaatagtgcatattctgtagactatagggtttacattgtgttgcatcttataacttgtatagattgagctgattgaaataagattttgttccaagtattatctgatagaatacaagatgattcaaaattatatagatatttaaagcttttctgctgttttttttttttttaattgcaactgcttttctgccgtgcctctcttccctacccaaaagtgatgagttctgaacaagacaagactgtcatattgtagagactttggtatgtgataccatagaatactgattggatagccatcctagtcacttaccaatactgactagaagttaactcttaattctaagctatcttaaaatgcatatatatacttcttgcatggaagagcaaaacaaattcaagttgtcatgcctgataatttcagatgccaccgtatagcaaagggtgaacatgttttcaaccctttaactttttacggtgtttgaagaccagctactccttaatatttatcaatggattaagaagtttaagattttgcagatttatcaatttgggtttttgtactgaagttgtcttgcggctttgcaagtgtccctttatatttaaatttgaaagttgtaagcactgatgttaatgtgattgatcagcatgggcatatgtaaaatgtccttttctggttgcctctctatgctattgtgttcagatacttacaccataattaaacagtaagttatagacttgctgagtttggcatagatagtgcactcatttaatctgtgcctctcaaaacttcagaatattagcatattaccacaaataatttttggtgaaactattgagatattaaaatttttgaaatcactactgttacctgttatagaaaatagtgttggcttagtctagtctctgtgtaactggttacattttgatggttgtctatactcaactggatatgtgtatgtaaattagaaaatacatacctatccagacataaatgctaagtaacatttttttcttcctccaactacataatttgtagctcatcatttttccttaatcctttcctaacttgttgcagcagtttgaatttcccagatatttatgtttgaacataatggctcagaatacatatttgaacatcatagttgtatatatttttaaagtagaataaataatggaaagcaacttgatatacaagtttatactaaaatttcaactgtgtgaagatacattttaaggcattactttgctaataatctacacattcttttttctattaaataaacaaatggtttgtggttcacagctttcatccaagcttggtgataatcaattttgaaaatacagtggactgaaaagcaaatttattctttcgaagatttcatttaaatctctgtactatgcatttttgtttcagtttgtaaatgtgtaacatttatagttaaataggacaaagcaggccctatgactattgttttcaaaaaattaatatataaataattcagaggggtttttcatttacttttgaaaagaaatttctttaacaggattgcacctatcaatttcttgtagaataaaaaaaaatctttcaacaaactgactttacttgtttctgtcaggatttaaatctttctaaagctccttataaacttaaagcctagagtacagttctgtaatgagagtgattatttatttggtattttattaaaatatctgagggactgtccaagaaagaaggtgaaagagaaataccacgtctgtactgcctaatttgtaaccttctctttgcattccttactgaaagtttgtgtaggtgaaaagcagttaaatcatcagttgctctaaagaggtcttaatttttaagtaaattacctttagtttgtatattacccagttgtatcagtgtttttcttaataatgtagtcagaggggacagtctggttcctgggcataattctccaaaaacaacagggaaataactataaatataggttaacatttattgaatgcctacct

SEQ ID NO: 14604 - DNA, 1128 bp, Homo sapiens
tggactaagcaagtcgcattctttcttaagagatgctgaaaactaactacttttcagtaacaaccaatagaagtatttctttcagcttgctgccttgttcattttatttctaaaaactgatagcacagtatcgatataaggctctatactgaatcccttttacaaatattaaattattggagtaaagtcagataagactacatataaagttctaccaagaggtgaaaaaacaagaagcatatttgcctcctatcaggagtatctgtgacttaatacttgtaagtaaacttctgcaaaaaaaaaaaaccaaaaaaacatttttttttcttttgaccaaggctcatcattgtatctctggcatcttatgtctttcttgagtaagtggattaatgaatggataaattttggttcatcatggggttggcttttaaaaaattatactctggcatttaagataaatttattatttatttgtaccattctaataactttggtgtcaaatagtttgcagtttaatctttgctgtttgaggttaagtagaaacctttgttttattagagcctcaaggtgtctcttttaaaggaattgttcccttcttagatttttgtccaagaatcctaaagagtggtagaaaaggaaaatacaatattcatcatcttccttggaactggccggtaacggtgtagcctgagaaaaatgtcctgttcattaatcggtggtagtcttggggatgcgtaaacagatctttgcacgatgctgatctgcaaaatcgaattggtcacagggagtccagagatttacattgttctacacatcatgtccaagtatactttcctctataatttatcccattagtaccacaacggattttaaaaaaagtttttttctttttatagagaaagggtctcactatgttgccaaggtttgtcttgaactcctgagctcaaatgatcttcctgccttggcttccgaaagtgctgggattccaggcacaagccactgtgcctggccctggaccatggatttttaacctagagagaaaactgtcttccagaacttttaagtgatttgttcaattaataatctgtctcttttcatagtaatgattgccttttagagtgagaattc

SEQ ID NO: 14605 - DNA, 1183 bp, Homo sapiens
taatagttattagagtacacatactagcaccactactagaaaacagctaaaattacatatattgtggttggacatgtagagaaaggacaagattaaaatacataagctcattcatgcctaagatgcttaaaggacagattttattaaacacttaggattattaatatgtgtctgatagaaacaggcatcctttgaaagagatagcctgtaacataggtaacttaatatacgtgtgtggatatttatgatacatgtggcatttatcttcttagtttcatctaagaataataaaagattgagtttgatttattgccttttttttttgtagtgttttggcagtgatggtaaactggttttacattactgcaagtctcaggcgtggggatgaaccacaaagaaaatcaacttgctactacatgaaatggattttcacggaagagacagctctgaaaagttttgatgcttgtggcaagagacttaacagatgtgatctatttagtatgtgtctactctatgtttatgcataagaaaacatccatagcatgaatggactcagaaaaatgtgatttgtattaatgcaccagtcatcataaaagatggtcatgatagtacacccattgctcctacttgttactattattgctgcagatctgcctccaaggttgaaaaggagactaagactgtataaacatcttcattgtcagttctcaaaatgactgaaattgttttcatggtaaaagttaatatactaaagggttcctttttttttaatgtttacatttatctctatgtttacctttttagtcacattgacctgctggctgaatacctcaaatagtccagtagagggcagtccaccaggcagaaaaggttaggcgttttggtttcacatctttgctggggaataataggggaaatggctgtttttgctaatttttagctaatatctagccaggagagcaagcacataggacagactgaaagactgtaattttacacaatacacatggcttaattattttattgggatacagaaaaatataaattctggacaaataagtcatatacctgttttcagtcctaacatttaaggattcttgagtcccaatcacataactgtggtgttactctgtcatttatatggtgtcaaaagcacttgatgagtaaacccagtagcatcttt

SEQ ID NO: 14606 - DNA, 1371 bp, Homo sapiens
taatgtttcttttaaatttcatcttggtgtatatggttgtttcataaacttaaccttaaactgttctgcattagatatggttatgacatatacatacaacttagtacgaagcgattactattctaagtagcacagcaagaggttaagaacagagacccagggtcacctgcctgtgctcaagccttggctctgccacgtactagtggtgggccttgagcaaattgctacatctctaggccccagtttctctctttgtaaaatggagttaacaatagtatggtgtgataaggattagatgagttaatacatacagttttagagccataacgtgacataataataacaaaataaaggttcattaaataaaaacatttgtagcttttttgtccgacatctttgcaaggctgcggtgtctgctgctactctccgagcttcgcaatgccgcccaaggacgacgagaagaaggacgctggaaagtcagccaagaaaaacaaagacccagtgaacaaatccgggggcaaggccaaaaagaagaagtggtccaaaggcaaagttcgggacaagctcaataacttagtcttgtttgacaaagctacctatgacaaactctgtaaggaagttcccaactataaacttataaccccagctgtggtctctgagagactgaagattcgaggctccctggccagggcagcccttcaggagctccttagtaaaggacttatcaaactggtttcaaagcacagagctcaagtaatttacaccagaaataccaagggtggagatgctccagctgctggtgaagatgcatgaataggtccaaccagctgtacatttggaaaaataaaactttattaaatcaaaaaataaaaataaaaataaaaacgtttgtatatattctccacaaaaagcagaattttattgtacagaacactgggctaaaaatcagggtacacaggaggtggagaggagatgtgtgaggcgagagcagcccgcagtgagcagtggggaggagggaaagctctatcagcctgggcggcagagctcctccctgtgaggtcctgcctgggcccaccttcccacccacatccatgggcatctcagagatcctcgagggggcactccccagtagcatggaatcatagaatctgtgtgccataccagttgtttctgtccaatttgacagttcttctcaggaaaactatgatctgtgtgtctctcttgaatggaattgtttttctctgattgttcattcatctctgatcacttaaaaagtaattggaaaaagtaaaacatattaatatcatctatctccagtaactatatctggtgattcttttctactctccctacacgtctcactttattcaa

SEQ ID NO: 14607 - DNA, 1303 bp, Homo sapiens
gtccagagtaccaatgtttctggtaatctctggagttctgggtcagggtaaaatggtcatgtgtatgatgttgattgtacattaatttattctcaatgttgaggatgattgcactgtcatcttaatgtcatgcttttcctttgtagaataatgaggaagtatgacaaaagtggcaggctcatctgtaatgacgctgatctgtgtgattgtctagagaagaactgcctgggctgcttctacccatgcccgaagtgtaactccaacaagtgtgggcccgagtgccgctgcaaccgacggtgggtttacgatgccatcgtcactgagtcaggagaggtcatcagcacgctgccgtttaatgttcctgactaggtgctcttgtatatggactgatttgtttcttcttcttacacatttaagttgacctctttcttttgggtgaattttagggcttgggggaaatatcgaaaaaacatactgaagactcatgttctgtcaagccccagaacaatgtagaatgggcaataattctgtaaccttcttaactgtgtcaacaattttcaagtcccttaacttgcaaccaaagaatgtaacaatggagggatcagcatttctcatcagcaccctcatctctactctgccttcaaattaaaactctcttccctctttgctgatatctgagaaaatgtagctttaagattttcaaaactctgtagttgagagcttttcttacatagaacatagaatcttaaatttataatatctagttgtccttagaatcttatacatcactagctgtaaatcagaattgccatttggattttgaagaaaaactgtgactttgcactgtatacccatagcctcatttttttattgttcatgttttaataacattaaaatgaaatttagtaatacttggtagtatttttaatcattaaaatttgtattgtacttgtaaaattgaaaagttaggaatttattatcctaaaagccaggagtttacatatttttgatttcagaagcagtatttcaggatttgtttttcatagagagaaaacaagttatacaaaaatgattttctgtatgtttgctaattgagtgtgttgataagcaattgactagataaatgatgtagtcttttcaactttgatacatcatcagagctataaaatattgaattcagctttctttgaattcatttttttatgacagtcttttttttaaccctaagtcaatggttctcattcatgagaattgcctagagaacttgtcaaaacatagatttttgcagccccacattcagaat

SEQ ID NO: 14608 - DNA, 1267 bp, Homo sapiens
tcttcacaaaacagactctgagaaccttttaaaatcagtactctttacccttataagtgaaattatccaattggatgtttttagaacgagtactattttttcggaagttcctaactcgatctgtgtgtaaattatttacagatgaatgcagttgcagccaaatcaccttatttaaatgcatcattactggacacttcaatggtttctccatttgaacactgaattttactttacttcaaatatactggcacaagcagtctacatcattcatgatttacctgttttactgtattaaagtaataattttacccatcttcaaagccatatgcattacattattgctaccatgagaatttatgtaaacaatgggtaattgttcctgtccatgtgaccttgtgctaataattattctaaaattgaaatttttttcttttcattgctattcattacttttttgtttttaaacaggcagctttcgattgccagatttaagagtgtgttcgttagcaaagctgccctagttgattgacataggtgtccaatggctttctctgtctttccttgatagtatttctatgaggaatttcattgtattactctgatgctgctgagaatttccctgcctgcttttgttactttggcctccactgtcacctgacttccatagcagatgtccactcaaaccctagtctttctacctacaatgccagtgaaaattttagcctcctttcactttcttcctcttccttcccctactggggaccctgactcttcagacacattagcatcactgactgaagatcttcctatttttgattattactctttacctcttctgttaatgtaaaaacttcacctttccagttatcaaggattcttctagaacccttctctcaacattttgaggtttgattttctatgcaaattcctcaaatagcttcccatctgaaaacgagagctaaaatcctaacaatggctttacatcatctgtcctaccacacccctctcacctctcctcttccaatctccctcttgcttactgtgcttcattaaaactctctccttgttcatgaagataccaagctcactttcttctcagggactttgtccttgctgatttctttacctggaatgttctgcttccagaacattcctcgtggtttatcctctcacatctttcaaatctttactcaagtgtcaccttatcagtgaggtcttccttgaccaccttatgaaattacagtccccttcatagcttctatgtaaa

SEQ ID NO: 14609 - DNA, 1371 bp, Homo sapiens
agtggtaattttattgctatgtgaatggatttaatattcatagttaccagtgctattttttcctttctatttgcatgtgtctgaataacacttgatatgagtttcgttcccttcactaacgtctttttttttttttgtctttgtaaatagctagagactatacaagcacagctggattcccttacatgatgttttcgaagactgtttttttcatcacgctcctgccacctcattattttgcattgaagatacattgccaggttgtgttttctgaaggattcagtgacttgctttctgtaaattatatggcttatcacttcttagacaaataacaaccaatagagatcattgttaagaatactgaggttctaatatactttctttagttctgtgagccaacagtaattattaagaacactttccctttaaaggaaacaaaagtgaataccatattgtttttactgtcatagtgttgctttcttgcctgtcctgcttagtttttacttgctggatgataccataatgtatcaaggagcgtccatggatacaagataagatgtgtaccttagtagaatacagagctttggtaattacatgaataaaattaagaaaatagccatatacaatcaaatacactatggcatttttatttgaatatgatgagtatattttgcttcggaaataatataggaaggaaatgtaaaatagtgagtagtatggtatcagttaattccagtctgagcttctctgtcaacttcagtttctctctcagtttaatgatttaataatagtccaggtttttgtgtgtttttctttatactgcaaattaataatgattcactttatagtttgggagacagaatcaggtcttgaataaaataattgtaatgagtgctaaatgggcaccattattcgaatcagataccttttatattctctttccataaatacgttgatttctgtcaataaaatttttgtgtcttaggattggttgaagtgtacattttttaattatatacattatagtatattttatgccatgaatgtatgtaaatgaatacatttacgtacatttgttaaaatgtatgtaatgaatacatttacatacatttgtttaaaaaaaacttgaattttttatgaatgaaatttctgtattgtttccaaaaagagagagattcaaacatgacttgcttcacatgaagaaatttgatttcagaaatgtcctatatttaaataagcaaagccattgaaattgaagcacatttcttatttgaagcatctgggaaatacaactgttaagtatctctcaaatattcagtatatggaatttatacccacatttgtttgtatatctatttgtaagctgttgct

SEQ ID NO: 14610 - DNA, 2061 bp, Homo sapiens
tgaaggttaacgttgttacgtatgaatatgatcctgtcattatgatgttagctggttattttgccccttagttgatgcagtttcttcatagcgtcgatggtcttcacaatttggtatgtttttgcagtggctggtacttgtttttcctttccgtatttagtgcttccttgaggagctcttgtaaggcaggcctggtggtgacaaaatctctcagcatttgcttatctgtaaaggattttattgctccttcacttatgaagcttagtttggctggagatgaaattctaggttaaaaattcttttattcccactggctgctctgaaaagccatctttgcattgttcctcgtccgcctccttgctcgcggcagcctccttgctcgcggcagcctccttgctcgcggcagcctccttgctcgccgcagccgcctccgccacgcgcctcctccgccgccgcggactccggcagctttatcgccagagtccctgaactctcgctttctttttaatcgcctgcatcggatcaccggcgtgccccaccatgtcagacgcagccgtagacaccagctccgaaatcaccaccaaggacttacaggagaagaaggaagttgtggaagaggcagaaaatggaagagacgcccctgctaacgggaatgctaatgaggaaaatggggagcaggaggctgacaatgaggtagatgaagaagaggaagaaggtggggaggaagaggaggaggaagaaggtgatggtgaggaagaggatggagatgaagatgaggaagctgagacagctacgggcaagcgggcagctgaagatgatgaggatgacgatgtcgataccaagaagcagaagaccgacgaggatgactagacagcaaaaaaggaaaagttaaactaaaaaaaaaggccgccttgacctattcaccctccacttcccgtctcagaatctaaacgtggtcaccttcgagtagagaggcccgcccgcccaccgtggacagtgccacccgcagatgacacgcgctctccaccacccaacccaaaccatgagaatttgcaacaggggaggaaaaaagaaccaaaacttccaaggccctgctttttttcttaaaagtactttaaaaaggaaatttgtttgtattttttatttacattttatatttttgtacatattgttagagtcagccatttttaatgatctccgatgaccaaaccagccttcggagcgttctctgtcctacttctgactttacttgtggtgtgaccatgttcattataatctcaaaggagaaaaaaaaccttgtaaaaaaagcaaaaatgacaacagaaaaacaatcttattccgagcattccagtaacttttttgtgtatgtacttagctgtactataagtagttggtttgtatgagatggttaaaaaggccaaagataaaaggtttcttttttttccttttttgtctatgaagttgctgtttattttttttggcctgtttgatgtatgtgtgaaacaatgttgtccaacaataaacaggaattttattttgctgagttgttctaacaaaaaaaaaaattcttttatttaagaatgttgaatattggcccccactctcttctggcttgtagagtttctgctgagagatctgctgttagtctgataggcttccctttgtgggtaacccaacctttctctctggctgcccttaacattttttccttcatttcaaccttggtgaatctgatgattatgtgtcttggggttgctcttctcaaggagtatctttgtggtgttctctgtatttcctgaatttgaatgttggcctgtcttgctaggttggggaagttctcctggataatatcctgaagagtgttttccaacttggttccattctccccatcactttcacgtacaccaatcaaacataggtttggtcttttcacatagtcccatatttcttggaggctttgttcgttccttttcattcttttttctgtaatcttgtcttcacgctttatttcattgagtttatcttcaatttctgatatcctttcttccgcttgatcgattt

SEQ ID NO: 14611 - DNA, 2061 bp, Homo sapiens; identical to SEQ ID NO: 14610

SEQ ID NO: 14612 - DNA, 2061 bp, Homo sapiens; identical to SEQ ID NO: 14610

SEQ ID NO: 14613 - DNA, 1229 bp, Homo sapiens
ggcggagccctaggtggaccgggggtcgggattggccagtttctgactagaagaggcgtttttatgttcacttgctgatacgcacgctgtggtaaaaaagtgaattctttaccacagtagcagctgccccgagcgaagtctcgcgatatttcggccgcagggatccagaggcgcgtagtgagtggcggaggactgtgggggtggcgggcaccggagccgggaagggacaggtcaggcggggagtgcgagcgcgtactgcttgcgccactcgggctgggtcaggagcggctgcccgaggtccagaggaagtgtgtggacagcgcggccttcctggccggtgagtcggccccgggtcgtggccggtgaggggaccctgagcttcacctgggctagcgcggggagtgacaggtgcgcgaaggagcgcggcgctccgccctctcgccgacccgccccctccgggcctcgccctccggggctcgggatgagtcgcgggccccagctgagcggctccggctccaggcgcctgtcgctgcttctgccgtcgccaccgaagagcggccgccgcccctgagggaaggagggagggaagcagccgctgacccgtggcatgagctggatgcggtgtccgttgcaggactagggcgccgacatgaacctgcaccaggtgctgaccggggctgtgaaccctggcgaccactgcttctccgtgggcagcattggcgaccagcgcttcacggtgagtgagggaggccctcgcgtcgcccgtggcccggcctttgcccgtcattctgggccgagcttggcccagaacgacgggcagaggcgcgaggtcttgtctccccaggggggtccttaccacccagaacccagcagacctggcccttgagaactaaggaagcaaaaccatgtcggtcagtgaggtactgtatggagcctgaactcaagttagaatattttgtaggatttttaaagtttttggtctgtctgccttgggccagggtgctttgccaaagtcgtttgttcaaaaatctttgttgagtaacgagttgggggcttttttataccattctataggttcaaattgtcaaatttaggaatagtggagattggtttcattttgtattctaagttaaggtcaagtatctttgtagttaaaaagtgggtgtctcaaaacaattaccaattgtttgccatcaacaactagccttgagaacagtgtttttcattta

SEQ ID NO: 14614 - DNA, 1652 bp, Homo sapiens
agatggacttcagagcaatagtagtataactgtacctggtaggcctgtagaagttagctgtgcacatacaaatcgtttagcagtagcttataagcagcctgcatctaatagtagatcttcccaggactttgtgatgcatgtaagtatttttgaatgtgagtcaacaggaggttcatgttgggtccttgagcagacaattcatttagatgagttaagcacagtattggattctggcattagtgttgatagcaatttagtggcctataataaacaagacatgtatttatctagtaaagagaatatcacatcaaacacaaagcatttagttcacttagattggatgtctagagaagacggttctcatatcctgactgtaggaattggatcaaaactttttatgtatggacccctggctggcaaggtacaagaccaaactggtaaggaaaccctggcatttcctctctgggagagtaccaaagttgtgcccctttctaaatttgtactattacgaagtgtggacctagtttcttctgtagatggctccccaccttttcctgtttctttatcgtgggtccgggatggcatccttgtggtaggaatggactgtgaaatgcatgtgtattgccaatggcaaccatcttctaaacaagaacctgttataacagattcgtacagtgggagcactccatctataacaagtttaataaaacagagtaactccagttctgggttacatcctccaaagaaaactctgactcgatccatgaccagtcttgcacagaaaatctgtggaaagaaaactgcattcgatccttcagtggatatggaagattcaggtctttttgaagcagctcatgtactttccccgactctacctcagtatcatcccttgcagcttttggaactcatggatcttggtaaagttcggagagccaaggccatcttgtcccatcttgttaagtgcattgctggggaagttgtggctctgaatgaagctgaatctaatcatgaacgccgccttaggtctctcacaatcagtgctagtggaagcactaccagagacccccaggcattcaacaaggctgaaaatacagattacacagaaatagattctgttcctccacttcctttatatgccttacttgcagcagatgatgatagctgttactcatctttggagaaatctagtaatgagagtacgttaagtaaatcaaaccaattatctaaagaaagttatgatgagctttttcagactcaacttctaatgactgatactcatatgttagagacagatgaagaaaatacaaagcctagagttattgacctttcacagtacagtccgacttactttggacctgagcatgctcaggttctttctggccacttacttcattctagtttaccaggactcagccggatggagcagatgtctttgatggccttagcagatacaattgcaactacaagcactgatattggagaaagccgagacagaagccaaggtaaaactaaactccgtactgataacatttttacttactttcacagaaaataattttaaataatttttattaaaatgatgccattggctaggcacaggggcttatgcctgtaaattcagctctttgggaggctgaggcaggaggatcact

SEQ ID NO: 14615 - DNA, 1108 bp, Homo sapiens
caattatttaacaaaagtctggtatcatctaaaattctagtttctatcttctgaaacagaaattttcactatgctaggagaaggtctttaagtttaacctcatgttttcctttgaacttttggttgaacaaaagcaaagagattcataacgggtcatgatatatgcagcctacttaaatagttcaggaaaagtgtgtgtatgcgtgggtgtctacaaatatgaaagagaagtagaggcaaaacaaatgtgccaaaatgttaaaaagttgctgcatctgggtaaaaggtatatgaaagttctctgtattacttttacaatttttctaaagttcaaaggaaaaaaacgatacagaggatttaagaaagccagaaactacatgatcacttttcgaagaatacatttacctggttatgacatttttagtgagaggagtaacacgtattgtttgtaaccattccagacttggcagtgtcataacaaaacagccaatgattttgtcttcgttagttcctcctctctgatagctacagctggtctttcaactgacaataggtaagagatgatagctaaaattgaagtatgagaaagtatagctgaacttttttttattgtttctgtccttgtgtttgactaaagtttacttatggctttagatacagtatttttattctaaaaactattatttattggccatgttattccagccccacccccaaaagctgtggttgtaagaaagtgtcatctcctgccccagtatctgtctgcctcttttgatttctgttatataactgagttctgagatcaaggcccactgagtttgcttagcttatatatttatctgtaaggccacactttgcactagaaacaggattgtaagactatagattcttcagctcgtcttccgtagatatttcttacgtatgttggtccccccacacagtagaaacaagttttctttgtgcttaagaaaattcagcatctctcctgttaatgtatgtcagtccaactgttagagattcagtgaatacaaaaagaagtttccatattcagacttcatatattattatttgtaaacgcatgttaatctaaagttattcaaatttttaa

SEQ ID NO: 14616 - DNA, 1219 bp, Homo sapiens
tttttttttgcaactgtgcttttcatttttaaaaaatttttgaattcccatcctaattttcaaataagtttcaaggagactatcaggattattattttaaagattagatttagtcaaataagtcttagcaggcaataaagtttctgtggtggcatatatcatgtaagacacttaaagtaagtttgtgaatttgtcaactttcgagcatcaaacaaatattttacttaaattttattttatcttatttttaggtgcttttaatctcaaaattctgaaaagcgaatagcagtgttttcagaaacaaatgtgaaagcagtcaaattaagtagatactatttagaaatgtaaaatactctccagatctaccattaatagaaaataaactaaaccttatattttatttttgccaaaatattttattataaaatatgaccaaaatatttaaaatgcacaatgcttttaacttaaatgtgctaaccctgtttctgtctgttttgtgctgtaccttttctgattcagaattatagaaaacttgataaatacttgattttaaccaatgagactacaggcagatgggactaagtgtttatgggacaattatgtactatttaacttaaatatattttgtttaataggaaatatataataatagcattttatgtaataaaatatgggcaacgattatcttggaaattaaagagtcaaagcaaagaaatgaagggctggtaaaatgaattttgtaatatcctcaggatacttttatcttaaaagtatgttgttaaagattttgtaaattgtatttcaacaattttaaatgtgttgagcaagttgcagtgcaaacactgtcattatgtagagagtttatatgcacataataacctgtacctataaatcgtgcaataaccatatgcgactattttgccatggagaaatctgacagcattgcaaacaatagtattgtttgatgtagttaaccttaagttatttttcagtaatttcttcacaaatcaagattcaaacagctttaaacacttccaatgagataaaatatttactattatgcttattagaacaaaaggtgtttaaggatgaactaaatattttaattgagcatttatatggataatcatacattatgtaagcccatatgtatttacatccagagtcataatattttaaataaacaatcatgcagaaacttttttagggggtatactat

SEQ ID NO: 14617 - DNA, 1175 bp, Homo sapiens
cttctcagcaatagaaaaggaataaattactgatacaagcagtagcttggatgagtcccaaaggcctgctatgtaaaagaagccagacacaagagtatatacactaatctattgtgacagaaatctcatcagtggttgtttgggacaaatgagaggagggtgagaaccaaagagtactagaacacttctggggataatggaaatgttctttgtcttgagtgaagttatagttacaggagtatacatatttgtcaaaatacatcaaaccgtatactttaaaagattatattttatagtatacaaattataccttactaaagtgaatttaaaataactgattacaattatgaaaatgaacttaaataaaaattctgcaattgatttcgagccaaatccacagatcaggaatataataggtgatatctttatatcataaataaattaagcctgatataaatgccaaaatttatatgatttctttccttggtgaaattaccatctttaatgtatttttcaaacctgagttaccttgaatttccatctccctttcttttttaaaacctagaatggtcagttggagtgcgtacgctggatggtgagcgaaacagaagccattgcagaactgagttgttctaaggattttccaagccttattcattacgcaggttgctatggccaggtatgaaggagttttttaagtatcttccctttgtgtaccatataatcttcctacttttttattattagtccatcaaaatccaaacataagaaatcatcaaaaatgtatccaaaggtatataaccaatgatatttgttgttatttttgttttaaatgaaaaaaagtttacaacaacctaaataaatatcccatgacagatattggataaataatgaagctgcagccattgatgacattttatgggaaaatgttcattatatagtactaaacaaatatgtatgatacaaaactggtcctataatttagcaccaactttgaattttggagataaagagaaatagaaattaatactaaaaaaattatgtcacaacatgtttatagtagttatcactcagagtagcagtacaagtggcttcgattttctatttttttaatttttcagtattttccaaattttttacagtaaacacatttaacatttatcaaaaggaacaat

SEQ ID NO: 14618 - DNA, 1261 bp, Homo sapiens
ttgtccaggttggagtgcagtggtgtgatcttggctcactgcaacctctgtctcctgggttcaagctattcttgtacctcagcctccccagtagctgggattacaggcaagcgccacattgccaggctaatttttgtatttttagtagagacggggtttcaccatgttgaccaggctagtcttgaactcctgacatcaggtgatccacccatctcagcctcccaaagtgctggaattataggtgtgagctacccagcccggcttatgtagatttttttttaatgctgtacaggatatatgcatataaatgacaaaaaggtaatgagaataacttatattttaattatcattcacagctgataaaatactgggaagcattcctacctgaagccaaagccattgcctagcaataagattgttgccgttaagaagaccttggatgttgttccagttatgctggattccacagtgaaatcatttaaaaccatctaaataaaccactatatattttatgaattacatgtggttttatatacacacacacacacacacacacacacacacacacactctgacattttattacaagctgcatgtcctgaccctctttgaattaagtggactgtggcatgacattctgcaatactttgctgaattgaacactattgtgtcttaaatacttgcactaaatagtgcactgcaagaccagaaaattttacaatattttttctttacaatatgttctgtagtatgtttaccctctttatgaagtgaattaccaatgctttgaataatgttcacttatacattcctgtacagaaattacgattttgtgattacagtaataaaatgatattccttgtgaaatattagtaacaaattatttgggtatttaaacattaggaatcttttcaaagcatttttaataggaagaaatttttcttctagatgtatataggtgatgccatgattccttaattattttaattgacaaagctgaactcattaaatgactaaatgaagcttaagttttcttatgaaaccatcataaatcaaagaacatttgactcttgattgtcttgggtaaagaagagaataattgtctttgcttgtttttaaccatctctattacaagtgcccaatttaagaattaggaaaaaaatgtatttatatacttttacaagtcccatggattttgttcatcttctcgttatcttcagaatctcgtactttgcatatatttaatttattcttgtctttt

SEQ ID NO: 14619 - DNA, 1180 bp, Homo sapiens
ctggtcccaagcaatttggataaaggatattcagcctgtaataaccctaggaacacctgattggagatctgtccaaacttcctgagcactagttcaagatcctcctctctttccaactcagatataacttccatctgtaagagtaggtttataattacaggttgcagatttagagatactacttgggaactcaaatttaaatgatttttacctgaccctgaccatttactaccttcctggttgaactcagtccttcaaggtttatagtaatccattgagttgtggatgtctcaggattaaacattcagccacagttaagtacctactatgtggtaaagtcttaaatagacactggagacagaataacagctaagagtcaggtggaggatgtgtatatcaacaaatacaaataaaacaaccacaagcacttcaggtatatacagagagctctaagaccacagaacctgcaggtaaagtgttcctctgcattcttagggtgaccatacaacttggcatccaaactgaaatgtttttgaaagtacaaggtggtagtatagagatttgtgctgggataacagcagtagacctgggctgtctgggaacagccagggcagtggtcatctctccacttagcaccccatacctggctcactctgggttccaccatgctgccctcctgtctgtcattgtacaaacatcttacaagattgtatttaatagttgtcatgtgccttattaattgtgagtacagcatagtgggtctgatttgaatcaattttttgtttccaggtaggcctagaacagaaagtgtatgaagtgaaagtattttgaacttgacatgcataatctcatttacttctcagagcagttctttagggtttatgtactgttggtatttccttttgttttgagtggagttttgcccttttttgcccaggctagagtgcagcggtgcgatcttggctcactgcaacctccgcctcccaggttcaagtgattctcctgcctcagcctcctgagtagctagggttacaggcacataccaccattcctggttaattttgtatgtttagtagagatggggtttcaccatgttggccaggctggtcttgaacccctgacctcaggtgatccgcccgcctcggactcccaaagtgctgggattacaggcatgagccac

SEQ ID NO: 14620 - DNA, 1275 bp, Homo sapiens
aatcaataagctacaaatctggccgcacattcctgccgcgcctggtggtgtgctcaagtggctttaggctgaagcagcatgactgatagcacatcctcaaccaggcacatgcctggcgatgcagattcctgtgtttaccgtaagcattgccttgttccattctacagaatgcaattatattttgtttcacataagaaaagcagtttttcttttttttttctttttttttttctttttttcagattttccaaatgtggttattgaaggagtcctccatgggatattttaccctcatctacagcccaggtagaaatcctacatggctaaaagaagcagaagcaagtttcgaagtcacagtcaaggaaatcaatacctaccaatttaacctaaacgctatgatatataacagctctagctagtggtaaagtgcacagtcccagcttaattcagggcagggacatttccattagaatggtgctcttaaaaatagaaactgaaccggggcggtggtcaggctaaggccaagtgtttaagaagtagagtgtagctgccagcgtagaaacccatgaaaaggaggccacaggagattcctgggagcactgggtgtagcaaaacaaagccactctctgcttcagtcgcaccatttgctaattgaaaatcatatcctgaatcatactgagactgatcaactttggtagcttttttgttcagatcttatgacacactactcttctcaccgtgagattttctcagccagtgatagtacattctgaaatgctggcaccaggagacggccacagacacacactgctaaatgtgaagatggaactaaactggaaattaaattatactgacaatattatggcatttttaagatcatggcattttaatttacattagagtggagttgcatcatactcaggggttagcttccaaggtcagtacataggtaaaatgggctattaggatgatccttgaaagccctttagaagggtgccatgttggaaacctgtacatccacaacaagtagcttttcctcctatgttggaaaaaaagactgtttctttgtttgaagaccaagtgaagttgttggtgtttgtttaggggccattttgttaaaaaaaaaaaaaaaaaagcacataacttttaacactagaatcagcccgcaagatgcttgccccgctagtggcagatgtgaactgacaaggagtgaagcgcccacccagcggatggacagcacccacctgggtttactcaagggtgtgcattcatttt

SEQ ID NO: 14621 - DNA, 1154 bp, Homo sapiens
aattgtcatcatcctctgtgtcctgatgggtcctgaagttgctgtgaccaacaacttccagatcagctgctattgctcttggtgctgaggcaagaaaaagcaccagctttagaatcagaaagtcagatgttcaaattctgctctgctattttcaagttttgtaacctctgtttcccattgtaaaataggacggagaatacctactcttcagggttgttatgagaattcggtgtgggtatatattgaatgcttggtgcatcctggttgggtgctgagtaacacccaatcctggataagtcacaggactgtcctgagctttgagcctcaggaaacaggtgcacagccactaggatggctcaaacaccttttcatctggctttaggatgttttcctgcccttcagttccttctcacttcagagcgaagtcatggacctgcttgatcaaggtttggcccttggtatgaggccagagagtatcccactatcctgtgccatatttaaggctttctttgttcattttaggccctagtgccctgttcccttaaggagttaattttattccctccttcatgtctgcttatgtttgaacatgtcttccccatccctacctcctatagggttctagtaattgattcctctaaggccttatgtttccctttgaagagctgacttttggaagacatctgttgactttcttccttgttttgtctcaggtgtgagcatctatggtgagacatttccagatgagaacttcaagctgaagcactatggcattgggtgggtcagcatggccaacgctgggcctgacaccaatggctctcagttctttatcaccttgaccaagcccacctggttggacggcaaacatgtggtgtttggaaaagtcattgatgggatggtaaattgatacatttttttcctttcaaagctttatatttttattgagagtactttcagtgatttattttaatcttaaaatatgcttgttagagatccattatatagctgactggcctcttcaaaggtgaataaattatatatggtatggcattttaattcttagggtcattggcgcagcagctagggacttgacaaggagaaattaaggactaagttgatttattttactacttgatataaatgtaaagcccttt

SEQ ID NO: 14622 - DNA, 2230 bp, Homo sapiens
agagagattttggcaaaaagcaatgccagtaattaataacatttggaaaagctttatagagactctaagtctaaattttaatttctttgtaaaaacctcaaaagtgaggaaaatggatgttttaaaatggtattttcaattttttataagcaaaattttgtatgttattgtatagtatttatttgatcttatttactttatgctacctctcccacactggttttatttgtaatttgcatttatatactcattttaaatgacttttcagtgtttttcatagtttataatctgatggctaactaactttcaaaacagcttttaactaagtttgttgtaggagaaatgactgcggtaatttccagttctataatgtttcatgttgagccaaaagagtatatcttgcactttaaaaacgctgcgtcctattccatttgaatgtaaattcttaaaagttgagaccaattgtaaccagtttaactcattttagatgacctttttttcttataatatttgcaagtgacaagtttgaaaacaaagcaagatcagtgcagagaagccacatgacatgttgggtgacagattggtcatttatttaaataaagttaatacagattaaatttgtttcaagagctattgaattttcaaattttcagtgtatttataacttttaagaacatgaagtattagcttaatatagttttctctgttggtttcttcctcaagtttgcattgttttcttttgttaaaattagagatttctttttattttccagttatagtaatactagctgtcagcttaaaccctctgtaatagaacatggaaacagacacataaagacattagctgaaaaaatagagtgaaaatcaactattttttactcccgctaatttcaatcaatcgttttcaaaagcgcacgagattcactcattggatttatgcagtgccctgtctgtataaaaactcttaagagttcctttatatcatattcttcagagccaacatttgtcctcaaagcaacgtttcccacctccttttactgagtactgaaaaagttttagcaaagtcacagattaggttgaatttcaaaatatatgtactttaaaaagttctgatttccaaatataataaagttaaaattaagtatatactttaggaagttaccaataacttccatcaaagcagagtaggatatatggtaacattaattttcggtcatttcaaatgaggtatatttcttattagggaaattaaagtccctatatttattatatattttttccttattaacagagtattaatctagtaaaaaataacccagcagtaaataataaagaaattactgaatgagaggataatgaatctgaatcatagcaggaatttgcaatattaattatggttagctatttttctctcattgatttttgtgccacttgaatggaacagaagcaagccttatgttttggaaggtctgcggtaaaatgctgtgactgtttactttcaattgcattgtgtgttgcctgtgactgctttcaaacgctagagggggcctctgatttaaagaaataaaaaggacttttctaaaatggatgtgtagtttattttgccttttgtaaagctcttttggctattgtaacttaacaaataaaatcataattgtgtgcatctctgagttcttgagcagcctgttacttctgtttctaaacagagtgggcatagtgttcgggttttcctatttcaaatgactgtctttttttctcaagtgtttacatactattttttgtcttacaactaggggagtctgaaatattaacactgttttgtagtccttttagcaatacccattccatttgtaagtggcatcgaatgtttttacactgattttgcctaggagttaatgagtatgaccacagtagataaatcagtgagtgggtgcaggcatgggtgggtgaataagtttcctagtaacaggaaaatatcaaatattttagggtaaaatcagatttacctttaaaatttctgtggtttttcatggagaaagtctagtttccatgtttaatgcgggcatgtactgcataggaggggtgtgtaatctaccaggtatatctaataccatgtctgtataaacataggagttcccttgcagataaatcctagtaatttctatctggacccgaattcctgttgcttcaagcagatgtgggggtttgagtgtgatttaaggacgtatta

SEQ ID NO: 14623 - DNA, 1174 bp, Homo sapiens
ggatagcatacagaaggactgtatgatatggcctctgcttatccagccccacctccctctgtatgtcggttctcactctgtgatctggcaccctatgcctgtgtcagttttctcacacatgctttctcttgcttctgtgtttttgtacatactgtcccttctgtctagaacactcttttttttactcccccattccctgttcagctgcccttttcttcttagccatatctagcttattcactttccagtttagattcactgtaaaacctatgttagatgccttttctatgtggtttattaccttaaggttttaaaaatgttactccagaattttacttttacatacagaaagacaatgctggttaagtaaggtttctttggtgagtatgtaagagagtaaaggaaaccttattagatattaactgtattcatgaaaattaccaagcaaattacaaaatataatcagttttaaaaatcttataatggtttatgacaaactacaatgtagtttaatcgtgtttttctctgtaaagtacctgccatcctggctggacttgaccccagggacattgtggctgtgctgaatgaagagggaggctaccatcagattggaccagcagaatactgtactgactcctttattatgtcagtgaccatagcatttgctacccagttggaacaggtgagacttttcatgagattggtgacttacgaataatttgaaaactatgtaaaacattttacctttcaggtattaaaaagacttgcaagtagactttttttttttaacttttgaaaaatgagttcaaaacatgttttctttcatactggaaagaaaacttcttaatttagaaaaaatagattttgatgatcttgattgtaagagaataaatctctcaggatttaggagaatggccatcagttaacattgttttccattgtactgtgtggcattgtaaggactgacatggaaggatttttaaatttgtgaacgatttactttttggagaaacttacaatgtcaggaatactttctgccactaatacttaatgcctatagagttttgggttctattttatcttgtttataaactaataaattaagctgttactgtcatggatgctagcagaagacacaggttcttggatcagaaacaaaagaatttattaccct

SEQ ID NO: 14624 - DNA, 2352 bp, Homo sapiens
attccttgagaagttcatattttgtgacatctgcattgatttcagtattactgatggtactgttattcataagtcatattaacattctctccgtgaaatcatggtacagtcactgcccagaggtactgaggaaaaagcaatatgggttcggcagatggtggtggtaaaatgaatcttaaggagtgtggtaaatatgtgctccgcttttgttgcatcactatgtgaagtactgtgttgcagaagtggcaaaagcgcttatttttaaaaatgcaaaatatttgtacaatgtaactttatgcttccaaataataatgtatgttagacagcaagaaatgaatactttaaaaagtgatgtatgttggagttataaagaaatacactaaggagaggtagtaaatgtgaaccttgttgcagtgtataaggtggaagcctaaagaaatctcaccgaaacttactgctgaatgattacattctcccttaagcagaaaactttggatgtgccatgcaatggtgtctgtgtaattattttgctctttgattaaaaaaaagacccccagcaataaaaagtgggtcactctatgccctctgtgcacattagtctcttgtattcaactttgctgattctctggaattttcctactctttagcataattttgatgattgaaaaatattttggaaaggatgggtcaggtgctttgcctccatagtcttttgaagtgcctgcatatgaacaacaacaacaacaacaaaaaattctgtaaaaaaggaagcccattccacttttcaagtatgctttgttttaagccataaagacacacatgtagttttgtcacattctactagccaaaattttcaagaagggttaaaacaaagactggctagaaagataattattttgaataaatctcatattcatctttcatttatataattgttacttattcctcccatgcagtctcttcgttgtctttaagtgtgtgcctccaggcatgcttatttatttttattgtctcaaggtaacatttaagatgtatattaaagtaaagctacatttttttacttcattattgcatttacagggatttaattgtactttgtaatttatttttcttattagccaaaagtttaatgcatttttttttgatgaattaggcacccacatgaacaccacaaatcaggacattgtttatcattgttgctatgaatcctatgaatgatcttttttttattttaaagacctacacttaacctacaaaacatttgctgtataatttggtcaacagtttctatctatctgtatactgtcatgatgtcttaaactgcaggagttacatactgagtttatatttttatttgctttgagcaaggtagataaacattttggccattataatgtgaaaccacttcttctttctttacagtatttgaccaaacttgtgtgtctatgatatttgtaaatacatgcgaatatctgtatttcttatcataagcctatttagttttattctcagtagggttttttggattgtacagtgtttatatgatctgaactccttatacataagaaggtgtgtatattaatccaattatggacttaaaatattttaaaagtataaatacccttatttgctgcaaagaccagtgtgtaggcatttgctttttagcaatatttttaagtgctccattttaatgccgaggaataagtcttttggcaacacaaactggtcaataataggtaatgcaggtatgttcaggttaagccaacaatgttttgcatttttatgcttattttctgtcaacactaatgaagtcaacattgcctgaatgtctgaataatgaaacacatccctgtttaaaagtatgtaactgaaaaagaaataaaaaaaaataaaagtagtttttttaaacttgctctttcccatttcctctaaagatgggtaaaataatgtcactccctaatttaagataggaattataaaaatttggtttatttagtctgttatatatgagaagcagagctaaaggaatatgcttttgttattttatgttttgttttgctttcttgaaatccagtggtaaaaagcacacactaggaaggatctaagctttctttaatataaaaaaaattatacttctctgaactgtttaatagagcaataattaaatacatcttctgataaattaagggaaatagcatcatttttcctttttgagaatggaatcatactattatgttcacagaaattaagcattattccagttttaagtgaatgactttaaaatcattgtagatggggagcccatatttctaacagtatctcatagttcatcattgtgctaggtgctttaag

SEQ ID NO: 14625 - DNA, 1134 bp, Homo sapiens
acagtttggtatggattcatactctgcccttagtttctcccatcttgttcaaaaagttaatattggcatagagataagaagtgactccaggccaggcacagtggctcacgcctgattatgagacaagggcaattatagttgtatgataaatctcaaagaagaaactacaaaagtctcgtgtttcaagggacatttgattaactagataaggacattcctaaacttgtaaagttctagtataaatagctcaaaagtacaataattcttgtaagtttatgctctggtggagacagaaaggatattaggggttaataaaagggttctaagaaaccacgtgcttgaaaataattgcctgatttttgtttagaagccgaaacacaccatatccacttaaacaaaaatagcttaagagatttcccgctgagcttttaagaattagttccctaaacatctagcctggagttgcggattactgcagggctttgtctaatattaacaaatgaaatgttcattctcttctattataaaccaattttctgttcaaataaattttaaatgtgttcattccacttctttccttgtcatccctgcccataataatttttctcttttttcttacagacaggcagcaccatctggcctgaggtcacaagtacaattcaatgtggaggttctctgtcaagagcttacagctaacatagtgaaattagaaaaggtgacctatttctttcctgtgtatgggggcagtcacagtagtgcctgttggttgccctaggtcaggtcagggattacacactcagacgccgttagtgtgccgcaataaacctacatgatcaaccctggctaggggctttttatagtaaatgtggaagaatattttttatttccacaaagaaataggtcttaatctcattttccttgaaatacatagtcttgtaggtcttttgttcttcctccttgattagacatattacttaatagcacagggcccagtggtaagtgactactgacatcggagcttaatgtagggacatagtagggagtgaactggagaccaaccactggcttggccagaaagtacagccccaactccaccaaggctgactgttcccataggtaaaatattgcatgtaa

SEQ ID NO: 14626 - DNA, 1208 bp, Homo sapiens
tccacgcctgcagtggctcatgcctgtaatccaagcagttcaggaggctgaggcaggtggatcatttgaggtcaggagttcaagaccagcctggccaacatggtgaaaccccgtctctactaaaaatacaaaaattagccaggcgtggtggtgcacagctaatcaggaggctgaggcaggagaatcgcttgagcctgggaggcggaggttgcagtgagctgagattgtgccattgcactccagtctgggtgacagagtgagaccctgtctcaaaacaaaacaaacaaacaaacaaaaaccaccaccaacaaaaaaaaccatgtatggtatgtctttccagatttttatgtttctgtcttttttcttttaaataaaacgggatccatactaacattgtcttttatcttaaaggtttgtcttaaaaagttgtaacttggagatcttgccttgttaatatatacagatctgctacattttaaaagtgggcatgaaaatcttctgttatgtatgtactgtcattaattctgttattttttcccactagtactatcaactacagtaaagaccttcctctggcccaaggaatcaagtttcagtaaaggtgttttagatgaacatcccttaatttgaggtgttccagcagctgtttttggagaagacaaagaaaattaaagttttccctgaataaatgcattattatgactgtgacagtgactaatccccctatgaccccaaagccctgattaaatcaagagattccttttttaaaaatcaaaataaaattgttacaacatagccatagttactaaaagatgagttaggtggatttttattatgtcaactagttgtacatggctttttaaaagttaatgattattttgtaattagaaaaaaatagtacgtaccagggtaggaatttgggaaaatacagaaccgaggagaaaacagaagtctttgcagtagatacagggtgtctcctgaccaagtgaaggattcaggggcggggggtgaatattgcttgacattacccacctatggcatgtgttggatgtcgtgtgattgaaagggggatgcattcccctgtatgcttggaccacagttcagtattcatgtggaataacttgcagtgcttaaaatgacaacaggcattcatcacagttatggctcttgcttatgaaggctgtgtcaacttggaagagatttctggg

SEQ ID NO: 14627 - DNA, 1141 bp, Homo sapiens
agccagggaggagacacaggagcatgtccctgagacacacatacacaatagtgttatgggatttgtattttactcaaggagttttttttgcttctgaaaggaagtgtttctatctggtttgaacgaatctataaactagtattttctgcttgttggtttacattctgtattggatttggtgggttagggatatgtgatgtttcttttcttacagacaccaccacagtcaagttgctattgcccagtcttcttattatcagtgttatcttagacattaaaggtttaatagatgaaatattgaagtaataagctttgggtaaaggcctaggtatattagcattcttaaagctcattatttaggaagtgactctaaaagtcacacagaattaccatcattcacaccatatcagcaaacttcatgatgcttttcctgtgtttcatctaccagttaccagcaggacttaggtttgaaatgccttgaggtgaatcatgcttccttttttgtttcagttctagataagactgactatgctttgcttcttcttttagcttgagaatgccagactgtcatcagagatgaatacttctactgtcaacagtgccagggaagaactgatggaaagccgcatgagaattgagagcctttcatcccagctttctaatctacagaaagaggtaaataatcatctttctgtaagaagttagacttgaaggctaccttcaccacgggcacctacctgctttgcttgggctgatgtcactcctccctctgtttgttacagaggatggtgtcatcctgtgctttcgtcttcacagtacttttctagattcgttcattttgcattgcataaacatcctgtgagcagatactattgttcctaattagtagattacacagagctaagggacttgcccttgaggaaggagcctgctagtttattcactgtacttaccctaggacccggatcttccgacctgtctaacagcttcatctctacagagttattctcaacaccttccttttttatatcatttgaaaaccaaaatgaagaaaaacatgcaaaaattctttgtgggtggtgaatgctttgtgtttctagacaaattctttagtgcttaaagtatataacaattaggatcc

SEQ ID NO: 14628 - DNA, 1264 bp, Homo sapiens
agaatgaatattaaatttgaatattaaatatatgttactttccaagcactgtataatgactgttcagtgaatatcagacttccgtgtcattaaaagtcatgagagacagcacagagaggttataggttgccttggtgtacttttgtccaggagtaacagggacagaatactttctttctttccttcaagtacaagaaggctttctctaccatttgcgtctacactttattttaaaagctatccttttctagtagtattttatcatggcaatggcatgatgacaacaacagtctttcattacagactgaagggaagcatgtccttacttaaaatagttctgctactttccctcctattataaggaaatcttacagattctaaaaataccttaatttttctttgatttttattttaccaagtcacaaatgtctttttgatgttttgagaattgttctcatagaatcacaaatactgacatttcattagatgattattttcctagaatccccaaagagcagtggcagtccatggcttggttgaagctagaaattttcctgcccctggtgacctggtaagcctcctgctcggaaccgtgtgagtgggtgaggaagatgagagatggtcagatggaagagagaaatacatgaactgctctggcctctctggttctgttcttggcccagagtttttgaaaagcagcggagcatgactgacttcacatgctcagctttctcagccttttgtttattttgttgtccttagatttccctgttgtaaaaggggcaagaaaagtaactcatcatctctaacacaccatggcagcttagccaggtagtcttagtggtggtgtttaggcataagatatgctgatcatcagtctcaggccacagtttccttcactaatcgtccagcttgagtgttctgttctcttcctgcccatttccttgaacctcctgctctagccttggcggagggagagtgctatttgcttttgttctccctctgtcttaggaaaagccatctttaatatagttcttcaccactgttggggttgttttgtgattttttttttcttccgaagaactcctggttgttattggattttgtattttaatacaaattattgaattttataagcttgtacacaatatttaattagtgtgaaaggaaacaaagaatgcaggaaaaataatttaatatcaacctcagttgacaaggtgctcagattattcaattcgggatcctccttttgttaggtttttga

SEQ ID NO: 14629 - DNA, 1193 bp, Homo sapiens
ccgcactgcccgaggccctttgcggactggctggccgcgctcttcgcacggggcgcttttgcgtggggtcgcgcaggagccgcggagggccggatcgctgagggagcgtcagccgcgcgccgctgcgggaccgcgggtgggcgggctgaggggcggaggagcctccggccccgcctcccgcgtgctgctgccggagccgccgccgccgcagccccgccgaggctttaaacagcggggcccgccccgcgcccgccacactcgcgcgctcgctcggctgccggtggcctctgtggccgtccaggctagcggcggcccgcaggcggcggggagaaagactctctcacctggtcttgcggctgtggccaccgccggccaggggtgtggagggcgtgctgccggagacgtccgccgggctctgcagttccgccgggggtcgggcagctatggagccgcggcccacggcgccctcctccggcgccccgggactggccggggtcggggagacgccgtcagccgctgcgctggccgcagccagggtggaactgcccggcacggctgtgccctcggtgccggaggatgctgcgcccgcgagccgggacggcggcggggtccgcgatgagggccccgcggcggccggggacgggctgggcagacccttggggcccaccccgagccagagccgtttccaggtggacctggtttccgagaacgccgggcgggccgctgctgcggcggcggcggcggcggcggcagcggcggcggctggtgctggggcgggggccaagcagacccccgcggacggggaagccagcggcgagagcgagccggctaaaggcagcgaggaagccaagggccgcttccgcgtgaacttcgtggacccagctgcctcctcgtcggctgaagacagcctgtcagatgctgccggggtcggagtcgacgggcccaacgtgagcttccagaacggcggggacacggtgctgagcgagggcagcagcctgcactccggcggcggcggcggcagtgggcaccaccagcactactattatgatacccacaccaacacctactacctgcgcaccttcggccacaacaccatggacgctgtgcccaggatcgatcactaccggcacacagccgcgcagctgggcgagaagctgctccggcctagcctggcggagctccacgacgagctg

SEQ ID NO: 14630 - DNA, 1263 bp, Homo sapiens
agggaaaagggaattttgattatcatgtagattttgcactgtggtagcacagaacttgctgcatctcatttctgttaaaagaaaatatatataggctgggcacggtggctcacacctgtaatcctagcactttgagaggccaaggcgggcagatcacgaggtcaggagatcgagaccatcctggctaagatggtgaaaccccatctctactaaaaatacaaaaaattagccgggcttggtggtgggcgcctgtagtcccagctactcgggaggctgaggcaggagaatggcatgaacctgggaggcggagcttgcagtgagctgagatcgcgccactgcactgcagcctgggtgacagagcgagactccatctcaaaaaaaaaaaaaaaaagtgtacgcatatatatatgtgtgtgtatatacgtgtgtgtgtgtgtatatatatatatatggagagagagaattcactaaaggatgtgaagtactgaaaatatgttttaaaaatttagttggttcttctgcatttaaagaacatctgaaatatagccacattatgttctctgctgtttagatgtgggtagaggaagaaccacaggatggtgttagagacataattctaaacccagaacatctatttcctaaaccatctcccctttcctttcatgacctttttagggctcggttactgctttggaaatgtgtcatatattgggatagaacaaaactcaagaagcactgaaagagaaagagagaagttagagaacaaagaattatggaatcagctatgaaacctaaaaacctaaaaaggaaacactggttgtcaaattcattatgtcaaccagtacatgtctgagtctgagaaaaactacaaaggaaagcaatgaaaagcactgagtcactgcagacaaggaatgagtaaagagaggagctatgaaggaatcttgggatccatgggattcctgctgtcatggactataaaaaaaacatattcgttggtgatgaagaggagttttaagttgttaatgttgaaatttcagatgtaggactggtggcaactaggtgatgtaaatttgtggcttgagagatggggtctgaattgatcgacttagctaccctgtaattagcaaacaggagtcattgtttcctccagacactaccaaaagtgtagctagaatttggaattattaaaatggatttactgtcatagtgagacttaaattttaagaaatttcagtaattaaggttttcttctagtttattgtt

SEQ ID NO: 14631 - DNA, 1103 bp, Homo sapiens
actttttcttattttcctgtagcaatcacacactcaacattatgtttggaccatgtataaaacttgtgtttgtgtccagcatgttctccatgtcaagatggtagtgttaaggtggaagagacaggaatgaatgatctagaatgaaagcctatattgttttggaatttacagtgctttatggtttgtgggaaggcatgcacatctttaactcatttcagaaatatggcatgatctcacttttactatcttttttttccccagatatttctttaaagatctctttgttcattaaacaaggatttattgagcagctgcttggcatatggcattgtttaaggcactggggaatcaggcaaaacaagacagaaattctttccctcatggaagttatattctaggggaattgaatcaagatatagaaacaagatacttgattttaatttttaatgtttaaaattgcaggctcagattgttcttttggtgatcctacttcttgctattggtgatttcgtcataggaacatttatcccactggagagcaagaagccaaaagggttttttggttataaatgtaagtaaaaaagattcaatattttttaagggtacctatttatagaattctatcatcaattaaattttgtacatttcagatattttgtaacagaattgactatggtttggtgattcaccctaatttacaatttagttttgtcccctttatgctgtacagttggagtaaaaattacttctatttacatcttttctttttcattattagcaacaaaaggtgatagaatatggagaaatcagtgctgctaagaaaaggagattttattctctactagttttgggaatttgtaactgaatttctaacttttgttctaatatgactttcattcttttaacatatttaagcacaacagtataaaagcgcctaagattgtgaaagcaattattggtataattgcatttttcaagagtgcaggccatttgatttttaggagatctctccagttgggtttgtcttatttgtttttatagattcaggttatttatgtttgtcaggaacgtaagtgaaccgtgtctccttctcagtccagcac

SEQ ID NO: 14632 - DNA, 1258 bp, Homo sapiens
tttgataccaggagtctcccagttgcacgaaaaggtgctgtgtctagtgctctctacatggcatggttagaagctctatctaaggacctaccaccaatcctcctagttcgtgggaatcatcagagtgtccttaccttctattcataaatgttctatacagtggacagccctccagaatggtacttcagtgcctagtgtagtaactgaaatcttcaatgacacattaacatcacaatggcgaatggtgacttttctttcacgatttcattaatttgaaagcacacaggaaagttgctccattgataacgtgtatggagacttcggttttagtcaattccatatctcaatcttaatggtgattcttctctgttgaactgaagtttgtgagagtagttttcctttgctacttgaatagcaataaaagcgtgttaactttttgattgatgaaagaagtacaaaaagcctttagccttgaggtgccttctgaaattaaccaaatttcatccatatatcctcttttataaacttatagaatgtcaaactttgccttcaactgtttttatttctagtctcttccactttaaaacaaaatgaacactgcttgtcttcttccattgaccatttagtgttgagtactgtatgtgttttgttaattctataaaggtatctgttagatattaaaggtgagaattagggcaggttaatcaaaaatggggaaggggaaatggtaaccaaaaagtaaccccatggtaaggtttatatgagtatatgtgaatatagagctaggaaaaaaagcccccccaaatacctttttaacccctctgattggctattattactatatttattattatttattgaaaccttagggaagattgaagattcatcccatacttctatataccatgcttaaaaatcacgtcattctttaaacaaaaatactcaagatcatttatatttatttggagagaaaactgtcctaatttagaatttccctcaaatctgagggacttttaagaaatgctaacagatttttctggaggaaatttagacaaaacaatgtcatttagtagaatatttcagtatttaagtggaatttcagtatactgtactatcctttataagtcattaaaataatgtttcatcaaatggttaaatggaccactggtttcttagagaaatgtttttaggcttaattcattcaattgtcaagtacacttagtcttaatacactcaggtttgaacagattattctgaa

SEQ ID NO: 14633 - DNA, 1107 bp, Homo sapiens
gtcatgcgtcatacatgtgggtataaagtacataaaatatatctaactattcataatgtggggtgggtaatactgtctgtgaaataatgtaagaagcttttcacttaaaaaaaatgcattactttcacttaacactagacaccaggtcgaaaattttcaaggttatagtacttatttcaacaattcttagagatgctagctagtgttgaagctaaaaatagctttatttatgctgaattgtgatttttttatgccaaattttttttagttctaatcattgatgatagcttggaaataaataattatgccatggcatttgacagttcattattcctataagaattaaattgagtttagagagaatggtggtgttgagctgattattaacagttactgaaatcaaatatttatttgttacattattccatttgtattttaggtttccttttacattctttttatatgcattctgacattacatattttttaagactatggaaataatttaaagatttaagctctggtggatgattatctgctaagtaagtctgaaaatgtaatattttgataatactgtaatatacctgtcacacaaatgcttttctaatgttttaaccttgagtattgcagttgctgctttgtacagaggttactgcaataaaggaagtggattcattaaacctatttaatgtccattcttatatctgtttaataagtctttgccagctttgtggttttatctcatttcgataactattgcttcattcatttctgaatttttaaaatagcttttaccttaatattcacgccctggaaaagtcgttcactattcttaaacctttgcaataatcactgttgatgctcacagtatgactgaaccatctgagatgcagctcattatggtatttttttaagtgacctagcttttctaattctgctttatctttgggccagatctctcatttgtgaatgaggaaactggaagattaaaagcgattcatagtccctgaatataatctgattctttccttccaaagatttttgtctaagctcatttagagttttagaaagcattttcattttctcatttgaatatgactgtaggtg

SEQ ID NO: 14634 - DNA, 1146 bp, Homo sapiens
aattaaggcgagtgctccagagtcgggtctgctttccaaagtataggacatttgaagaactggtatgctactcactggtgaaggacagtcaggtgaaggactgtaagcccacacaagctcttcttatctctactagaattaaaatgttaagtcaaaaacggctccttttttgcgcctcctagtgaaacttaaccagctagaccatttgagtaccagcatttagttacaaacgtcaaaggcttccggtgctgcttaccttccttttttgttaatgtgcttttatttattaaaaaaaattacaatgaagatgcctgttttgtctctactgtgtactctgatcgtatctttccaaagtgcagactcttgtgaagttttcttaaattgttcactttaaagaaaatgacgtaccaacaatgatttggcttttatattactgtaagatgttataatgttaatgtggatgtagtgcttttactttacagattgattggaataagattattgcatatgaatttacccacaggactctgaatcatgttacccactcccctcacaatgttgtccacttagtgagttgcattgatctatccgtaccaaatgatgttgaataattacatatctttcttgactatactgatttcttattttggtcactattactaaatctctgttaatattctctcttttaactgaaaagggatgggatagaagggtttgcaatgccatattattggtggagggctgttttaacatctttgaagtatggcttgctgaatatctttaccaacatcttgaatatatattctagtgtccacaagatttagcaaaaagataaagcttgggtggaatatcattttaaaatgttcatgttctgttctatattttcttcacctactctccaaatattgtaatgcaaaaagtctcagtaatgatttggtagtattaattttgtggtcattgtttctcttcgataaatttattttcattaaatacttgttagagggttttgaaatgtttttcaaatatgtgaaatgtgaaactgctgtcttttatattaaagtaattaaagaaaatgtattgtgattgaaattattttgtcctccacaagatggctctatgagtattcttccagggattctaatattt

SEQ ID NO: 14635 - DNA, 2014 bp, Homo sapiens
tcatgggagttttcaaagaaggaaaatcctttgtacgtaggggcagatggattttactaaagggtgaaaggccttcttcattaagagcagattttttttatttttcctattggcagtggtaacaaatagcaacctggtgtgtttaaatacttttttccaaccatttgtgtgtcaaaaaagaagaatcaaagatttctgcacctttaaaaagtttttattaaatttaacctagtgcttctcaaactttaatatgaatgcaaattatttgaggatcttgttaaaatgctgatgctgactcagtaggtctgttgtgcagcctgaggtgacattttgcatttccaaggtgacatttcgcatttccaaaaattgggcattttccaccagtgctgttcagaaaggaccatatttgaaatagcgagaatttaactccagacaactgttttcctccactgcacccaaacctttcagggctcagtgaaataccagtacagtgaagccttttcacaggtgaaactaattctgtgacgtcagcttcgtttcccctgccttccataacaaactattataccacaaacagtgtcgtaaaacaacggcacaagtgtattctcgcagttctgtaggttagaattctgaaatgagtcttagtgggctaagatcaaggtatcagcagggccgtgttcttttccggaggctgtacggaagaaactgtttccttgctgctctgtgcttctagcattcacccatgttttttttttgttttttttttttttggttttttttttggcttttttgaccccatttctacctcttctaagccaatgaaggtgtatctgttttttcttatgtcacatctgtctgactcactcttctgtctttctcattctgacttaagagctcatgtgctttaaggtcatctgatcagaaccttattccatctgcaacctaagttttcttttgctgtgtaacaacatattcacaggttccagggtttacaacattaacatctctggtggccactctgtataacacagacaccgccatgtgatttagtattttatttcattttgtcatttgtcatatttccatctttcctgctatattataagctctctggaagcagagaccgtgaattatatatagtcattctggaaacattttgaaaacccactaagttctaaacattgtgctttgtgcttaggataaaaagatgcccctaggaaacttatgctatggcacaaaatcagatacaattctcagtaaatgtgaattgaattaaattatatcagaggtccaggaatgtcaatataatactaaagttcagaataactgtgaattctgccttctctctttttttgtacatcatgccaagcaggtcactgacaaggctttattattacaagaaaaccaaattgattataatacattatgccttaaaattggaagcatctgtaactttgtaggataatgaaattctttcaactgatgtaaatagagaacttgactacataagcaaaagagtagtcattgtgttgaattgcaagggtatgggagcaggagcaagaggattcacttattgaaatgctaaaacatctgtagaaacttattctaaaattaaaagtgataacttattccaatcaggaaacaaaatatcctgttacatccgttaaagtaatacatttctcaacgtggaatatattccctctctaaaagttgatgtttgtgtaaatatgactttagaactgggtggaactataaagatcatgatctcaaaggtccatttcagctcccaaattctaaaatggttttattttacagacacagttagtgaggcccagaaataaatgacttttccaaagttgcacagcaggatgagaactgaggttacttaattccctgtcctgttctttcttacattaagtgataatgctaaggattatcaaagagagaggaacaataaatatatacaaaagagtatgcattttataatttctgtaacaataattttgattggcaa

SEQ ID NO: 14636 - DNA, 1199 bp, Homo sapiens
tagactgcttttcagacatcagtaggattttccaaatatcaaggatataatttgctgcattgaagttgaatgaactgcaaattttatttacaggtttttcatatacagatatttcttgcctgatcagagactgatgtagagcttctgaagctgcccaaaatatatcccatttgatgtttcctaaagttcttttaagagaacctgagctcttcctgttctctatcatggcggatcaaggtgaaaaggagaaccccatgcagaaacttcacatctgcaagctctgcctcaacatctgtgtggaggagagtggagacagactaacccgagcagccaaggcattggagcagctcacagggcagagtcctgtgttttccagagctagatacaatcagatcctctggcatgcagagaaatgaaaagattgctgtccactgcacagttcaaggatccaaggcagaagaaatcctggagaaggatctaaaggtgcagaagtatgagttaagaaaaaataacttctcagatactagaaactttggttttgggatccaggaacacatcgatttgggtatcatatatgacccaagcattggtatctacggcctggacttctctgtggtgctgggtaggccaggtttcagcatcacagacaagaagcacaggacaggctgcactggggccaaacacagactcagcaaagaggagatgatgcgttgcttccagcataagtatgatgggatcatccttcctgacaaataaacccgtttccatcaaaaaggccaataaaaagtttttggtggaaaaaaaagagaaccagaaagctcagccttccttagactttatttgctgggcacagaaaatcatgcgcagccttgccaaccttctaaggaatcagagaaagcctcatcccactgactcatgacatttagaaataatctgccaatgtagacctggtttccggtttgaggcctgagtccactatcatggtcttgcatctgctgtattgactcagactatgtaaccacagttcagcctcgacttccctactagaaccttcagttccttacctgggggtgatgagaggatgggcaaaggggagtgctccctaggttctcattctccatctgtccactgggtcctgttgcaagggggtaaaccctgggaatcccattgtctttgccctccagactcctgatgttgct

SEQ ID NO: 14637 - DNA, 1144 bp, Homo sapiens
aatcctttatatccctttccgtagacctgcatttcaaagacttacattttaataagaattagttgtgcagctgcaaccctggcaacaaggcctaggagaaaagaattggggcagcattccagaaatcagggcaggcactggtctcatgtgggactgagctaatgaaacataaaaatataaagcatgtagtaaaaataagaccaatactttctttggcatggtagatactgacatttttccacacattttttttaaaaagtccaaaagctcataagctgcacattcaataagagtagctatattatcttctcctttagtataaaaaaataccccagatactcttggaagttaatatttctgtgaattatatccaaaatgtaattgttcttggcccactcttggtgaagtccagacgttttcaaaacatggggtacgaaatttgtcagataaagtttagaaacaaggttttaggttttaaactttaaaaatcaaatgctcatatcagttttaatgtaaatttctcatagttactggactctttagatgcccttaaataataaaatttgttaaatatattctctgaatactgtgacaatggctacataatctattatctaaccataatttaattattacctggttgttacgtgtttaggttgtgttggagttttccctcttataataagaaatattgcaagaaaacatttttgtgtgtataggtattttgctttcttttggactagtcaggattacttttggatttccagaagtgataatgatgcattaaatgtgaaaattttgaatactttctaaaagcactaccaatctacacagctactatagtgtgtatgcagttgctagtttctctgcttctttatcaacattgaatatttgaatagatatgaaatggtagttgaattttttaatttttcactttttaaattagaaacttggaatattttaaaagcagcttaccagcttcccctttgtggattttaaaatttgcgtccttttcccatttatctattggagatccattaagtggttttttttttttttgaagtagtagtcctaagaatctctcaaaattgagtgtggtaaacttcctattcattctgtacactcatagcaaatggtataatat

SEQ ID NO: 14638 - DNA, 1262 bp, Homo sapiens
tggtgatcattatttcttcttggaattagaaacttgtatgtggcagtcataatgttctaattagtgatttttaaaaattaactcattaaaataatccatacttttataatcataaaataggatgccccacgaaggcaaagatttctgtctgcttttactactacacctagaacttgacacttaaaaagttgctcaaaaaataatttgttgaatcaatatcagtttgttaaaatcttgattttttttcagtgtttactttttttggtaatatttattttaagaaataaaagctttcaaggataagtaaagtttaacttttttttactttttcttttttttccctagactatctgttatagtccctgggtcaagacaacaatttttataccttcgtcgtggttcagaaaggagtctctgtagaaccagaagcaaagaaaggaaacaatccaaatttttctttattaaatcgactgtgtaagatacttgacttccaggaacaaaaacacggtgaaataataaaatttcatcttggcatcactggacatcatcgtattgaggagcgtatttttggaacttcccgagttgagatttggaaccttcattggtgctcatttactgtggactgtaagcatgagtgaattctggttgtgtttcaactgctgtattgcagaacagcctcagcctgtaagtatgaagtatgtggacacatcaggtggggtgcttattaaactttccactggttctcaaactgaggattgggatcctagcagtaattgcaaagcagttgtagagaataccacagagaatagttcagtggaactccgaacatatgtttaaaaagaaataatgtttttaaagtaaatactgtatgtcaagaactctcctagaccattcatcgtacatgactgagaggaggtgttcttctgtcaaatagcttctggaggaatagtgagagaaaaaggagatagtaacctgaggtaaaacagataaatcagccttggaagtcagtgggtggaagatgtgacagccatattgccatcatattcctctcagcttaccatctcattttcctcagagcaaccctctgaggaagatatcattgtctttatttttcagttgaaacaggttcagttttttgcccaaagtcatatagcttgtcagtggtcttgactgacttcttggtatatgccttgtttttgtgccctctaatatatgcacatattgttacctctaccaaaatcctgccctccagcctccaaatt

SEQ ID NO: 14639 - DNA, 2001 bp, Homo sapiens
ataacaaatggggcttaattaaaaactttaacttggaataaaggaacagggatcactttatcttctgccttcatttaccttagtccaagattcttgcaaaacaggcaactgaacaaacattaggtttatgtaggtaaaatgtgaaagcatttctcctccactttttaaaatttaatttacccagtacagcggggcaccagattacttgatctttgtattttgcagttttgagcctttgtgtcaatcccaagcacagagaggatctgccaaggaaaaacatttgcatcttcggagtagacattttgcagtttgtttaataacaacttctaaagtaagttgaattcatccattgtcactgattcaccaagtggatgttgcattgtggaatttgcctgagtactgttgtcattctgctcagccaggcacggtcagtttcttggccagggacattgctatgtgctgtgtgcaagctctttagaagagagattggattttcttggcattatcagcactcatgctatttagtctacttctattttgactgactctttaaattagtacaatttttctacttgtcatataactcctggaacaatagtacgggaagccgtgatccttttccctgactcatgattttagtctttttccaaatcgctgttttttttttttttttttttttttttgctgctccaacgaccagcatgtgttggagcagatctccatggtaagccaaaagtggacttgtcagcctataactactctgcagctgccactaactctacaggcacagtaactacactttatacaggagcacatgccaaagtgcctgggaggtgccaataaaatcaagaaataagaaaactacaaaaaaagatacggtattaaccttggacataattttttttagggaggcagctttcccacttttataaagggggttgtaaatctcaagaggtcatttgttccccatagcagcatatctcatttttaaattgaagcgaattaaataggattttactactcaacattcattatactgttaatctttgctgaaatatatgctaacaaatgttaagcaagggaaactgaagacttagtcatgtggattgttagcagtgatctgcattctgtaaaagaggtactttcccatgatgtaggcatgaagtggtgccagtaagcgtagagcggaaatgttgactttagttaacattgggtttagcatttccagtgcagcattatcagtgggcctttaaaaatacttcgtaagtacattagctttcactttgttgttaaattatagcagactcattatagagaacaagtttgccttgattttgtttaaaatgacttctgctaagcacccagaagataaaattgacatatttttataatataagcatactttttttgtacattgtgttcattcttgaataaaatgagttctgtgttggcttgtagatactaaaaagaaagtattgattttgattcaataaatgttttctttcaatcctggttggcctttcctttaaattttgtttagtttttcttttctttcaaggaaggaattatttaccagaattcagttagagcaccttttttgcattcttatattttcagtcatgattcctatcatgcaaaaaacaacttaaaactttttgatttaaaagagaatttaaatttctatcattgtaatctttaacttcacagttcacctcttaatttaacaaatacctagtcagaatgaaaattaaatggatagaaataggactaataaaacatttatgcctggtgcagtgactcacaactgtaatcccagctcttttggagatggaggtgggtggatagtttgagaccagcctggacaacatggtgaaaccctttctgtaagtttttattgcctatcaaccacatgatttttaacagaggtatcagatatctacacagctttccatgatgaagcatcttgtccttatagtatatgtaggacttaattaaaatgaa

SEQ ID NO: 14640 - DNA, 1161 bp, Homo sapiens
tttaatgtaaaagcaagtgaaattttaataaacttctgtaattaccaaaaaaaaaaaaaaaaaaaaagccaaagccattaacgtgcactacccagatcaacttggagccaaaaggggtttacttctgaatggctgtccgtatgtgtccacataggatttagttggtttgtggcctcctttatagaaatgtgttgtctttccctagctgtctctgctgtctgtcttcctgcatatcccccttcattttaaaatcatgaatcagttgtaagtggtaaatggtagtagttcatctttcccatcaacatgattgtctctttattttaggaataatagcatttcaaaaattcctgtggtaaagaaacattaatctgaaacttaagccttagaaattaatcgcaggtatgatagaatgaggcttggtggttccatagctttcttggtcctttgaaatgggaaataacctgaaccaaaaatcctagtttgaaagttacacttcagtgatttggcctataaacagtggtcctatgattatacattttttccttcactgatttgcataattttgttttcatggccacagcaaaacaatgtgaaatatatttttgctatacccactttttttatcaaattcagatgtctactctcaccattttatattcatttccccagaaaaatgtgctgttttcataatgtctttatttagcaggtctttcaaaccaaatggaagccttacctgtctttgtccttaatagtgtaaatatcttgcacagagtgttgaggcctatggttttggacttgcaccttacagctgcctttgttttatctatctagctttaactgtgagtgttcagatcagctgatcacattgatcaggagccaaagccaaatgctttgtagtttgttatgtatgtatcccttaaaaaatcatgaggttttgatttttatattttaactaagggtacattcctgccttctcttagtttgtcatatgactagaacaagagaagtcttaagctgcatttactccaattccagatctccatttgtttttgttttataaatttataatcttaatgaagagactagtgccctctcttcctgccacaactctcaatctgccaagactgttgaagcagttaacgctcagtgcaaacttttgcc

SEQ ID NO: 14641 - DNA, 1790 bp, Homo sapiens
gttccacgtggctggggaagcctcacaatcatggcagaaagcaaggaggagcaagtcacatcttggatgacagcaggcaaagagagtttgtgcaggggaactcctctgtttaaaaccatcagatctcgtgagacttgttcactattgtgagaacagcatgagaaagactcacccccatgattcagttacctcccactggctccctcccatgacatgtgggaattgtgggagttacaattcaagatgagatttggttggggacacagccaaacctttcaagaagtatgtctgattttgatggatcttgaaacagtctgaccttaagtcttgtaggtttaaaaacctgatgatgtcagcagcccactaagtattggctcatcagaatgaaatctgaacaagatgcatttgatgactcagatttcttaatacattgaggaaagagagtttgatgcatccttcttacagaaggaaccagagtagatgaagtattctactttcaacttgagaggacccagaacattcaacatatgttggctaagactccttgtccctggaattatattcatgtatattcagttgaatctttcagtcctcagagcaagtctttttttttttttttttttggtcctcagtctcaagaggaccaaaaaatttattttatgaaaatatttcctgccatatctgtatctgttccatttctcccttttaaccagggattatacctcaggacattttgagataaatttgtaatttgttttgttttgttttgttttcctctaaaggctaacagtgtccataatgctaagaaggtgatgctggacaaacagtataattacttgagcccccaaaatcttccatcctgcccccactgcagtcatcacacacatacaaaaaagccacagtaatatatattccctaattctttttttcttttttgagactgggtcttactctgttgcccagagtggagtgcagtggcatgatctcagctcactgcagcttcaacctcccaggctcaagtgatgctcccacttccacctcccgagtagctggaactacaagaatgtgccaccacacccagctaatttttaaaaattttttgtagagatggggtcttgctatatatccaggctggtctcgaactcctgggctcaagtgatcttccagccttggcctcccaaagtcctgggattacaggtgtgagtcatacccagcctgtattcctaatttttttaaaaaggaaacttttgcaacagtaatttattgtcatagggaaaatttttagcatttgttcatgctataaagtcacttttcacttaaatttaattatattaaatattagcttatcatgttgaacattggtccagagttctataatgacaaaaagaaataagatagaacaagggggggtggaatattattatttacatgtgcttatcatataaacattgtctcaaattagaatttttctactaatagcagaaatcacaagggcaaagactaagatttcaccaggtgaacatttaaaatgttcttgtgttacaaataaataaaatatggaaactaacattttccacttcatagttggactaagtgttgttatctactacaatacagcaggaaaaaaacataagggataccaaaaaatatttttaaaaagacataatggttcattaaaccattatcagttactgagtcttaccagtaaccaaagaaatgaaaaaataatgatatttttttggagggaggaaaagaatagggcttatgaaatgggaaagcaaaacaaaaca

SEQ ID NO: 14642 - DNA, 1204 bp, Homo sapiens
tttaaaaatatatatattttcaactagtattgtctataatgctgaaatattacttattggtgatttttctgtttcacacactctaaaatataagtaaagccaaccttttttttaaggctgagattcccaaaatgagaatactactttataccatttgtttataagtatgaactgttcttataaatattaatatttacatattcactaatttaacataaatgaaaattaggattaaaaattgcaccaaagcatcggcaaaaacaatactatattctttaaaagtgctcaggtagccaaggcccttgcttttggtatcaaccctcatgaacccataggagctgaatatttgtttcactgcttaataatcctcaatttacactattcataactcttaaaattattctctttttttctaagagtccctcccttccaaaagtgtatttttttcaaagattttcacttctcaattgttgcctttgtacatactatagagtgttgcttgtaagaaaggctaatatggaaccaaactcttgtaagtaatgtaaatagaaaggtgggtggataaagttttcaatactttctactacctcagtttacttgagtactacattatagtttattctttgcttatctggtctaagagacttttaatgctagtagtaaagttggtttctgctttcattgactattttcatcataatttcatcattgattaaaaaaagaaaaccacttgtttattcagttattaaatatatttactatataacacatccattcttgctgtttaaattttcaatagttaatggaaagttgtctttgaccttgaatttacagcattgggtcacattttgccttgctgtgtatgtattcaagagacttccaactagacaaagaaaaaattgttgttttaatggaatgtaaacctgaaattggtgtgtctgcaatctgtttggcccatgaccttttacctagtcccagttattacctgagtctcccatggatgacttgctgccaaggagtgtttgtggatatattttctttggcttaattttcttattctgtgcattaacaaaattatccagttgtctgattttggaattctatgagtcaatctttttggcagaattcagaatattaaaaagttcatacatttgcgggccattgtacctttttttttttttttttttttttgacggagtttcac

SEQ ID NO: 14643 - DNA, 1213 bp, Homo sapiens
gattgtgcctgcttcattttcttgtgaggctgcccagacaaaggttactttcctgattggggattctatgtcacctgattcagatactgagcttcgaagtcaggcagtggtggatcagattaccagacatcacaccaaaccattgaaggaagaaagaggggctattgatcagcatcaagaaactaaacaaacaaccaaggaccaatctggagagtctgatacacagaacatggtttctgaagagccctgtgaacttccctgttggaatcattcagacccagaaagcatgagcttattcgacgaatattttaatgatgattcaatcgaaaccaggactattgatgatgttccatttaaaacaagtacagatagtaaagaccattgctgtatgttagagttttcaaaaatattgtgtacaaaaaataacaagcagaacaatgaattttgtaaatgtatagaaacagttccccaagattcatgtaaaacctgctttcctcagcaggaccaaagagatacactctccattcttgtcccccatggggataaagagagttcagataaaaaaattgctgtaggaactgaatgggacattccaagaaatgaaagttcagacagtgcccttggggatagtgaaagtgaagatacaggtcatgatatgactagacaagttagcagttattatggaggagagcaagaagattgggcagaagaggatgagataccttttcctgggtaagtaggaagttttcacctataatgggccctatataaatatgtaccattctcttttttagctgttctctgaaggttagtataaaagagatcattgttctggatagctctcttgttttcatattctcttaactcataagaaggagtaaaggctaagctccagaaacaccctggaaaggttttatgaagacctcaaataaaagttaaaggatctggttgataagtataagatttcttactgcttagaaggtttcaagccatttaggagtgacttatgccccccaaaggacatatgctgagcctggcagttagggagcactaatccctgagatgttagaatagctgttagaaatagatttggccaagactaagaggaaaacagagaatgtatactttgggtcaagtatgcaaggagaatattcatgcttgagaaacattacatacctagctttggacttgtgaggcatttaattgttttgtt

SEQ ID NO: 14644 - DNA, 1201 bp, Homo sapiens
cctggctggacagcctgctgaccccagtccggttgccctccatccaggccattccctgtgcaccgtagcagggcccctgggcccctcttattcctctaggcaagcaggacctggcatcatggtggatatggtgcagagaagctggacttctgtgggcccctcaacagccaagtgtgaccccactgccaagtggggatggggcctccctccttgggtcattgacctctcagggcctggcaggccagtgtctgggtttttcttgtggtgtaaagctggccctgcctcctgggaagatgaggttctgagaccagtgtatcaggtcagggacttggacaggagtcagtgtctggctttttcctctgagcccagctgcctggagagggtctcgctgtcactggctggctcctaggggaacagaccagtgaccccagaaaagcataacaccaatcccagggctggctctgcactaagagaaaattgcactaaatgaatctcgttcccaaagaactacccccttttcagctgagccctggggactgttccaaagccagtgaaatgtgaaggaaagtggggtccttcggggcgatgctccctcagcctcagaggagctctaccctgctccctgctttggctgaggggcttgggaaaaaaacttggcactttttcgtgtggatcttgccacatttctgatcagaggtgtacactaacatttcccccgagctcttggcctttgcatttatttatacagtgccttgctcggcgcccaccaccccctcaagccccagcagccctcaacaggcccagggagggaagtgtgagcgccttggtatgacttaaaattggaaatgtcatctaaccattaagtcatgtgtgaacacataaggacgtgtgtaaatatgtacatttgtctttttataaaaagtaaattgtttataaggggtgtggcctttttagagagaaatttaacttgtagatgattttactttttatggaaacactgatggacttattattggcatcccgcctgaacttgactttggggtgaacagggacatgcatctattataaaatcctttcggccaggcgcggtggctcacacctgtaatcccagcactttgggaggccgagatgggtggatcacctgaggtcaggagttcgagaccagcctggtgaaactccatttctactaaaaatgcaaaaa

SEQ ID NO: 14645 - DNA, 1375 bp, Homo sapiens
gataattatttttttctgttgttagctgcttatgaaacttttattgtatttttttaaagttatgctactcctggccgggcatggtggctcacgcctgtaatcccagcactttgggaggccgaggcacgtggatcacttgatgtcaggagttcgagaccagcctggctaacatggtgaaaccctgtctccagtacaaatacaataattagctgggtgtggtggcgcacacctgtaatcccagctacttgggaggctgaggcaggagaatcacttgaacctgggaggcggaggttgcagtgagctgagatggcatcactgcactccagcctgggtgacagggtgacactccacctcaaaaaataaaaataaaataaaaataaagttatgctactcctaaaccacttaatatatgttttgtggttttcaaaattatgtaatcagccctgaaacacattggttgaaaatattttgagactttataagttagtatttattaaattaatattattttaataagttttgttaaatcctagtttaaatgacaaagctgtgtatagagtaggggtgagtgaaggtggagtactcttgaggtggcgataaaaatgtacccataaatttaaagtccattctgtaattggaatactgaatgtcctgtgtgtggtgaacattttctaggtgattagaattgcatttcactggctgcatttgtttgtggtatgtaagatagctagaaatttattacttaactctgtggggcattgtttagatactgtgaagagttgaggtaaatatgtgtcttgtaaaagctttgtgtgatcagaatattttggtaattataaaatgtttttgatgatacacatttaactctgttagtaattactctaaagaaatcttaattttaccagtttaaaaaaaacgcttctttttaaaagttcatgtttctaacctttaacaattcagttaataggaaaggagtaacttttaaatcaagctttaaaacatggaaatttaagccagtatgttagatattttttctatcccaccctaccatgataataaaaataaatctataaaaagtcaaaataaaaagccgatctataaaaagtcaattgagaagttctaaaagcaggctactatagcaggggtgtttgttttttgtttggagacggagtctggctctattacctaggctggagtgcagtgggacaatctcggctcactgtaacctctgtctcttcagcctcctgagttgctggaactacagctgtatgccatcatgctcggctaatttttgtatttttttgtagagatggggttttgccatgttgcccgggcctgtcttgaactcctagagcttaagtgatccacccgcctc

SEQ ID NO: 14646 - DNA, 2289 bp, Homo sapiens
taagactcccaagcaaatcctgcatattccaaatgtaaagagtactcagtgggaaaaaggttgttacctcaaagtcattgcttctttcctggctgggtcacagggtgaagagatgaaggtgtctgatgtatatagacaattagggaaaaatgagcggcaaaggagctttccccttcagctgcactctaaaggggaacattttaaggaagtactagcagctttgactcttctatgctcctgttggtttacaagccaccaagaatgtcagtgttgagaatacggcctggtaaaatgggagatgtaaaatgactaaatgaaaggaagggtagttttaatgttgaagcaccgtgctgggcactggagctacccagaggaatgcacaacgctcccctcaaggagctcacagtctagcctactccctggctggaagcctcaggaagacgtgctaatttattgtggaattggtagtttgcttttcatgcccctgtcttccttctcatgaccatttccccctttctgtctggcttgcattattgatttccaggaccaagtcctggcttcctcctgccttcctgagatgatgttctgctcagggagaagtggaggggtgagctgtgtgtgtccaccgaggcacggccaggaagaggcagcctttacctgtgaggggctccatgctccagcagcagagcaggttctagtgacaattcaactttttatgctatgaccaggggtggatctaaattttatggggctgaaagcttgaattatttagaaagacttctttaagaaaaacaatgttaatataaaattaggtacagggtcttggaaggggccctgaagattaagcttccttagcgtcacaataagtccgtatctggttgcaattgaaaactgatgcttcagtgagggtatctaaaaaggtaaactggcatatccagggcaaatgtgggctgccaatggctcatctctagggtaattttatgtctgaaagtgtatgcagttgggtcagagcatgacctttaagatagcctctctcagctaacatatttatgaagatgaggcctggtgacccagcaggttcattggatacataagaaatgagaattcctggttcatgggccaacctaggactctggagtatgcagacttggccattcgtccattgtggcctgcgggtcgcaccccaggcatactgaaaggccatactcgtggctggctgcctgcgggcctaagccttcccaggatcttcaggacacttgacagacttgtgttttctggtctgagctgcctccacaggtccctccagcaagcctcactgcacctctcccctgctgtttgtgtttggaattttgtcttctttagctgagaccaaattaaaccttggtgcataaagtgagcttaaaacttgccactgtttagtaagttagcccccatagaatgtgaccctgtctgcagagtctcatttacccctctttttctcattgtcatttgttggctttattagggctgtcttacaggatcatgttggcatttactatcatgtctttatcataaaccatgtttgtttgaggtagaagaatcaccatataattcgttgcccaaattgggactattgagagagaaaggggatgctattaattacaccagatcaaaaggcataaaccagacctgtcccaggccgatgtggaaatatgttctttctagttgtgggtaccctgatctaggtggtttgtaattgtgcattactgactgcatatgtttgtgtatgtgtaaatgtgggctccctgttaagtggggctcatggatacgaggcctgaggaagtgtggcttgctagtctgttacgttaacatgcttttctaaaattgcttcacgtgttaattcatttactcctgcattcattgactgtttttgttcttttccattcactttgtacttatttttttcattaaattttgcatttattttgagtttttgtggtgtcttttttgggcagtagcttttctgatttaacgtttcctgagcccattaatctgctacaactgtggtaaaatacagcttgtctgttctttgaattttgtggaggttgatctacttctgtaggaattgttttaataggaaaccctgctacagacatctgtgaaaggctcttgcataggtgggggatggagggaagagtcacaggaaagttacaggaaggtaaaggggcagcctgtggtccatgaatctttattggttaactgggtgcaggacatgagaaaaggggcacctgcccttgaggagtgttcctc

SEQ ID NO: 14647 - DNA, 1008 bp, Homo sapiens
gtgagtcgggagtgcatttttggaatgggggcaggggtgtttttcatgaccatttatttgagtggttttgattggttatgcatactctttaaatttgaatccaaattttttgcaaaattacttcccaatcagatcttgacccttagcctgggacaccacaaactgaggtgaattctctgctttgctcgtcacaaatgccaaactgactgccctttcacggtgtccatcttgctgtcttttgcttctgtttgatttggtctgcatatcttttaatgtgtctgtttttgttttgtttgttttatttttatttttcagttaacgcacgcacagacttacatgtcaagagtggactttagactttcatgtgttaagttgcttgagttacaccttgtgacccttctcccataacatggtgtgaggacggactgggagccggtacagactccagtgtttacagccttgctttcctcccaccgaccctggccccaggctgccccgggcctggcgggccacccctctctatgcaaacacgtaaaagccatgaatgctggaatccaaaactgacgaggtttatttttttcagagccagtggctggtcttccatttacagtgtcactattccctgacggagctgttatgtgccgctctagcgaaggccccagccgggatgctaggcctaattgttcagcgtggagatggcaactcacgtggtgccctaggtgcagctgcgtggtctggtatacatgctgcaaaattcacccagttcccctcattttaatttttctaacctacagcttaattttaataactttaaaacacttctaaatatttattttggcaccagcgtcaagacaaataatatcctctcccattattttcataagtaacacagattccctgatttttaaaaactaaaaatacagctaaacctttcttatgtataaagtatgcctatcatatacagggagaggtgggtaataaacttcctgtaatgacagtgtttggcat

SEQ ID NO: 14648 - DNA, 2013 bp, Homo sapiens
tgagctactggccaaggccaaatgaaacctcgtgctcctctgctgtggggcggcccggcctcggggctcagaggcgctctgtctacagctgggaagactcgcaggccccaagctcctggccagcgctgccccggaggtcggcaggccccttcctcgtcacctttttgttccctcccccgcctcccgcattcggccgcttcctgactgggattccacagaaaagccgagggctgaggagaagtgtgagcgcctccgcctgtccactgtcccccaaagtcagttcaatccccgacgtcctccgctaggctccaccccaccggcccgggcagggcctccaaggcacctcccacctacgggtcacccagtcagcccacttctttctgggacaaaggcgtcatcccttagagacagtaggaaaatggtatctcccggaagttacctcacgacctccaagagcggcttccaaccttgccggaaatgacgaacgagtcaaccggatcggtgactgtggagggcgagctgagccctgtgcgtgagtggggtctggttgtgcagtgttcgtggaccctgggaggctaggggcgccccgctgggctgggaaaggataaggagtgcaggggcaggagtctggggttggggatggacccccgcggggactgcggcgcttcgcgaaagcgagccaagcgcctgtccaccctcggtcctgcagggccgccgccacaatgggccgcgagtttgggaatctgacgcggatgcggcatgtgatcagctacagcttgtcaccgttcgagcagcgcgcctatccgcacgtcttcactaaaggaatccccaatgttctgcgccgcattcgggagtctttctttcgcgtggtgccgcgtgagtgccttgggcccgcgggagcgggaggctggaccccagcagcagcagcagtcactgcgcctcccctctgagcgctggcggccgggcaggcgctctgtaacttgccgtacacacctttctcattgaatattcctgaccgcccttaagctggtcatattatcctccccatcttacacggggaaaactgagctacagaactgaaatgactggcccaaggtcactcgggtgattccagcatgttcctctgaggtcacctttatttagttcttaccagtggtgaaatgctttgtgttaaacgtgcagcagatagtgatgatagttgcatggccttggatatgctaagaactactgaagtgtatgctttaaagaagacaagaggactgagacctttttttttcttctatatgtcttatatgtgtgctctctgtttactctcttaatttttaaagagtttgtagtgttttatcttatctacacatgggggactgaagagttcgagagatccaagaggaagaatccagctgcctatgaaaatgacaaatgagcaacgcatccggatgacggttccctgtctctgaaagacctttctctggaagaggagtctgcattgtagtgtctcaaagacacaataaacttcctatggtctgcactgttgtgatattacatttttgtgagtagaatcctgtgtgaccactaatattcaagttcatgaagcgcccctcctcagcatgagtcttgaagttttgcctggtctcgggttttggtgaaagagcagggctccccctttgttccattatctacaagaaagtagctgcaggtactcctgcatctaaccatttgtgggtgacatgggctatggcgagtgctggttcttggccctctgctcccatagcaacaataaagtctactaactatattgtaattagtatgtgtcagggacgcttttattttttattttttgagatggagtcttgctctctcacccaggctggagtgcagtggtgtgatctcggctcactgccatctgtgcctcctgggttcaaacgattctcctgtctcagcctccgagtagctgggattacaggtgcaggacaccacacctggctaattttttgtatttttagtagagacagg

SEQ ID NO: 14649 - DNA, 1173 bp, Homo sapiens
aaaactaatagaagagataattattgaataccttggaatatgtagtgagaagaggccaaatttttcatgtttgtgagcatgtctttcagatactcgctaatggagaaattcactttagacctctagaccccaaaaccaagttagcaagtgacaaaaagtaaattattaatagtctgtaaagtggatgctggtcttacaaagctcctattcacatgaaccctatggttaattagaaagaacttgctgtctccagaaaagggaatggaaataataactatgtatcttcttttcatgtaatttggtcacagaataaggtattcaagttaagtctaatccaagtcttagagatctttaagtatcctaaaatagcagcctaagtagtcatcatgtaaagaagttgactttcaggaatgtcagcattgacctctccttgccactgttactcagctaaacataacttgccattcttaaaaataaaaaagctcccacccagaaactctagtgatactcagttttgacctcttactgcttccatgtgggacttcttttcagcttttaaccattggaattttctacctgctatgttcctctctggaaaatatcaatttggaaatgctgcctttcaaatcaatgccatgatcatccatattgttgagtttgttgttggtgttccagaagtgtccccattttacaactttatgcacacacctggcaaatcattaacatgagcattcaacagtactgggatgggtggggtgggggtagggggctcaccaacagaactggccagttgacattgcctgaaaaggcaccacctttaagggccagttgtggggttggtaagcacagttatgaaaatttctatctagcctccgttttgaatggttttaagaaattttgtatatggaggatggaaatgcttatatatttattgaaaatccttttatttgaaattaaaattatttggtatataattgtttgatatttggggagggttttggaggggagataatgtcactgataaattaaaagcctgttgattttgcagaaaggtactgttagtgactgataaggatgcctttgttttgtacatgaaccaaatctttgttttacatttcttttatccaaaatatttaggcatctgacattttcaaccagaatttcaattatata

SEQ ID NO: 14650 - DNA, 2806 bp, Homo sapiens
tttggttttctagaattctttgctgaactggataaagtaatgggccctctcatctttaatgcaagcatcatgacagatctagttcgttatacccggcagggactgcactggcttcgccaggatgccaagttgatatcttgaactgaacacattctcgttgcctctgattttctccacaacactgtgtcacatcacgaaggaaaactgccataacataccacctagtcgacactaagaatgaggaatagttttctcctcgttggttcatgtgttgttgtttttgataatccaaagcgatcatgtcagttggccctttaatatttccaatgtgaaagattatttaaatgcttttaaatctgcagcacattgataagatggtttccgtgagctatgataagattgaaattccagttgcaattcataactaatgaattgaaattttatttattttaatttttttaagttcccagattggggctagtttaagacttagttatttctgcctataaatttactctgttgaatatttagcataaatttaatgtagacatttttatttatataccttgggagctttattacctaatatctttttgtggtagctgttctaagagtaagaattggttcgtctaaaataaggacatattctttctacacctgctacctgacctgatatttgaaatcttaactccaattttattattgtggaatttacagttagtattaaggatattcttctacacatgaaaaaatcacttaaatatgagaaaatggcattctacatgtatgtactatgaaatgtgtctgatttggtatgcattatttcaaaaactgtgaatgtgtgttaataacactacagcaatcacacagtgactatagcttgcatttaatgcattacaaaagagggaggacaaactttctagaagaagcatttcatgttgaagggtttcataaaaggacaatcctgaacgttacggattttattaaaaccatatgttattttttgttgctaatcatttgacacttaatcgaaacagaataagttactgtggaaaaaaggatgatccaactcctgaggattgccgcctgtgtgtctttaattgattatctttgatagttagagttatttttcagatttttccccctcatactggattgtgatgctctgatatgagcatgcaatgactgatacagaaataggctggagcttcggtgtgtgcttttgctatacagcttacagttctaatgcctgatgtagagatgatgaatttctcctttttaaacctatcttctgtttactccttttgcattatgaaggccctcttcaatgatgtatgtttctgatggaatcagaaaatttcacactagaaaagtgtacctaacttgattcagtgtgagctcttgggacagggagtggagccaggggtagagcttaaagaagctggctctgtaagagttgtatatcaaagtaccttttgctacaaggtgcatatagaagtctaagataagaaatgtaccctctatactttatttttcatgcccctatcatgtttggtgtgccttaaatcttacctttaaatgaagactctatggattgtttacaaatgaagttttacactaggaccagatcgtccatacatgattggtcttctacaataataatgttcaattctttcattttaaatctttctttagggtcatataaagattagttctttcagaaaagctattgctttggtacatgacttagtctaaccagttgggtaatgctgctttgaaaaatagtttgtccctctccccattccaaaaatgaatccattcagtcagaaaaaaagattatcctactatttgtagatgattgctaaggcttgaaataggaaaggggaaagaagggatagaaaagtttcaagtccagtagtgcagtgaatcctttgtgtttgagacttttttacacttatttctgaagttagtgaactttcattgtccctgtggcctcatatttatagagcttcttaactgttttgtacctcagattgtttttagatgtcattgaagattgagatgtacaaattatgttgaatttaacctgtttctcttggagaaattgcctctgatatctttctaacttaatcttagtgtgttctaggaacagttttccataagaggacaacttctcaatgatcatgatagttatttagtaagaaataatggttgttaatcaaatacatgttatgtcttgtccttctctgatttttctgacttggattccttaatttgcagtgatgtcttagaaatggaaaaagtatcctctgggctttcagactttcagcaacaacagccagtgggatacctctgagttcttgtgttctagtctcttgtatgtcctgaaaggcagcaggagcatttttggggtcacactgatattttgttaaagcagagtttcctgcatggtttatggtgctgctctaatattttctctttaaaactgtgtcaatttttggagaatgaatttttcaaccttttcattgtggaggatttttcccacaaggtagtaatgggcaatggatcaaaatcctatcataaatgattgaattttcaatgtcatagtgtgtggaaatactactccctttcctccatgtctatcttcttagatgttctgtctttgtcatcatctgctccagcacatactttggactcctttacaggtgaccttcccccctccctcctcaataggtgtcctcagtgttttctaagcatttaaaactgaatttgacaagtggctaaaaacttagtctgagacttgtac

SEQ ID NO: 14651 - DNA, 1766 bp, Homo sapiens
ctggtctggaactcctgacatcaggtgatctgtccgtcttggcctcccaaagtgctgggattacaggtgtgagccactgcacctggcctttcaaaatactttgtgtatttaaaagacagtcttgctatgttacccatgctggagtgcagttgctcttcacaggtgaaatcatagtgcactggagcctcaaaatcttggaattgagcaaacctgcctcagctgcccagagtagctgggagtacaggcacgtgccactgtgctcggattatattttactatggttatttttaggcacttttcaatgattttttttttcactacagaaatgatatatttggagtttgcttcaaggtattaacgttaagatatgaggtaaagcctccctttgaaaagcccctttccattcgaagtttggaaaattagttcagaattatattttatttctgattatgctcattttataattttattttattttatttttttgtagactagcaaagaagataagttatcaagtcgtattcagagtatgcttggaaactacgatgaaatgaaggatttcataggagacagatctataccaaagcttgttgcaattcccaagcctacagtaccaccatcagcagatgaaaaatctaacccaaatttctttgaacagagacatggaggctctcatcagagtagcaaatggactccagtaggacccgcacccagcacttctcagtctcagaaacggtcctcaggcttacagagtggacatagtagccagcggaccagcgcaggtagcagtagtggcactaacagtagtggtcagaggcacgaccgtgagtcatataacaatagtgggagcagtagccggaaaaaaggccagcatggatcagaacactccaaatcacgttcttccagccctggaaaaccccaggctgtttcttcattaaactctagtcattccaggtctcatgggaatgatcaccatagcaaggaacatcaacgctccaaatcacctcgggaccctgatgcaaactgggattctccttcccgtgtacctttttcaagtgggcagcactcaactcaatctttcccaccctcattgatgtcaaagtccaattcaatgttacagaaacccactgcctatgtgcggcccatggacggacaggagtccatggaaccaaagctgtcctctgagcactacagcagccaatcccatggcaacagcatgactgagctgaagcccagcagcaaagcacatctcaccaagctgaaaataccttcccaaccactggatgtaagtcacacatttagagcttttaacattgtgactacgtgaagcaattgactgatcatgaaattacgattgaacttgaacactgcttccttgccttaatagtaaggaatgtaaaagttgaaagatgaaaaaaatgtaaagacagacttgtgagttactcccaagtggatgcgtagatctgttaactcgtcctcttgggaaatggagaaaatgtcattcacagttttcaaatacttagatgacaagtcagttatagaataaaagaatgactaattgatatcttagatttctgcattttgattttatagaacaatatacctttgttgttgtttaaaaacaaaattaacttttctatgcttagattgatactaatgaatgagatgcaggtgatggtttatggttatgataaatgggacttttgggtctgtggaaatagtaatattgtatactttgaatgctatgatccttttctctggttata

SEQ ID NO: 14652 - DNA, 1184 bp, Homo sapiens
tcatctccaagtatcgtgtttggttgaaagctaaaataggctatgcgtggtggctcatgcctgtaatcccagcactttgggaggccgaggcaggaggattccttgaagccaggagttttgagaccagcatcggcaacaaagcaagaaccctgtctctgcaagaaaaaaataaattagctaggtatggtgacatgtgcttttgctccccgctacttgggaggctgaggcaggaggattgcttaaacccaggaggttaagtctccagtgagctgtgatcatgccacggcgctccagagagagagaatgacagagagagagaccctgcctccaaaataataataataataaaaaaagaagctaaaagtgaccttcaaggtattacttcgaaaactagctttttttttttttcaatcccctcttgagataatgttgcattgataatgggaagcattgttcattttagcttttaggactaggacatgaagaaagaaatataataagtctaggcccctttgttgttttcttgcaggtgacatatatggaggaagagcgaaattttaccactgagcaagtgactgccatgcttttgtccaaactgaaggagacagccgaaagtgttcttaagaagcctgtagttgactgtgttgtttcggtgagtttgatccctatacattattgggaatttgcatgaagaagcagagagaagaaagctgctaatttcaagtaaacttgtttttttgtctcaggttgtaatggttatttaaaatgtttgtcaggccgggtgcagtggctcacgcctgtaatcccagcactttgggaggccaaggtgggtggatcacctgaggtcaggagttcgagaccagcctggccaacatggtaaaaccccgtctctactaaaaatacaaaaattagttgggcgtggtgatgggcacctgtaatcccagctattcgggaggctgaggcaggagaatcacttcaacccgggaggctgaggttgcggtgagccgagatcatgccattgcacttcggcctgggtgacaagagcaaaactctgtttcaaagaaaaaaaaaatttatgaaactagtcttcattttcttactctcttctgctgcttagcttttgctcaggcctcctttgttattctgcctatttaaatctcttctgtttttcaaggtgcattcat

SEQ ID NO: 14653 - DNA, 1308 bp, Homo sapiens
gagctaaggctttaaggaatcctttggtagtaaactgcagagagttgagcctttggtattactcagttttgtgatactgagtagactagaagtatgtacatgacatgttagtatattttaccttggacatgtaactgctattggttgtcagactggtgtagtggggagggcatggactttggaattaaggagatttggctttgaattccacttctaccacttagtagctttgtgaactgcagtttatctcatctgtctaggtctgtagcattatctgtaaattggggattatagtgcctatttttacagtgtggggtaataaggattaaatgatgtatacattgctttgttttaaccttaatgtaaccctccctctttttttttagataaacaacttaccaggtaaatatatatcatctgtttcaaaatcgattggttaattgttagattaattctcattttttccttaaggttctggccactgcatttgacacgacattgggaggtagaaaatttgatgaagtgttagtaaatcacttctgtgaagaatttgggaagaaatacaagctagacattaagtccaaaatccgtgcattattacgactctctcaggagtgtgagaaactcaagaaattgatgagtgcaaatgcttcagatctccctttgagcattgaatgttttatgaatgatgttgatgtatctggaactatgaataggtaagtatattactatttcgatgttaaagtgaagagtgagttttctccacatatattaacctttaattggctaattgttaaaataatcacggaggttatatgataattttggttctattttaaaaattagaagccattcaggaccctgctttttatgtaaagttgggtctggttaataatgtagactaatgtttttgttctgataaattgaatattccaacatgttgatagttctttacatatgcatttgttatacacgagatttcagtttccaaaaaatcagggcaaagggctgtaatgcagaattaaattgaatttaatttacccagtgactaagaaattgtaattttttttttgagatggaggtttttgctgttttgcccaggctggagtaaagtggcacaatctcaactcactgcaacctccacccccaggttcaagcgattctcctgcctcagcctcctgagtagctggggttataggtgcctgccaccacgcccagctaatttttgtatttttagtagggacggtgtttcgccatgttggccaggctggtctcaaactcctgacctcaggtgatccacccacctca

SEQ ID NO: 14654 - DNA, 2684 bp, Homo sapiens
gagggcggatttgggtttagcatggcttgtaaaatttgttaattttataagaaaccagttttctgtcttacccattccaggagctgacaagtacttgtagccctataatttcaaagcccaaacccaaagtggaacctccaaaagaggaacaaaaaaatgcagagcagaatggaccagtggatggacaaggagacaacccaggcccccaggctgctgagcagggtacagacacagctgtgccttcggattcagacaagaagcttcctgaaatggacattgattgattccaacacttgtttctattaaaacagactattataaagctttaagttgtcaactttgttctaaatatcaactagcgcaagtgaatactgaagatttcttagtcagtttttaggggattttcggggaggggaaataggtaatgtatggagcattttcacttctaaatagttagatacagaaattaagtgcattgtatctttttcataatggtactatttagaagcccagttagtcttactgagcttatgcttcactcctttatgtttaaccatgtgtctacaagaataagtttgttttggaaagttgagctatagctacagctctagctatccagcagacttttcattatgacttacatggcaggagctctaattatgctttaaaaatctgttgtggagattgctttaaatgctccctgcctggtgtggggatggggtccccctctttgtgagggctggagcatggcacggcatggattaacacggcagaggaacaaaggtgtgctctgagcttcttcatatttcaccttcaccctcacctgtgttctcttccctctctcccaataaaagggctcccattataaatgccatgtacttctcttgggaaaatagacccccttgcctagagtaagttgttaactgagggctttaaacctggaggctcttcctgaaagtatgttcatgaataccccaagcatcaaggtctaaataattttcagaagattagaattgggtagatatactgttggatatagccatggtaaatttaactgaggaattaaatccttgttaattttggtgtaaagatttgtatcctggcctgtttattcaggtgggagatgttctgtataattttgaggtatagcttgaactcctagaacaagagttaaaagttctttttagctcattcacaatcacttgtgtgttaagtgttaatatctgtcatgaacctgccaatttgtacgtgttaagcagctgacagatgatgcaaaaaaaactaagatacactggattgtactggatgagtctgaaattagtgttaaagaagtgtggtgcctgatgttataacaacacctcattcttaactgtgtggccaatgtcaggtataccaaagcattcctctgactgctttttggggcagtgttgacaggagtgaggcattttggaaactccaagggaagcctgtgtttgaggccagagttggtacctgctttaagaaactgttacagggcttgttggtaatgttttgaatctttgtaaaaattgatattctgtataacagagtgcctctctgttacttttggcctatgttgttagaaataagatgctatcttgcatagttagaattaagcgtttgtccatctctagataacattgaaaagtttgagtgttacaggctctaaagtgcaatggagaacaattgcttaggaggaggaaggggaaagtatacttatgttggtgtgtaagcatgcatggaggcctcgaggcaccacaacaaggccaggttcttagcacatcctctgttctctacctgtcatgcttcaagagttccagctggcctgctgtgaagccagtagctattttaaaagtgctggctgcaggattaagccaaccctttacaactggcccagaccgtaatggccatttcttcttaaaaaaaaaaaaattttttttttttttttttttttttttttttttttttttggtgtgtgtgtgtgtgtgtgtggggaagggtgtgggtgctgggatgggggtgaatttcaagttgaaacacgatgatgtggtctgcttgctctctgcttagacaggctttaagaccaattggattttcatggaggccaggacagagagtggtaattgatggcttgtgtacagacaagcatttatccaggttgcgttatccaaactgatttgttaaagctccaggtcacgttcttacactaagaaaatcattcagtaaacatgagacaagtttaggaaaaactaataaaataaacctgtcttaaacttgaatggtttccttaattccataatgaaggctgctgggtgtgtgtgtgggggtgtgtgtgtatgtgtgtgtgtctgtgtgtatgtgtgtgtggggtgggggcggggggtgtgttttcaataaaaatgttctctaggagtaggaaccctctgagctaaatttcacttaacatccgttgaagacttccagtctgaagagtgacagctgaagcacactgcctactttgtgagaaaatgttgcctaatttttctgtactcaaactctccagttgagtcttggcccagttcctttggtgttaggaatccttgtcttgctcctgtgactgggccttactttgagggttttgttagcagaaggcgggggttatggcataaaggtaagtgctaggactt

SEQ ID NO: 14655 - DNA, 1149 bp, Homo sapiens
gtaatggtgaggtttgggcttctagtgtacccattacccaaatagtgaccattgtatggaacgtgggaatttgttgtagatcaacaaataactgtcgtgacctggcccgcaaagccaaaagaaggtacttttttttttttattctggcagtttttgtggttttcacattcattccattttctgcatgatgggtggtccaggggaaccatgccagtaggcccccagttcagcagcgggtaatagaggagaatgggtcaggtctcagttttagttttccttgtgcttcttattttcaaattcacctgcattcaaccacataagtgtttttaaagtaatcttagtagtccctttgaaattatgtgtgcagtaattgttggaagaaagaagttttgggtttgaattaccgctgtgtcagctttagctcagtgctttttctctgtactgccctggagccaggatggaagggagatgctttcctgtccagactgaagagttacagggaggaaggaagctgtctgctgacaacaaattccccataagatttctttacatagcaggctcctttactcccatctgtactttaaatatctatttgaattgtagagttagccttggcccccccacattcagggtcttgcctcttgcagaaaggcaagtatagtgtttaggagtgaagtgaagccaagtgagtgctatggtgcaggctgtgactcttctctctcctttgaaggaatttacaagctcaggctcagccaacactgagaccaccaaagtgacgggcagtctggaaaccaagtacagatggactgagtacggcctgacgtttacagagaaatggaataccgacaatacactaggcaccgagattactgtggaagatcaggtaatggctgctgtgaaaagatgtggatttattaattcgcatctgccagcctgccttgtgactaaatctagtggcaaatttcttttctgttcagcttgcacgtggactgaagctgaccttcgattcatccttctcacctaacactgggtaagagtttcatctgttttctccacaaggatgttctctgatgttgcaggtggtggaagccctttgtgacaaaatgttttgggggctgacagcacctaaaatatggtctccgagacctg

SEQ ID NO: 14656 - DNA, 2413 bp, Homo sapiens
ctagtaaaagatgaaattaactacaaagtaaacagaagaatgagaatattaaagggcagaaatcaatgaaatagaaaacaggtaaacaataaagtcaatgaaaccaaaacctgttttttaaaatgagatcaatatagtgctataactgcttacgtttgaactctttaagtgtggacaaatatttttgccaagacctgatgtggtatttgtgtgcatgtgtacacacatacacaacagtagtggccgttatttcacatttgagctagtatagtttggttaaggaagcagaaggattcaacattatagaggtataacaaagaaggtcacataaaagtctttcacagaagaacttaggagtgatttattcttctccctttaatttcttaaaattagcattttaagctttattagatacggagtgtcaatcattaactttggatttagtttaaaacatcaagtatactttaaggaaaacaactgtctctttacaggctgcaaactacttagacatcaaaggtttgcttgatgttacatgcaagactgttgccaatatgatcaaggggaaaactcctgaggagattcgcaagaccttcaatatcaaaaatgactttactgaagaggaggaagcccaggtaggtagcacacagttttgtctttgatcacatgctcttaaaaagggagtaacacctataacatgccagcaaaagaggtgactgtatcaagtagtcttgatactttagggataatatgtacttaatgtgtcttaaacatactcttactgttctgtctttatgaatctgaacacttagatgatactgcattttaagcataagaacaattagttttcaatgagaagagctcttgttaatgtattaacagttactagttttggcacctgcaactttctgtatagaccatacatatctgacatcagaaaagcaggccctagagagaagtatatactagggtactttagagcaacttaatgaggggaggaaatgaaagaatagatcagaatgattttgttgacatgactacagactgaaataatgtgaatgaattaactgaatttgctctgtcaactttagtaaattgcccattgcctttgctttgttcataatttcagcagggcagaataaaaaccatgggaggcaaagaaaggaaatccggaaatatagtcttaacctggtgttgttctaattttccatctgttcttctgactcaactcactggctatcgatgaatcagtaggtagtatttataagtcttaggaaagactactcaagttaaggtacttccctatatccatctcttttaggtacgcaaagagaaccagtggtgtgaagagaagtgaaatgttgtgcctgacactgtaacactgtaaggattgttccaaatactagttgcactgctctgtttataattgttaatattagacaaacagtagacaaatgcagcagcaagtcaattgtattagcagaatattgtcctcattgcatgtgtagtttgagcacagatcccaaaccttacggccaagtttcttctagtatgatggaaagtttcttttttctttgctctgaataaaactgaactgtgggttctctataagtggcattttgggctttccctcttttttgtaaagcaatgtctgcctagtttattgtccagttaactttagtgaccttttaaaagttggcattgtaaataaaacaacttgcaaaaaagttttctggaatagaattaacaaaatattatctttattcatgagttggaaactggaaaaaggcttcttgaagtaaatgttctgagtggagctactaggatgtcttccagcctcctgcagtcaaggagtaccactgtattgattagcctgtatgtagcagggctcccttcattgcatctgaggacttgttttctttttctttatttttaatcctcttagttttaaatatattgcctagagactcagttactacccagtttgtggttttttgggagaaatgtaactggacagttagcttttcaattaaaaagacacttaacccatgtgggatgtcatctttttataattagtgttcccatgtggagaaaattattcacactacttgcatgtaaagaataatttaacttttaacattaaaatatgtggtaaaacccagaaagcatccatcatgaatgcaagatactttcaataaaaagtaagttatatagtaggtagttaagtttgcttttgtggacttaaatgtgtctcttcacttaaatgggttgaatgtgtatatatttgttcagcttgaaaagacttagtttatatcctagctcactggaggctgctgacataaccataacttctgtcccttctaattgtcatttatatgcctaactggagctagtactttaattcttaacacaaaat

SEQ ID NO: 14657 - DNA, 2472 bp, Homo sapiens
tttttgagacggagtctcactctgtcacccaggctggagtgcagtggtgcgatcttggctgactgcaagctctgcctcccgggttcacaccattctcctgcctcagcctcccgagtagctgggattacaggcgtctgccaccacgcccggctaatttttttgtatttttttagtagatatggggtttcaccgtggtagccaggatggtcttgatctcctgacctcgtgatccgcccgcctcagcctcccaaagtgctgggattacaggcgtgagccactgcgcccggccaaccatgttttgttttgttttgtttgaaatttcagtcaaggtaaaaaccatgtttttataaaagcatagtctctgtggctgaagttgccttgactctttcaaggggagtacagttaacagaccattatcattaaggttctgttacattaagacaagccaaaattgaataggaagtgtaaagtttggaagactcatgttcttgatcttgattgtcactacatggaggtcgtggaacataaaccatgaatcggtcttgtttttcagcttgcagtttgacccagcacctcgtagaggcgagccacatgttactcgtcgtaccccagactacttcctgtaatgaaattttaaacttgtacagtattgccatgaaccatatatcgacctaatggaaatgggaagagcaacagtaactccaaagtgtcagaaaatagttaacattcaaaaaacttgttttcacatggaccaaaagatgtgccatataaaaatacaaagcctcttgtcatcaacagccgtgaccactttagaatgaaccagttcattgcatgctgaagcgacattgttggtcaagaaaccagtttctggcatagcgctatttgtagttacttttgctttctctgagagactgcagataataagatgtaaacattaacacctcgtgaatacaatttaacttccatttagctatagctttactcagcatgactgtagataaggatagcagcaaacaatcattggagcttaatgaacatttttaaaaataattaccaaggcctcccttctacttgtgagttttgaaattgttctttttattttcagggataccgtttaatttaattatatgatttgtctgcactcagtttattccctactcaaatctcagccccatgttgttctttgttattgtcagaacctggtgagttgttttgaacagaactgttttttccccttcctgtaagacgatgtgactgcacaagagcactgcagtgtttttcataataaacttgtgaactaagaactgagaaggtcaaattttaattgtatcaatgggcaagactggtgctgtttattaaaaaagttaaatcaattgagtaaattttagaatttgtagacttgtaggtaaaataaaaatcaagggcactacataacctctctggtaactccttgacattcttcagattaacttcaggatttatttgtatttcacatattacaatttgtcacattgttggtgtgcactttgtgggttcttcctgcatattaacttgtttgtaagaaaggaaatctgtgctgcttcagtaagacttaattgtaaaaccatataacttgagatttaagtctttgggttttgttttaataaaacagcatgttttcaggtagagcttaaactaaatgatgtgtttacttagtgcagtttctggttatgaatattatattgctatgtgtatattatatggactctttaaaatgattgacagattggcaaattcttaaatctttgtacattgttgagtcatatgttcttagagttaaatttgtctcagataagaaagtgttaaagcattagcctgtgtcaagttctttgagtgatactagtgaaaccaaatagaaaactattgttggatcatgatttagtcttatgtacattcacccgaagacaaaaatggtacttaaagtggcagtgttcaacatttaatgagtttttccccttttatccttcgaataggattagatgtttaaaaaaaagttcttctgtgggaactaatatttgatattttaacctaccagagtaaacaggaacacttaatcatacttgtgagtgtagtaaataaaagttttcttgctttgtgctgtgttgaatctggaaccaacagggaagttatagcatatcccctttctaaaatgcttgaggaacacatacataccgaatgtcttttctgatctaattgatagtatttttagtggcttgtggagttaattttccaaagcaaaaggccattagggtttctacatttcatttcatttcattcttttctttcacaagaaatacattctctgtgtgtctttttgttgctctgtcactctatgccctttctctccgactgaacaaatagcttatccatgtgcagtggttttaatacccaaacaatctagacaccaagcagctattttttccggtcctgtga

SEQ ID NO: 14658 - DNA, 1516 bp, Homo sapiens
tttttttttgagataaggtcttactcttttgcccagtctggagtgcagtggcgcaatctcggctcactgcaacctccacctcccaggttcaagcagttctcctgcatcagtctccctagtagctgggattacaggtacccaccaccatgcccagctgttttgtatttttagtagagatgggatttcaccatgttggccaggctagtctcgaactcctgaccttcagtgatccacccacctcagcctcccaaagtgctgggattacaggcttgagccagcgcgcctggccaagacattatttttattttcattgcttgaaagcttcctattcatgttacatactgttgttcctctttgtcttggaaagagtaattattattcagttttggatgtagctgacaacatttgcccctcaaatgagattggtgagatgaaaaccctagataatttcccttgtattcttagtataaatcatgatccagagactgagctctaaagtattctaataaagtataactgactttttatattgtttattgcaacttataaaatgcctcttttcagcagggcaaggtggctcacacgcctgtaatcctagcactttggaaggccacggcaggcggatcacgaggtcaggagaccaagaccaatcctggctaacacggtgaagccccgtctctacttaaaaatacaaaaaattagccgggcgtggtggcacacacctgtagtctcagctactggggaggctgagacaggagaattgcttgaacctgggaggcggaggttgcagtgaaccaagattgtgccactgcactccagcctgggcgacagagggagaccccattccccccggccccaaaaaagcctcttttcatcctcttggcttccacagtcaaatgtcatgcatgtgtgtatttgtttcatggtctcctaggcaggaagctgtaatgcagttagtttggagttgacttcatgaggaaacagaaaaggtgaacattcccactattcagaaacacaggttccccaaccctccctacgttctccactgggaccagaattgtatgttttcagaaaattggctgtaaggctaagttgaagctcatgtactgtagaaagaatgaaggacccttcaggagtatgtgggataacatttgtattaccagtctggtgtggccctgttttatggcagcaaatatgttccctatctcatggtaagtcaggtttgtcagagttacctgtgagatagcctttgcttagtttggaaggggtaagttaggaaaactaagagactgggtttggtggggtcttttatcagggtactgaggagagaggcaaagctatatgtaacagggagacactatttattctttctgctttgacccatttctcttacttcattatcatccttgcctgagaaagctgtcaacctccactcatacacaggcagatctgaattggatgagaaccatgaaggaggaagatttttgtttttgtgggctttttttttttttttttt

SEQ ID NO: 14659 - DNA, 1174 bp, Homo sapiens
taatctttttcatcattgttgtgtataatttacctctcattagaaaggctaacaaattttaagtgccacaggttttaaggattctgcagaaaaaaaagaaaaaagtccttcagtttagaacctacaaaagcttgtgtatcttgattaatgtactttttattgcatggtgtgaactaagttattgctgcataaatttgtaatatatcctgtttgtatttttttccaagtgtataatgttggtgtggagttttcatgacagaatatacacattttgtaaatctgtacttttttcaaatattgaatgccttatttttgaattctttagatttttaaattggagaaaagcacttaaagttttttatatatgaatattacatgtaaagctgttaaaatacataacttcagtgcaagagactttgtcacttatttccttatgtgtgtaggaggggttaataagtctctagctctccatctattgatagtttcatttacaatttcaaaagaacattcttatattttatcaaggaagtcttcaaatttgattctaaatagcgattataatctccaactttattttgaatgtacctctattagtttcaattgagtaattctagacataactggtttgactctgtccaactctgtatttaggccatttgttacagtttcttcatgcattacttactgttaaaactgtaccttttgcgatttcacagttggcacttctgccatgagcagagaactgatgcgacttgttttgctgcttggtagcactttaaaaaattttttgattaatgaagaaagtaaaaccataaacatttgccaaaaattcatgccccagtattagcaatgaattagttgcattggtttgagaaaggcacatattggagggaaatcttggtgtaacttaaatatttgaaaattacctttaatgcaatgcatatctgtttattctgggaaatgttttaatgccagggcctgctgagttgcttcttcttgtggagattttttttttaatctcctgagttgtataaaagttgtactgcatcttagtttactggataaatttaaaacacagtattgtagaaagctaatacaaaactatcctatgccttcaaatagtatagaaaatggaaaatatacaagtaaattctgttgaaccacctgtgtagtc

SEQ ID NO: 14660 - DNA, 2082 bp, Homo sapiens
ccatcctggggcaggggctgggcctccctggtggcaggggtgggtggagaattagggagagggtgcaacgagtctggccccttgcctcgggctggctggtgttcttccaagagcctctgctcacattgttggcctctggattctggcccttcttcattggctgttgctttggactggactgttgctgagcctgtgtcctgcagaacccagatgtctgttaggctggctggctgctgcgaggggaggggggtggcctttcatttggggtgccctttcactcccaggccaagccctggagcaatcttcttcaggcagctgtctccacctccaggatgtccagcaggctgcaaggagaaggatgccagccacccatcctcccccagttcccagcctttcccctgttggtcacagccgcttctgtctttttccggtctactgtccccagtgtagagggctttgctgtccctgagactgaggcaggttccttttccaggtcagaggtggaggtagatctttctctcaaccacatctgcctccacacacagctcctccgcagggaaggagaagctgctctgtaactcattctggctatcgtcccccttctcactgacctgaccgcccaccacctccttccccctcatcacatgacaaaggataatgtgcaagaaaagtatttttatgtatcataaatgtattttgaaacaaatgagaagaagaaaggtagaagggtttattttattaaatgagcctgacttagtgacagtgtgtgagcatttgcaatgtaagggcctcagcttccttggagaagccaccccaggtttccagacatagatgttgaattgtttgtggggggtgtgccaggccacgtctcgtgtgtccgtatgcaggcatgcctgtgtatactgtgtatgggcacactgggactagctgggacaattcctagagattcaactgcccaattctaaccaacattggcagcggctgaacttggcatttccttgctaactgccagatgtggccaacctttgtccatatgcaaaccactgaaaaatgatctggatttctatagcaaggcccttggggagggcactctcccatgcccttggcctcgctggccacattggccaatgagccagggctggagtctgagacctttggttgttctttaaggcacctcctgccactttctccctcagaggcacaaacactttgtgttccacgtcagtttgaggggacggtggggggatgatatgaatgtcacaggaggagacaccttctgtctttgtttcaaagaaagtgatgtgccatttgttaatatacaagagaaatattgaaaatatattgaaaagagcaattttaaattatttttggcttatgttgcaatatttattttcttgtattagaaaagattcctttgtagagaaaaaatgtatttttcattaacgcaaagacctatttctcctttttgtacattgtccatgtgcgcaacccttaacgagcaatagaatgtatggtcacctgggtgtggccagtgcccgctgtgccctgcatgattctgtgttgccgctgctgcatagttcccagccccatcctgtcctgctcactcatgggggcttccagaccccggccccaccagggcttgtgtcatagggagccctttgcactcctcgtgtgttggcaaacgcagttaataaagcagtgttttctgtgctggctggtgtgaggctccattgcattggatggggtagggaaccctgggagtcccacacacacacccgacaatgggctcagcaaaaccacggggtccctgagttttccaagggatcagctgccacctcctaaggaatcataataaagatgttcagtgcacaccaagggctataatttcagagcagtatttatatttttcattattattattattattattatttgagacaggatttcactctgtcacccaggctgcaatcttgattcactgcagccttgacatcccgcgctcaagctgtcttcccacctcagccttccgtgtagctgtgactacaggtgcatgccaccatgcctggctgattttggtaattt

SEQ ID NO: 14661 - DNA, 1203 bp, Homo sapiens
aattctgctgggatgtggggctttattaattttataaaattccaacgaaatgtctctcttctattctaggggagtatatctctgaaagaactgaatgcccgacccttagaagttttcatgtgtagtgtgctcaaaagacaaggttacggagaaggcttccgctggatggcacagtacattgattaacacaaactcacattggttccaggtctcaacgttcaggcttactcagagatttgattgctcaacatgcataacttgaattcaatagacttttgctggttataaaacagatgttttttagattattaatattaaatcaacttaatttgaatgagaattgaaaactgattcaagtaagtttgagtatcacaatgttagctttctaattccataaaagtacttggtttttacagtttataatctgacatcaccccagcgccatttgtaaagagcaactttccagcagtacatttgaagcactttttaacaacatgaaactataaaccatatttaaaagctcatcatgttaaattttttatgtacttttctggaactagtttttaaattttagattatatgtccacctatcttaagtgtacagttaataattagcttattcaatgattgcatgatgccttacagttttcaataactttttttcttatgcaaacgtcatgcaataaaacaaactctaatgtttggcatccttgttgggcaaatgtttcatttaaatgtgtcttatctagctagtatactctgaaaatttgagtatttaatattaggcatatgaagtggttgttgggaaaggagattccttcagaatatttagaatagcgtttaaggctctcaaggcttaggtatttaccatgagatggttgtggtcagttgcacctgataccatgtatccctgaatcatgtgtatttttattagtaatgcagccactaccattgctgatggggtctgtgtcctagtccctgtgggattggccttctgaagaaaagcacatttatggtacacaaggttgattctcagtttggtaggctctatagttccatcccagctgtctaattctgaagtgctccagtcttattggtgcccaatggggtaatctgtgcctcttccccaaaagcaatgacaggcaccagtgtctccacatttagatatattcccagtctctgtacatttaacagtactctctg

SEQ ID NO: 14662 - DNA, 1178 bp, Homo sapiens
tgactgggttgaagtttggttttataattatctgaagtcccaaatcatgaatagatttatttatttatttatttatttatttatttatttattttttgagacagagtctcactttgtcgcccaggctggagtacaatggcatgatctcagctcaccaccgcaacttctgcttcctgggttccagtgattctcctgcctcagcttcccaagtagctgggattacaggcatgcgccaccacacctggctaatttttgtattttcagtagagacggggtttcaccgtgttggccaggctggtgtcaaactccttacctcaggtgatccgcccacctcggcctcccaaagtgctgggactacaggtgtgagccaccgtgcccggccatgaatagatttaaaatagcttttttaaaactgaaaataggtttagaacttcaagcttaattgggccaaatttaaattcatttggataattagtatcagatatcactttgaccaatcatagctcttgctttgcaggattatataagaaaactggtaaactggtatttcttggattggataatgcaggaaaaacaacattgctacacatgctaaaagatgacagacttggacaacatgtcccaacattacatcccagtaagtatattcctacatacaatgtgatacttgatcaaatgatgctgagtcatatgcactaaccaaaagtgttttgtttcagacagggtctttctctgttgcccaggctgcaatgcagtggtatgatcacagttcactgcaacctctgtctcctgggcttaagccatcctcccgtctcccaagtagctgggaccacaggcatgtgccaccatgcccagttaatttttatattttttcagagaccaggtttcgatatgtttcccagggtggtcttgaactcctgagctcaagtgatcagcctctctcagcctccgaaagtattgggattacaggcgtgagccactgcacctggccaagttttttgtttggggggcattttctggtagataaattatgatcaggtgatttgacctgttcctaaaataataaattataggtgacctcgctcccagggagaatatttagatcttgaattagtactcatacctttttatcagctagtactcccttctctagcttgaggaattaaaaagtttttgtc

SEQ ID NO: 14663 - DNA, 1206 bp, Homo sapiens
acttaaatgagtatatctgtaggacacattctttgatatgggattgctaaagtcaaaataagtatctagaattttgatagatactgccaaattatcgtccaaaaatgttttttgtgtttctttttgagacagagtcttgctctgtcgcccaggctggagtgcagtggcgcaatcttagctcactgcaacctctgcctcccgggttcaagcaattctcctgcctcaacctcctgagtagctgggattgcaggcgcctgccaccatgttcggctaatttttgtgtttttggtagagacagggtttcaccatgttattggccaggctgatctcaaactgacctcaggcgatccacccaccttggcctcccaaagtgctgggattacaggcgtgagctaccgcacctgacccaaaaatgttttttgaaaattagtatccccaccttcatttcaaaagccatctgttattccttaacctcactaagtactgtgtattatctagatttctttactttttgccaatctgataagtaactaggataaaatgtaaatatcagtatgtaggtatataaaaataattttgttacctttttctcttctaggtctttccattcatactttccatggaaacttctttgttaggtcaaccgacttactgtctttgcctaacgtcaacccagacgctgggtatgcagtacagatgtcagtggaagagagtcttactgacactcagttggtttcttttcagtcagcactcttgtatacatccagcaaaggtaaattgtttgtttttttttggatttcaaatgttcaaatattgtctggatttcaaatgtcaaaatgggctataaaatacatgtagcatatcttatgtgtgctaacttaaaattgctgtttttatttatttatttatttatttatttatttatgtagagacagagtctcactctgtcaccaggctggagtgcagtggcgcagtctctgctcactgcaacctctgcctcctgggttcaagtgattctcctgcctcagccacccgagtaattgggagtacaggtgtgcgccaccacatccagctaatttttgtaattttagtagagatggagttttgccatgctggccaggatggtgtgaatctcttgacctcgtgatctgcccgcctctgcctcccaacgtgctgggattacaggcatgagccactgcgcccagc

SEQ ID NO: 14664 - DNA, 1126 bp, Homo sapiens
gtgattaatgctgcagtgatcatggaagtgcagacatctctttgatatactgatttcaattcctttggatatatattcagaaatggaatttctggatcaactatttctcttaattccaccataagcttttcccttaaacaacttgaaatttacataatcaaccaagtattctcagagaaagcctctagaagtaactgtttatatagtaaatgttattagggttatgaggaaatcaaaagccttctgacaagtctattttactgctacattttatctaaatttttttgccttttattcctaagggatgagagtccaatgaaagcaaacttccttcaaaacatgatagaagacagaacagaatctgcattatcatattatgaattcctgttgcatatacagcaacaagtgaataaatgaatgaatgaagaaatttgacttatttttaaggaatgtcacgatagtgcagaatacctggaaatgtgtaataccttctttttctattatgtttgtggactaatgtgatgattgagatgttctcactgtgatttcaacaacctatagcaaataaaagaccacagcagagaatcaaacatgcaactctgaaatactgtatttttcaaatcagaatatagctacgtatgattggatacttttttcttgccaattatgtttgagttgttatggattaaaataagaatattgcagaggcaaagtacattttgtaaaataaagatttctgtgttctacatgtatatttctcatttttaatttttctgaatctttggctgctacatttaaaacctcacaaacctaagtgttgcagggaagttacaaattgattggtagtgatgtttttaaaataaaaacaatggaaagtaaatataatgtaggaaaactagaattcattccccacacgtgtcttttttttttctttgttaagggaaaggatcatgttgactaaaactaaactaattctagtatagcttgagaaaaatatgaagaaacacattcaagctttaaaatctgtcagtattctttatgcttgaagaacaaagtcactttgatttgaagtgagaactatcattaggtggttttctgatttcctgatgaagagttggacatactg

SEQ ID NO: 14665 - DNA, 1099 bp, Homo sapiens
agtttctgtcaccaaaagtggtgagtggtgaatggtgagctgatatatagaaatgtcacataccagatgggcatggtgactcatgcctgtaatcccagtattttgggagaccatggtaggaggatcacttgaggccaggagctggagactagcttgggcaatatagtgagacccctgtctctacaaaggaaaaagaaatgttacatatctattttatttcttggttactaggatatgaaattaagagccagagagaacagatgatcatttgccctcatttgcaagcctgttaaaccctgaaagtttacaatttttatcatttacaattaaaatcaacatcttcctagcccttggtaaagatatagcaagatattgtcattcattcactacaaataaaatgaatatttctgtccaggggatccatttgcattttcacttcattaacttgatacaatatggtgttttcagattgtgattgaagaagaaaagaaattcttgaagttacttgagcttctaggccattatcaagagtcaggatctgtcattatatttgtggataagcaggaacatgctgatggtcttcttaaggatttaatgagagcatcttatccttgcatgtctcttcatggaggtaattattcacttgattcacacataaaatatctattaagtacttgccaagcattgtgctgtgttctcgatgatacttactttgttctctataattcagaactaaattttatgtcagtttttactctaaagtgctttgtgggagtaagattattattgtctcatctaagagaaagaagatcatacaggcatactttggtttgaccaagttccatcgccatttatcaactatggaggaattgaatttaacttttctctgtgttataccctttccattgtacgtgctatctgtaggttttcatgattcactttaaagagcttttattgaaatttcaaagtaacgttttaatttcttgtgatattgctatcacatgcatgtaatagcaatatcacagtatgtggaactagaacacaaaacacagaccgggcatggtagctcacgcctgtaatcctagcacttggagaggct

SEQ ID NO: 14666 - DNA, 1127 bp, Homo sapiens
tcactccccctgagaattattgactatatttttagtaggccactgaccttgagttatagtccttcttccagcctgtttcattgcagtataatttggtctcaaggcctgagccctggggtaagtcagctgcatcctattggctattctgtcttgaaagcacatgtttcctcatttattgaacagggatgaagtttctggtcctctcaggagtctgatgacgtggttcatgcaatgttgtttctctgttttctatttttctccctaccatagacaactgattttttaaatgaaatgtgacttttaacaaataggtggtatattttcccatggatctgtgtagtaggatttgtgtaaatataactatctgattccagccttttggtggaaacattccttatttatttctgtagaataacttaatttggtatttctaattcagttttttactagtcctttttttccttttgatctagattgatgagcaaattgaaagcatgtttaattcaaagaagagagtaaaggatatggctgctcctggaacatcaagtgttcctgctccaactgcaggaaatgctgagaaattagaaattgctaagagattggctcttagaatcaatgcccagaagaatttgggcatcgagtctcaggtattaagtaatttgttccaagtctcagtcaatacttttaagaagttctttgattttacttttcaggaattatgttgaacacaagtaaacaagttgtcctagacattgagtttgtgagaatttaacattctcaatacagaattttttgataattgcatttggatgatttctcagtgctattgactgaggactttgggcctattctggaatttctaactgttagccactggtagttttatagggtagtattctgatgagtcttaacaaaatcttaaagatgtattaataattctctttttctttctttatctgcttttattgggcacacaactccctggatatacaaacacccagttacatgactcaaatcaatatggtcttaaacagtggagaaatgtgatttttaaatatttcacgttatctttttcttggaagcttacttgttattttgaagcttttgaggcagtcattaactataac

SEQ ID NO: 14667 - DNA, 1121 bp, Homo sapiens
tatgtatttgtgtgtgtgtatttatatatatttgtcttttatttttggtagaaaatgatgcatcctgttgccagcagtaatccagctttctgtgggcctggcaagccttcctgcctcaatgaagatgccatgagagctgctgatcagtttgacatatattcctcccagcaaagcaaatacagccacacagtcaaccacaaaccaatggtttgtcagaggcaagacccattaaatgaaacacacttgcagactacaagtggcagaagcatagaaataaaagatgaactaaagaaaaagaagaatctcaaccgatctggtaagcgtggccggccttcgggaaccaccaaatcagcaggataccggaccagcacaggcagacccctgggaaccaccaaagcagctggatttaagacaagtccaggcagacctttggggacaactaaagctgcgggatacaaagtcagcccaggcagacctccaggtagcattaaagctctatcccgtcttgccgatcttggttatggctgtggcactgctgcttttccttaccctatgatgcatggcagagcagttcatggggtagaggaaactagcagtgaagtcaaaccacccaatgagtgaatgaggcaggaaaagagggccaggtttagaaggaagattgtgaataatcccaaagcttcttggttttattttgatatacataattttatggcctgggctttccaaatttgttttcctgtttggtttttttcctgcttttgctcaaaaactgccatatgctgacagatgcactcagggcatgagcagcggcattgtatttgtacataggttcaagtgtaacacctaactaaatcatttttccttttcctttagagttatggtcatgtctcatgtttcattactactttggggctgttctaaatagatgctttatgtgataaacaactgaaaccattatacctattagtttgtgaagtaagcctacagtataataaagacactaacgtatttttaactgatggagcaaaaaagcaaactaatgaatcaggattacttgaggtaatggctgtgtgagtttttgtaacatttattttcacaagatgggacacatatttgtatgc

SEQ ID NO: 14668 - DNA, 1188 bp, Homo sapiens
gtttaatgttctaccatagaataatgcacaccattgtcaaagatttgattattgtgttttatagtaagtccatttgacatttatttccctttcagtttattttccttccttattttgttatacatacccttccctttctcccctgcctttcgtacattcattcctcttcctctaccctccagcacatctacttactggtgctgtgctgtgtgtcagaagataaaacaggtgtattattgtataatgaattttgtatacatgtttatgaaatggtgagatcaactaaaggaggcatgttcataacagtgtttattatcagcagctatgtcccaggaaaaaaaaatgggaggggcaaatggctacagttgtaaatggataacatcatttagaaagccgaatttactgttcatctgagcggttacctggagtattatatctatgcactggtgagcatctcctgattccacttacttttctccctgtgaacagtttaccggtgccatgctgaagagaaagacatctaagtgataacatgaatgaagtcttaaaatttaaagtatttttactgctatataaactaaagactacattgtgcatattttgttaacactgtctcttgttatgataaacactgaaatagcatgttaaacagttgcctatactttaatataatcagttggggaaaactggccttttctcccccactgtatgattgtttcttgaaaggtaaattgctaattttatacagtgtaattctgttcttcacaaaataggtttcattattctatatttaaactgttggtcagaaaatgatctgcaattcaagtaagtctgcattacttttttctttaaaaagtactttaacatgccttatttattatattagcaaatgagctaataacagatgaaattttcattttttgacagatataaccttgcataagtagtatttagggtgattttgatactatctttagagttttgcattggatattaaaaaatatattggcacaatgtattggaagaaaatgagtagtatctggtttaatttttaatatttagggacattttaaaaaatcaatgttttaattagactaaaaattctttatattttttatttactttttaaagaaacatctgtcaaagtaatattgattccaaactgatgtttgtgtgaatttacatgtc

SEQ ID NO: 14669 - DNA, 1171 bp, Homo sapiens
gaggacagtcacatccaccagcccccaaccctcagcaatgagtactcattctaggtcctgatagctgccttactttggcccccagatcacaagtccctttaaaggaaagctgatctcctcgtccactgtggcttgtgcttccttttgtcccaggtgccacccacgggctctgaacattcatcctagtttgcttgctcccgcatcccgagcagcatttgagtcttatgtttgaaatgggttcatttgagccagcaactccctgcttcccttttgtgcctcgtgcacttggagtgtccactgtcctttacctgtatcccaaggctccttctctgagacttcccagctctcctgttatttcccacctcatgcttttctttgcagctgaaccttattcacagtgaaatcagtaatttagccggctttgaggtggaggccataatcaatcctaccaatgctgacattgaccttaaagatgacctaggtaattggggacggggttcggcaccaccagctgtcagatgaaaagttatggaacccagaatttaggcatttcatcttcccagactttacagtggtcaagccaaatttccaaatccaagattgatatttgagtgtagacgctgaatatcaacttactccaggccattccaagtgtaaacggtctgtttcattaagtgtgattggctactctctcctcaattgcaaatacattgccatctgaattctcttccataatgatcaaactgactgctggttacttggggagggatttttaaacgtgttggtttttgtttgtttttttgtttttactttagaactgaaaaatctcaggtaactacaaaatgatagtttctccatttaaaccttaattagaaatgacaaagcttgaaagagaagacaggccacatcagtatgctattaagctgtctttagtccacaatttactaccatcacttcaacttttctttagaactgaaaacagtatatgactgaatgccaccttcttgaattatttggctagaggatggtattaaacagaagggcaatatctccaagtgagttcttatggaggaaaactgccccagagccatggtgtctccctgttcaagatggcagatggttcagggcagactgagaggtgcccctcaagtgtcctgcctctatggcttta

SEQ ID NO: 14670 - DNA, 1134 bp, Homo sapiens
taaactggtcatcagatagcaccagccagggaatcaggcagaagtcaagccttggtggtggaaggtgaacaacctagccggcagcctgcttgtcctggggggcactaacggtagagcctcaggtctgattcagggctctacaggggattgttttcagactgtactgatgggtgcactgggtttcttcactgaaccaccagatgactcttccagctaattgtttgtttgttttaaccatgggcaatatattttcagccgccccagtgatgcaactttgccaggacgccatggttttgtaaaagacaattcacttttattgaaaataaaaatgatgcaaaggcttttaagacctgagaatgagagttaactaatatttctttattgacatcaaaaaggggtgggaagaaagaattaaactcttcttaattttttaatcctatacttaaagaattaaaggaatgaatttgacgttccaagttaatctgtgtttagtttgagtgtggtaacaaacttggatctgaagctgcatcatttttaaaccctcactgtcaatttcttttgcatcacagtgacacggttccctcgctcacgtcattgcaagttctcctcctacccctttccctctttctgtcactaattgcactctctctcatgatgcaattcctgtggtggactctgtgttccagaaaataaccattactgtttacatttttaaccattctttgtattttgtatgcatttttcaaaagaaaaagtagcactagttgtcatcttaaggtctggggatttgaaagtttttgttttaaaatattttttgttcctttaaaaatttcgactcagcagtgaagacaactgcctgggtctactttcacccctgtaacatattccttgggtaatgtattgaaagttaacgtgacccatccacattacttccatttgaaatacagagcagttcagcccttggggtcaccttctccctcttttccccactctgcccttaggcactcccaccctggcctctcccctgcctatgttcttgttacctcctgccagccactccaaaggcagcctcagatcagaattcctcatacctcccttgctggatgaactaaaatatttccaaagtagcagcaa

SEQ ID NO: 14671 - DNA, 2131 bp, Homo sapiens
cacaaaccatcaacaaacctcaccctatccccatgtgaaaactaccctcctagatcataaatataggcttgctccttaccacctggcaaaagcccaaggtgattttagtagagtgcctctttctcttgttgaggaataaatatttaaactgcaaattgagtgattaacgttctggtaagggaagccagagaaaggaattggttcgtttgagaagctactattagaaaaatttgctggccttctattgaaattttaggttgttcaaacattagaataagagactaaacataggtaaacatggggtgatgattttacataagtctttctggatgctcagttctacagtttcttaaatgtctcccagctgactctgacctaacaggttttctgctgctcagaacaaagctgggcgagtgtccaatacatggaaatttatgggtttgtaggacaatataaaattataacagtctttctggagctgacagaattgcttgctaacttttatttcccccaaactgagatatgaaaataatctaccacttagtagattccatttcatagaagaaagggcatttttttttattatactttaagttctagggtacatgtgcacaatgtgcaggtgtgttacatatgtatacatgtgcacaatgtgcaggtgtgttacgtatgtatacatgtgccatgttggtttgctgcacccattaactcgtcatttacattaggtatttctcctaatgctatccttcccccagccccacaccctcccacaggccctggtgtgtgatgttccccgccctgtgtctaagtgttctcattattcaattcccacctatgagtgagaacatgcggtgtttggttttctgtccttgtgatagtttgctgagaatgatggtttccagtttcatccatgtccctacaaaggccatctgacaaagggctaatatccagaatctacaaagaacttaaatttacaagaaaaaatcaaccccatcaaaaagtgggcaaaggatatgaacagacacttctcaaatgaagacatttatgcagccaacagacacatgaaaaaatgctcatcatcactggtcatcagagaaatgcaaatcaaaaccacaatgagataccatctcacaccagttagaatggtgatcattaaaaagtcaggaaacaacaggtgctgaagaggatgtggagaaataatgcttttacactgttggtgagagtgtaaactagttcaaccattgtggaagacagtgtggcgattcctcaaggatctagaactagaaataccatttgacccagccatcccattactgggtatatacccaaagggttataaatcatgctactataaagacacatgcacacatatgtttattgcagcactattcacaatagcagactcggaaccaacccaaatttccatcaatgatagactggattaagaaaatatggcacatatacaccatggaatactatgcagccataagaaagggcattttaataccaaaacattaggaagagacatgatttcagacaataggctttatgaaaaacttgggcatagttgctatgatttgaatgtgttaacacctcacaagcaactgtaacgaccttaagcacctgccctgttgtcccgttgggtgggtaccttgaagggaaaaggcagaagttttttgccaagtgggcaggctatataggaccaggcagtgatggcttgtctctggagtgctttactactttctaaggccagtcgtttaatcaggaactctccagtcttagtctcattttctttctttctttttttttttgtatttttggtagcagtggggttttgctgtgttgcccaggctggcatcctcctgccttggccccccacaaagtgttgggattacaggcatgagccaccactcccagacccagtcttattttccaaataaggaatctaaggcttagggaaagggagcagttttcgggtcatgctgttgggggagccaggacccaaatacagaacttcagagttcaaacttcagagtactatcacttttatgtcctgtgactgtttttaacagttggaaaatttacattattttctccttatttctcttttgcttgccccacaaactttcat

SEQ ID NO: 14672 - DNA, 1772 bp, Homo sapiens
gtttcataatgcagaagtattcttttcaattatattgttagtggacttgttttaattttagagaaactttgagtacagatactgtgagcttacattgaaaacagatattacagcttatttttttctacataattgtgaccaatacatttgtattttgtgatgaatctacatttgtttgtattcatgttcatgtgattaactcttagaagtgttgtaaaagatgcagagtaagtattatgccccagttcagaaatttggcattgatcttaaactggaacatgcttttactttattgccctaacaattttttattaaatttatttgaaaatgcatcacatgatgaaaaattatagtagcttataagagggcatatacagtgaagagtaagttttccctcctactctcgatcttccagaagctgtacttttaccagtttctttgtcccaccaacttaaaaaaaaaaagtacaattcattgttttgcaaaagtgtatggtaggggcttaaaagaaactataaagttttatttgaatgaacactatgcactgctgtaactggtagtgttcagtaaaagcaaaatgatagttttctagatgacataaaatttacatttaatacagataagtgttcttcagtgtaatgtgacttcatgctatatatcttttgtaagacatttccttttttaaaaaaatttttgcaaataactgatctcaagtatatgtcatttactcaaaatctgtcataagcattactttatagctagtgacagtgcatgcacagccttgttcaactatgtttgctgcttttggacaatgttgcaagaactctatttttgacatgcattaatcttttattttgcacttttatgggtgacagtttttagcataacctttgataaaatacactcaagtgacttggacttagatgcttatccttacgtccttggtaccttttttgtattaacaaacactgcaatttatagattacatttgtaggaagttatgcttttttctggtttttgttttactttcaacctaggttataagactgttattctatagctccaacttaaggtgcctttttaattccctacagttttatgggtgttatcagtgctggagaatcatgtagttaatcccattgctcttacaagtgtcagcttacttgtatcagcctccctacgcaaggacctatgcactggagccgtaggaggctcttcagttgggccccaaggataaggctactgatttgatactaaatgaatcagcagtggatgtagggatagctgattttaaaacactcggctgggcacagtggctcacacctgtaatcccagcactttgggaggctgaggcaggcagatcatgatgtcaggagtttgagaccagcctggccaatatggtgaaaccctgtctctacaaaaaatacaaaaattagctgggcatggtggtgcgtgcctgaagtcccagctactcgggaagctgaggcagaagaatcacttgaacctgggaggcggaggttgtggtgagccgagatcgcaccactgcactccagcctgggcgacagagcgagactctgcctcaaaaaacaaaacaaaacaaaacactcacccatcaacgaatatagactcttctctcatttatcgatgatcctctttttccattttttaagtacttatgtggaagctagtctcccaaaacacaatctttagagagaaaagacatgaacgaactccaaaatatccatttaatcaatcatgtttttggctttgga

SEQ ID NO: 14673 - DNA, 1648 bp, Homo sapiens
aatctacttggatcccatgcctgaaatttggaagcatatgtacaaaaatcatttttacgttttatttttaataaatcattgtgtttgaccgtacatgtctaacattttttttctaggatccattccgtaccgttttttaagggatatttgtttaagactttacgtgttaattctttattcttgatgtgtacttagagaaacttaagaggtcctgtggtttttttcccctctcctgttgccctgctagttgcgtgttgaattatatcccttacaggcaaaacttttgaagtggtggatgtggctttttaaactcttaagtttctgtgcatccatctcttgtactaagcgaattgtttatcatcttgacatggttggtcatttctatgacaatttacttcaaactgtgtactgtgtagttctatatagtttgtgttaagcatgtcattcatataaactgtttaaaatttttcagatggcctagtttcatccctcttactggtttgtctgtaatgaatggttaaaaataagggttatattttaccctcaaatgcgtttttgtactttcagagcaggtttaaacgttttttttttttttttcctatatccgaactgttggcctcatggaaatccctttcccgatctttgtagcaccatctactggcagaatggcagagtagctgcgaaacaatttgtttaaaaacttgcttaagacaattgcatcagatttggaagttttgccatcaaaattctttgcagaattggaagttaacacatttgcttgtaactgagatgggcttcacaggaatgtagttgccagttcatatcacaatagccctttctatatgaggtttgaaaatgtaaactgctatgcatagcttgggcaatagccctaaattgctatgacaactaatgaaccagctacgtatactggtattttaggtgcaagttgtaaagcaaaatatctgtgtattctgcttggttaacaaatgtatatttgtagccctttcctgcaatagcattcaagttgttgtttataagagaagaacaaaagtgataataggtgaaaattgcctttctggatagaaatagagaatagcaacgtttatggatatcacaaataaagaattcaattctttacatgattgagtgagagtatgtataacctggtgggtgggttcagagtaccttttaatctagtatgcttaacttgatgttaatatttaacttaaatatttgacttacatgttgacgttgaaggctcaaagctatactaagaagctttctgaaagattgggctttaaaataaaataatattttaatattgaaccattttttaacttcttgtcactgttcaattcctaaggtctagttcttgccagttttttttttttttttcctgattggcagggcttttaaagaagtaagaagaaaggttaagattattaggctaggttatagctgctcagtagtcattttgacaaagggtagcggatggttggtacaaatagtgttatatcctctatgacaaacggggtggatgtttttacacattgaggtaatacatagtcaaatcctttgctctcaaatagttgtacactttccatacatttctgtcttattttttaattctagtgatacacaaattaca

SEQ ID NO: 14674 - DNA, 1323 bp, Homo sapiens
aaatttgaaagaaaagcctataaaagtgcacatacgcaactgtgttctctgttttcctagaaaaccaaaatcaaactgagatttcaagtcgtactatggaacacctttctgtttaattcccaaagtgacatcttctcacaggtagtatgttagtaaaattttgcaattcgctggtcacacagctcccggatgaagataacagttggtagaccaaaaggtgacctcgcttagtatattgaaaacacacaccacacatcacacacagaactgaatcataccacatgctgcctatgggacttcagttactgtttcctgagttactgtttatccgctggcaatggtgtgatttgtctggatcagatccgcgctattccccaacccacctccagataatgtgagaaaatagccatgtcagtatgtaggaactctgatggtgctcagatttgtgtgttcaatcaatgggcttaaatcagcaaaatattatgcctaaagtaaatctgttcttaacaagggctctaccactgcattttcacatgtaccttcagggggttatctttttttttttcccctcctattttaatcagcaaaatccataccaaaacaacgacaacaacgccctcttaagggaccaccctttggtcaatcataacatgctgtttaaagcagctgtttacaggatgtgtagtggtatgccccttgtcatatactcttagcatatctttttttcctttggctttgcatggcttttcttcaggtactgtctcggtatcattctgctaatcattgttacagaatggtgacttcatttgtgctaacagtacaacagcagatttgggtcaggcttaatctaagtgttaacttttttttctggtgcttttttggattgatgactgtctcactttgactatacccatgttttgcatgcaatgactcatgcatggttttcttaactagctaatattaacaatttattccatataaaaatggaattttgcaacatcctttaataaggtgagggaagcatgaacctcagacttctggcactattacatagtaagcacatgaagtagtttgataataaatagcagttctagtacttcacatttcacccgtgtgtgcaatgcctttttctggggggtggggggtgagggaaaacctggtagtgaatgtgtagttggggaataaagaaaagcactaaatcctgccctttttgtgtggtttccttttgatacaactaggttattcataatgtatacctagaaaagtgaaattgaaaataccaaaagatgtatcatttttatttgaatccatcatgcagtgtac

SEQ ID NO: 14675 - DNA, 1849 bp, Homo sapiens
ctgggattacagcacccaccaccacgcctagctaattttttttttttttttttttttttttttgtatttttagtagaggcagggtttcgctatgttgcccaggctggtctcaaactcttgacctcaagtgacccacctgcctcggcctcccaaagtgctagcattacaggcgtgagccactgcacctagccttaccacccattttttatatatgttgtgtgttctagtgctttggttcattcctaacttggaggaagatcttaagtaaggttagagtaaggatatagatgatgaacttattcaatgcaggagttgctctcatcctttgagaccataagaattttcttagttgagtcttcaagtagctattgcttcttatttatgtgctttcttcttacttcattttgtgtacctctttatatgttaggtgctcccactctttcccggcttttagaagctggtcctacacagttcaccacacctcttgcttccttcactactgttgccagtgagcctccagttaaacttgtgccaccccctgtagagtctgtgtcccaagctaccattgtcatgatgcctgcgctgccagcaccatcctctgctccggctgtctccactactgaaagtgtagctccaggtgcgtccctgagcagccactagatctaaaatttcattttgagctttagttagagaaaaatgaccaagagcatcagctccgattcagatgcttcttctctgttctacatagacatgtgccatctttatccttagaaataaatatccttagaaatagatgtgagaagaggtgggtgggcatttatgtattgcaggaagaggctaagtatacagatatgagcaggcttgaaaatatgttctcacctttctagataaaactggggagaagaaaacataggcacatgttgatgactctttctgaccttaagtgtttggatatttgacatctgtctgtagcgcttatgtgatctcaaggtggtcgctttgtacccaataagcttctgagatgcttttctctttctgttactcagtgagtcaacccgacaactgtgttcccatggaggctgtgggggatccacatactgtgactgtttccatggacagcagtgaaatatccatgatcatcaattctatcaaagaagagtgttttcgatcaggggtagcagaggctcctgttggatcaaaggctcccagcatagatgggaaggaagaattagatctggctgagaagatggatattgctgtgtcttacacaggtgaagagctggattttgagactgttggagacatcattgccatcattgaggacaaggtaactattcagcgaagccccagagaatctcatgggtcctacataggcttctcttttcagcctcactttggtgctgctgctgcttttttttttttttttttggagacagagtcttgctctttcatccaggctgaagtgcagtggcacgatcttggcttactgttacctctgcctcccagcctcaagtaattcttgtgcctcagcctcctgagtagctgggactacaggcacatgccaccacgcctcactaattttttgtatttttagtagagatgagttttaccatgttggccaggctggtctcaaactcctggcctcaagtgatccacccacctcggcctcccaaagtgctgagattacaggcatgagccaccatactcggctgctttgcttcttacagtaagaattacttaaacaactctcctacttctgcccatctccatctttgtagccctttggtgctaacatactagtcatctcctcaggtctacccatgttactggtttgcacaggacaggtgcc

SEQ ID NO: 14676 - DNA, 2132 bp, Homo sapiens
ccagatctcaactggattcatgtgcaagatgctgaggaggcctggaagctcctaaaagtgggtcgtaagaaccagagctttgccagcacccacctcaaccagaactccagccgcaggtgagtagattgtaagaataaactcttcactgtgttccaggaaacattagtcctctgcctggtcatggaaaatgtgcaatgactttttgtttttcttaacttccagtcacagcatcttctcaatcaggatcctacaccttcagggggaaggagatatagtccccaagatcagcgagtaagtttatccatttagaaatttgggcttcttggccataaatgatagttgggaaagcatggaggaggtcctcaggggaactatgtgttctccttctttgggtacagagattcttagtgggccgtcccctctccagaattatacaaagggccagaaggctcataacatgtgaggcccttatgtcagatcctgtgcatcattctaggctgtcactctgtgatctggctggctcagagcgctgcaaagatcagaagagtggtgaacggttgaaggaagcaggaaacattaacacctctctacacaccctgggccgctgtattgctgcccttcgtcaaaaccagcagaaccggtgagcttttgactataattcctgggctctgcaatttgctaagagacttcctggacaccactggggatggtgctaggatacccaaagggctggtgttctgctcacagctctattatctctgattctctgccaggtcaaagcagaacctggttcccttccgtgacagcaagttgactcgagtgttccaaggtttcttcacaggccgaggccgttcctgcatgattgtcaatgtgaatccctgtgcatctacctatgatgaaactcttcatgtggccaagttctcagccattgctagccaggtgagaagctagaggtgtgatgggtgtgcgcacttggaactggtaactctaagaaagctcctagggactacttatggagtcaagtaagatattttttttccctctagcttgtgcatgccccacctatgcaactgggattcccatccctgcactcgttcatcaaggaacatagtcttcaggtatcccccagcttagagaaaggggctaaggcagacacaggccttgatgatgatattgaaaatgaagctgacatctccatgtatggcaaagaggtgagaatacaagaaagctttagtgtagcagcttagtagctacacatttttccatggtgccttccaggtgggcttgtgccttctgagggcatgagcatctgatgacctctgacatgtgtgtctctcctaggagctcctacaagttgtggaagccatgaagacactgcttttgaaggaacgacaggaaaagctacagctggagatgcatctccgagatgaaatttgcaatgagatggtagaacagatgcaacagcgggaacagtggtgcaggtactagctgagtgacccctcttgctctgtcacctgagacagagggtgggaagtaaggagttaggtggagttgtgcctcaagatctgttccccaagttcactcctcagaaccttcacttacctctcttttctcctctgtttctgacagtgaacatttggacacccaaaaggaactattggaggaaatgtatgaagaaaaactaaatatcctcaaggagtcactgacaagtttttaccaagaagagattcaggtgagttgccctgagccagctccaattagctgctcagatttccatcactagcttgcctgaagtaaagagattttataaactactccagtaagggcaggaatatataactcccttttctctattccccatagtgctttgggttcaatctatgtttggtgaattgattaagggtttagttggccaggaaatcgtattaagtgctaacaacaggttttcaagggatcagtgtcacaagtgctttgtttgttcagtcatctgtcttagcaatatttttctggctctgcaaagaattgtgctctctgcttccctcttaggagcgggatgaaaagattgaagagctagaagctctcttgcaggaagccagacaacagtcagtggcccatcagcaatcagggtctga

SEQ ID NO: 14677 - DNA, 1093 bp, Homo sapiens
gggtttgctcaaggagtcaagaggagggcaccaagttttccttttttctaaatagctctggaaccaggcttgtaatccatagcatcaccgactctgcaaaggatttcattttggggtacagcagggtgttttaagtgctgtgacttcagctaatgatcttttcttcagccccaccccctccccactagctcgatctagtatattggggaatgcaggtggggggtgtcaccatattttttctgagctggcctttttttctcatcagattgtccaggctatattccacctgcctcttttgccctcttgagtagagttgcacacagcacatgggcaactgaagcagggttgaggggctctctctctctctcctctgctgatgggacccttttcccctcaccctctgcccttctaagtcatagactaggtaggaaggccctatattggtccccagcatctactgaggcagacctgcaacagaagtggcattcagtccccagcagacatgggtgagctcaccccagcactgctgttgggaaggtgactgcaggaaaccaattcttacaagatccaggcccagcctttttgacctgcttgagagggaagaaggggtgtttagcatttaatagtttgcttgtcttccactcctgccaggaagtgtttatttgcctctaattgggcctgagagaccatagggaggttggggctcactgagggattggctgaggatgtataaagcaaaggctgtgagaagcagttgggagtttggttgtcattggattgaatttacttttttgtttctcacccgcaacttgagccaggacagctggtccaagtggccacagtgatgggtttaagtaccttggtagggctggcaccagtggaaacacatactgaagctgccaccacaatagcttgtgaggttttatccagctgtggttagaccctgcatgaccaaatttgacctgcccttgtttatggcaagaagggcatttttctcttcaatttccagggtttcctaggacccagttcctcatgtaagggaggaagaccaaggtctttgtgttttcttcctcatggaattgaacctgacatt

SEQ ID NO: 14678 - DNA, 1255 bp, Homo sapiens
gtcttcttaagcctctggccctcagaggctcctccctatctcctggctagttaccactaggctaccaggtctctaggggcctgagagaggccctctagagaatccagggaaactgtgagcccaggagttgcccatctatggtttcattcctcccctggctcttctccctcttcaggccataatttccctggtgccaatttcttttcctcctggggcatcctcatcccagggctctctgctgtagattggctgtgccagcttccaacaggttactggcaatgccagtgagtttctgtaggccctaagctgaagaagtgaggcagtgattctgcctccatcctggtttccccaaagccccagggcaccatccttaggggagaaggtctacagttatcattattttaattccattactttcagtctggaaaactaagctagtcagaactgtcatcttgcttcccaatctaagaacctgtggccctggaacacttttcaagaattggttcattttgctttacacagtagatctgttccaacagttctgtgtaaaccaaatgctatttttcaatgcatttggactgctgaccatttaaaagcagcctatgattgcttctttttgtaaagcaagcaacctccctccactttagctgttttgactatttgaattttcacatattgggcttacccagagtggagcacacctccagggcatgtggctgacactgggtcaatgtctgcatctgtgctgtgtgtgtagtgtggttggccagtaggtgagtatccctgtgtgtgtgagtgaagccactccccaggctggtgctctcctcctgtgcccagtgactgcccagtggcagctcagctgcccttcactcccacctgctgccaaagtccctgtgctaatgggattacaaatacaaaaagtggaaaaaaattttcgtaaactttgttttatattaaaagaaaaatccataagtctgtgtgtgttaaacatgaggttctgcctctgtggctgtgtttgaaaaaataaagttttattagaataatccattttcccaagcaaccttgtgtactacagtgtcttcttcccttccccacaaagacaaggaagaagcagggtagaaggccacctaactgttccagccccttcatctaagatgtgggtcaacctttcaaaaaggggcagtatttggaccctaggccctttgccggccatggcaggatgttatactgtggcccaggcttctgctaaggcctt

SEQ ID NO: 14679 - DNA, 1582 bp, Homo sapiens
gtgacgaccaattggataacaaccaagggaattgcaggatgaatgacatcctgctatctctggttcaccttgctaaagatgccctcagtgtagtctgtggcagatttcttccccactgctggtgaactccagttacaagagcagatccatggaattgtaaaagagaaaagttgatggacccccaagaaatgttgatctggtgatagtgaggtccaagaaagagatcattagattgtcatgagaagccagcatcactaattcaggctatcttcctttcagaattcaagaaattctattctggcctcttctggatttggagcacctctccctagttcatcgcaacctttgacttttggaagtggaaggagccagtccaatggtgttctagccacagagaacaaacctttgggcttctcttttggctgtagctctgcacaagaggcacagaaagacactgatctctccaaaaacttgttttttcaatgcatgtcccaaactttacctaccagtaactacttcactactgtttcagagagtttggctgatgattcttctagtcgggactcattcaaacaaagccttgagagcctgagctcaggcctgtgtaaaggcagatccgttcttggaacagacactaagccaggctctaaggctggcagctctgtggaccggaaagtgcctgcagagtccatgcccaccctcactccagccttcccacggagcctcctaaatgcccgtaccccagagaatcatgaaaatctatttttacagccccccaaattgtcccgagaagagccttctaatcctttcctggcatttgtggagaaagttgaacacagccctttcagtagttttgcatctcaggcatcaggtagctcctcttctgctaccactgtcacctccaaggtggcacccagctggcccgagtctcactcctctgcagattcggcatctttagcaaagaagaaacccctcttcattacaactgactcctccaagctagtatctggtgttctgggctcagctcttaccagtgggggcccaagcctctctgccatggggaatggccgctccagctcgcccaccagcagcctcactcagcccattgagatgccaactctctcctctagccccacagaggagaggccaactgtggggcctgggcagcaggacaatcccctcctcaaaacctttagtaacgtctttggcaggcactcaggcggctttctgtcctccccggcagatttttcacaggagaacaaagctccttttgaagctgtgaaaaggttctcactggatgaacgaagcttggcttgcagacaagactcggactccagcaccaacagtgacctgtcagatttgagtgactctgaggagcagctgcaggctaagacaggcctgaagggaattccagagcacctgatggggaagctgggccccaatggggagcgcagtgctgagctgttgctgggcaaaagcaaagggaagcaggcccccaagggccggcctcggactgcccccctgaaaggtgatcctgctggggctatatttgggctttgctctggcactgggctcaaatgcc

SEQ ID NO: 14680 - DNA, 1263 bp, Homo sapiens
tttctttgcatttgtctcatccctttttacttcactttggcccatcctctttacttcagaggggttactgggaactggtatccattcccacatagcagacatttgtagacttgatgaagcagagagaatcacccctcagtttgctcctctctgaaacctacataaggattttaacagctctatcaaaatccattaacttgtgtggtgtgaggttatggtccagaagcgggtaaaacaaagtctcatggtaaaagcagctgttctcaataggaattgctatgttgtgggagctcaagaggtcctgatgaacagaatagccatatcgtgagagactagaggcaggtgatggctacattctggcttcttatgtttttcacatccatattcaaagttgttttgccatagtggggcacttcccacaagttctgcatggttcttagctcccaatggaagcttctttgctccttgctttcccttcctgtcaaggatggacataatgggtacatgcccaagcagggaaaggagtagcaacccaggtcagaacaaatgtctgtccccaaaagaatcatgctattggttcctgtttacacctcatgacaaacttttcttctctcccccttgccacagttggccagtcagtgctgaaagatgtaagcaaagtgaagaagctgaagcaatctggagagcccttcctgcaggatgggtcatgcatcaatgtggcacctcatctgcacaagtgtcgtgaatgccgcctggagcggtaccggaagtttaaggaacaggagcaagatgattctactgtagcctgccgtttctttcacttccggaggtacccaaactcctgttttcctcctttgctagttttcattagtgacacataacttccactctttctctgagtctataaacatgtttcatcatcttggtctttgctttcctcaactcctttgctctcagcgtctgtgaagaggctctggcatagtagtcacttagttgtttggattgtaaaatgacatgtgattttgtccttggagaattaaaattgagcagtgttagctgcagctctgtgctattccctgagtaattcctaacttgggttggttctatttgaaaccactattataagcagaaggactgcatttcatattatggatctacctgactgcttattcctcctcagtgctagagtaacttgagtcatgttaaaaagacggggaggtaagatttggagataatgtgaagcatctttgaaatagatataac

SEQ ID NO: 14681 - DNA, 1169 bp, Homo sapiens
taggtagtacttttctaggcaaatgttttaaggccacacaagttttttgatagtgtgataacactccctagtttaaaaactttagcaggtgcttgaggaaggggagctcatggcattgtcattttcaatatgaggaagtgttctcaaagttggacttgtcagatttttgtcctttcaccttaaaacaatggtaggtattagggcaacagaagtgatttccccagggtgagaatgaagcataacaatggagtagaagcatttcctttcactttagttgacatgtggaaatccatggattatacaactaggaaagaacagtagagcttcctggagaagaggaggccctcctcaggaaaccctcctattctgtctcagccctagagctggaagtttttcctagattgctctgattgggatatttttgtttccacagccagtgctggtttcgggggtacataaaaagctcaagtctgagctctggaagccagaagcctttagccaggaatttggagaccaggatgtagacttggtgaactgcaggaactgtgctataatttccgatgtgaaagttcgggatttctgggatggtttcgagatcatatgcagtaagtagctttcatatctagttcagtgatagcagactggaaaataagcatctatacgcccagctctgcccttgaataataaattatattctggggcataatgggacttgaaaaaataaatgaataaaaaattaaaaacagacagccgggcgtggttgctcgctcctgtaatttcagtctttttggaggctgatgtgtggatcacttggggtcaggagttcaagaccagcctggccaacttagcgaaaccccacctctactaaaaatacaaaaattagctgggtatggtggtgtgtgcctataatcccagctactcaggaggctgaggcaggacagtcacttgaacccaggaggcagaggttgcagtgagccaagatggcaccactgctctccagcctcggtgatggagtgagactgtctcaaaaataaataaataaataaatccaaattatacccacttggtgggggaacattctgccctggtgccaactgtgtagcttacatggcaatcacatgactcccagagcatgcctggacttaatcatgtgattccatgggctatgc

SEQ ID NO: 14682 - DNA, 1866 bp, Homo sapiens
actaaaccagtaggcttacagtcaaggtagaacgtacatttgcatggggctgctgtgaactgactttgctgtacaccttctctaggtgaagaacatcatttaccatgcagtgaaagatgcggttggcaccctcaaggctcatgaatccaaactggcaaggtcctaggcatggagaaactccaagctcctctgtgaagcaggtctttcactcacaacacttaacagggaacggcagggctctttgctggagcagaggcccttcacccagagccagtgtggtcagtattccaaactctccagccactctcttctacgctgcctcaacactgaaggttgacacaggaaagtcgtactgttcacacacacagtttgagactccaagccaagagtgccacatccctatcctgtggccttttggaaatccaaattgcctgaacatggcggggctttcctgcacattctcctgatttgagattcacgggcacacctttcttttcttttcctcttgtgcctagttaagtggaaatgtgtttggagataggggaaatcacataactggtacaagtatggggtaattgcttaaacatgcctggtggaagtctgatagcgtctctgcacgtgacctctgacaaagcccatcccaggagacggggtgaagctattccccacactctcctgtgaacactggagtcttgcaagacccagggagaacccactgcttttcccaggaggctccaggattaggaaatgtgtgtatttagtgaaaaataggtttgtagtgaaatagttactatttcatgaaagtagatatttttagaatttttgaaataccacagttgttttcctggattataaggaaaggcacattacatttagtcttcctttcgatataaaactctttgaagaaatatgatttttagaaatcagctacccattatagcacaaaatcagccaaagcagaatttttaaaaattggcttttttaggattctttttctccccctcccatcttagtcttaccttgagggaacagtcatatgagaaggaactttgtcacatctaagctgtggtgtgttccccatgtgtgtgtacaacactggtgactccaggaaccattttcacctattaccagtgttccctggggactcctcttaatgtttccaaatgggaaggacagttgatttccaacatgaggttttttgttttttatccagaaatattttcagcaaaactttccaactgagtggagtctgattaaggatttatttgaaaatggtgggattcattggcccataggtacattggaaaatgtatatctctccagctgtactgtagtgccctgcaggctgtttatatgttcacagttacttttttttttttttttaaataaaagtcatttaatgtagaatacttttaatttcactttctgtattttaattttgttgaagggctgattgggatttccatgttcttattaaaaatctaacaaatctgtttggagtggactaaattattcgtgtaccaacccttctaaaatcaacatcagattgggagttgggttggaggtgggggattcatttccaggtcttcatgactgtgctacacccagatatttttctttgcttgttgagactgtgccatgttagaaaaaaggaaagtgccagggtgaggtcagtatggtttggggaattgggggtaaggggaaggggccacatgaattagagggtagaaagagagacatgtttccccatactttatgctttgtgaatggagtgggaaagttggggtcctcccttcctgtggcagagtctggggggaagggtcatggtgtgtggcctcagcaaagttggacagtctgtggtgggat

SEQ ID NO: 14683 - DNA, 1099 bp, Homo sapiens
aggacaattgaaatttgctaaagggaaaggggaaagaaagggaaaagggagaaaaagaaacacaagagacttaaaggacaggaggaggagatggccataggagaggagggttcctcttaggtcagatggaggttctcagagccaagtcctccctctctactggagtggaaggtctattggccaacaatcctttctgcccacttccccttccccaattactattccctttgacttcagctgcctgaaacagccatgtccaagttcttcacctctatccaaagaacttgatttgcatggattttggataaatcatttcagtatcatctccatcatatgcctgaccccttgctcccttcaatgctagaaaatcgagttggcaaaatggggtttgggcccctcagagccctgccctgcacccttgtacagtgtctgtgccatggatttcgtttttcttggggtactcttgatgtgaagataatttgcatattctattgtattatttggagttaggtcctcacttgggggaaaaaaaaaaaagaaaagccaagcaaaccaatggtgatcctctattttgtgatgatgctgtgacaataagtttgaacctttttttttgaaacagcagtcccagtattctcagagcatgtgtcagagtgttgttccgttaacctttttgtaaatactgcttgaccgtactctcacatgtggcaaaatatggtttggtttttctttttttttttttttgaaagtgttttttcttcgtccttttggtttaaaaagtttcacgtcttggtgccttttgtgtgatgcgccttgctgatggcttgacatgtgcaattgtgagggacatgctcacctctagccttaaggggggcagggagtgatgatttgggggaggctttgggagcaaaataaggaagagggctgagctgagcttcggttctccagaatgtaagaaaacaaaatctaaaacaaaatctgaactctcaaaagtctatttttttaactgaaaatgtaaatttataaatatattcaggagttggaatgttgtagttacctactgagtaggcggcgatttttgtatgttatgaacatgcagttc

SEQ ID NO: 14684 - DNA, 2302 bp, Homo sapiens
atcttgcggtaccgagtagatttccagggaatggaataccaaggaggagacgatgaattttttgaccttgatgactactaggtagtcgacatgggtccggcaaaacgtgcctcaccctccagcatccaacccaaggagcatacccatggtggaatccaaacagatccctgccttacaattggaacatttccagaacttaatccatgagcattggatattgaaaagaaaaccgaaacaaaaccagacccagccctacactttggtttgtcatggtgtcagcgcagcagcctacaactaagttcctaaacgccactttggactaatttaaaaaagaatcccagtttttacttttactggatggtgaaattggttgctcttgtattttatgaaaaaaaatgatttttttaaccttcatacatagaagcaaaaatactttaactgctgtaaaccttcaaaagttaatagaagtgagatcatactggtttgtttcttattttgattggagaaaaattaaattgctgcatttcgcagtgacccatttacatggcattctcagcttagactgcgtaagaagaaatatatgtggtgaaatgttggaaccatttctctcttggtctctgtttaatgttgaaagggtgagctaataggaggcactttcaacttcactccctcacgctaccccgtccccctccagactggcagtttcaaggatgcaaattgcattgcaaaatcaaactgactcatgaagcatttgggccagtgcactgtttacttccatctgtttgcagacacatttgtgcccggcgtttgggagccctttgtatcaatgttctgacaagggtccctataaccttaacctactcgaaaccggtttgggatggatatgatggggcttctgtgctattgctgggattgggagaaataaaacatgcaatttaagtggaagcgaagaaatttaaagaggattttattttgcttgggtcaatccttgttaaaagggaggtggatgtgttttccttgtgttggatggcatgagattatgtgaatgttttgatttattaaaatgaactgcaaggtttttcacaggaacgacagacatgtatgactgcatgtaattataaactcctgacctcctggtggggttggagcatctgtttcaaatgtgggacttacaagcacttctcacatgagaaattaggggcgggtgggaagggatgggacacagcttctggcaccatggatttaagaccatgttggatccaaaagttggcctgaaaccctgaagcttatgcttcacagctgggctgtaagtcagacttgaacccagctgatatgcaaggtcatggcgtgcccagggtggtgacagttgaacaaagtgtatagtacgtgcccagtggtagcgatggaaaaaagtataccaaatggactttgaaggaccaaaggttttaaaagtcaattggtatcacctccacactgactagggtagtggggtgcatttggttttcaaattgggtacttttaacactttagtgcctgactgctgttctttactgacttgattcagtcactcgtagctttattggtctgaaccagctccttgttcccaggttacagacctgcctatcgttccaataatcctgtttcacttgaatgaagggagtatgtcttaaatgtaaagtttctggttctcacactgtactctgaggtccaaatactgtctgtcaatgtgtaacctgatgtctcaaccccctgtgagaagagtccattatttggtgttcaccaacgtgggagacttcaccggaacaggcttttttgctttgggctctgctatttgtttgcagaacacccaagagcgagcaaacatgctctcttcacagcagtaccttagggttttgccattgtaaatgggtctgatgtgatatgacaagaccagagaaattggatgtaaatttacatttttgaatatgcttgttgtttcacatgatacatttagggtatgcagctccttttgtagtttttatttttactatttaagtttggaaatgatgccaaatttttgtatttctttaatcaatgtgttctcttcggtgatatatattgcattatatattgatgtgtgtatcaatatatattgatatgtattacacttacacatacaaacacatataagagggggtgaaaaccgtagcctttgcattctctatagcctctgcagagagatactaagcagcaaaatcttggtgttgtgatgtacagaaatggagaagagtattaaaccatatttaagaatatactttgtgtg

SEQ ID NO: 14685 - DNA, 1666 bp, Homo sapiens
gccatttgtggaatttagagtgagattagagttgggagatagtctcctgccgtcttgactctactttggcattggagttagtgtcaaagggaaggaatccagaaaccaccagtagggtagaaagtggggagggggagtggaatagaaatgaatgatgaggacatatgtgggtccctcatcttggagtgcaacaaagagcaaatggttagctctaacgttaaatctgagtggctctcaaatgttttcttaacagatggcatctgagcgagaaggctctggaagttctggcactggggaacaaaaggaagatcaaaaggaggaaaaacagtaataatagcagaaattttgaagccagaaggacaacatatgaagcttaggagtgaagagacttcctgagcagaaatgggcgaacttcagtctttttactgtgtttttgcagtattctatatataatttccttaatttgtaaatttagtgaccattagctagtgatcatttaatggacagtgattctaacagtataaagttcacaatattctatgtccctagcctgtcatttttcagctgcatgtaaaaggaggtaggatgaattgatcattataaagatttaactattttatgctgaagtgaccatattttcaaggggtgaaaccatctcgcacacagcaatgaaggtagtcatccatagacttgaaatgagaccacatatggggatgagatccttctagttagcctagtactgctgtactggcctgtatgtacatggggtccttcaactgaggccttgcaagtcaagctggctgtgccatgtttgtagatggggcagaggaatctagaacaatgggaaacttagctatttatattaggtacagctattaaaacaaggtaggaatgaggctagacctttaacttccctaaggcatacttttctagctaccttctgccctgtgtctggcacctacatccttgatgattgttctcttacccattctggaatttttttttttttaaataaatacagaaagcatcttgatctcttgtttgtgaggggtgatgccctgagatttagcttcaagaatatgccatggctcatgcttcccatatttcccaaagagggaaatacaggatttgctaacactggttaaaaatgcaaattcaagatttggaagggctgttataatgaaataatgagcagtatcagcatgtgcaaatcttgtttgaaggattttattttctccccttagacctttggtacatttagaatcttgaaagtttctagatctctaacatgaaagtttctagatctctaacatgaaagtttttagatctctaacatgaaaaccaaggtggctattttcaggttgctttcagctccaagtagaaataaccagaattggcttacattaaagaaactgcatctagaaataagtcctaagatactatttctatggctcaaaaataaaaggaacccagatttctttccctatttctgcttttctgtcctcagtgtactggcttgtcccaaattctctgatgtagttctaataattatcatgtgctgacaacctgagcagaaaggcaactacatctttattcaatgttaagatttcccaaaagtcttccagcacatttcccttatgtttcatggatgaatgtcatatgccat

SEQ ID NO: 14686 - DNA, 1123 bp, Homo sapiens
cacaagggaagaccatgccccatgttagcaatgcaaattattgctacagctgcctatgataatttggtctttagttgataatatacaagagaatgtggacttctaagtccccttgccttgcatcctctgtttcaaatgatttaatgtgttgtgtaggaaagcagataataaaacttaggagaatccttcccagatttacaagggtcatgaaggagatacttctataggtataaagtgtatgagtgttagaagatcattagcaggaacccaagtacgaaatggttatttgaataaacattctcagatttgagttagcctgtcttgagatctggctgggagcgtaggacacgtgctcccttttgttctgctcaggtagttcccaagtgtgggccgacaggttctttttccttgatgttcaggttcagcagactgtacaggatctttttggcagagccccaagtaaagctgtcaatcctgatgaggctgtggccattggagctgccattcagggaggtgtgttggccggcgatgtcacggatgtgctgctccttgatgtcactcccctgtctctgggtattgaaactctaggaggtgtctttaccaaacttattaataggaataccactattccaaccaagaagagccaggtaagagccatcacttcctaccttgtcacatgggttttaggttctatgacggatgtaattgcagccactttcatgagttttttctagaaaacttcatttttatctgttttacagtttagaatattaaacagttaactgtgggtggtgagaatcctgtgttttgttttttgtttttttgttaccagaaaagttcttacatgttagctggtagtgatgattataagaaggacatcagtagtctcctccacaggattaacataatttgctaaaagggatctcagtcatttgagactgaatttcctgtagtcttctgttctcaaagacagtaaaaagggtagtctggaccagacttaggggagtgttcttatcttatggatgaatgaagggggtggtatgagggtgccgagataccaagcagggctacttggacatggcttgttcttgaagtaggaattatttctggctgggcaccgtgg

SEQ ID NO: 14687 - DNA, 1218 bp, Homo sapiens
ttgggacctttactaattgctgagatttgtgtgaataaactgtcaaaagacttcagaagcaaattatcttaaaatgttttgcaaagtttgaaaacagtggcagtgtgatctccagataaagctaagttcattgttaacctctttctggaacatcttggtgacatatagtagagacatctaacttgtctctaatcattttttaatttgtaaaatcaaactaaaaacctaatgatcatatttgagaaattaaaatatgtgttaaataattctctgtacacattaagaaagctgaattattttggaaattaaatatagcatcattgctgtatatcttaaatatggggaattgtatgttaatgttcagtggaatctcatgtgattttttaaaagaataacttaatcttgctgtctttaaagatattagtttgtcattttaattgactccagtttaatgttaaaaatgaaacttttaggttacaacccttgtaaacaccaatagtaaagggccctctaataagaagagaggtcgttctaagaaggcccatgttttggctgcatctgttgaacaagcaactgagaatttcttggagaagggggataaaattgcgaaggagagccagtttctcaaggaggagcttgtggctgctgtagaagatgttcgaaaacaaggtaggtcattactgctttttaggtaaagagaggcaggcctttctagaaaatcagtgtttgaagattttttttgtggtcagtattctcattcttatgcttgccaattgctcagtaacttacttagttattggagatgtattaagttggactggctcatattttaattctcattcttatgcttgccagttgctcagtaacttagttattggagatgtattaagttggactggctcattttaatcatgagagatgcttgcagagggacatctggagaatctgaatccacttctcttgggtatttcaagtaatagttaagtcttagaaatgttgtaacacaaattgataggaaagaaatgggaccgaagtttacttttcatcctgtgtaatacttctttttagttcatgctgaagagatgggtgtgataaaatggaaaaatatctacctactctgaaaatactctagaaattgtcctattgtgtcagaatagtatgttaaatcagccatgcatatttgaactggttggagcttgacataaatctgggtataaa

SEQ ID NO: 14688 - DNA, 1157 bp, Homo sapiens
ctgttatggctgtacacatcatgtagttgggatgattaatgaagtgtggtggttctgcataattgtggccctgtttctgtattctatggatgtgagagtagattttattagatatgttttttctcctgttcaaatcttgaatttttcttttttttggatacatataatgcccttttttttttaaaggaacattattagatcaaagggaaatatttttaagcctcttgatatatagtgccaagtcactttccagatattttgctttcaccagcaatatatgaaggtgctttttttagtgatagctataaaacaaacaaaggaacagcaaacaacaacaaaaatgaaaactcttaaactaaatttgtgcatgaaatatacaaagtttggattatttttatatttttaaaaatgtagatcagttatttgagttcattcttgctgagtttgtttttcattctgtaaaacaggtgatttgatgaaggctgctgcaggagagttcgcagatgatccctgctcttctgtgaagcgaggcaacatggttcgggcagctcgagctttgctctctgctgttacccggttgctgattttggctgacatggcagatgtctacaaattacttgttcagctgaaagttgtaagtatacaggcctatgtctgtaatttgttctatcacaggaagattgctactggccttccttagttcagtattccttaggatttagtttggttttgaatttggtttatctcaatggaccagagatgtttttgtttaatttccacttactcctctattccaagtatatatcatcctggctctgttctgagccagtgttgtcttggctgtaatgaagaacttgtagcaaagatactgttttgactccttccctttttccagtaatgattaaatattttccttgtagagttctggagttgagaaaccaagatacattaaattttgtacttttatttatttatttattttttccatttaaccctgagtggacacagcacatgtttcagagagcacagggttgggggtaaggtcacagatcaacaggatcccaaggccgaagaatttttcttagtacagaacaaaatgaagtttcccatgtctacttctttctacacagacacggcaaccatccgatttctcaatc

SEQ ID NO: 14689 - DNA, 1101 bp, Homo sapiens
tgggaggccagggcaggcagatcacctgaggtcaggagttcaagaccagcctgaccaacatggtgaaaccccgtctctactaaaaatacaaaaattagccgggcatggtggcatgttgcctctaatcccagccacttgggaggctgaggcaggtgaatctcttgaacccgggaggcggaggttgcattgattccaagatcacgccactgcactccagcctgggtgacagagcgagactctgtctcaaaggaaaaaaaaaaacaatcatgtcttacaaagaaatagtgaattgactcagtgatagcaattgagccccacacacagtgaaaccagcccaggcctgctgtgggccaggcagcccagcgtgtgcaccagtgaagcagaggctcgagacaaatgctgagtgattttgactttattcaccatactgttcagaacactgcacattaaaatccagaattctgggcctccgtgcacctggccaagaggctcagggtggctgggggctggtggcccagagatgtgtctgacctgtgatctttgtctgggtggcagacccctgaggagttggatgactctgactttgagacagaagattttgatgtcagaagcaggacgagcgtccagacagaagacgatcagctgatagctggccagagtgcccgggtaaggaagcgctccgtggggcagttcagcttgtgctgccgactttccctgtcccctttcttgtttccaggaaaacaccctcagtattcagaacaccgtttctctctctctgtctctctggcagtagactgaagttaaactaagttgtggcacctgctagtcaaatgtagcctcctcagctagaggcagaccaggtcctgggcctcctctgcagtgccctgagctttagtttatgatagagccctgggtcagggaagggctaagatttagtcaatgcagtgtttgttgaaaggatcgtgaaatttgaaaaagattgctgcctttgtccatctcgatactatgggtatgaactatttaattattcatgggtttaaaaaataacagtggtacattcaagaaagccagtcagagccattgcattcatttgagtcatta

SEQ ID NO: 14690 - DNA, 1651 bp, Homo sapiens
gtccacgaggctggaggtcaggccggtgcttcttaccacccctgtctgcctcgtaggtggacagcgccatgtccctgatccaggcagccaagaacttgatgaatgctgtggtgcagacagtgaaggcatcctacgtcgcctctaccaaataccaaaagtcacagggtatggcttccctcaaccttcctgctgtgtcatggaagatgaaggcaccagagaaaaagccattggtgaagagagagaaacaggatgagacacagaccaagattaaacgggcatctcagaagaagcacgtgaacccggtgcaggccctcagcgagttcaaagctatggacagcatctaagtctgcccaggccggccgcccccacccctcggggctcctgaatatcagtcactgttcgtcactcaaatgaatttgctaaatacaacactgatactagattccacagggaaatgggcagactgaaccagtccaggtggtgaattttccaagaacatagtttaagttgattaaaaatgcttttagaatgcaggagcctacttctagctgtattttttgtatgcttaaataaaaataaaaattcataaccaaagagaatcccacattagcttgttagtaatgctctgaccaagccgagatgcccattctcttagtgatggcggcgttagggtttgagagaagggaatttggctcaacttcagttgagagggtgcagtccagacagcttgactgcttttaaatgaccaaagatgacctgtggtaagcaacctgggcatcttaggaagcagtccctggagaaggcatgttcccagaaaggtctctggagggacaaactcactcagtaaaacataatgtatcatgaagaaaactgattctctatgacatgaaatgaaaattttaatgcattgttataattactaatgtacgctgctgcaggacattaataaagttgcttttttaggctacagtgtctcgatgccataatcagaacacactttttttcctctttctcccagcttcaaatgcaaattcatcattgggctcacttctaataactgcagtgtttcccgccttgggcttgcagcagaaaaacctgacaacatagtgtttgctaaggcagtaatttagactttaccttatttgtgattactgtagtgattgattgattgattactattaactacaaggtataatttactatcaccttatttaaattttatgaattaatttgaatgttttttacactaactaacttttcccaataaagtccactatgaaaccacgacatccaagagcccaaagtcgtcttctctgccttcaagtcatagatttgcccgcagtatctgtggtgctctgggccctcccggtgtccgtctcttccaggatggggatgcccgggagggaaactgtctgtggctctaggctgcacggctcgtgccaacccatcagggagggccatgcccgttgtcctattgagtgccccaccctgcacccccaccttgggaattcacatgtccattccttgaggttcatgtcaacctcggaggcatccctgtcttcattatagctgacccctctcctgcgtccttctgtcagcatatcccttctgcatccttcccgtcacacatacataccaagctatgatgatt

SEQ ID NO: 14691 - DNA, 1181 bp, Homo sapiens
tgaatgaatgaaaaggagagttttgagcagggtcttctttttctcctgttgcccccttcctctgtcctcagtctatttgttcatttcttcattcattcaacatatattttttctttctaggctggtgtgggggccaatggttgggaatggggtaaagggaaggtttccattgagttgaggctgggaggcatagtcagatctctccttcttcttcaatacctattttgtcctttattttggaaaatgttcaaggtattatcaataccagcatcctcctcctgaaaattgctgccttctacctgctttcaccaaatggttttccttatgccaagggagggtggcagagggagtagggatgaagcctcttcaactcaggggctgtgtaggtatgtctccgtgcactgtgagtggtggggctgtggggagccaagcttgccttgcctgggatataattcccataattgaaggcttggctttgggctaggctcccaaagtgttgacatttccggaggactcacgccagcaccagaccttccccgcagcccacgttctagcttgttactgctattgaataggctccctgagtgcctctcttcaaccgaagaagaaagtggcttttattgagagcctttaggaggggttcaggagactggatattgggtattccagaaaccctgagttgagcaaatgagagattcgtcaaagccatgtgcctttggcttcctcattttgctgctctgcttgggtctggcttgattgacagcttgcgacggttgctcctacctgagaagtggggagtggctataataatttgggcatgagaacaggagcatagggggagggacatatttagtagataaaattgacaatagttgatgatggctgagtaggggatagaagacagggaagggagaggagggattgagagctcttgggtttccagcgtgtgcagtagaactaggcagtcctggaggaggatgagacgtgtggagggaagagcaggagctgagctttggacttcttaagtgtggaacatacaagaggagagtacagcaggcatatcacccagaagagatggcaggaagactacctaaaatctcaggctgcttttctgttgaagttatccgctggggtttaggccactatgggtagataatacagtccaaatcaaattctgttta

SEQ ID NO: 14692 - DNA, 1112 bp, Homo sapiens
acttgagcccaggaagtggaggctgcagtgagccatgattgtgccactgcactccagcctgggtggcagagaaagaccctgtaatataatacctccattctacaaatgagactgaggtatagagaggtttctcgcccagtatcatttggctagacactggttaggggatagagccaggctccctgatatttgtttaatcgactcttttgctactattgaactgctgtggtgtataagtaacaagagatgaaaacaaagctaaacaaggataagctattggttttattgtctgctattgtttctgtggcttaggcctaagttaccgtgttttgaggggagggactctgagctgcacacgtgttcactgttggctgactaacctggagttgtttcattgcagagaggctggctgtggcagatgcaactgcaggtgagtgcaaccccttcagctctcttggctccagctgtaggcagctgcctaggttgtcttgtacctaggcaagtgttacactgctgggagaacagcagccaatagctggttggcattctggccctggttcatgccaactcttgtgttgactaccccaggatgccagcatagttgcttatccattaaggcaggcgtgttttttggcttccctgggccacattggaaggataagaattgtcttgggccatacataaaatatagtaacactaacgataactgatagctaaatttaaaaaaaaattgccaaaaataactcctcataatgtgttaagaaagtttaccaatttgtgttgggctgcgggttggaaaagcttgcattaaggtttaatctgtgagagcatgactttttgcagagaataagtccagaccttcctgaatagttctggtccaacaggtttgggtagcatgaagttacttgaatcataccttggaaacagaacaaagctaatgggaagagggggttggtaaaaatagacggaaaagtcacacctttatttttagtgcctaccaagggctcaaagggggccagatacaatgggatttttgctaatttcactgaaattaaagtccatggctcctactacccaccataaaagctagtcatgacaccctttgtagaggg

SEQ ID NO: 14693 - DNA, 1112 bp, Homo sapiens; identical to SEQ ID NO: 14692

SEQ ID NO: 14694 - DNA, 1558 bp, Homo sapiens
tcctttttcttggcgttaccatttttgaagcaaagttaacctagctttctagtttgagctttctttttggccgtctttaaaaaaatttttttttttaatctataaaatagacaagagctagttctacaatgtccaagtcattccagcagtcatctctcagtagggactcacagggtcatgggcgtgacctgtctgcggcaggaataggccttcttgctgctgctacccagtctttaagtatgccagcatctcttggaaggatgaaccagggtactgcacgccttgctagtttaatgaatcttggaatgagttcttcattgaatcaacaaggagctcatagtgcactgtcttctgctagtacttcttcccataatttgcagtctatatttaacattggaagtagaggtccactccctttatcttctcaacaccgtggagatgcagaccaggccagtaacattttggccagctttggtctgtctgctagagacttagatgaactgagtcgttatccagaggacaagattactcctgagaatttgccccaaatccttctacagcttaaaaggaggagaactgaagaaggccctaccttgagttatggtagagatggcagatctgctacacgggagccaccatacagagtacctagggatgattgggaagaaaaaaggcactttagaagagatagttttgatgatcgtggtcctagtctcaacccagtgcttgattatgaccatggaagtcgttctcaagaatctggttattatgacagaatggattatgaagatgacagattaagagatggagaaaggtgtagggatgattctttttttggtgagacctcgcataactatcataaatttgacagtgagtatgagagaatgggacgtggtcctggccccttacaagagagatctctctttgagaaaaagagaggcgctcctccaagtagcaatattgaagacttccatggactcttaccgaagggttatccccatctgtgctctatatgtgatttgccagttcattctaataaggtgagttaactcaacagatgcttctaatttcttttacattgtagtgcctatttacctatatctttgactctaattctgtagtctgatgacattgagttgatcaagcatttttaaacttttgagaacacttactttatttggaaggtaattgtttttgagcattttaaaccagggctttacattaatatattctgcctagattacttctggccacaaagctatcatccactgagattatcttgttggtttttggcatcaatatgttcttcttaatcatatatttaagcaggttttttttgtctgctttgttgaattgttttaagtattttttttgcagtcaatgtgctctgccattcaggatgctagatttcagctctccatctgtcttgattgctgatttgtatgtagtaaagatgtattcttgaacaattctctttttttccttatctgtggctacagggaaagagttaatgtagagccctggtgtttgtttcagtatgtttcatattttagattag

SEQ ID NO: 14695 - DNA, 1161 bp, Homo sapiens
ggaggccgaggtgggtggatcacgaggtcaggagatcgagaccatcctggctaacacagtgaaaccccgtctctactaaaattacaaaaaaaattagccgggcgtggtggcgtgcgcctgtagtcccagctactcgggaggctgaggcaggagaatggcgtgaaccagggaggcggaggttgcagtgagccgagatcgcgccactgcaccccagcctggtcgacagagcaagactccgtctcaaaaaaaaaaaggcaaagacgctatccgtttcccttcaagtaaagcagacagaagggatgctgcaggataattgttgcagagtaaatttgtctttcttaacagcgtcgttttccagggagtatggaaggttttgtcactctagatgaggttggtgatgaggaagattcggaacttcagaaacttcgtaaatcgggcatggcatttaaatctggtgacaaaaatgatgatggtttggttgaaattaaggtggacaagatcgaggaacttgatcaagaaaacgaagcagcgttggaaaatggaattaaaaatgaggaaaacacagaaccaggtgctgaatcttctgagaacgctgatgatcccaacaaagatacaagtgaaaacgcagatggtcaaagtgatgagaacaaggacgactatacaatcccagatgagtatagaattggaccatatcagcccaatgttcctgttggtgagatttaagtctttgttcttcaccttcctcactctcctcaaaacaaactcttaggttttaaaataagattttaaagttggtcttacataagctgtgatagcattttaaatttgctttgtttctatggggaacaatttataaatcttaattgatatattttcctctcatgcatgtctctgattttgtattattttctgttgttattccacaatgtgttcccttttttcgtaaaatttcttgcaagttacacgcttttgttttgcttttctgtgttgtttttctgtattatatttctttttttaagaatacagttaggtgagacctcaaacatcaattaggtaaaagcaaaatatggttcggtttttgttttttatcttaggctgtattggacttctcaaaaacatgttgtttcatttaaattatgttgacaggtgaaattgtgaata

SEQ ID NO: 14696 - DNA, 1754 bp, Homo sapiens
ttttgtgtgctaatgaggattaactaattgttgaaaatattgacaaaattatagtttaagtccctaaacttggatataggatatttgattttggaattaatccattttgctgcatttctcttaggtgacttaatggctgtaattctctttctttatagaaatttctgaataaattggcagaagaacgcagacagaagaaggaaacttaagatgtgcaaggagatttaatgatttcaaagaaaataatggttctttgtttttaatgttaaccttttttaaatacaatactgatagttagaagaaaactattgtactcttttgttttagtggagaaataatagatgtctgttcatgtgttaagtgttatagcaaaaaaaatacacatatggttaagttaatgaatagtttttgttttatcagaatggcaacagacagaagtactttgtagagattgacttcctaagctacttaagacaacttgcaccactaagaaaaaaatgtagaaccatttggaaaaatgaaatttagtagttccaagtttcaaagaaatgtcaacattttattccattcaataaagaacaaaaccaatagtgtttttattactttcatctgaaacattccatgttttaatctgagccttgcagactttcatttggagtttgaacccgttttggttgcatttcatttttggagaacttaattaacgtgagattggcaattgaaatgcaggtgcagttttctgttaatgtcatgctgttgtttaggtaataagaaatattaagtaattggctttagattttgtaatttttttccctgagttcctgctagatttcgtattctagtagtcaatgtattttcagtgaaatgcaaaaatattcccgttatctttgaccagtattaatttttgagatcttactgcttgtcacttgaatcccgtgattgtcatacatctctggtataagcaacatttgatttttgaagtgtgtagaccatctcttcatattttcaagatgtaattttacatttctgcatttttaaaacagtttggccataatcctagatgcacgcttctaattcatgtacctgcacatgtgacctttgtgaacagaaatttgcatgtataatttgtgtttacttgtaactttctggttatatactgcttatatctgtggattcaagttactgaagtgaataccaataaaaagaaaaccctaggccatgttaattggttatacatgtttggaatgttaaccaacgtatttgtcagttgtggtttttattcgctcttaaactttgtgcatgctttaacaatttattacttttaaatctagagtgaattctaaagactgccgctaaagatctgagttttaaaaatgttgttgctggtggatttcttgttcctgttacataactaaaagtgaggccatttgtggtttttaaaaaccttatgaattaaaaatgctacaggtgaacaaacagaagcttatgtttagagatattgatgacttaacagtacaattggaagtaatacggatgagcaagaattagttctgcagcttttcaaaataattacgtagagactcttggtatattggattatctgttgtaaacaatttttttttcttccctgacacagggtctcactctgtcacccagactggagtgcagtggcacagttctctgcaacctcagcctttgggctcaaatgaccctcctacctcagtctcctgagtagctgggactacaggctcatg

SEQ ID NO: 14697 - DNA, 1160 bp, Homo sapiens
gaacccgggaggcggagcttgcagtgagctgagatcgcgccactgcactgcagcctgggtgacagagtgagactccgtctcataaaaaaaaaactaaataaataaataaaaatacaaaaaattagttgggtgtggtggcacgcgcctgtagtcccagctactcaggaggctgaggcaggagaatcgcttgaacccaggtggcagaggttgcagtaagcctagattgtgccactgcactccagcctgggcgacagagcaagactccgtcacaaaaaaagaaaagaaaaagttgatgtaatttaatatgatatatagcttacatctggttcttcctttttggggtttagtatagtcttacagactgagttcttttgtctttttttttttggaagatgtttttgcatgaggatctagattgaattagtacctgaaactgtgttaatgaacttgcttttttatgtacttattttccaggtcaagagcaatctgaatccaaatgcaaaggagtttgttcctggggtgaagtacggaaatatttgagtagacggggccctcttttggtggatgtagcacaatttccacactgtgaaggcagtattagaagacttaattgtaaaagctctcttgtcactgtgttacacttatgcattgccaaagtttttgttagtcttgcatgcttaataaaagtgctgagactgttactaagtaaaaagctgtcaaacatttactgaaaatagaattggccccatggcttgatgtgaagacagcaaggaaagaagcaccagtcaagttgtgaacaagcaccaaattaaaagacctaaaccttaccaaattgtctttttttgaggctaatctatcacttgttaatgtctaaactttaaaatcagtacatttaatttgagttccaactgttaagcatatttctcagacttaaatttgattatgtccccatcaaaaagaatctccattttctgaaggtctgttagttaatttgagataatttgttaaaggcaagtatgtcatattactgaggctacaagttagtcagcagatgagtgccagtccagccttttctggtatgttattgttagaaatattgagttctaatgttacatctgaggaagtatgtaatttgagaattgtaacttctaagggattca

SEQ ID NO: 14698 - DNA, 1235 bp, Homo sapiens
aaatacaaaaattaggcgggcatggtagcacgtgtctgtaatcccagctcctcaggaggctgaggcagaagaatctcttgagcctgggaggcagaggttgcagtaagctgagatcacatcattgcactccagcctgggtgacagagcaagactctgtctcaaaaaaaaaaaaagaaagaaaaaagaaaatacagtgaactccagatgccactggaacatgggttccagcagcctggccaagctatgtgtcattctttttcctcatgatacccaggatgggctttgtgaggaggcactgtgccgttccagtggctttctgttacagctggccacaccatacaagcaagtacatcatctgcatgcactgctcctcacaggagcttgcacttcattcatatttattctgccctcatttaaggtataagcttagtgtcctaatatatttatttttggaaagggccaagttacaaaacatcttttttttgaggctgcactgttgatatgtcatgcagtggccaccaagaaagtatatactcgtgttagatactgattacatcatttacatcacgctcagtatttggaattaaagatgtgaatgttctgtgaccagagtagggatgacacaaatggaatcagctcctggtggactaagaatcttgaaaaaatctggccacctcatccactacatctggattgagtgtactgcaacaaagaaaaacattaaacaattttatattaaaagaatggctacttttccttggttcttttacctttgcccatggcatccttggccactgcacatcgcctgactcccttggagccacttccgactaaagaagcttttgacgcctgctccagtcttccctcacccgtcagtgggattatttgcatttagaatagtagatagcattgttggcatcagttccacattttctatcagataacagcagctgcagtacctcacagccaatatacagatcaaaactacacttagcatcagaaattcaggtgttatcccagttccttgctggctttggtcctagtggcccatatttaggaaagttttggtttaaaaatatagtaaatgatatttacatgatcctaactggtcatgatagctttcatttgaaaaagaaagtgagatgagattcaattcagcaatgattgagaacttactctgagccaggtgggctgggtttttggaatgggggtcagggaacaggtgaggcccagca

SEQ ID NO: 14699 - DNA, 13088 bp, Homo sapiens
tgagagagtcttgcagtggcgcagtcatggctcattgcagcctccacttctcaggctcaagcagtcctctcacctcagcttctggaagtgttgggattacaggtgtgagccaccacacctggctctaaatatttttcattgagcaccttatcagtgttctaggccattctagtcatttttcttgtttctttagactgttaatttatgttcctcatcttgctcatactcattatcatattatttataaatgaatttggattagaaggggaatgatatgttactatggcgtagatacaatgtagatattgttacatggtgacttttttcttgttatttttcagtgttccattggcaagctacaataatggggccagtaagtattcagattaatttcagaataaacagtttatgtaatttactcattttaatcccacttttcttgttatcaacagaatgacagtccctatcagggtggagtatttttcttgacaattcatttcccaacagattaccccttcaaaccacctaaggtaattaattggaatgtggcagtttttaatgtactttctataatactaataaactagtttacagaaagtttcctttctttctgtaggttgcatttacaacaagaatttatcatccaaatattaacagtaatggcagcatttgtcttgatattctacgatcacagtggtctccagcactaactatttcaaaaggtaacagtgggtatttgatatcaagataaagcaaccgtgtcttttgtctttttagagttatttatttttgaaaagattacttatgtttcttttaagaagagatagcaattcttcttaatctgaaatggaccttgagaactgaaaacgagttggatttttcaagcaaaagtattccttggtgtagtgactagtctgtcagttgtgctactctagcataggttagaagatgaacactgggcctggtgccgtggctcatgcctgtaatctcagcactttgggaggccgaggcgggcagatcacaaggtcagcagatcgagaccatcctggctaacatggtgaaaccccgtctctactaaaaatacaaaaaaattagctgggcatggtggcaggtgcctgtagtcccagctactcgggaggctgaggcaggagaatggtgtgaacccgggaggcagaggtttcagtgagcagagattgtgccactgcactccagcctgggcaacagagcgagactctgtctcaaaaaaaaaaaagaagatggacactggtatgaatgtttttttagagcataaagtagagcacaattaacatctcttccaaccttgagattcatgaatggaaaaagatagatactattgcagaataggaaatagaccagccctttagacaaatgcctatgctgtaaacatagacgttaggttcttgaagaacaaaatataggtaaatattttaccagctcttgtctttaggtttctgtatcaatgaactgagtgatgtagttgttgtcttaatgtgttgatttgaaattgtacaacccttcaacattattcccagatgaaatcacagttgcgttacaataatctagattttttttttttttttttttttttgagatggagtctcactctgtcgcccaggctagactgcagtggtgcaatcttggctcattgaaacctccacctcccgggttcaagcaattctcctgcctcagcctcccttgtagctgggattacaggcacccgccaccacgcctagctaatttttgtatttttagtagagactgggtttcgccatgttggccaggctggtctcgaacgcctgaccttatgatccacctgcctcggcctcccaaagcgctgggattacaggcatgagccaccgtgcccagccaaataatctagaatttataaaggaaaacaaaaacaagtatttatggcctggcacggtggctcacgcctgtaatcccagcactttgggaggccgaggcaggagaatcgcttgaacccaggaggcggaggttgcagtgagctgagattgcgccactgcactccagcctggccagcctgggggacagagcgagactccgtctcaaaaacaagaatatttatcagatctcactgctgtactctgaaaggtgataaaagagttcactggatgtacttttgtgaaaatgaaatcagttgtttaagagaaaaatcaaatatggtaatggattaatatgtttaaaatatgaagtacaaaaatcagaaaaaaattcagatcccaatagatgaatggacacaggggaaccaaagaataaataaatgaatgttacgttcctattttttacctttttaattaacaaagatatttttaaaagaagacaaaacactaatgaggtacattgaaatgaacactcatattcttcaagtagaggtatagatttgtagagcccagtctgccagtatgtgttaagagacttaatcatccatgcccattcacccaataattctagtttcatttatttatactaagaaaacaatcccaaatgctgaaaaaactttgtatacaagtacatttgtgacattgtgatttagttctgaaaattggaggttacttacagtagaggaaaaaatagatcggttccagcacatgcatttaaaagagtattgaccctggccaggcatagtggttcatgcctgtaatcccagaactttatgaggctgagatgggcagatgacttgagaccaggagttcgagaccagcttggccaacatggcaaaaccccatctttactaaaaatacaaaaaattagccaggtgtgatggtgcgtgcctgtagtcccaactactcaggaggctgaggcgggagaatcacttgaacccgggagacggaggttgcagtgagtcaagatggtaccattgcactctagcctgggtgacagagggagactttgtctccaaaaaaaaaaaagtattgatctttacaaatattgtgaaaataggaaaatactgtgcttgagaaaagcagaaaaaagaaaaaaggcatatacactgtaacaagagttacatataaaagtatgttgagtgtccagaaatagacaagcaatgttagttttggtatttgtgtggtgaaatgtggtgtgtgatttttttttttttttttttttttgagagggagtttcgctcttgttgcccaggctggagtgcaatggtgtgatcttgactgactgcaacctccgcctcccgggttcaagcaattctcctgcctcagcctcccaagtagctgggattacaggcacccaccaccacgcctggctaatttttgtatttttagtagaaattatctgcttataatttaccatttgaaccattaagtagaaattatctgcttataatttaccatttgtttaatgcatgtatttagacaggaagcaacatagtttcatggtaaagaacatagattctagatccaattgcctgtgttcagatctcagatccacctcttattaaatgaggctagagacacattggcccctgtattcctcagttttttcatctgtagaaaaggaacaataatacatatttcattgttgttacgaagattaaagaagcaaaaacagacagttaactggttccttgtaagtactccaaaaactggggataaaggcacagttgtcaaaagtgttgggtatttgtcatgttatcacttggatgtcaagactcaatcttaaaaaaaaattattattattattatttgtttttttttgagaaggagtttcacttttgttgcccaggctggagtgcagtggcgcaatctcggctcaccacaacctccacctcccgggttcaagccattctcctgcctcagccttctgagcagctgggattatagggcatgtaccaccacgcccagataattttgtatttttagtagagacggagtttctccatgttggtcaggctggtctcgaactcccaacctcaggtgatccgcccgcctcagcctcccaaagtgctgggattacaggtgtgagccactgctcctggccacaaattaattttttaaagcaaacaaaactctgagacattaatttaaaatttttggagtcccaggcagaaataaaaacaggatgccagagaaccacatttttttaaagttattacaactttaatgaaatagttttttagagaagtgtccccttttcttttggtaggcccccttacaattcaagagctacttgagaaagtgtttgtggacctgtgcctggcctggtgagggtcccattggttgcacttccttcaccaaatagcaatagagatgtaaatctagtaatgggaccaagataagtagaattgtgtgagaggtgtgtgtttggtggggtgaggtgttggagacacaagatagctgaaattattgccatacctctttttgttcttccccttgcctagcgttgattttttttcagctattccaaatgataaggactgttacaagtctgatttgttaggttctctctatctggatagctatcctttaaaatagttgcagtgccattttgttgaatttgattgtattaactgtctcagatttaaggttttaatgagtccctttttgtaaattgaatgtatgggcaagtagttctatgaaatgccttaatcctgtatatgatattattcctttaacatatagtctgtcttcaaggacagaaattttgacccagtattcactctactttgaaggtccgtgatggggacctaaatatttaaaaaacaaaaacaaaaacactgaaaaaaactgaagggaagcagataagtgtgccataaagccatttgattatatgtttttagaagtgaaagtaactgttgctgtaacactagtgaaaaagtaatactggccaggcgcagtggctcatgactgtaatccactttgagaggccaaggaaggtggatcacttgaggtcaggagtttaagaacagcctggccaacatagtgaaacctgatttctaccaataatacaaaaattagcagggcagggtggtgtgtgtctatagtcccaactactcgggaggctgaggcacaagaatcacttgaacctgggagggagaggttgcagtgagccaacatcacaccactgtgctccagcctgggcaacagagcaagagtctgtctcaaaaaaaaaaaaaaagtaatactgatgaagaatatatataggtaaaagttcagtgaagagactatacaggttatagaaataagagttactatctttacagaagaaggtatagtatatgtatcagtccattcttgcactgctataaagaaatacctgagactggataatttataaagaaaagggttttgccaggtgcggtggctcactcttgtaatcccagcactttgggaggccgagatgcgcagatcactgaggtcgggagtttgagaccagcctgaccaacatggagaaaccccatctctaccaaaaatacaaaaattagcctggcttggtggtgcatgcctgtaatcccagctacttgggaggctgaggcgggagaatcgcttgaacccgggaggcggaggttgcaggaagctgggatcgcgccattgcactccagcctgggcaacaagagtgaaactccgtctcaaaaaaaaaggaggtttaattggctcacagttctgtgggctatacagaaagcatggcagcatctgcttctgcggagtcctcgggagcttttactcatggcagaaggcaaagggggagccacctgtctcacatggcagtagcaggaccaagagagagatgggggaggtgccacacactgttaaacagccagatctcatgagaactctatcacaagaacagcaccaaaggggtcgtgctaaaccattcatgaaggatacacccccataatccagtcgcctcccaccaggccccacctccaacgttggggattacagttgaacatgagatttgtgtggggacacagatccaaaccatatcagtatattagaaaccaaaatgaattcttcatgaaatcaagaagctaagtagtgtactaaaaatcttttcacaaggtccagatagccagtactctcctttcctggaaagaaagaaaagccctttctttaaaacctgtcctttaaagttgacttattagaatatttagaagaataagttaaaggaacattcaaaaatttctaacttccctgttgtcatttccaggaaatacatgaagtctttcctaattgatgttagaatgttctatgcttgaagagggcttcaggtgatgacacctgacaataggaaaatgtttttggaatgccagctgccagaattgtgggtaacaggaatgaagagtcagaaaacatctctcctgattttttaaaaaaacttttcatatactcttaaggcaaggaaatagcatttttgttaccaaactgaatagggcatgccaactatttctttacttctcagaagcccttgatctctataggatagatttggtaggaatatgagcgaatcctttccctgctgaatttatgtgttgggagtaaaatgggctgagagttattatctcttggtacagaacacctattagagaaaagaaagatggctgagctctattagcattagtatagaaggatttaaatttattttgtcagaggctactgaacttaatgtaatcagtgactttatgccccctttgcattcagtaaggaatgcataagttaatgatagatatggccgggtgtggtagttcacgcctgtaatcccagcacttcgggaggccgaggcaggtggatcacttgagcctaggagatcaagactagcctggccaacatggcaaaacccaacctctacaaaaaatacaaagaaaattagctacacatggtggcactcacctgtagtcttacctggagagtgaggtgggaggatgacttgagcccaggaggtttaggctgcaatgagccaagatcatgccactgcactccagcctgggcgacagagtgagaccctgtctctaaataaatacatacataaataaataaatattttaaaacataagttaatgacagatttgaacaaaggaaattacactattgagatttgtctgctacatcccaggttgtcaccgaggaaatggcttagatgagattctaaattgtcactgaagagaatttgagacattcatagaagtatgttgtattctctgtaatgagtgtatgaccatccccatttaggggcaagtgtttgcatttatgttcttgatttagactgaattgttttcaactgaaaattaaacaaaacaattgtctgaatgtggtgcctgccactggaaaacagtgattgttggattttatggttgtcgtttttgctaagaatattcagtagtgtggctgtcttttttttttttctttttgaggcagggtctcactctgtcacccagattggagtgcagtggtgtgaacacagctcaatacagccttaacctcttgggcgtaagtgatcctcccacctcagcctcctgagtagctgggaccataggagtgtgccaccacatccagctaatatttttattttttgtagagacagaatctcactctgttgcctaggctggtctcagactcttggcctgaagcgatccttctgctgtggcctcccaaagtgctgtgattacaggagtgagccatcgcacttggaattttgaaagccatttatccttgaatatgggcttctaaaaaattgaactttatgggatctgaaaaatgttcttggtctagaatttagacaaagttctaattctattctaattactagccagggacattgaacacgtcactgcacctgtctgggccagctcccttaggagttcaggcataaagacagtcatatcaactcttcttacatcatgggattgttgtgagactttgcacaaaggggcttatatttgtatctgggagaccaagatgtcatttaacattaattttctgctatttgttttattttattttttattttttattataattattattttttggagatggattttttgctgtgtcgcccaggctggagtgcaatgctacgatctcggctcactgcaacctccacctcccaggttcaagcgattctccagcctcagcctcctgagtagctgggactacaggcacacaccaccacgcccagctaatttttgtatttttagtagagatggggttttaccatgttggccaggatggtctcaatctcttgatctcgtgatccacccccctccgcctcccaaagtgctgggattacaggcatgagccactgcagccagccttcatttttattttttaatgacctaacctaaagtctgtttaagcttcttaaaatccttgttggtaggctgggtgcagtggctcacgcctgtaatcccagcactttgggaggccaaggtgggcggatcacgaggtcaggagatcgagaccatcctggctaacacggtgaaacccccgtctctactaaaaatacaaaaaattagccgggcgtggtggcgggtgcctgtagtcccagctactcaggaggctgaagcaggagaatggtgtgaacctgagaggcggagcttgcagtgagcctagaccgcgccgcgccactgcactccagtctgggcgacagagccagactccgtctcaaaaaataaaaaataaaaaaaactatttgccaggtgtggtggctcacgcttgtaatcccagcactttgggaggccgaggcgggtgaatcacgaggtcaggagttccagaccagcctgaccaacatggcgaaaccccatctctactaaaaatacaaaaattaggccaggcatggtggttcaagcctgtaatcccaggactttgggaggccgaggtgggtggatcacctgaggtcaggagttcgagaccagcctggccaacatggtgaaaccccaattctgctaaaaaaaaaagaaataataataataataataatccttgttggttactgttaatataaagttaagtaaaacttacaaagctgctaggcattacagtataaattcttagaattttctcatgttttggcgtctcatgtttctctcaaccctttgctttgatcctctgctaatttatatgatttttttcattctagtactcttgtccatctgttctctgttgtgtgatcccaatccagatgatcctttagtgcctgagattgctcggatctacaaaacagatagagaaaagtaagtatggcctcaagatggaaagttatctgtggtgggatggagatgtttgtcacaaatctttcttgtttaagggctgaatatcggccagatatttaaagtgaagtcctaatatactctcctggggctagaaaagagaaatatatgcattgagtattattataagtagatgatgccagtcttatccctgattgtttcacgtgactcctcttgtctacaaaaacttttttttttgtttgtttttttttgagacagggtcttactctgtcacccaggctagagtgcaatggtgcagtcttggctcactgcaacctccgcctcctgggttcaagtgattctcatgcctcagcctcccgagtagatgggattacaggcgcaggccaccacgccaggttcgttttttttgtagttttagtagagacttttaccatgttggccaggctggtttcgaactcctgacctcaaatgatctgcctgcctaggcctcccaaagtgctgggattacaggtgtgagccaccacacccatacaaaaactttcctatggtatatttttcaacagcttaatgccttatgcttggcttttgatatataaagcacttttcatcaagtgcccatttgcctgccataggtatttgtcaattaatgggaaaagagaattgatttcctaccatttgacataatctaaaggaagaaagcaaataaatgccattagacgtgaaagccccaaatttcttttaaaaacaaaacttgatgtagaatttgggtattttagaattgtactatgaattattgaacagtggtcaagatatcaaaagagatagtagctaaaagtgttctagtagcattttttcttttctttttttcttttgagatggagtcttgctgtgttgcctgggttggtctcaaactccctacctcagcctctggagtagctaggattataagcatgcccaccatgcccagcactaataacatctgttttatgtagtattcagtgaagttataagaggaactagataggagagggtggatagttcttttagggccgggcgcagtggctcacgcctgtaaccccagcactttgggaggctgaggtgggcagatcacaaggtcaggagtttgagaccagcctggccaacggggtgaaaccccgtctctactaaaaatacaaaaattagccgggcatggtggcgggcacctgtaatcgcagctactcgagaggctgagataattgcttaaactcaggacgtttaggttgcggtgagctgaaattgcaccactgcacttcagcctgggcgacagagcaagactcacgtctccaacttgagttctagtggattagagaggcatagatacgtttttgtttttagtggaggtaacactgggaatgggatattctaacagtagttggttcttgctttttcctatttgtgaatttattgtcaaatttttttgattagagaactgttttgtccgatatttagaattgtgggtctgaatgcttaccagaagtcatttcccaagtcatcatggagtaatgttgaacactgttgaacagaactttcccaaactgcactgcccccaccctctaaccccccacttttttttttgcagagacagggtcttgttcttcagcccagactggagtacagtggcacaatcgtggctcactgcagtgtcaaactcatgggctcaagtgatcctcccaccccagcctccccagtagctgggactgctagtacatgccactacacctttccagcctccccagtagctgggactgctagtacatgccactacacctggctaatttgtttttttttttttttttttgtagagacaggatctcactatgttgcacaggctggtctctaattcctggcctcaagcaggccttctgcctcagccccccaaagtgctgctgttacaggcatgagttaccgtgcaaggccagcatacccacccccacccccccccctttttttttttttttttttttgaggcagggtcttgctctgttgcccggactggaatgcagtggcacaatcacagctcactgtaacctcaacctcccaggctcaagtagtcctcccatctgagcttcccaagtagctgggaccacaggcagatgccatcacatccagctaatttttttttttttgagacagagtcttgctccgttgcccaggtggaatgcagtggcacaatcttggctcactgcagcctctgcctcccaggctcaagtgattcctgtgcctcagcctcctgagtagctgggattacaggcgcacatcaccatgcctggctaatttttgtgttttcagtagagacgggattttgccatgttggccaggctggtctggaactcctgacctcaagtgatccagctgctccagcctcccaaagtgctgggattacaggcgtgagccaccacacccggcctagcacccgttttttaataggagaattatagaatcatttgctctgcttactttattcaaatgttcttctgaagcaataaacccattcattttgtcaaccaaattgttgaaattagttctaccagaaccaattgttttattgatatgaaaggaaagtttggttttttttccccctttttttttgagacagagcctcactctgtcacccaggctatggtacagtattgcaatctcagctcactgcaacctctgcctcctgagctcaaacgatcttcccacctcagcctcctgagtagctgggactatagtcatgcgccaccacaccctgctaatttttgtatttttttgtagagacagggttttatcatgttgcccaggctggtgtgaaacgcctgggctcaagtgatccacccgactcagcctcccaaagtgctgggattacaggtgtgagccaacatgcccagccttctgtcggtttaatcattattagtatatgagttcaagaactatgtaatgtagaatcatataatttcaagtactttaaatgaatgaattgagtggacatcttttgtagaaataggccaatcaagtatggaataaggtatatgccaacaaatactaaaatttaatcagaaccctctataagtagcaattaaaggagactttcacattttacagctccttcccattatcattgaattaatccttatcagaaatttgggatagaaaggggcctttccttgaatgtcctataagctactctcttcaagttacttgatgggataatgaatggaatctgttgcttactgactccacacctatgttaagccaagcttctctttgtgtgtacaggtacaacagaatagctcgggaatggactcagaagtatgcgatgtaattaaagaaattattggataacctctacaaataaagataggggaactctgaaagagaaagtccttttgatttccatttgactgctttctatgagcccacgcctcatcttcccctgtgcacatgtttacctgatacagcagtgctgcgtgttgtacatacttggaacaacaaactagaaatactgtacttctgtaccaacattgcctcctagcagagaagtgtgtgtgtgacaagccagttctacaggcattacctaggtgtgagactaaaagcttttcttattgacttaaatttggataacagcaaggtgtgaggggggtggtgggtatggtgtgtgcttggatgggaaagaaaaggctccactcacctataggagattatttttaagtggaatccatttaaactcaaaacagttatgaaaagcaaggtgaagaacatgaagctgtgtctgtattcattttattccgaaggagctacgtcttaggtgaaagttatgaccaaccagattaaactctacccacatcctgcattt

SEQ ID NO: 14700 - DNA, 1155 bp, Homo sapiens
tctcttccatattctttggtttgtatgtggtttctcagttaatacatagctaatagctcttatttttcttatgtttttaaccgcttaggtctatttggatgtaagggtgaaaattcatttgatggaaatacttgtgtatatttaaagacccaattgctcctctggagcttgtactttcaagaatgattaatctgtgtaataaactggttactacagtcattacatataattttgtgtgaataggctttttcatttttaagaagtttgtctagctgagattagtggtggattttctcccacttctgaaatgttcatttatactggttgcattttaagatcatgaaacaattccagttacattgtaaaaaggatatcttacgagtaattttattgaacaagttagaggcataagcttaagagcatttccatgaaacaacacatgcagcattccaggaacttgattgttaaattcaataagaaatttgctttattaatgaaactaagctgcatttcatcaaaaccttgtgacattcccttggtacataggacataaaacacagaggcattgctatttggtaagttaagcttctgtgattgtaattataaaagagcaacattgaccaaacctgggaaacaagagcacagtcttgtttggagagtctacataattactttgcactaacatttgcaggatgttcacacaattttaaattgtactgtatgtggctttttgaagtcttcccttgaccctagtaaaatatagcttgaaacttgtaaacaactgtgtttgccagaaacatcattcatgtgaactaggcaagttaccttttttccccccttcttttcctaattgtaaactaggccaacctgaaagccatggctgatgctctagccatcaggttctttcaaatgcatctttacactcttgcacaaaagttaaggaataaatgtccactgcttttggttttaaacttgttcaccttgtcttatctctcactgtcactgctcctccaccttggaacttgtgtgataaaacccaaaacctcttacagttctcttataagcatttcaagcatctcttattagcatccttgactttgcagaaaaggcttaactgttaacagttgtggggaaaggagttagaatttagcttaa

SEQ ID NO: 14701 - DNA, 1230 bp, Homo sapiens
ttgtttatttgtaggatcgacggaaagcgagtgaccccggtttttaaatggggggccaccttcgggacctgtcagaagagctgaaacgcccaaagtgggagcaagatctctttttgttcttttttcccccccgggaatctgaaggggtgcgcggagttgggctggtgcctcgggctgcaaggaagcaccagtaaatttggggggttctgtagtgactcattcggaaagacccgctccctgaagtctcccgcgacgggggtctgaaggtttggcaaccgcgccctcctttgccccctggactttgggtggtctgagagtcgcgccttcggatggggggggagctaagggggtgaccagcggaccagactcctgacccccacctttcctcgcgcggcgggcgctgtttggagcccttggatttgtggtgggccctgtcccccccacccccgcattttctttggaagcgttggggagggggcgtgtgtgagatcgctcggccctcgcccccgccggagccgccccagggccgccggcaaacagagtccctttcaagttttccgctggggccgcctggcgggggctgcgagcgcggtcgctgcggacttgtttggagcgcgatttgaacgcccggctccacctcagctgccccaggccgcggggtggggggcgtctgtcctttgcagttgggagtatttaaattagacgtcttgggggacctactggcctaagcttcacctgatccccctcctgaaagatgcccgtgccttggtttccaaccgccactagaaaaccgggaactgagaccgaagccccctctaaacccctttctgagagccgtgcggggaaactcaggccggcgggctacctacccgtaactgcgtattgttgatttagcagtttccctagatgagagtcaggctggagcttgggggggtggggagtggcccgctctgcagctgtcacccccctcccagaacggaaattgtcctctccttggggaggagggagagggggtgatggtttgatttttgccctgggaagagatgggaacagctgaaggagattggcctccgagttcccagccagcccccggaacttgggtagaacccccctacccctcatcctcgcagtagctgggtctctcccagggacgcccctagtcagccttggcctccctctccatgccacctccctttccaaggtgagcctctgcagaagacagacccttgg

SEQ ID NO: 14702 - DNA, 2054 bp, Homo sapiens
agggaggtgtgtgggctcttgtgtctgtctggcagtccaaacccacccccatcccctgaccccacttttcctacctgggcaagtgtctgggggatgccccctcccagtccttggggcctgggggtctggcttcaagacaccagtttactgccccaaaagtcagagccacattctgagaatcctatcaggccataatttgcaaggcaagcataaaactccaggcaaggacctagcattctcagccaggccctgggattctgattcctctcctgggttctgggtcaggtattgagatttccatacaggtcctaagtttctgatgctcagacatggcctaaagcatccagtccatgacctagaactctgggtctctcccctgccctgtttaagggattctgtttcacgggccctgtgcccttaagcccttcatttgcccctccagggccatctttcccccaaggccacccaaggatagagctgttccagtgctgggtgccctgctctgaggcctggaaggacccttggtctgggcacctagttgacagatttttggggctggggtaaggggaggtgaccatgagcccggagtggacaagaacctagccactgtaggattggcttggagaaggcaaggggttcccatgctgctatctctgcacccctgtggcagggcccgtccctgtgcccccagatgcagcaacctagctggagtgccaggcctgggtacaaaagcatcttttcagcctgcagtccctgcccttgtccccgcccctctatgagtgggcttgacgcaaatgtccagaatggttggaaaacaacagtggtatatcccagccatggcctcctggttaccctcccccaaccccagccccagccccagccccagccccagcccttccatttctgctctcctatgtacacacaaaggcacccactttagtccagtgtagacacacatgcacacacacatagacacggccgcttgagaaatagctcaaatacccacctcccacagctccataccacacagctcagcatagcacgaggcacacacccatatgcacacccgtcgcacgtgctcacacgctcatttacagaaacatgccacagccacctggcgctgttgcctttgggccaggggaagggacttcttctctggaaggagggttcctgggcacagtggctcaggaggcctcagagtcctcggggccttccagcagcccagcaggtcaagcgcctcctttggcctggctggggtggcaggagctccgaggggtggctgctcttcctccatgcctgtccctccgccatgaggccatccatgggggaacgtctttgctccaggcctacccggaccctgactgaactctctccttgtttttgtctcccgcccccgccagaaggtgatgcttccgacgggagccgccttccggtggtttcagtgacggcggcggaacccaaagctgccctctccgtgcaatgtcactgctcgtgtggtctccagcaagggattcgggcgaagacaaacggatgcacccgtctttagaaccaaaaatattctctcacagatttcattcctgtttttatatatatattttttgttgtcgttttaacatctccacgtccctagcataaaaagaaaaagaaaaaaatttaaactgctttttcggaagaacaacaacaaaaaagaggtaaagacgaatctataaagtaccgagacttcctgggcaaagaatggacaatcagtttccttcctgtgtcgatgtcgatgttgtctgtgcaggagatgcagtttttgtgtagagaatgtaaattttctgtaaccttttgaaatctagttactaataagcactactgtaatttagcacagtttaactccaccctcatttaaacttcctttgattctttccgaccatgaaatagtgcatagtttgcctggagaatccactcacgttcataaagagaatgttgatggcgccgtgtagaagccgctctgtatccatccacgcgtgcagagctgccagcagggagctcacagaaggggagggagcacc

SEQ ID NO: 14703 - DNA, 1312 bp, Homo sapiens
tatttaccagtcaggatcgaacaggtagtgattaagcagatgatctgtcatgtctgaatccctgtctctggatgagagaaaacagcaaggctgcatccagggcaacttttctagcattgttattggttgatttgattttaggggaaaaatagtgaaaataaaaatttttttaaaagaaagaaaggagtctcagaccattacaggatccggttgttacaggctgaatccaaggcccataagtgaagagtttcttttaaaggactctgggacttccaaagacagcctgtcagactgcttactgttggttggtttctttttcacagtctgtttgtatgggttttacttctgaccctctcttacctgaggcttcacctctcccacttcatcccacctggcttccttcctttctgcttaggcctgctgatagaattgctcttctctgaatgtaacatccgttcttcagcccccattgtcaagaatcaggaaaatttccagaaatttttggtataaaattcccaactcttccttagacctcaggtctgacaggcctaatggggaggtaggcataatcctgggataggatgagggtgggaccaaatccagtaaatctggctgagtttcccttaggttggattcttttggacataacatggagtttttttttccagaagtcatcttccataattctaggtctcattttcaaaaggaatcctttctccaaaaaggctagtaacattcactggtctcttagtaacatatacattaagttgtcttggccaagtactgacagagattcctttcagatggcacctccagagctcagcccaggtgattcaggccaatgctaagaaaatcccaccatgtagagccaagtagtattaccatctgggcagagccagacaccaccacctctgagagaaaggagaaaggtctttctgctggaaagaatctaatttgtaagttgaagggaggcacatgggtggctcccagattggaagtgagctttccgtatttgtttcttactgtgtaaattatctgagtaggtttccactgtgtatggtttacactcagtcaactgaaagggcaagcgggagctggagctgagactggttcccttggaagtgctgttttcacctctgccaggcttgcccctgcttcacctatgcccacagacaatgtgggctttgcgcttctcctgtgtggtgttacagcctcagggcctctggtgaatggtctgccttacatccagagcttgtcgtacagaggtaaaaaagttaaaggcattggttttgattagttctgtaaagggatc

SEQ ID NO: 14704 - DNA, 6231 bp, Homo sapiens
ggttcatccgcagagctggccagcaactcaggctgggctcagccctgagcagggtgccccccttccccaaatctcagaaggaggagggggaggcgggcgggcaggcagtcagtcgtggtcccaagggggactggctgcaggtttttgggtgagtgtggagtttctttttgattgttgcatgtggggaagggcagagtcgacgggaacagtcactgcgggcaccctagccctggtgcgtctactgtcctctgctcggctccccccatcggtgagtgcgcccgcccgcccgactgtgcggggctgcggttggggggaggggggagcgggatcatctgaggccagagccactgccgtgtgtgcggggagggggagcggcgggagagagaggggagggacaggctaggtgtctgctgctccacgccactgctgccggcgccccgacctcatccccagcagccccctctgcagctaagggttaccaccgcaccacctctcttctttgcctgcctcagcggccaaggctctgcggtaggagacaacccagccgggtggcgggtgggcctgtctaggtttgggtttgggtcttgctgaggcccgcatgagagggggtggccgtgactcggtgtcccctctttgcagggggctctgctgcgccgcgcaggcccctcctcctacatcctctttggggggtcactggaaagcagagcttaggcccactctctgtgcttagtatggcagactccttctcacccctagtcccctaactccccaggccgaggccgcctagggtctgcccaacagcgacagccacggtggtggtggtggtggtggtggtggtagcagtggtggcggcagcagcggcagcagcagctgcgacgctgcgcgtcctgctccctctcccccacccagccagggttgtagggtgagggccggtgggtgggcgccgcctggcgggcgggcggacggggggctggcagcggggagggggcgcaggtcacgtgccggcgggcgggtgggcgcgtacagtagggcgccctgctactgtactggggagtcagtgccctgttaccgggtctcgtctgtctcgtctctcccgcagatctcgcgagagtggctgactggctgtgggggttgcggcggcagcaggcggagccggggagggaaagcagcggcggctgaggcgactgaggcggcgggcggagcggcaggcggcggcggcgcggcagcggagcgcagcatcatggcggaccgagacagcggcagcgagcagggtggtgcggcgctgggttcgggcggctccctggggcaccccggctcgggctcaggctccggcgggggcggtggtggcggcgggggcggcggcggcagtggcggcggcggcggcggggccccaggggggctgcagcacgagacgcaggagctggcctccaagcgggtggacatccagaacaagcgcttctacctggacgtgaagcagaacgccaagggccgcttcctgaagatcgccgaggtgggcgcgggcggcaacaagagccgccttactctctccatgtcagtggccgtggagttccgcgactacctgggcgacttcatcgagcactacgcgcagctgggccccagccagccgccggacctggcccaggcgcaggacgagccgcgccgggcgctcaaaagcgagttcctggtgcgcgagaaccgcaagtactacatggatctcaaggagaaccagcgcggccgcttcctgcgcatccgccagacggtcaaccgggggcctggcctgggctccacgcagggccagaccattgcgctgcccgcgcaggggctcatcgagttccgtgacgctctggccaagctcatcgacgactacggagtggaggaggagccggccgagctgcccgagggcacctccttgactgtggacaacaagcgcttcttcttcgatgtgggctccaacaagtacggcgtgtttatgcgagtgagcgaggtgaagcccacctatcgcaactccatcaccgtgccctacaaggtgtgggccaagttcggacacaccttctgcaagtactcggaggagatgaagaagattcaagagaagcagagggagaagcgggctgcctgtgagcagcttcaccagcagcaacagcagcagcaggaggagaccgccgctgccaccctgctactgcagggtgaggaagaaggggaagaagattgatcaaactgaatgaaacccccacacacacacacatgcatacacacacacacacagccacacacacagaaaatatactgtaaagaaagagagaaaataaaaagttaaaaagttaaaaaaaaaaaaaaacctgttaactccaagggagcaccacccacagaacctccaccaactgacagtttctcttcttgacttgccacccatcgctggatgttgtccactttatccaccatataaaacagtaagcagctgctaaaaacaaaaaaaatacaaaaagtaataacattatatgaactgtgtttcctacttgattaaaaaatataaagaactgagtgtttatttccctaattaaccaagaacttttgtacacgtttaagctattattattaaaaagtgtttgcaaaatggtcaagattataatattgctgaattatataaaagtccttttcatgttgagctaacatttgactttagcacaaaaaagagatattttagaacacgtaaaataatatttttagtttttctcattttgttaccaaatttcaaaccttacatggaggttattatagtatatttgacaccctatatacctgtgattagagatgtgtatatatatgagggctaggcatgctgtgtgtctgagctttgtctaaatgttatgcagaagtttgtagagttaaaggtacgtaggtttaattcatgcaaggtaaacaataagtgctctcttttatacaatatgcattgcatctggaccttaaacttataaaaatggtcagtgaaacttctgtgaacatgaagaaattattaaaaaaggcatttaaatgaaatttgctaagttgtgatttttatggttggaaccaaagttattcaaatagtaaaaggaaaaagaaagaaaaaggagatctcccataatatttttctgcatctgtttgctttgactgagtaggcgttttgtcattattgtgtatatgagatgtacttgtatcgttcataatatattttttttattatgtgtagaaagattttaaaaaactaacgtgcagcaatttccagtgaacctgtacttggacatcaggtagtgagtctatttgtggtcactagcactgtctcctaaacttgtaagaggtctgaagctattctttgatttttgctagtgctattaacttatgtagacctgttaaaaagcagagcaacacaattatagttatcctactgagccatggattctgagttttgttttaaaagtgaaagccaagttggtgtatgtaaaggatttccatgtagctgtggtgctagttattactggctacattatatgctaagtgtatttgtgttccccaagtgtacaagccttctatcaaaagtatgttctataactcatatattcaaggtgtagggtatgaaaatgcaaagtttaggagagcactttaccaagctggtgtcctccaaactgaaattgtttgtaacgatagtcttttacaggttttcctttaaagatgtttgtgtgcttttaattgacaactaacttcttgctgctgtatagtaaaatattaatatatttttatcattaaactgctgcatgactatcatctttgagtgaagagaaaatgttataaaaaagatgccttaaacagtacattttggtttggaattctgtagaaagtattttggtaaaaaaaaaaaaaaaaaaaaagggtcttgtctgacagagagttctggggatggaattgtttcttggcaaatccagccatatagatctaactgctgtatgtataagacaccacctgtaggagcgggaaggtatcagtgcttcttatattgtaaagcattggcctaggaaggcaaacagttgtctttttgaaggatttttttctgctggtcctttgggttttgatttgatatttttatgctccctggttgagtgtgttgtcttcgtttttgagatctactgtatgtgttgaataacaagctattttcattgtactgtgcattttcccattaaattgtttgcttttaatattcaatgttaaatatgaggtgaccgtacagtagttaggagtttctttacttacaaaatcactggaaatgattaaattgcttttccccctccccagaggtgcatttttcttatttccatatagtaaagttgagcttttacagtgcataatgtgacatttggaatgcttatcaactgcatgtaaacattaataacctgcacttttttgtcttaaggtttgttgagctgttttgttcactgtactttaactgtgatatggaaaagactgcattctctgtgctgttactaattaggaaagagaattgctttgattttgtctcttgtttactatagcttcttaaagttaagccttgtactacaggttgttggagtactcctagatcactgtttcatagtagccagcaataagtagtgcaagtcaacaaaaacacagcaaacttaggcaaagtgtcctttctttgagatgcgagttctttcatgaggttttctttagggccagagttacctaaagtgaagcctttcttatctatagacttcagattctgcttggaatcccaccggctcaagaagcacatgtattgtgcaattaattgtctttacactaaaacagtttaatacaatctaactacgattttgaaaccagtgtctgatttatggtcagtgggtttaaaaagaaatccacatgcagatcttttaagacttaaaaagtgatcatagaaaagactaagtgactgtaaagatgctctttttttaagcatctcactttacctccccaagcaccctcccaaaccttgtcttccctcttctgttgcatcctttccctacccttccctcccaggtgctcggtactttacctagtttctatatatcagtgttttatgttggaatttttccttgtttttattttactagttggtaaaccctgtttatgctgaaacaaataaggaaatggtatatttgaccatatgtgttattcatagaagacagtatgatcaaatgtgccaaaaacaagcaaacaaaacttaattcctgagaagtatgccttatttttattgatctgctttgtcttacaattaaggtccaagagcttggttaaactgtattatttgcctaagtataaaagaaaacttgaactgcattgcaatattgacgttctttaaaatgagagacactgtcaagtaatttaatccagagatcagccaccagatttgaaatgcttatgtatgtgtgtgtgtttggagttgtttttttcttttaaatcaccaaattttttttaagctactttttatttgtgcctcctatttatcatgctgatgttagaagcagcagtcatccagccacagagggagctaaagttaactaaccagaactgtagaaatcattatacatgcctttgacaacaaaggaagttcataagaaaagccatgtcggcttttcctctactagatacagattggaggtagatgaatatttgccaaatggaaaaaaagacaatgctagtcagaaaagacaaactgttttccagcttctcaaaaagccatggagagtagaaaccaaaaccaacagggaaataaaaaaccttgaaagtctcactttctagttgtcccatgcaggggttgaaatttgattccaagcggaaagtatattatgttttttcaggccttcacatctagagagatggataacttccaatttgatttttcaggtaatagagaaagctgctagtaattttaacccctgcctaaagaagacatatacttcatttgggagcaaatacttattgccttgaaaagtagcactgtaatagcctatgataattagttgtagaataacctttatccctttcaaactatgcaaattattaaataagtgtaaattaggattcaattaaagatagttgattatattgcaatcagatggcattcacaaacttaactggagcatatacaaatatattagtctaagttttgtatgctaacagaaagatataatttagctacctattcta

SEQ ID NO: 14705 - DNA, 1173 bp, Homo sapiens
tttgtttcactgaagtcagtgagataggagtctagctgggtacatgcttaaaaagctggaagtgaagtgggtggcaagtggcagctccctctttcatgtagttttccataatgttcatatagtttccttatggtctaagtgttacaactggttttcaagttgttatattgaatattcctttttggaattcagggttgaatcactttgagggggaagggaagcaagggcaagagactttattttaaccagatgcggtcttatgacctcaaagatgtgctctagaaagaaaataacaaaaagtgtacctgtgaacatattttttgtcttggtgatattatgcaacacagtgttcagaattgcaaaaaaatttaaaaattgatagttttatcaatggaacagagagatgtgtttttggctaaaattattttttgtaagttatttggttatttcattttatattccctttcccatagctttgtacacacctcatacttaaaaccaagtgagaggcctcttttcagatctggtttatttttggaatgcctgagtgtgtttccagattggggggggagaggtggtgttttactttttgacatgctcttagcatgttttgctagtcattctggatcttatgtttgcaaattctgttgaacattcagtgatgtatttgaaatgagaaagtcctttataacatagtgtgaatgtttgtggccaattcaattgtggaatcttatggctttgtttttactttgggtagaagtttaacttccattgttcagattttaggtttatctagtgaaattgtgccaggtagttgtctaaatatggaccaattttgggaaatgaagattaataagtgtatatttgattctagataatcctttactcaaaatcataagttaaagattcacatcattaagagttatctaacttttatgttgtcaaatctttaaatgtggatgatattcagcattctatctatgaatttcctttaggaaaagagaaaaattcagtctccaaaccttttcttggagacaaaatttaccacatatcgaaaatgaaaaaaatttagaaagcgatttgattattttttaatggagtttaaccagcttaattaatgatttttccagtttgaagcacttattttcccaatgtgaataaagggaaaagatc

SEQ ID NO: 14706 - DNA, 1131 bp, Homo sapiens
ttgccaatccagcttgactgaaataagtaaaccaatcacttgcaacatgaaaaactgtccaactcctctaaggttctgacaaaataaccttggctgatgtgggaagactcccactttgattactgacctgacagtgaagattcatgcttgacatgatttcagacttgacaatgtctgtttaaggagctatggtacagtttgctaattcaatcccagatacctgttgattacctgtgagatctagagtccaaagtagccagcagccatatccctgagtgctctgtgcccatcagatatcttaaagtaagcagggttgggacaggtcacagcttggatgattgacctcaggtgccgtagacagccccagattcaagaattgtatctgctttcttggcagtcgtcactgaactaatgtcccatactgtgttacttactgtagatgctctcttttagaggaggcccagagcacacatcctaatcgctagcggtactcagagagggggtgctaactctgatgccctggccaaattccagtttagggatgtgggtcttcttcttgtcattctaattggaaatgtgcatcacttcccatttttcttactgatctcagtgcaaactacactagtctgtttctttgccctggtctcaagtctctaagacgctggtgtgtattatgtgggctaagttcatgtgttatcctaaggcacaagagttgaggaatgggtgagcttggtgtcagagcactgtgtggttggagggtggactcttgtgatgctgtggggatgaaattggccctcttttagcataagttggggagtgtgcactggctggaggcttccagaggcttccagccatgaggtgtgagctgaaaccaatttttcctctttccttatagcatgttgagaaaatctgttgggttttcagcagtcagggaaggccggagttctgctttaatctgggtaactgaggctaatatgagcaagactttggttaattaactgggttctcagatgccacagactccgtgagaagtcaccattattttcaatggttgtgatagaatttcccccagtagccattattttaagattatattgcagagttgctttattttgagctttttgtgtatac

SEQ ID NO: 14707 - DNA, 1165 bp, Homo sapiens
ccttctgactcacccactcagtgcgatgcgagacagccccacagccctcacagcagcccatattcctgctggacagggcagagcgtgcaccatccattttatagctgcagtggctacagacgcctggcccaggccatggaaaaccttgagaggagatagtctgttacggacaggagctttgtcctggaatttcctggcctttgtctgtctgggataacttcatgtactgagacgcctgttttttagagtcttcttccttctgggggaagagtgctactgcctgtcctccacagagcacttttgcttctaccaaagccatcttctccctgctgcctgcccgtgatcacccatggttcggaggtgaggggagcactgtgggcaggtgtgtgtacctggcttgcagtatactcctgaaagttgcctgtcacaaaggaaaagccataaccattggacatcaaagctgtgtcttccagcccggcccattcactctggtcctaacctttgtctgtctctcatattgcagcagaaaaagtcctacctggagcgaagcgttaaggaagctgaggacaacatccgggagatgctgatggcacgaagggcccagtagggagcctctctgggaagctcttcctcctgcccctcccattcctggtgggggcagaggagtgtctgcagggaaacagcttctcctctgccccgatggatgctttatttggatggcctggcaacatcacattttctgcatcaccctgagccccatttgcttcccagccctggagtttttacccggctttgcctgccacctctgcccaggacactcttccctctcgggatgtgtgatgaactcccaggagagggaagatgggagccagggcaagataggaagctctgcctgagctttccactaggcacgccagccagaccaataaaaagcgtctgtcccactctgctaagcctggttttcttgagcagagggatggaacagagggtgagagaggcagtggccgtctccacctcagctcctgctccctctgcatcagagcccttcctttcttgggggatgggccttgccctcttctcttttcccttcctgtacctttgactaacgctcagcttccgggcctgcatgcagtagacagaagaggaagaaagaacagatgttcac

SEQ ID NO: 14708 - DNA, 1222 bp, Homo sapiens
ctttgggaggccgaggcgggtggattacctgacgtcaggagtttgagaccagcctgccaacatggtgaaaccctgtctctcctaaaaatacaaaattagtggggcatggtggtgggcacctgtaatcccagctactcaggaggccgaggcaggaggatcacttaaagctgggaagcggaggtggtagtgagccaagatcgtgccattgcactccagcctgggcaacagaatgacactctgtctcaaagaaaaagaaaagaaaattaaggtgatgcttctaaccaatgataacgaaaaaaagttgagataatagttgtagtgatttgtgtaagggaattgaagaggtatacctagagcattagcataatcataattgtatctgttctgtcatgattgtatatttctttttaaatcttttatttatttttattttttaaatatatattctgctcatgtattatatttcttcttcttctttttaggaaacactgcgctaacttatgcatgtgctggaggatttgttgacattgttaaagtgctccttaatgaaggtgcaaatatagaagatcataatgaaaatggacatactcccttaatggaagcagccagtgcaggtcatgtggaagttgcaagagttcttttagatcatggtgcaggcatcaacactcattctaatgaattcaaagaaagtgctctaacacttgcttgctacaaaggtacttaatacatgtatgaatatttataatgtttttcgtaaccactttgattatttgagtattgagtatttgagtttactttatattgcttatgttttccctgtgctataaaattatctagtttataagaaattatatagaaagtctattttagtctatattgcctgtaatatagttttctagtatatgtttattattttaattcagatttattgggttaactgtgaagttaacccaactacttagcttagatttagagggtttccattatttaataacttttgttttatatgatttttccaatgtttatttaaaaaatagtacatgccaaagtaataatacacacaatactgaaaacctgaaaaacacagagtaacacaaagaaaagaaattttttgtttttgagacagaatgtcgctctgtcacccaggctggagtgcagtggcgcgaactcagcccactgcaacctctgcctcctgggctcaagtgattctcgtacctcagcc

SEQ ID NO: 14709 - DNA, 1222 bp, Homo sapiens; identical to SEQ ID NO: 14708

SEQ ID NO: 14710 - DNA, 1241 bp, Homo sapiens
ttcgtgatggttcccaggaggggacatctgggggatccacggctcctcccgcctcgccgaatgctctccccacaccactccacactgttgaggcagttgacaggagccgcagaagaaacaagggacatcctcactcctgagccgctccagagtcgcttctccccggaactaaaaaggtcaaggagagtgaagaccacgcccggctgcagatcacccccacggccactcaccttgtcatccgccatcttccccgccgaacttgttgcgcaggcgcatccccgcctccctcgtgccgactgccccggccatctttacggagggcgaaggcacttccggagcatttttggaaagggggaggtgctttcctagtggccaagtacgcctctctcagatacttccacgtgaccccctcccgtcgagtctcaggctgcgtgtgagcgcactcacgaccggggcgcgatgatctcactcgtgcgcgagtgcgcgcggcgcatgttcggcgtgtcggtcttcaggcgcctgatgagttcatagttgggcggtggtgtcagcggtttcgctggcgttcgtgggcctcccccggacccacacacggaaacacgcaaccattcggggatccagacgcccgtttacacgcaccacccctgggcgggctgtgcggctcaggccctcccccgggaccggcccgtgtcccgccccgtgtcccgccccgtatttgtgcggcgccagctggccccgcagcctgcggcgcagagaggctgggcttgcaggcgcagtagctccagaggtcgcgctgggctgagagtgcgggccggcagaggctggcggggagcagccggggttatgctgggcaaggattacatgctggccatcattctggtcaactgcgatggtgtgcacggaggggcccggtgggaagaccaggagctgagggaggacgagggaatccgaaaggctactctggggctcaaagacggtgggggatacctctctgtgtagggaccagggggcgaatgaacccggtctttacatgtgatgtcttcaagattgaggagcctggatcttcagcctaagaactgacccattttggggatggagaggggattatgacagcatgttattctgaactcacaaatcatatgctccctcctctctaatccggtgttcctgtagatgacttgtggggggaccacagtctggaggtggaggctggcctgcctcctggctggaggaagatccac

SEQ ID NO: 14711 - DNA, 1512 bp, Homo sapiens
tgtctgctgtcatgaagcatggcagcagcatcacacgcctctttgtggtgtcctgctcgctggtggtcaacgccgtgctctcagcagtcctgctacggctgcagctcacagccgccttcttcctggccacattgctcattggcctggccatgcgcctgtactatggcagccgctagtccctgacaacttccaccctgattccggaccctgtagattgggcgccaccaccagatccccctcccaggccttcctccctctcccatcagcagccctgtaacaagtgccttgtgagaaaagctggagaagtgagggcagccaggttattctctggaggttggtggatgaaggggtacccctaggagatgtgaagtgtgggtttggttaaggaaatgcttaccatcccccacccccaaccaagttcttccagactaaagaattaaggtaacatcaatacctaggcctgagaaataaccccatccttgttgggcagctccctgctttgtcctgcatgaacagagttgatgaaagtggggtgtgggcaacaagtggctttccttgcctactttagtcacccagcagagccactggagctggctagtccagcccagccatggtgcatgactcttccataagggatcctcacccttccactttcatgcaagaaggcccagttgccacagattatacaaccattacccaaaccactctgacagtctcctccagttccagcaatgcctagagacatgctccctgccctctccacagtgctgctccccacacctagcctttgttctggaaaccccagagagggctgggcttgactcatctcagggaatgtagcccctgggccctggcttaagccgacactcctgacctctctgttcaccctgagggctgtcttgaagcccgctacccactctgaggctcctaggaggtaccatgcttcccactctggggcctgcccctgcctagcagtctcccagctcccaacagcctggggaagctctgcacagagtgacctgagaccaggtacaggaaacctgtagctcaatcagtgtctctttaactgcataagcaataagatcttaataaagtcttctaggctgtagggtggttcctacaaccacagccatgattgtcttgtgtcttctgtctgcgcaactcccctcaaacaattttgttcctctggggtcctgagtatcttaattctgggataacttttagactaagaaaaaattgttttctccaagctgttgccagtggcattatttcctgtgagagttccatggaactgagacatttccctgtcatagagcttttgaaatttccctggagcacaaaacttgggcccaggggaatgcggagagagtcttgggaacagcaggtgctgggccgagcaggacaaactagactctaggccaaaaaactcttaagaaagccgatgtggtttcggttttcatttcctctggttcccttacaatttctgcctgtcatctgtcttaaaatcatggc

SEQ ID NO: 14712 - DNA, 1245 bp, Homo sapiens
aacatggtaaaaccccgtctctactaaacatacaaaaattagccgggtgtggtggcgggcacctgtaatcccagctactcaggaggctgaggcaggagaattgcttgaacccaggaggtggaggttgcagtgagtggagatcgtgccaccacactccagcctgggtgacagagcgagactccgtctcaaaaaaaaaaaaaaaaaaagagagagaatgggctcccagctgaggctggacccatgcaatacattgctcaccgtagttaataataaatgcctacagtgcccccgaaagcttccctgaaacaacccattgcggccatccagaatcagccaaaattctatttggacttgggcttcctagatgtgtttgagacctattgtattaattctaggcataccaaatgtattttgatcatatctctttaatactcttcctgtcttaacaagactaagataaagacaaagatcttttattttactttggtagcctccagggtgcagaatagttaaagacacctccctctctctcttcagcatttggccaagagacgaatgtccctttgaacaacttcagtgctgatcaggtaaccagagccctggagaacgttctaagtggtaaagcctgaagcctccactgaggattaagagcaacagccccagagcctgggctctgctggacttagtataatgtgaaaaaaatgtgttctcctattcctcataaagcttgtgctgtaaaatactttctcagggtgttcttgtcctcatctaccctctaccccttactgtgcaaccactgaggcaaagtagcttaatataaaaataaaactttattctgtctcatcaaaagctaccagctgctgaagcaaacatgaagggtggcgggggggcagggattctagggccccagagtaagtagaccacactgagtcccttttggtcctcctgcctggatagtgctgagtggaaggggaggagctgggacccaaaggtcttggcttaggtgtgggagcagagaacatgagacctcattatggtcctaaatctccaaaggctctactggacaaacaagcttgatgttaagagagaggggaatgagtgacattgagaaacaagatcacccttgaagagctgtctgctggagagcatacacacgatcctggagctgggcctcttcctgatgcctttccagggcttgcagccctgactgctgcaggaagacctgaacagcctaggggcagggaa

SEQ ID NO: 14713 - DNA, 2039 bp, Homo sapiens
tagtagtacttctgtgtgaatgctttggtggacccttaaggtactacatggaccagcctgggcaacatgatgagaccctgtctctacagattaaaaaaaaaaatttttttttttttttaaattagctgagtatggtggtgtgtgcctgtagtcaggaggctgaggtgggaggatcacttgagcttgggaggtcgaagctgcagtgatcacaccacggcacttcagcctggatgacagagaccctgtctcaaaaaaaaaaaaaaggtactacatggagataagcttgaagttactgtaaaaaagctacctttactcttgccctaagttatttattctgatacgtcctatgtacaagtcagtcagttcagtcctcatatctactaaaagctacctttatgcccaaggtgctagatgagaagacagggcccctgccctggtagagctgagttgggcctggtctcaaaatcccgactagagcctgctttgtttgctccttgaaggtgttagcccagctctcttttatctgccccttccccaggctttggaggagaagatacggaccacggagacacaggtgcttgtggcatctgcacagaagaagctgctagaggaaagactaaagcttgtctcagaactgtgggatgctgggatcaaggtatgggaggcaagccccagggtggcagcaaacttaggtgtgctggacacaaactgaataaaagctcacccataatggatcctgccattacttctcaaaagtagagctaagaacagggtgccagcttggacaccctctgtccctgaggacagcagaagccagccttcatcttctgctcttgtcccctgcaggctgagctgctgtacaagaagaacccaaagctactgaaccagttacagtactgtgaggaggcaggcatcccactggtggctatcatcggcgagcaggaactcaaggatggggtcatcaagctccgttcagtgacgagcagggaagaggtgagggaggtgggcaggaaggctaagggacagagaatgtatgccattttggcaggcccatgcccattcaagacctgagaaaaagcctggcattgatattagtacaactcataaaagccttgagggcttaacctgttactgtggtcttagtagggtgagatctccatccctgcatataccttatggtttgttggctcccccaagaggcacactctagcctgaggtgtttaattaggttcctgctcccagctgagacaagcctgatgcctagagggctagaggaaactaggcactcggggagcagtggaatggaagatgcttataccaccttcttctcccatcctggccaggtggatgtccgaagagaagaccttgtggaggaaatcaaaaggagaacaggccagcccctctgcatctgctgaactgaacaaactatcagaggaaaggaagtgggactggcactatttgaggttaagacaaactgcatatgtacttcaattgctttgcacttttccgtttcagcggaagacctgaagagtggtcagaacagagcctttgatttttattatggttattttattgattattactggcaaaaacggccaggtacaacacctttttcatacaaggcccaggaggcttagtccagtctgtgctcctgggctacaaggacccagcctgagatggtcccatctgcagggccccgcaccagttggagcagatgcctccccaccaccaattgccaaaggtccaataaaatgcctcaaccacggagtctgcgtgtgtcagtgatgcctagccccgccttccccagcagaccaatgtagggatggaaaagggagaaaaacagtaaacttgtgaccctgaggttcttgtctccagcgtccaccctgcggcttgggagctcctcctcgggaggcagcccccgtacatacgcacccgcgactttgcagctttcacctgaaggtctgagcgaagcccgggcggcgcacgtgcagtggatacctccacccccctgggaggcggggtcgcgctcagagccaatg

SEQ ID NO: 14714 - DNA, 1208 bp, Homo sapiens
atttgactcaggtgctgtttcttcctgttagatattactgcaatgtctgtgactgtgtggtgaaggactccatcaactttctggatcacattaatggaaagaaacgtaaggcttggaggtagcttgtgactagggctggaattgggttttggaggtggggtggaatggaagggtagctttttttttcttctttttactcatcaaaagatggctggagtaagaagggtagtttctactgggctcttttttgatgcccctattagaactctccagttgtttcagcacaggccgtcttttacttcattatgtaatatttctggaggccgtgaggtaagaggcctcattctggaggccatgaggctttcaacagcacccaaaccatgtgctgctcctggacccagctggccaagggagtttcttttagccataattatttttgctgtgtgttttatgagatgtcagagaagtcaggaaaataatttttgaggggctgaggatgttgtaatgaacttgccttcttcactgttgaccctatgcagatcagagaaacctgggcatgtctatgcgtgtggaacgttccaccctggatcaggtgaagaaacgttttgaggtcaacaagaagaagatggaagagaagcagaaggattatgattttgaggaaaggatgaaggagctcagagaagaggtaagggtctcctatccttcccctctcccccagatttgagttttatgttatgaatcatgggagaccctgtcctcatcccactcctactcccacccccagagttgtatctcctgagttctgtatattagcggaaacatttgttgcctttgtttaggattctcatgatctgaaggaaatggctctgaaactacttttttctcctagactctctgggccttatttttttttttgtaatttaaaaaaaaattttttttttttttggtcatacagatatttctcaacttctgatggggttacctactgataaacctatcatcaagttaaaaatatcataagtcaaaaatacataatacacctaacctactgtagtttagcctagcctaccttaatgtgctcagaacacattagcctacaattgacccaaattatctaacacaaagcctattctataataaagtattcatctcattaatttattgaatactgtactgaatgtgaaaaacaatggttgtatggatacttg

SEQ ID NO: 14715 - DNA, 1229 bp, Homo sapiens
agctactcgcgaggctaagaggggcgtattggttgagcctagatggagccagtgcactgcggcctgggtgacagagggagattctgtttctaaaaaaattaaaaagagtaacaggaagtttcactgggcgggggttggaatgtttatctagtttagcagcgaagttctaagataaggtctgaaatacaatttacaccttgtaaagactccactcccctggcccaagcactagttgtaaaagtcgatttgatcacgaagtgaccctgtgtggttgttttgggagcgcagagtctggaagcgaaggaggtgggggcgtttcgagagttgtggaccaggtgactgctgagaaggagacagtaaaccggggacacacctgcggaagagctcttcagggattaggaaaggctacgtccttgtcactgctgtgtgtccccagatggacaactcctcaattgtctggaggtcgggggcgtgttggacagtcctggtcgctgagtcatgctgaagcactctctttttgactcactctttgtgacgtaggtctttctcaccagtcaataaaatataatccgaaagcaacctccgggctggctttagctcagcggttacttcgacagttctttaattgaaacaagcaacctgtctgggttgttcgagacccgcgggcgctctccagtccttttacctctctgggcggttcgagacccgcgggagctctccagtccttttcactgctgaagttcagctccctttccatggtaaaaggaatcagggctcctcggagaaatggctgattttagtactgggcaggaaatatagaaatggacgtggagcatctcatagagctagaaagtaaggaaatgcttaaaaaccaagaacaaccaaactcaacttttaaagttttttcaatgtttagtatgttcatgtgtttgttctaacagttgcctgtatacttgtatcttctcgcccttttttactgaggcccacaggatttttttctttcaaatctaatggatgttctaagatataccttagacttgatcattccatataagttttcctaggtttcctttcgatatgtagacccaatttttttttattatagttttgaagattacatcggttccattattttattcttcttcagggactgcaatgtatgttggatctttgcctctataccactttctctctgatcctttgaattgctttcttgattttatttttat

SEQ ID NO: 14716 - DNA, 1176 bp, Homo sapiens
aatgacctcagcagcagcagtgaggatgaagatgagacccagcatcaagatgaagaagatataaacatcattgacacggaggaagatctggagagacagctacaggacaagctaaatgaatcagatgaacagcaccaggaaaatgaaggaaccaatcagctggttatgggaattcagaagcagattgacaacatgaaaggcaagctccaagagacccaggacagggcaaaacgacaagaggatctcatcatgaaagtggaaaatctggctctcaagaacagatttcaggctgtactggatgagctcaaacaaaaggaagaccgagaaaaggagcaactcagctctttgcaagaggagctagaatcactcctagagaagtaaaaagaactgatatttaatttcagtcttcagactggtcagcattagaaaattcttggctttattgtactgggtattaagaccttgctcttcctagtccttttaatgctgtgtgttctgttaagttctttcatttgtttgtaattttgtttttcagcaaatttatattgttttgctaggtgttcatcctataagaagcaggattgtataggcagaaaaatgattgtaggaaagttgcaggattagcggaatgtatggttcaaccttaattatagcttcattgcaggactttactgtttctccattttctagaagctgctgttgctgctttgtgatgacgtgagatcaataagaagaacctagtctagagacaatgatgctagtttgcatatgttttcctatgcaataattgttttcccagttattcaaagcagctttctatatgtagagatgcaaattattaagttgtttccaatacaataaataaaagcatctgtttttcactttatagtgtatcttgttctttcatggttggtgggagtcaggtcctcttgtgaggtggttttatggtggagtttagtgactaagcaatttgatcccgttctgcaggtagaggcagtagggtttatgaaaaaaaggaacacagcaggggtaaagaaattgggaatggtcatgtttgcatcatattaagattccaattctatttgatctacttgaaagctgggaaacattagatacagagctttcttaaagtaccctaatttttgtagatgaaggcctttgtgccttttttaaaaa

SEQ ID NO: 14717 - DNA, 2813 bp, Homo sapiens
ccccattttgcagatgagaaaactgaagtggcataaggaggttaggtagacttgcccaggatcacagtgagtaaggaaaggagctaggaatcaaacctagactttctcactccagagcctcttaacctctaccctcaactcttgtgaagagagactaccttggtgacccctatattcccagtgctcagcgtggtcaaggcccagggtgctgtataggcattcattaactgctggggatataagacagtgactgttgaggaccctaagtttagctcccacctgatcttcctctgtctctgcagaagctgctgatgggagctccaccctgggagggggtgccggcaccatgggattgagcgcccgctacggaccccagttcaccctgcagcacgtgcccgactaccgccagaatgtctacatcccaggcagcaatgccacactgaccaacgcagctggcaagcgggatggcaaggccccagcaggtggcaatggcaacaagaagaagtcgggcaagaaggagaagaagtaacatggaggccaggccaagagccacagggcggcctctccccaaccagcccagcttctccttacctgcacccaggcctcagagtttcagggctaacccccagaatactggtaggggccaaggccatgctccccttgggaaacagaaacaagtgcccagtcagcacctaccccttcccccccagggggttgaatatgcaaaagcagttccgctgggaacccccatccaatcaactgctgtacccatgggggtagtggggttactgtagacaccaagaaccatttgccacaccccgtttagttacagctgaactcctccatcttccaaatcaatcaggcccatccatcccatgcctccctcctccccaccccactccaacagttcctctttcccgagtaaggtggttggggtgttgaagtaccaagtaacctacaagcctcctagttctgaaaagttggaagggcatcatgacctcttggcctctcctttgattctcaatcttcccccaaagcatggtttggtgccagccccttcacctccttccagagcccaagatcaatgctcaagttttggaggacatgatcaccatccccatggtactgatgcttgctggatttagggagggcattttgctaccaagcctcttcccaacgccctggggaccagtcttctgttttgtttttcattgtttgacgtttccactgcatgccttgacttcccccacctcctcctcaaacaagagactccactgcatgttccaagacagtatggggtggtaagataaggaagggaagtgtgtggatgtggatggtgggggcatggacaaagcttgacacatcaagttatcaaggccttggaggaggctctgtatgtcctcaggggactgacaacatcctccagattccagccataaaccaataactaggctggacccttcccactacataatagggctcagcccaggcagccagctttgggctgagctaacaggaccaatggattaaactggcatttcagtccaaggaagctcgaagcaggtttaggaccaggtccccttgagaggtcagaggggcctctgtgggtgctgggtactccagaggtgccactggtggaagggtcagcggagccccagcaggaagggtgggccagccaggccattcttagtccctgggttggggaggcagggagctagggcagggaccaaatgaacagaaagtctcagcccaggatggggcttcttcaacagggcccctgccctcctgaagcctcagtccttcaccttgccaggtgccgtttctcttccgtgaaggccactgcccaggtccccagtgcgccccctagtggccatagcctggttaaagttccccagtgcctccttgtgcatagaccttcttctcccacccccttctgcccctgggtccccggccatccagcggggctgccagagaaccccagacctgcccttacagtagtgtagcgccccctccctctttcggctggtgtagaatagccagtagtgtagtgcggtgtgcttttacgtgatggcgggtgggcagcgggcggcgggctccgcgcagccgtctgtccttgatctgcccgcggcggcccgtgttgtgttttgtgctgtgtccacgcgctaaggcgaccccctcccccgtactgacttctcctataagcgcttctcttcgcatagtcacgtagctcccaccccaccctcttcctgtgtctcacgcaagttttatactctaatatttatatggctttttttcttcgacaaaaaaataataaaacgtttcttctgaaaagctgaacgtttctgtataagcgatggaagctcctggcatgtgtgcatgaagtgatgagctgaggtgggtgctggaagaagggcggaatcgggaggccactttgtgtcattgcgcgtctagatgtttccgaattgcgtgtgtgtgtgtgactgtgcaatatggttgtgtatgcttgcaatgccgttgtgcctatgagacagtgtgcgattgtgtgcctatggatctgtgtaccgtgtgccattgtgtgatcggtccgctgtgggggtggggatctgagtgcggcgtgtcagtgtgcagtggagtgtgcagtctaagcttgcggctgtctccaggcagaagaggagaccccggcgcgggcgggggcgggttggcgccgggcaaacgccttgggtagaggggagaggacgtttcgttagttcccgccccttcctgactaaaattgcctacccgaagcgccccggagggcttcacgggaggagggt

SEQ ID NO: 14718 - DNA, 2813 bp, Homo sapiens; identical to SEQ ID NO: 14717

SEQ ID NO: 14719 - DNA, 2813 bp, Homo sapiens; identical to SEQ ID NO: 14717

SEQ ID NO: 14720 - DNA, 2813 bp, Homo sapiens; identical to SEQ ID NO: 14717

SEQ ID NO: 14721 - DNA, 2813 bp, Homo sapiens; identical to SEQ ID NO: 14717

SEQ ID NO: 14722 - DNA, 2813 bp, Homo sapiens; identical to SEQ ID NO: 14717

SEQ ID NO: 14723 - DNA, 2813 bp, Homo sapiens; identical to SEQ ID NO: 14717

SEQ ID NO: 14724 - DNA, 2813 bp, Homo sapiens; identical to SEQ ID NO: 14717

SEQ ID NO: 14725 - DNA, 2813 bp, Homo sapiens; identical to SEQ ID NO: 14717

SEQ ID NO: 14726 - DNA, 2813 bp, Homo sapiens; identical to SEQ ID NO: 14717

SEQ ID NO: 14727 - DNA, 2813 bp, Homo sapiens; identical to SEQ ID NO: 14717

SEQ ID NO: 14728 - DNA, 2813 bp, Homo sapiens; identical to SEQ ID NO: 14717

SEQ ID NO: 14729 - DNA, 2813 bp, Homo sapiens; identical to SEQ ID NO: 14717

SEQ ID NO: 14730 - DNA, 2813 bp, Homo sapiens; identical to SEQ ID NO: 14717

SEQ ID NO: 14731 - DNA, 2813 bp, Homo sapiens; identical to SEQ ID NO: 14717

SEQ ID NO: 14732 - DNA, 2813 bp, Homo sapiens; identical to SEQ ID NO: 14717

SEQ ID NO: 14733 - DNA, 2813 bp, Homo sapiens; identical to SEQ ID NO: 14717

SEQ ID NO: 14734 - DNA, 2813 bp, Homo sapiens; identical to SEQ ID NO: 14717

SEQ ID NO: 14735 - DNA, 2813 bp, Homo sapiens; identical to SEQ ID NO: 14717

SEQ ID NO: 14736 - DNA, 2813 bp, Homo sapiens; identical to SEQ ID NO: 14717

SEQ ID NO: 14737 - DNA, 2813 bp, Homo sapiens; identical to SEQ ID NO: 14717

SEQ ID NO: 14738 - DNA, 2813 bp, Homo sapiens; identical to SEQ ID NO: 14717

SEQ ID NO: 14739 - DNA, 2296 bp, Homo sapiens
ggctgctgttcctgccaaggtgtccaagaacagtgagacattccccacaatccttgaggaagccaaggagttggttggccgtgcaagctaatgtgggtcctgtgaccgcggcagctcctcagcggagccgcagactgtcctgccctgcagcatgtgcctaaaggctcaaggggatattcctctggggtggccactcccaccaccctgaccctgtctttctctctggcctgctgctctctcaacatcacatacagcttcagctgcctggaggccagaaggaaagggcagtgcaggggaggcctgagcccgacttagccagccctggctgttgtattaccaaagcagggtccatgtttgctgccttaaccctgtctcctctctgttactcagagggcctcatctcagacaaggcccagcctgctttttctcagccctgactttctaatgggctttcccccctaggtcagtcttgctggatttgtgcttttcttttgtggtttctctggccctgagaatagcatggggcttgtaaacctttgggctagatccctcctttcattgctgttgtctctgctcttccctctcctggctgtggttatttattattagtggtgtggcactgggagctgctcctaaggaagcagggagcaaatcccacctttaccccaccttcctgggaaaggcctccaaagcaaaggatctggaccagtttccctgctgtgctgtggcccaggccagagcctgtgggcaggcaggcagggcatagcgacagtgtgggacctgcccccagcttctgccacgctttatgcccttgcctctctggacgctctgcaccaaccccaggctactgagccaccttccctcctcatgccttccctgagctttggtgcatctcatctggactatgggttgtactgtgaccatcccaacacctcaccctctgtctacaaggaaatgggaggtggagcctcctggctgagaaattgttttgcaaatggatctatttttgtatgaaaaaaaaaatttttttaaagaaaactgttccttccccctttcccctccataatgtaagaagctttggtggcaggttacagagttctgggatttcttctcacaggcccaatcctgaatgtgcccctggaccttctggacccttgagtccaaggcagatcctctctcccagggaatccgacacaggaggaaccccttctctggttgagctgggccaggcctaagagtagcaggaactctaagaccacagagttttttataaatgtataaatgtatcaagccaaatgtgcagatgctaactggacattctggggaactgggcaccaggagtgccttcatacactgtaccccagctctcttctaaaagagaagtgggtgggcacactgaactgtttggtggccccaaccacaggaagctgcaattctctggcttagggtgatacttttgccctccttgtgcccctctcagctttccatccccagctaggaagaaagaatggcactcttgggcttggcccagaattagagttattagagcaagagagagcttaggaagcatgagggcaactatagtgaggccttattgccaggagggagggttttggttgctggcgcttgtgtataaaggggcaagagcagctcctttggactattcctgggaggactctgatgcagggcgtctgttgctcccctgggtcacctcctccctgctcgctgacatctggggctttgaccctttcttttttaatctacttttgctaagatgcatttaataaaaaaaaagagagagagagagaggtgtgagggacaaaatgcaaacctatttcccttgcctcataggcttctgggatgtcatcacctccagtttgttggttttgtttccaactgttaataaagcattgaaacagtactgccttacagcttcctgtgtgaatttctgagctgttttcttttcactctagtccaggctcctctagtctttcctgcctcaaatccctggttgacctgacaaatcactgtgaaaaagctaaaggtgccagacactttacttgggcacagggctagagatgattaatacatggtggctgctgccccaccagagctcacctcagggccgtttggccacagtaaaggagtgggcgcctggttcagctccctgactcttccacattgctgctacttggtttggagcccttttttggaactcacttggaacctttcatgttcccagatgtcacgcaaggtttcctggcagtacctgtgtctcttgctgagggaagcatct

SEQ ID NO: 14740 - DNA, 1181 bp, Homo sapiens
aacaaacaaacaacagtttaaactgccaccttctttttttataggtgtaccatagttcatggtttactattcccctatttaggggtacctacatggctttggtttttgctgttataaacagtgctgtattgaacatccctttgcatgccagtactcatctttgagtaattccttgggctagagaagtgggtctgcttcttggtcttggtcttggtcctttactccttggctgcacagctttgtgaaggatgcacaggaacagtataacaagctgcggatgatgcattctaacatggagaccctctataaggagctgggcgagtacttcctctttgaccccaagaagttgtctgttgaagaatttttcatggatcttcacaattttcggaatatgtttttggtgagcaagggatacttgctgactgaatcttttgtgggcatttctcactttcccctgggttcctgttggctggtagtaggtatacaatgcccatgtgttccttcctcctcttccctgccccagcaagcagtcaaggagaaccagaagcggcgggagacagaagaaaagatgaggcgagcaaaactagccaaggagaaggcagagaaggagcggctagagaagcagcagaagagagagcaactcatagacatgaatgcaggtgaggagtgaagacgggttgatgggctgagataggaatgttgggaagacttctctgcctagagtctagaggcagagtctcatgtctgagctcacctcctggcaaatgatttttggcagtcttcactccgagatcctgatgccggactttaaccccaattctgatacatgcgcattccaacttgccctggttaaactattaccttttctctcctttgctcgctcttgcattctctctcattcccctgtgattgtggtattgctgtgatatatactgttttccttctgtccatccaaaggttcctctggcctgttctcattccctccactaaatctttcgggtttttttctgtaaaatattttcctgacgctcctcccatcttttaattgtggcgtgtcttccctttctgcttatttcacaaagtactatgtccctagtaccttagcacagttgtatgcacaattagattttaaatggattgaacttttggagcgggtggggagccggtcaccctcttctttc

SEQ ID NO: 14741 - DNA, 1148 bp, Homo sapiens
atgctgtctcaaaaaacaaacaaaaaagatggagcttgaaagataagttggatttttaaataggcacaaaaggaaggataacatggtggaaggggactgctgaactactactaaccaactgttcttgtgaatcaagttttaatggaacacaaccatgcccattcatttatgtattgtctgtgcctgctttcatgctacagtggcagagttgaataattgagaccatatggcctgcaaagcctaaaatagttactatctggtcctttacaggcagcttgctgatccctgcaagtagataggatgtaggtaggaaagcattactgataaatattgaagaaatgaaaatgagatatttattagagttgggggaggttcagtaataaaagggtggttggttgaagaggaggttagttttgaaggaatacaatagaccattataatagagaggaagtgaggggccatttcacgctggacagtagttgcttggtaaagcacagaggtggcttacttttaatcatgcttttctaatcttttccctgctagccaagaaggatcaagaaggtggagaagaaaagaaatctgtgcaaaagaaaaaagtaaaagagttaaaggtgttggattcaaagacagcccagaatctctgtgagtatctcttggtcccaactattcaaaatgtgaaggaattcttttaagaatttttaattctcttgaatctatggtcccttgatatggaactttaattgttcaattcctgctatataccaaccattgcacagtgaattttcagtatcatgtttaatttcttcaatagcactgcaagatttttaagtatccagttttatgtcaaggaaacaagctaagacttttaggaatttgcttagacataaagctagtaagaaggaggtctgggatttgagccttttttttttttttttttttttttgagacacagtctcaccactctgttgcccatgctggggtgtaataatgcgatcacagctcactgccacctcagcttcctgggctcagttgattcttccaccccagcctcccaagtagctgagactacaggtgtgcaccaccatgctcagctaattttttgtagagatggggttttgccatgttgctcaggctggtctcaaactcct

SEQ ID NO: 14742 - DNA, 1258 bp, Homo sapiens
accaacaagaggaggagtggttctcaacggggcctgagaaatggctttggaaaagggtgctgggagaagattagaacttagagtgagatcctgacctctctccccttgctttgcaggccagaggcacccaatgagttctatgatggagaccatgacaatgacaaggaaagcgatgtggagatttaagagtggcttgggatgctgtgtcccaaggaatttcttttcacctcttggttgggctggagggaaaaggagtggctcctagagtcctgggggtcaccccagggcttttgctgactctgggaaagagtctggagaccacatttggttctcgaaccatctacctgcttttcctctctctcccaaggcctgacaatggtacctattagggatgagatacagacaaggatagctatctgggacattattggcagtgggccctggaggccagtccctagccccccttgccccttatttcttccctgcttccctcgaacccagagatttttgagggatgaacgggtagacaaggactgagattgcctctgacttcctcctcccctgggttctgacttcttcctccccttgcttccagggaagatgaagagagagagatttggaaggggctctggctccctaacacctgaatcccagatgatgggaagtatgttttcaagtgtggggaggatatgaaaatgttctgttctcacttttggctttatgtccattttaccactgtttttatccaataaactaagtcggtattttttgtacctttcgcctttctaggaatgttaattcttgctagtttcctatttatgaaaggagagggaaatgggcatgatgatgcatgtaataaaagcatagttaacattcattcagcacttatcctacgttaggccctgtgtatgtattctacatttattattgtaaatataagaagttaatagaggattttggttaagagttagacaaacctgggcagatttgagaggagtagaagatgacttcaggtttttgaatctgggtgtttagagtagtgatgctagttggtgaagatacactgagataaaacatgttaagtgcttagcacagtgcctgacagaagaagttgcccattatctgtctatgtgaagaacaatgctaaatactgtagtagccacaaacatgaacctttctctagaagagtttacattccagtcagtagtatgataaatattgtagcagatacagactgatacaagaaagaggactgata

SEQ ID NO: 14743 - DNA, 1142 bp, Homo sapiens
cccgtcaccacaccctgctaatttttattttattttattttttttgagacagagtctcgctctgtcgcccaggctggagtgcagtggcgcgatcttggctcactgaaacctccgcctcctgggttcaagcgattctgctgcctcagcctcccaagtagctgggatttcaggcatgcaccatcacgcctggctaattttttttgtatttttagtagagacggggtttcaccatgttagccaggatggtcttgatctcctgatctcatgatctgcccgcctcagcctcccaaagtgctgggattacagtgtgagccactgtacccagccaatttttatatttttagtagagatggggtttcaccatcttgaccaggctggtcttgaactcctgacctcgtgatccacccacctcagcctcccaaattgttgggattacaggtgtgagccaccgcacccagtccctggtctccctttgcccctacttgatagcctcttatttcatcatctaggtcaggtccccatggcccaggcacgagcgggggtccaaggtcccatggatggaaggatgccttccaatggatgtcttcccgtgtctccccgaacaccctatgggatgccatatcttgggtaaggcttccccagcctggtccttgaccttcagtgtagatgagaatgatccttcatgggtatacagccgaacctggaacaagggctagggaatcactgtgtccatttaacaagtaacccatggtattggagcatattcaaggagatattgccactttccacacccccgccatgtatgttttcctcatttaattcagtaaacatttatgtaacaccttgtctgggccaggcatttttgctagtcactacggacatagcagagaacaagatagatacattcttgccttcatggatcttacaataaataataatacattgcatcttttttttattattcattttttttatttttaaattattatttttttctgagacagagtctttctctgtcgcccaggctgaagtgcagcggcatgatcttggctcactgcaacctccgtctcccgggttcaagcaattctcctgcttcagcctcccaagtagctgggattacaggcacgtgccaccacgcctgg

SEQ ID NO: 14744 - DNA, 1145 bp, Homo sapiens
tgaaagaattaattttaaaacttggatagtatttttaaactattctttttctaaccattattctaggatacgaacagggctaggactcctaatggaagaaaaatagtttatttttagaactagatctctttgtcctacatgaggtatatggcagtactaaaagattaaagaacagaaaaaagtcttccatttcagtggctaaaatgtacagctatttctctaccttacggagtcttgctatttctcttcttctcgtggtacttcttgcttctgactttatgttctactctggctcatgttgccgaatagtttaagaagtgctccagtaagaatgtttgtactgttttgtatgtagcacagtgtatcacagcagtaaaaaatagtgttagaataagggcctaacttgcaagtggaaaagatttctagggaaaccaggagttggcagcagcatcatctttccaaactcaccaacatcttcatgtgttttctcctagctatctgctctatgcaagcacttagacaacctatgggaagaacaccgtggcagcgtggtcctgtttgcctggatgcaatttcttaaggaagagaccctagcatacttgaatattgtctctccttttgagctcaagattggttctcagaaaaaagtgcagagaaggacagctcaagcttctcccaacacagagctagattttggaggagctgctggatctgatgtagaccaagaggaaattgtggatgagagagcagtgcaggatgtggaatcactgtcaaatctgatccaggaaatcttggactttgatcaagctcagcagataaaatgctttaatagtaaattgttcctgtgcagtatctgtttctgtgagaagctgggtagtgaatgcatgtacttcttggagtgcaggcatgtgtactgcaaagcctgtctgaaggactactttgaaatccagatcagagatggccaggttcaatgcctcaactgcccagaaccaaagtgcccttcggtggccactcctggtcaggtaactgtttaccctgctgatggttgcctcctaattctcttccataaatggagatatcatctcaggaacttccttgatagggctcatggggcagtccgaggccttggagccagcccacaagtt

SEQ ID NO: 14745 - DNA, 1898 bp, Homo sapiens
aagatgaggtagaagactagttaactactgctcaagatatggaagtggattgtttttccctaatcttccgtcaagtacacaaagtaactttgcgggatatttagggtactattcattcactcttcctgcgtagaagatatggaagaacgaggtttatattttcatgtggtactactgaagaaggtgcattgatacatttttaaatgtaagttgagaaaaatttataagccaaaggttcagaaaattaaactacagaatattaaatattataatgtgcccaaagctctgaatagttaaaaattaaatatttattttcttccccaagctttaggtaaggagaagaggggtcaagagttaaacttagagaccctttgtctctgagaagcatccttctaagacattctgttggagttccctcagtactattccttacaactggagtgggtagaagccttatgaaaattatactgagaacctgatctcgtttactccatgttaatcacattcctaccaacctaaatttctgccaagtcagttctctttggaggaagcccattactccgtaactgactggatggtccagtgtcattttgatctgcttttcagaatggaaatttataatataaatatatgttttaataccacaaacactgtggggcacttgatatttattagtggtgtatatggtccactggtttcaggccaaatctagaatttagtgatactggctcagaagaatttaagttctattcagccttcctgggtgttagaacctagattcaaaatggcttgtctttgctacttttgttccacattctctctctttacctttgccctaccttctgtttgtaaggatgattttaatattaattccaggaacacatgtttttatttcctctgctggaataggagaaagcttaatatattcccaagctgaatgttcttgaattatatctgcatttaccactgtatatgcatatagtgacagtataacctgtctatactacagtagttccagtcctaactttctgaattatttttaaagatcttctctaacaagctatgggaatttggcttcatactctttctttgcaacagcagtgttctgggtgataattttgaattgatacctgttcctttttctgggttttgttggctttttgaaaaattgtctttccttatcattggtgggaggcttggtagcaaagtaacattttttggaaaagaggacagaaaaattgaactacagcttgagaacgtattctttttttcctactttgttattgcaaattgaggaatcacttttaactgttttaggtgtgtgtgtccagagtgagcaaggattatgtttttggattgtcaaagaggatgcttagtcttaaaataaaaataaatttaaaaatcatcttataattagaacagagttgctgctatttgttctgtcaccaaggcaactaatcacattttaaaactgttcggcatataacatattcttaaagtaagaaaaaaaaggtcacagaatagcatctcttttacctgggcttgtgactgagcttaggttttagggcccatattttgtttaaaccagatagtttcatggtcttccattcaggacattttgtgtaaaaattgaggttaatttgctgggcacagtggctcacgcctgtaatcccagcactttgggaggcctaggcgggcggatcacgaggtcaggagttcgagaccatcatggctaacacggtgaaaccccgtctctactaaaaatacaaaaaattagctgggcatggtggcaggcgcctgtagtcccagctactcaggaggctgaggcaggagaatggcatgaacctgggaggtggagcttgcagtgagccgagatagcgccactgcactccagcctg

SEQ ID NO: 14746 - DNA, 1232 bp, Homo sapiens
atagagaaaagagagaagtgtcagctctaagacaaaatttgagagctcctggatgttatgattgataatcaaggaactcttgccactgcctgaattaactactttttgtttttaattttttgtaggtttaatgcttgttcataacaagttggtggaccccttgtacagtatcaaagagaaagaaactgagaaaagccaatcttcgaagaaaccatacagcgattagcctgtgctgggacctagtgtcaagtacccatagggaaaggcaggtctttctggaaattgtctttagaagaaagaattgtatttctttaatctagtatggttactccagataagtgggtgaacttattgttcttggccatgaggctgggagcctagtcacggagtttagctatagggagaatgtttgtaacttaatcagaaaaaaaatatctgcaaaatgtactccatcattttgatgtctgccaaacccaggttgggagttttaaactttttgttctgcttcagccatggttcacacatatgacacactcccgtcaggaatttctctccttacacgcactgattttcaagtgggagggaattaggggcttatgtatattggataccacctctttgaagagtcttgagagtccttcttgcacaggcctgccccttggttgagaaccattgttccaagtgaaggcacaaactctcaatatctaaaataagtgcaaggaagcagtctctttggtcagtaacaagtgcaatggaaagaaaacgatcccttccttcttccactttcacagcttttctctgaactaggagaacctgggggtggatttgggtgggtggggccaaagaggaggcttctattgataaatccagagcctcaaggggcccagccacgtcaaacttctctccctcagggactctccagcaccaaaaggcagaaggtggaagccgtttttcccccagagccctgtgtttttgtgaaagcctcactgtggctcctctgttttacatactcattagtaagtgggaggtccactggggcaacagacactgccacaatttcagtgttgtgttcagccaaggggacggtctgggcaggcagcttaagtgtgagtttagtcacaactcctgagtgtcccgctctcctgcttacctaggaggtgagtgccaggaaaatacaccaaatgcttctagtattgtttccccacttaaaatagtcctgcttaaattcacat

SEQ ID NO: 14747 - DNA, 1180 bp, Homo sapiens
atacttttcttaaaggatttgtgcatttcaaggctttcaaaatacgttgccaaatagctttcgagaaaggctatttatttcagtttttgggttcttatctttctaattggctttatgcttacattaaaatatgaaatttttatttagttgcagaatgaagaagagtctggagaacctgaacaggctgcaggtgatgctcctccaccttacagcagcatttctgcagagagcgcaggtaggtaacagggcaaggtgatcacggaatccttaaaaacactctgtgctttgacattacagtttaaaaaaaaaaaagcttcagaagcagttggaagaaaggttacaaagcaagtctggattttaaataattgagaagtggatacatttaaaaatcacccccagtctcttacattcatctaagaatgtcttttggttcaattgttatgtatgtactcttaagggaatggctgggttttgtctgctagagttagtggaactccttttatttcaattcagctaatcatcaaaaaattgtgactgttaaaattctgcagcatattttgactacaaggatgagtctgggtttccaaagcccccatcttacaatgtagctacaacactgcccagttatgatgaagcggagaggaccaaggctgaagctactatccctttggttcctgggagagtgagtataatttgccatgttacttgatggctgctctgtgggaattaagttattttcattatccaattttgattcgttacttatgattgtattgattagtgaaagtagagctaattttaaaaatcaggtacatttgcttttgggataataaactcatctcttcttaaaaatgatgaggtaaattactagtcagacctgctcatttttccttcatctctcctattaccactactttttcaagtctcctgggatggctgaagtatcttgaagcagaagcacactaatgtttccttgattctgcacacttaatattttgctgttgggtggatagctgctagggaggtctaggaagagaataaatatatgcaaatttgtagaattaaactcataagagggatcttcacattgatttagatgaactccgttcttccagcagtccagatcatgtcatttgtggggacatagtgagttcagattccatctagcctgatgttgatt

SEQ ID NO: 14748 - DNA, 1860 bp, Homo sapiens
ggatgcgcagtagcactgcttccattgtattcttttgttaagaggtttggaaagagagactcctgacttcaggagtttttagaaaaagcattccagttttttctagttctagaggccttgataactttaagaactgaaattttaatgtttattgaataccgtgatgtcagtatacagtaatcttaaaactatgttaaaatgcacttgtgtctccaaacatcctgccttcttttgtgactacatccttctcttagccaaaataacaagctaactagagtttcaatattcaatatccttctctggcagatgttttctggcaaaggccttcctgcatttatgaattctctctcaagaagcaagagaacacctgcaggaagtgaatcaagatgcagaacacagaggaataatcacctgctttaaaaaaataaagtactgttgaaaagatcatttctctctatttgttcctaggtgtaaaattttaatagttaatgcagaattctgtaatcattgaatcattagtggttaatgtttgaaaaagctcttgcaatcaagtctgtgatgtattaataatgccttatatattgtttgtagtcattttaagtagcatgagccatgtccctgtagtcggtagggggcagtcttgctttattcatcctccatctcaaaatgaacttggaattaaatattgtaagatatgtataatgctggccattttaaaggggttttctcaaaagttaaacttttgctatgactgtgtttttgcacataatccatatttgctgttcaagttaatctagaaatttattcaattctgtatgaacacctggaagcaaaatcatagtgcaaaaatacatttaaggtgtggtcaaaaataagtctttaattggtaaataataagcattaattttttatagcctgtattcacaattctgcggtaccttattgtacctaagggattctaaaggtgttgtcactgtataaaacagaaagcactaggatacaaatgaagcttaattactaaaatgtaattcttgacactctttctataattagcgttcttcacccccacccccacccccaccccccttattttccttttgtctcctggtgattaggccaaagtctgggagtaaggagaggattaggtacttaggagcaaagaaagaagtagcttggaacttttgagatgatccctaacatactgtactacttgcttttacaatgtgttagcagaaaccagtgggttataatgtagaatgatgtgctttctgcccaagtggtaattcatcttggtttgctatgttaaaactgtaaatacaacagaacattaataaatatctcttgtgtagcaccttttactgtagattagtgcttaatttcttggcttgcatttgttgattgctaaggcaattttttctaatcttagggaatcattcagtagatgcgattaaaaaactaatgttgggtcaatttttttcttcattttcagcacaagaagtcctcttatatcctactaaatacattcctaaaaatgtatttgaacattggttctgtaaaagataatggactaaaaaagtagagaggagttgtagagatcttaaatcattctggaattcctaattatgcttcaatttttagacataattttagataatttatttccagtgttttctgcatgttctcatttgttctttttctcagttgaatgcaccaactggtttgagtcctgtgagcattcagtcagttgaaattaaagattcctcatttctcctgatttctattcttgtctcaatcttaaatttagagaccagttgtttttatgatatcagccatttgatttttttcattttctatttaaga

SEQ ID NO: 14749 - DNA, 1223 bp, Homo sapiens
aaaagtgctggttagttcccgcccctggtaaacctggggtaggtgggggttctgtcttaactcgaggggcacctgggatccaggacgcttctagggggctctggctgcccgtgttaatgaaggacagcgcttccgcgagcaccctgggaactgggtcttgggtagcaaagccctcccagagaaaagattgggcacaactaaggctttcctgagcaggaagggggtgaagaccaatcccttcctttggtcctttggtacgcaccccctcagagctgagatggaagacatggctagttcttttcagccttgtggagcctgtcagtcgccatcatacctcgagtgaggcccagctagataatgacttgtccaagatggcacacgtggaaagttgatctgcaccagaacccggatgactgtcaccttgaagcatcctgttctccttctgtgctgtcccaggaagtgtctggcgggcgtgggcagcacagctctacactgtacgattcactagggcatcctgcgagcctcactagccttctggttcatgcctttgacaagcatttttgtgccccctctgcttactgtgacagtcgatgatgaatcttgcgttgccattttctgctgtgggtaactgcgtgcagtgtcttgccttgctttctcttcttactgtcccacagcttggtttcatgttacaaacagaaaagctcgaggctcccaccccgccacatcccaacttcatttccccctcactgtagcccatttccaccccaccacaaagttgccacaggttttctttgtatagaatatttattttgaagctctattttaatagtatttattttagaaagtctactattgtaagagttcttctgtttgtgaagaaaaaaacaagttaaaaactgaatgtactgatttagaaaatatatataaatatatattgttaaatatacacgggactgccgtttctggtgtgtttgtgtgtttacttccctgacctcttcagccagcaaggcctcaagtttgagaataagcagccactgaaaggggaagagaagatagggcttcctgggctgggcaatcccttctcccagctctaggacgaccgtagaaccatcggaggaaagctgctcttcattatgaagcggaatactgcaaggagctgctagagcctccttcctgggaaagctgtcccctaaactggagtgtgctgcagatggacagcaaag

SEQ ID NO: 14750 - DNA, 1137 bp, Homo sapiens
aagcacacgaacagcgtcatctgcaaagcagccagcggggatgccaagaccagcaggcccgacaagcctttctgacagtttgtgtcgaagccccagtgctctgcctggaaacctggttctcttctgacatctaagaagactgcagcaaggtcagaggttttagcctcctgaggctgaccttgctagtctgcccactccctacccccagcttcggaaaatacagagaccaccaccacgtaccctgtattccccaaggtgatgaagaagcactttggggctttttttcagggtcctgaaactttgtgtcaaacagacaatgcaggggcagggtgtggtttggggggaaatttttctttttcagaagacagaacacagatgtggacacatatccggaaactgcagctgcttgaatgccttcccagcccctccttctccctccctccctccgcccccccccccttcctcttttccattgtctttggctctcacaggagctagctgcctgggaggaattgttaactgagtaccagggtacctttaaagaagacccttggagtcttctataccttcttctccttccccatctcactccaccccactttgtccctgatgtcttggggaaggtgtagaacaccctagcagttcctattgtatatacttgggagccactgagaacagaggacggccagtgagtccaagcctcgttcctccttctgcctccccggagccacaggatggatttaggagccactgctcagtgcacttctcccttccaactgcatcaactaactctcgggggtgttctgctcaccacaccgtccttcggttcttactgagtcacagactcgcctgcccactacgtgtcctgggttctctctactcagatcccttccagaaactttatatgggtagaggaagccagggcggcaaatgcgagaccaaatatcattttgccaatgagtctgaggctgtggtctctggatccagtcattatgtttttatagaataattaaaccggatgctaacggtgttttaaaaaataataataaaacaacttgtttccttttggccacccccaggaagggctgatttcaaaatctgggggcgagcaacctcaaggaacacaatttccctccc

SEQ ID NO: 14751 - DNA, 1165 bp, Homo sapiens
gagtgaatattttgctgctcctgtgcttacagaggtgtacttcattccaggcactgcttcacatataattatctcatgtgcttagattcattctgcaaatgagaaaacagagactgggggaagcattacctctgagtcacacagctctagcagcaggaccagagcttttgaatccacctggtttgagccagagatggagtccctgccagtgcagagctcttgacttctgccccatctcacttgcccggaatggaacctcttgcaccaagccctagaatttggacttgtgttttctattttggcattgaatctgaggagggtgcgtttgggtgactggcagttttcctaccactagtttttgggggcaagaattctttggtaggaagaaacattgcagtgatagagttgaagtgttatttaagctgtctaatggaatggatcagccctgtaatctggaggaaagactgatggggatctcggtgttctgttctctctacgtccagctctgctaatgtattctaccactactaactactacttgatcaggtcaggtgacctctaaaaatagagggtggagtcaaccattgtgtcctggatttcagacattccgatatcatgagatgcttgctgcgtggtatactactatattaatgtttgtgtattatttttcttcagtcatgtttattatatctataaacagaagtgttttcccagtacaacttaaacataaatacataattatataaacactgggtttagataatctatgttctcttatagctctaaacttttgtggctttattttatagccatattttattttattttacagttattttataactagtatttctagctctttggatttaacttggttttgagtgttaatcataggcaataaaactgtcctctagggattgccaaagttcaggtagatcattgttactattacttccactttatgaatgagatgctggcaatggagatgcaaattctttatagatctagatcccgtaaaggagaaacatgcagcaggtgcttgattaagtgaaaacattgccagttgttttttagactccgagccctgggtagcaaagaccagctaagattttgtattatcctctgaagttttggagttctttctccatcacgggctttgaaggct

SEQ ID NO: 14752 - DNA, 1207 bp, Homo sapiens
tttaggatacgtgggggaaaagaaagtcatcttaattatgtttaattgtggatttaagtgctatatggtggtgctgtttgaaagcagatttatttcctatgtatgtgttatctggccatcccaacccaaactgttgaagtttgtagtaacttcagtgagagttggttactcacaacaaatcctgaaaagtatttttagtgtttgtaggtattctgtgggatactatacaagcagaactgaggcacttaggacataacacttttggggtatatatatccaaatgcctaaaactatgggaggaaaccttggccaccccaaaaggaaaactaacatgatttgtgtctatgaagtgctggataattagcatgggatgagctctgggcatgccatgaaggaaagccacgctcccttcagaattcagaggcagggagcaattccagtttcacctaagtctcataattttagttcccttttaaaaaccctgaaaactacatcaccatggaatgaaaaatattgttatacaatacattgatctgtcaaacttccagaaccatggtagccttcagtgagatttccatcttggctggtcactccctgactgtagctgtaggtgaatgtgtttttgtgtgtgtgtgtctggttttagtgtcagaagggaaataaaagtgtaaggaggacactttaaaccctttgggtggagtttcgtaatttcccagactattttcaagcaacctggtccacccaggattagtgaccaggttttcaggaaaggatttgcttctctctagaaaatgtctgaaaggattttattttctgatgaaaggctgtatgaaaataccctcctcaaataacttgcttaactacatatagattcaagtgtgtcaatattctattttgtatattaaatgctatataatggggacaaatctatattatactgtgtatggcattattaagaagctttttcattattttttatcacagtaattttaaaatgtgtaaaaattaaaaccagtgactcctgtttaaaaataaaagttgtagttttttattcatgctgaataataatctgtagttaaaaaaaaagtgtctttttacctacgcagtgaaatgtcagactgtaaaaccttgtgtggaaatgtttaacttttattttttcatttaaatttgctgttctggtattaccaaaccacacatttgtaccgaa

SEQ ID NO: 14753 - DNA, 1199 bp, Homo sapiens
caggagaggggagatgtgatggacttctataaaaccctaagaggaggagctactgtgaaggtttctgcgtcttcaccctcactggctgtcgcttctcaatcagactccaagcagcgaagacttttggttgattttccaaaaggctcagtaagcaatgcgcagcagccagatctgtccaaagcagtttcactctcaatgggactgtatatgggagagacagaaacaaaagtgatgggaaatgacctgggattcccacagcagggccaaatcagcctttcctcgggggaaacagacttaaagcttttggaagaaagcattgcaaacctcaataggtcgaccagtgttccagagaaccccaagagttcagcatccactgctgtgtctgctgcccccacagagaaggagtttccaaaaactcactctgatgtatcttcagaacagcaacatttgaagggccagactggcaccaacggtggcaatgtgaaattgtataccacagaccaaagcacctttgacattttgcaggatttggagttttcttctgggtccccaggtaaagagacgaatgagagtccttggagatcagacctgttgatagatgaaaactgtttgctttctcctctggcgggagaagacgattcattccttttggaaggaaactcgaatgaggactgcaagcctctcattttaccggacactaaacccaaaattaaggataatggagatctggttttgtcaagccccagtaatgtaacactgccccaagtgaaaacagaaaaagaagatttcatcgaactctgcacccctggggtaattaagcaagagaaactgggcacagtttactgtcaggcaagctttcctggagcaaatataattggtaataaaatgtctgccatttctgttcatggtgtgagtacctctggaggacagatgtaccactatgacatgaatacagcatccctttctcaacagcaggatcagaagcctatttttaatgtcattccaccaattcccgttggttccgaaaattggaataggtgccaaggatctggagatgacaacttgacttctctggggactctgaacttccctggtcgaacagttttttctaatggctattcaaggtaagatcagtgtttttctgtttcttaagaatggtacatttaaggtagattaatagatgtaaatcttcattgatt

SEQ ID NO: 14754 - DNA, 1279 bp, Homo sapiens
cccaggctggcatgcaatggtgcgatcttggcacactgcaacctctgccttccaggttcaagcgattttcctgtgtcagcctcccaagtagctgggatcacaggcgcccatcaccaggcccagctaatttttttgtgtttttagtagagatggtgttttgccatgttggtcaggctagtctcgaactcctgtcctcaagtgattcacccgcctcagccttccaaagtgctgggattacaggtgtgagccaccgcacccagcgtggcttttatttaataatctgaagaaaatatttttgtttagatataacaaccagcgtatttaaaacgtgagttctcagactgctccagggtttgagtgactgtaattaaatgcttatattgataatttattttgttgtagacctttccaaagtgaaactgatgagatttgatgatccactgttggggcctcgacgagttcctgtcctgggaaaggagtacaccgagaagacccccatttctgagcatgctgttttcaatgtggacctcatgagcaagaaaattcatctgactgagaatgggataagggtggatattggcgatacaataatctatctggttcattaaactcatgcacattggagatttatcctggtttcttaggaatactactactctgattgtgtctactgattggctatcagaaccttaggctggacctaaatagattgatttcatttctaaccatccaattctgcatgtattcataattctatcaagtcatctttgattcctggacctaataaattttttttccctttctttgggtgtccaagagaaatggtttttgccaaactctttttaaaaaacaaattgttgctatttcctagaagtttctggtttttaagatgaacataaaagtgtcagtatgcttcttttatgaggtgtactttatactttgatgaaggctaaggtgtacctaacagctttttatagtatattcatttatggagttagctgtatttttttttaaaaaagaaaagtagtaaattagcagcttttttttttaaatgaagagaacttcatgatgatttaaaagaactaatgagaatattttgacttgacttcaattactaagtattttgtataaagaacaaataggtcctgcattttataagactttttaaagctttaattattcaactaagaaccaataatggcttcttcaaggctaatatcaatagtttataagcagtatatttcacctacactaaatatgggcattttaaaagaagatt

SEQ ID NO: 14755 - DNA, 1225 bp, Homo sapiens
ccacttgatgaagattcatgcctttttaaaagcaggtgttacatagaaggaaaggtagaagatgactgaccctgggaaggcgggcaagacataatgaaaatgtgggctttcagttattggtggtatagcatttttttaaagtaatttttatccttgaggaatgaagattgatttgacatagtatctaatgtatgtttatttaccttcctttagggagatgcacttatttacatggaaccagagaaacaagtgatgtccaggtcgtcagatgaatgtgttgtggctctgtgtgaccagtggttagtctcttatagcaagaaaattcccctagtcaatttgctcacctttgacttaaaaaaaaacatatcaatttgtccactcccaggtacttggattatggagaagagaattggaagaaacagacatctcagtgcttgaagaacctggaaacgtaagatgggagaaagtgatgaaggaggaaaaaggagatgaaaaatgtggaaacagtaaagttgaaatgcaacaaaaaaagtgaaccagtaaagatacactttgtcttttgctcttttctagattctgtgaggagaccaggaggaattttgaagccaccttaggttggctacaagaacatgcttgctcaagaacttatggtctaggtaaacaaacttgaaatttttctgtttggataactttgccagttacacagaaaatatacatttttacctttcccccctgccctcaattctagtgttttctgaattgaaagcagtaagtttcctctggatggtcatgaaaactaggatatagtccactatcatctactgtgtggtagaaatatgccctctctatatagattttgtggtgtgacttttttatggagagactccaagcttcaaccatttgtcttttttttcttttttagagacagagtcttgctctgtcgcctaggctggagtgcagtggtgcgatctcagctcactgcaacctctgcctcccgggttcaagcgattctcctgcctcaacctcccgagtagctgggattgcaggcacccaccaccatgcctggctaattttttttgtacttttagtagagacggggtttcaccatgttggccagtttggtcttgaactcccgacctcaggtgatccacctgccttggcctcccaaagtgctgggattataggcgtgagccaccatgcctggcccattttgtcttttatctac

SEQ ID NO: 14756 - DNA, 1088 bp, Homo sapiens
ctttgaggtttgaggtacacaggtcatgataatcctaattttttttttctggcggagtcttgctgtgtcacccaagctggagtgcaatggcatgatctcggctcactgcagcctccgcctccctggttcaagcgattctcctgcctcagcctcctgagttgctgagattacaggtacccgccaccacgcccagctaatttttgtattttagtagagatgggtttcgccctgttggccaggctgatctcgaactcctgacctcaagcaatccacccgcctcggcctcccaaagtgctgggattacacgcatgagccaccgcgcctggctgataaccctaatttttaatgttcatttaaatttcaagataaccatggaaaaatcagtctttatcagtgagcagctcagttctgtgaacccaattcttttttaaagcaagcgtgctgaaatacagagtggattattctctttgtgtccaataggaaagaaaaggaacagccaaagtggactttttgaagaagattgagaaagaaatccaacagaaatgggatactgagagagtgtttgaggtcaatgcatctaatttagagaaacagaccaggtgagtaatagtttgtgaagttctgcacattgtatttctatatatatatatatatatatatatttttttttttttttttttgagacggagtcttgctctgtcgcccaggctggagtgcagtggcgcaatctcggctcactgcaagctccgcctcccaggttcatgccattctcctgcctcagcctcccgagcagctgggactacaggcacccaccaccatgcccagctaattttttgtatttttagtagagatgatgtttcactgtgttagccagggtggtctcgatcttctgacctcgtgatccacccgcctcggcctcccaaagtcctgggattacaggcgtgagccaccacgcccggccctgtgcattgtatttctaaaaccgttggctttatagtacagaaacagcttggtggaacccataaggtagattgtatttataatgcctgaaacagggtgaaggaggtgactttcactttctgcatatg

SEQ ID NO: 14757 - DNA, 1108 bp, Homo sapiens
gtccccttagagaatattaatgaaatgttccatttggttaggggtgcttagtattaaaatcatccaagtcatttttttatgacaagtagtacaacttgtatattgaatcatcagcctaacatcaaaaattggtctttgtttaggaacacttttttttgagccttttttcttttctatttcaaattttctgttttcccctgcccacccctccccatactttggattcacctctttttttcatttctccccacccagtataattgcaggagggatgttttttctctgtatatatttgattagaggaattatgtggtagatttgcaactttctaaaaaagcatagatatgcatttggatgactcaagagtagtatttatactatagatttgtttgcagacttggtttctatagcctgcatatggcttttatatctgtatattataggacacgtgagaaaaaaagagaagacgggaaatggagagactatgaccggtactatgagcggaatgaattgtaccgtgagaagtatgactggagaagaggcaggagtaagagtcggagtaagagtcgaggcctgagtcgcagtagaagccgaagtagggggcgcagcaaagaccgggatccaaataggaatgttggtgagtagatgagtgtccccctaaaaactctgtagttatttatctgtctctatcacaggggtgcaagaaattctcttaaagttgtacctttaatatgtctgagcagtgtaaaaactggaattgtctcaagaagctcaatatccattttgttagaaaacagggctctattctggggatggagtcaagggagtttgattaaaaaggagctattcaagtgtatcattgtacatgtctagacttaactcattttgtataatggatacaaatatcctttaatcaataaagctatcacgtgaggaagagggttgcctgcttttcttctttgtttggttttctaaaagtaattgatttgctgtaagggtgcttgaagtttataaaattaaatggataaaataagtagattattgggatcccaaccactcatcttctgagatacaagtttggaagtcagttcttagataaccttcttat

SEQ ID NO: 14758 - DNA, 2431 bp, Homo sapiens
gcctgtttgtcctttggcctaaaaagtattttacttaccattcttgtgccactaagcagattttaacctctctttcttcaggaaacagaaacctcagatttgtttttgcctgatgatgacgatgaagatgaagatgaatatgagtctcgctcatggcgaagatgaaatctgatgctagctgtataatttttaggaatattgtttagaagaacaacttttaaaaattatttaaaagaagtcaatgagccaaaaaaaatttttttatttttcttttcaacacagtaggttcaagaacagcaagtttgctatttaaacacatctcataactgtacatgatattaaagcaccaaaggcctagtgacttttacacagttgtgaagatccacagcaatgacatggataatctctagagccttattttccacaccaccttttttttgttgctgttggtgttggattatgatgtaaatgacagggtgttcagaaattttattttggattataatctactgataaaatttaattaaatgtcaaaatcacctgtaatcttttaactctcagttgttatggatgggtcatcagacagtaggaaatatttgtaattaaaatacccttttgctttcaagagtggtcttggaagaaaaatatgtttattttaattttaatttttttttttttttactttggaggagcccaatttgtattcagtctaaatttgtttttcatggtttttatgtgtggtagtactagttcagtgaaaatcacaacaaactgtgtgttcttaaatgctacagcaatggtagctagctctatagtatttccattctcttgtcatatgaactcctggacttttcctgctactgattcttagtttgctttgatatttagtgagcgctggttcggctggtctttttaaaaatttttataactcagaatgtaaaaggctttcacctattgcccctttctcgtcccccttttcttcctcttgcctttctattaataggcctgacttagtcatcattgatataagtggttcatttgggcaaccgcaggcagtctccaataaaaggttcaaaccagcacctggataaataagtgatgttttgatgagaatgatggaaggattttggggagaagagaatcaccagctttattttttccctcttttgaagcttcagttcagtatagttacacagaagggtttaaaaatgtctgaaattcttttcctaaatttaaaccatgatggtgaggtgactggggggtggggggtggaggtgggagggggttgagggctgagtatgctagtaataaatgggagtcatatatgactttgttcagatgaccttattttttcataattttgtagcttgttgctatccatgaacatacgcatccctcagtagacagtttcctttactgtgtgcatttttactgtacactgtatagagtagagtatctgttaagtaaaatatatatgtaaatttatgtcttcgtgttctgaatgttagatggaaaagcagaggagcaacactacactgtactgacccctgggaaaataaaatgattaatgtacctaggctgtcactttttcaaggatatacacatctgtgtttttatatatgtgtggtatgaaaatttgaaacctcctgttgtctccaaaagggtcttggtgaccactatatcaaggattttgtttgctgaggtaaagacaatttctcaatatagaaactattcactaagaacttaaaaccatcaggattctagatttacttagctataagaagttaaatcccacgttctgataatctttattcttctacatgttttcctggaatgatgtgtcaaaccagggtcatttttaagttcatataattttctttcataataatgaggacttcctttttctaggttattgttatatttctagtaacactgaaggtaaaataagcttataaaagaaggaaaacatcagaatggtgtatctagaatacacaatcttgctccttactcctccatcatctctaatgaaatttttcttgatgtctgtggctcagtcagtatatattttgaaagattcattgtggtgaatattttgagtcctgacagtttaaacgtgatagagggaacaaaggatttatatattttttgtacaaagttttttcttaaactgtataattttgtaaataatttgtttgggttttttttttgtgtactaaaactaccagcgtatagatttcaataagaattgttgtatttttgtatttggaaactgaaaattacagtaaataaatggaactctaagaaaaatttcagtagacagttcaacagaatgagattccttttcatatgatttttttgacctcaaaatggacatcttatttcactctcagtaaaaagttgaaaatttgactttttagtattgggggcagaa

SEQ ID NO: 14759 - DNA, 1914 bp, Homo sapiens
tgggcttttaaattagatgtgaagtaagacttctttctacatttttatagttaatttagtgaaagatgtgaaagtgaaagcttgtgaaagatgctgggattggcagccccgcagactgaagtcctctgttcatccacagaacaggtacagcacgggcaagatttacccacccaccctcagccctgatctggagggaccaccactaggggtgggagggtaattcagcttctgaggccctttcactccttggagtctttgctgaggcgacttacaaaggtgaccactgccgtgaaatttttcttaaaaaaaaaaaaaaaaaaaaaaatggaaacacaattaggaactagatggacatttccagctcatttctgaaagacctgtgaacagcagtcagtaattcttggacttctttttcttatttcagatccaaaaaattaatccaagaatcagatcagcacctgaaagatgtagaaaaaattttacagaatgacaaacggtatctagtactggactgtgtgccagaggagaggcgtaaactgattgtggcatatgttgatgacctggatcgccggggtccacccccacctcccacagcatcggagcccacgagacgatcaacaaaataattctaaatactcttccataggggcatctattcaaaatgcttgcatgagccaattttcaggtttttacatatatgtgcattagtcaacctattgcgaaaccatctgacaaacagaaggagaagcatttgtgaacagtttctgaacagaacactttggaaatatttatgcttttctttgtgtggcatgactgacatacatactcaaatataggctgtctctagtaaatcttaaaatcttgaagctaaaattcatccttttatgaggtgtggaagtcagtgacttggtgacgttcttcctagcagtgttaatacatgcaagaagtaagagcatttgtggcttgaacttgccagatgcaaataccacagactccaagaaaacccgagttggggtttgttttgttttgattttttttttttaaagcgggtaaaagagaaaacactgaaaattgaattcttatcttccagaggctacaattattataatggacaatacttttacctttgtctctaaagatcagattagttttatttgttcacttacgtgctttgattatcccctctgaattatagaccgagtcttgttgtttagcctaagagaagatttatgtagtaatttcttctcaggtatggaaccacggtcataactaacatgttggccagaatagaaccactggttaaacatattttattcaccattaagtgatctttatcaatattctggattagacaacaaattacctttctgggtgtttcttgtaaactatactcctgtttgaatgttaaactttgttgctaaagtttaattttaagatgtttgaatgttcagtttatgtatttgaactacaataaaccaaccctttttatatatctgtattgtatatgattattgttacttaatttttaagagcttattttaacctgtttttaaaagcagcaaatagaatttcccacaaagtaagttgactctaaatcttaagtattacctagtttttaaaggtttgaatataataatgcagtatttgcagtataaaaaggaaggaatttgtagagaatcattttggtgctcaagtctcttagcagtgccttattgcctcatagcaagaagatgctggggttttttttgtttttgtcctttgtattaatgtatgatggtttgcgcctttttggcattctttcaacatgtcgtgtacatcacaccatgaatcagttcctaattgatatatctagctttacctcccgagttaaaaaaaaatctttttattttatgccttcataggttgctcgtttca

SEQ ID NO: 14760 - DNA, 1113 bp, Homo sapiens
gatgcccctgccatccccccaacctcctcatattgcctctgaacccagatggcaatccatcccggttctctctgagggccacgggcttgggtagtggaaagggtgtttgggaaattgttaaatcagttacccgtagtagagctatttcttgtacttctaagttttctagaagtggaaggattgtagtcatcctgaaaatgggtttacttcaaaatccctcagccttgttcttcacgactgtctatactgagagtgtcatgtttccacaaagggctgacacctgagcctggattttcactcatccctgagaagccctttccagtagggtgggcaattcccaacttccttgccacaagcttcccaggctttctcccctggaaaactccagcttgagtcccagatacactcatgggctgccctgggcagccagcattcattgtaagttccctctttgaaaactggtgtgtgggtgttcagttctgtgtctggtgggtatggacagacagtaatctcctgtgatctgtgctagctgtgaggcagctctggaacgtgaagagctgtttggtttgaaccgtgaacaaaactgtgttttgagtttagctgacattaaagaaaaaagttcatcacgtgactgttaatgtaaacctggttattaaaataactatgaaattaccaacattgttctccagtcttcttctttgtgtgatgtgcattttcacctataatattaaaattgcccagtagaactgaaagggttagtaagaggggcaggcagatctgctgataacagagttgtctggagaaaaattgggggcttctatttttgaaattgagttgttagttttgaccaccaagcttgatggccattttgaaactttggagaatgagtaagtttttttcttctgtggatcatcaaatttagtattatatgccatttgggataaatctagctaagtccagaacagagccataaagctttttgttttgggttttttttttttttttggtctttcccctaaagccttgctatttgattgttttggaagcattttctgcttctttttaatagcctagacttgaagaaaaactcaaattacacccataccaaagtat

SEQ ID NO: 14761 - DNA, 2179 bp, Homo sapiens
gccagcaaggcacttcatatcttgcactcttaaaattaacccagtttctctcttgcccacatccccctacccgccactctgttttttttttccccctgggaatttatttccaactgtaggcacccaagtggatgagggggttcgctcagccagcaagcgcatcgtggcgcccccaggcggccgttctaatatcacatctctgagttaagcaagccttcctcaaagagaggggcagaagcaagaagagattgttttgaagccaaaatggtacaccgatatttaagaaggaaagcgaatccaaacggttgtgatctaaagaatcaataagcctcaagccttatgtttctccaatgttacgctcgcttgcctagctttacgaatattgctttgttttctgtttatgcatagccttgatttgtttgactcccctccccccatttacatgcatgcaatcagacaggccactaaggtaaaagagtctgctctatcatagtgttgagagcgtgtgtagtgctgcatcttatgacaaggggacagacaagctgggacgtcagggaaatgaacaaaagggacgcaggttatttggggtgagtgggtggtgggagcctggagcaaggtggagggtgcagaggggctggggtagggcatgtaggagggaggtgggtgggtcaggtgagtggaaggggtgttgtatattgtgttgatgacgtacgttatttccatggaagatagccgctgtggcagctgtcacatcaccacagctccctagggtctgccgagaaggcaggcagtctttgggttctgttctttgtcacgtcccctacaagtaaattttgtttctttgaacgtttattaaaatgccaagacccaaccatttcttccacctgcttgattgtgccagtgtttgctcaggcctctttcttagtgttgctttcaaatccttctctttcctgggttgggaaggccaggcagggacagagcaaatgacacttctcttcctcttgccctccctgcctctttggtgctcttaaaagccagcagctgagaacatagcacaggcccacgtggtgagggcacccacagcttaaagacgcttccttctaaacacggcgaggtcacctctcactcttctgtctttgcaaaccgagaagagtggcatgcttctggcatcccaagtcaggattttagctcagatgaggcagaatgaagggcctctcttacaggcagtttgtgtttgattctctcgatcctggcacatccatgataaataggagtttttgaaagttggttttattaggtgttccctaatttttaccgtaataggtcatctcagcttatatgaaagtcaagtggggaactgggaaagccaaagtcagtcttgagcagagggagcacattttgtggacctggttccacctttccattccaaaccacctgtttccccttccattagcagaaactctgggggaactttgtgtctcagtcctagaatctccccaagtgagtggaagtgacatgatgcagtcttcctcatggggcacctgaaagaaattagtgtgggtgcttcgatctaccttgtctgtcagagttgaatatctctttccctatcatgctgcttctgaaaattcagttttggagcaagtcctgtgagcaagataagaatctatagaaccaagatgctcattttcagaagaaatatgttcaacctgggatcagacttccatgctctggggaatccaagtggtagcacctgtaaccctgtgtactaagtgctttgaagagaagagcaggcctcagacaccttttaattgcttaggagaaaccattgtctctgactgcaggtttgaataagttgaagaccagagaaaagtacacactgggctacaaaggaatttggagatagccaaggaacaggatttcccctagcaagctaccttctgttcaaatcatgaaaaaagactatttccccttagaatagggaagcttgctattttaaagctcttgtagtgcttttcttttaagggagatgtagtaaaagggaaaatgtagctcttagtttacacttcaaagatgtgggggtctttcagagaactaagaataacagttttatgtgcagagagagtttgccagatctgaagcatatacctcattgactaggctgttactttgggataggttg

SEQ ID NO: 14762 - DNA, 1191 bp, Homo sapiens
tggctacaaacttcatggccgcaccattaggcttgcccgagtggaagtggcagtggagtctcagagaagactgtgaagaggccatcaggaactggatgttctcccagagcgcagtcacctatgtttcttttatttattaaactaggtttgtattgtacatgaggtacttcatgtgatatgttttggatttagtcatattggctttatttctaagatattctattgatttaatgtgacctgtttggtctcatcagaagtcttaccattgggcatttgaacagtgtgacaggtgttccaatggcctttatcaaaacatgtttaggaaaattggtactgtgataaatttgaatccaaaatccttttaactatgggttttcaactacatgtttcttcctagcggtctctataacaggaattgtgtagtatcttgtattttgtggaaaaaggagatggtagggattggttcaacatttgggtacttagaggataaagcttcgtggtcgtataaatttagatcatttggattgatttttatacacatagattttcaggactttaccttttgttttgtttttttccttttagccatcttttgttcttgtaatcccaactagataggctttatgctcacatcattgtcccatacccacccctttctcatccccatttgcaggggctaaaggtctagatgagacttggaaggcaaggagcatcgaaatttgagatacccaggaccctttcaagcaagaatggccaaaaagccttgtgctgtctttgctcttcaaattattttcagcctccttgtcatataatcatttcaggcaaactgaggcaacactaacagctaatgacccagatggctctatttgggtaatttacctacaacttattccaccagcctttactcctctgcccttttgtcaattttaccttataatcctttattaaatgatgggaggtggtgatcaggacaaaagtgttaggttcccatgatttctcatttcatttattaatagttaatgctgaatttttttttaagtttcctctggctctatttatgttactttttgcgataagaacacttaacataagtattctctcctcttggcaattttttttttttttcctgtgttgcccaggctgacctccaactcctgggcccaagcaatcctgcctcagcctgccaagtag

SEQ ID NO: 14763 - DNA, 3051 bp, Homo sapiens
agctaatacttttcacaagagacgaaataacatgagccactataattattggctcagttccacccaatttccatattttgggtgtaatttaaaatttttgacttggaattttaactttttttttgttttgattttttaccaggtttctaagcatgaattgaggaacagaagaagcagagcagatgatcggagcagcatttgtttctccccaaatctagaaattttagttcatatgtacactagccagtggttgtggacaaccatttacttggtgtaaagaacttaatttcagtataaactgactctgggcagcattggtgatgctgtatcctgagttgtagcctctgtaattgtgaatattaactgagatagtgaaacatggtgtccggttttctattgcattttttcaagtggaaaagttaactaaatggttgacacacaaaaattggtggagaaattgtgcatatgccaattttttgttaaaaccttttgttttgaactatactgctttgagatctcatttcagaagaacggcatgaacagtcttcagccacagttgtgatggttgttaaatgctcacaattgtgcattcttagggtttttccatccctggggtttgcaagttgttcacttaaaacattcttaaaatggttggcttcttgtctgcaagccagctgatatggtagcaaccaaagattccagtgtttgagcatatgaaagactctgcctgcttaattgtgctagaaataacagcatctaaagtgaagacttaagaaaaacttagtgactactagattatccttaggactctgcattaactctataatgttcttggtattaaaaaaaaagcatatttgtcacagaaatttagttaacatcttacaactgaacatgtatgtatgttgcttagataaatgtaatcactgtaaacatctatatgatctgggattttgtttttattttgaaatgggagcttttttgtttacaagttcattaaaaactaaaaactgtttctgtaaggaaatgagattttttttaaacaacaaaaaatgccttgctgactcactattaaataaaaatctccccaattttttgatagactacttcaagccatttgttacatggtattcctttgcaagtcaatttaggtttcgtgttataacttttcctctttttttaagaaaaatgaaaaaagtaattcttttgtctgaaggggaaaggcattctttcatttttttctttttttttttttttttttatgacttgcaggcacaatatctagtactgcaactgccagaacttggtattgtagctgctgcccgctgactagcagctggactgattttgaataaaaatgaaagcattaaagggtttccctacaaaacatttttctttaaaatacttttgaaatggctataagcagttgactttcacccttggagagcatcacactgtgtgaggttcagtgattgttgaccctccccagcccctcctgcttctttaagttatctgtgtgcgtgcgcttcctctcaatcttctttgcacgctcatttctttttctctgacccatgagaaaggaaaacttactgatgataatttttaaatagtgtaatttattcatttatagcatgtcaggataaattaaaagaacatttgtctggaaatgctgccgggagcctattgtgtaaatgtaggtattttgtaaaataaccttgaaattgtaaattgacacgtgtttggtcagattgtgtcaagtttaatttgttttgttttcttttttcttttttttatttgaaaactactttagcaataattaattccatgattatcacattctgccattaagggatattagtaccgtaatactgaagaaattttattaagtctgaacttctggggtaggcagcttctttgtttcttttctatccacccttgtcggttgaggtatttgtttcttgactaataaaccctttgatacttttagccagaaatcagtctcataaagctatttttgagtatagtttgtgtaaaataaaaatgtttagctttggtaataacttccaagctgaactccctctagcaagatatttttcagtgcttttatttactatgcacttagactatgcactttttctgaaatatttttgtaacacttttttgtatttttgccatttgaaaaggttgtggtgtagttggtctgtaattaagttgcagatttaaaactgctgttagctttgtaaatcaaaatataggtgttttttgtcctggtatatcgtcattccatctgcagctggagctggaatcccattgatcttctagctaccattcattttcttcactgttcacaaaagaagagtgtgaaattcagtgaatgctgttactaatcctgttacgagatgaatctcatttcaccaaaattaaattatgtttttccgctaaaatgatgatacaagttgaagacacatcactctgaaattggaagacctcaccacttaaggctccacagtggcttactcagctgaactctaggttactactctttactttgttcacccattggggggtgcagtttttttaaaatgttgggagatggccattctaactactgttgaatgtctctgttttgggaaggtataacaagaaataaaaaagaatatatatgaagggagagactggttatctcctcccatatggttgtgcttatcctcttatggcttacaaatgaatatttggaggtttgctttcacaatgatttcccatcaacaaatatttttagtaggatttttcctgtttctgttagtccttgcagtactcataaatgttttaagctgagcatactgtaatagtcataagtttaatttcattataataaaaataatcaaacaaaaggactttagaacccaagacaatgagctagttttccctaaagtttgctgaactattaaggaatatgttcttatagcttttgactagaatgagtcatgggaattctaagaagggatggcctagacatttttagctcagttaaattcagcatttaatgcaggtgag

SEQ ID NO: 14764 - DNA, 1128 bp, Homo sapiens
ttgcggccacattgggattaactgaatctcataaaaggaccaccaaggtgaacaacttagggcttttaggccctgtatggcagtatgtcaccctctttctagacacacagaagtagcctttgaataatgtaaaactaaatgtaaacctaaaaaatgccaacatttggttgatgaaacctggagaagcttttcaataagaattcattagaagatgaacagttttattcaaacgaaggcatttaatgctatagtgaaaggaacctgtagccagaaaacttagattcaggctagttttacacttgagatcttaagttaacttcttcctttcatggaccttagtttccttatttattgcccatatgttattaaaaatgagagaatgtttgtgaatgtcatcaactgtaaaatcccttatgtatacaaggtattcttatttttctaggaaaagccagccaaagtaaaagtggaattggcttctggcgtctcttccaaaggctctgtggtgaaaagaaatcagcaacctgtcaccactgagcaaaattcctctaaggaaaatgcctccaaactgactctggagaattcggaagctgtaagccagctcctgaacgtagctcctcccagagaagtaggtgaggagagtgagtgggaggaagtgatcatctccgatgcccatgttttggttaaggaagctcccgggaattgtggtacagcagtcactaagacgccagtcgtcaaaagtggtgtgcagcctgaggtcactctggggacaactgacaatgacagtcctggagcagacgtaccaacaccatccgaggggacaagtacctccagtccactccctgctcctaaaaaacctacagggtaagtcagtgtgtttgtataatatagggctttggaaatgccccatgtttcttttatctcatgtctgtacagcatgcctgagagaggcagcagagaccaggcaatggttcctgttttagagatacagaaaccaaggcctagagatatataaagattgtcccttcccccggactctgctattcatgtactgctgtcagattacttacacatctcttcttgtcagtctccctaaagcattaattagagtcttgctggtataggctctgg

SEQ ID NO: 14765 - DNA, 1235 bp, Homo sapiens
atgccactcactattacctctacaaccgcctcatggacttcctcaccagccgcgaaattgtcaatcgtcagatccatgacattgtacagagctgccagcctggtgaggtggtcattcgtgacaccctctaccgccttggggttgctcagatcaagacagagacagaggaggagggtgaggaagaggaggtggccgcagtggcagaataagccaggctgttgtacagggactacaccatctctcaagccatagtaaggcccttgcctgaggcagagctatccaggggacctgcagaagtggtctcctgtggggagggcctctgactgctgggactgaccaaagagcttccattccctgagcatggtgggacccagggtcctcagttctcaaccctccaggggtcaggagtggtaccaggaaacctcttctggccccgagagagcacttgggggacacggtatgtttaatggaggggaggctgagggaaaggctcgtagctggtgggttccgtggggcctgcggtgtgggtcagggtggaggtcctgggtgggctaaggcgtgagccccagcactaggtgggaaggctgctgaggtctctcccacccctgaggagccctggtttcagccccctcagtctgatgaattgcttagcctgttgcctttgactaggggcctgggtggcctcattaactctaggggtccctttgggctcttgattctccctgaaggagggatgcatttctctcttgctcttcctgtacccacatttgggggaagctgaggagggaggaacagtcagccacagctctcttccagcactgtcctctccaccccaagctttgaggaagagcatccccttcctcctttccctggccactgctgctgcagccaatatcctctctgggcctgggaccctctccacagaggggatgtggtccctggtcatgacataacctagcagcagtaggaaaaactcccttctatgaaggggaagcagactgggccataaggaaacagcaggactggctcaagtgcccaaggtttgtttagggcctgggaattggccatgtgttaatttattgagtggagtaggtggctttttttccctccctcttcccccaacaagaataaagtttattaaattatctggttttggtgtagcaggagtcaattccgtgcacatcgtatggggcacagtgtggtcaagctccacagctgtgagctcgtcacttcat

SEQ ID NO: 14766 - DNA, 1607 bp, Homo sapiens
agatcaagccattgcactttagcctgggcaacaagagtgaaattccatctcaaaaaaaaaaaaaaaagtacaattattatgtgtcaatcaaaaataaaataaaacttgaagaaacctggagtagctgtattaatatcagacaaaatagacttcagaacaagaaatatttccaggcataatgagggacattacatagtgaagacagaatcaattttacaagaagacataacaatcctgggtgtatatgcactttagaacagagcttcagtttttttttccggctggaaccatggagggtgtagaagagaagaagaaggaggttcctgctgtgccagaaacccttaagaaaaagcgaaggaatttcgcagagctgaagatgaagcgcctgagaaagaagtttgcccaaaagatgcttcgaaaggcaaggaggaagcttatctatgaaaaagcaaagcactatcacaaggaatataggcagatgtacaggactgaaattcgaatggcgaggatggcaagaaaagctggcaacttctatgtacctgcagaacccaaattggcgtttgtcatcagaatcagaggtatcaatggagtgagcccaaaggttcgaaaggtgttgcagcttcttcgccttcgtcaaatcttcaatggaacctttgtgaagctcaacaaggcttcgattaacatgctgaggattgtagagccatatattgcatgggggtaccccaatctgaagtcagtaaatgaactaatctacaagcgtggttatggcaaaatcaataagaagcgaattgctttgacagataacgctttgattgctcgatctcttggtaaatacggcatcatctgcgtggaggatttgattcatgagatctatactgttggaaaacgcttcaaagaggcaaataacttcctgtggcccttcaaattgtcttctccacgaggtggaatgaagaaaaagaccacccattttgtagaaggtggagatgctggcaacagggaggaccagatcaacaggcttattagaagaatgaactaaggtgtctaccatgattatttttctaagctggttggttaataaacagtacctgctctcaaattggaaaaaaaaaaaaaaaaaaaaagaacagagcttcaaactacatgaaacaaaactgatagacccgaaaggagagatataaaaatctcttgtaacacccttctcccagttgtaggtggtacaagtagagagcaaatcagcaaggttatagaaaacctgaataaaatcgtaaatgattgacctaattgatttttatccacctaacaattgcagaatacacattcatctcaagggcatatagaacattcaccaagatataccatattctatcacttaagatacatctttaaaagtttaaataagttatgcaaagtatttcttgcatcacaacagaatcaaacttgaaattattaacaaaaaggtatctgggaaattgaaaatatttggaaattaaacacacttataaacaacccaagagtcaaagaagaagtcacatgaaaaattagaaaatattttgaattggataagaaaacaatggtctaaggctaccaccttaagaaactagaaaaag

SEQ ID NO: 14767 - DNA, 1096 bp, Homo sapiens
ggactgtggaagcatcagatgccagcactgactcaggaacagcaagtcagggcagagaggaggagggaggctgtcaggatggaaatacctggacttttctttgcttccctcgcaaactggggtcttctctaccgaacttcccaggatttcatctcaccatatctgtgtgccgcccccagcaccccccacccacctctggggggcccgtgagcgtgtgtcttcattgcctctctccccttggcgtctgatgaccacagcaaagcactgggaatttctactcttcatgcctcatcctgcagcctcgggttcgcattctctctttcttttcctctttccctctttccctgggattgactctgagtggaataccttggcacatccactaggatctactgtctgcactgttttctttgcatgactttatacgcagtaagtatgttgaaaacaaacaaaaagaagaaaacactcaacaaaaccaatctacatgttttggactaaaaaaaaaaatagaggttgtattctcagtgtccgactcggaattatgttgctgcctctctgtgcttttggcctctgtgtggccgtgttttgccagcatgagatactgtcccctctggaggattttaggggaggaagagccacgtccccagggattggaggaggctccggtaccctcgaccctcctgggtgttggttggagcagaactggtgaggatgtttgatccgagattttctgagctctccccaatcaccagctgtctgctgggttcttttctcaagtcctgctgcccaggcccaggtgagacaggcaacgccaggtctgcaggccaggagagatgctgcccaggcctcctggtttccaagctggtccatcactggcctctgtccttggcagagaccttgctgcccaggcccaggggcaggctcttggcctgccccaggcccagagggcttcccagtaaggcccagtgatcccattatcccaggggcaaaaccacctgtccccttttgagctgccagttccctacagccatccccagtcaagggtgagggtgtggccttcaccaggggctgctgtaattaccgagcaaggtctgag

SEQ ID NO: 14768 - DNA, 1182 bp, Homo sapiens
tgggccatgtatcaggagggctgcatcagaacctctggggttggggcaactagactgtaaatacctccccaggtgaattgcatattccaaccaggcagccttggaaaactgcttagaccactccctgcattcagcaagtaactgtttctgaagccagccggggaaagaaggcagaattggacattctggccgtggctttgcttccagtagggacagcagccttgggtcgctccctttccctctgggcttgtggttttcccactttgtataagggagctgatcctgctgaatgtagggcttcactgtgagggtcaggtgggctctgggagttgtgaagtgctgtgctgggtcttagcagatgtgtggggtgggagggggcaccctgggcagctggaatggcttctgtgcccagctgcccctgagctcagtggaccctttgccttgtaaaacactccctaaccccatcacctcctttccctggccaagcctttaatcactgggggggtgttttgtttttgtttttcaaggtgattaaaccccctctgatttttgtcgaccctaatcgtagtccagctggcccagctgctacacccgcacaagcccaggctgcaagcaccccgaggaaggcccgagcctcggagagcacagccaggagctcctcctccgagagcgaggatgaggacgtgatccccgctacacagtgcttgactcctggtgagcgcagcccttatgcagtggtgggaggggctgccagcactgccccacattgaggcccagaagggacaggacactggctgagtcacatagcaaggtgttggtcgggaggggcttggggtcaggtctctgggccctgcattagccattctgattagggcctggctcagacctgcagttctgggggaatagttgccagagcttttttgtggcagccccagtcatggagcccagaccagtggctagaagctgcagggaccaggttcctacatagtctaagaaagaattctgtatcagttgactgcctgtggaacaagtggtcagggtggtagtgagcttcccgtccttggtggcatgtaaagtaggttaggcaatccctaagccagagacatcacagggatagatttcatctatcagagagacaggaccaatctgaggtttctttgacttctgagaatctgtgattct

SEQ ID NO: 14769 - DNA, 1223 bp, Homo sapiens
ggcggatctgtccaaaggatcctcccacctgcatctactgagtagctgggacaacagtgtgtgccacaccgggctttttttttttgtagcggggagtttcaccatgttgcccaggttggtcccaaactcctggcctcaggcgttccaccagcctcagtctcccaaagcccaaagtgctaggattacaggcatgagccaccgcgcccagccttaaaagattttttcagactttttttcagtgtctttttacttaatgaaaacgagacagttgcagttaccctgtctaaaagggttttttcctctagagaagacggtgggctagatgtcagaacctggatttgtcctgtgcctctgacatcttgcgcacagctcagcctgtttccctttctggaaagtgagttaagaccacgtcaggaaattcgaggaactggcagatggggccacttcatgttcacatccatctgttaggtactggggagtcatttggggagcagcaggatctgttgctgattggttaggccattggtctagggagtcctgggggcccttcccatccagctccaggcaatgacgctttctcttcctccccacagaggatgtcacccccatcccctctgacagcactcgcaggaaggggggtcgccgtggtcgccgtctgtgaacaagattcctcaaaatattttctgttaataaattgccttcatgtaaactgtttcaactccagccttctctccttcatcaggggctactcaggcatttgatttcttcctcctatttggcttcttgggagaaaggagcctgaggagagctgagatcctggtgctgcatttggggtcttttccatgctacttgcggcattaagttgccttggtcatctaaagcagaccaaggcgttggagacctcgttttgagtggagatgctggttctaaatatggaccaattcttaaagagccagagtgggaactgttgatccaagtgtagcctgaagcgaaagaggagccttccagacccatgccatatataaacacacgtgggtgtgcattctccccccacaccttctgtgcaaagctgggagctcactccactgcgtcttgctttttttcacttggcagatcttggagattgttccacatcagtacataaagtacataaagattgtcaccccacaaatacacaccaagtcctattttcatcagcgataaaaaagaaaagttcttgcttt

SEQ ID NO: 14770 - DNA, 1132 bp, Homo sapiens
cgtgaacaagccagacagtggtcagaacataacaacaaaccatagtggccccctcagcctaaaatatttactgtctggcttttttttttttcctcttttttgagacagggtctcactctcacccaggctggagtgcagtggcgctatctcagcttactgcagtctctggctttcaggctctagcagtcctcccacctcagcctcccgagtagctgggactgctagtagtagtgccaccacgcctggctaaattgtgtatttttgtagagatggggtttcaccatgttgctcaggctggtcttgaactcctgagctgaagcagtccgccctgccttagcctcccaaggtgctgagattatgggtgtgaaccactgtgtacagccctgtctggctctttacagaaagtttgcagacctctgaactagcggggtgttgggatcttagaaaggagatcttccattgacttggccaaaggctcttcttaacttaaaccttcattttctaggaccaagacccctggacctggggcccagtcggccctcagagcccttgcccgctcgggtatgaagatcgggcggattggtaagtgcccccctctagctaatgcttgggtttattttgaagcattggccccaaaaagcacgtgctgtgcccagtggatgtgcagcggctggtctggtcacttttggcagttaagtttgttaagggaggctgcaagaggcaccttgtgacttaaaaatctctccctgaatatctctgtcaccttgatatgaatgtcctgtttcatttgtgaatctctgtcctacactgcctggtgcaggtaaaactgacaagagatgaattgtcctttcctccattcttgaggtcattgctattagcattttgtgtgtaccatctcctgcattgtaggatgttcagcatttttggtttccgcctactaaatatcagttgggcatgccagtcgtgtgacagccaaaaatgaagtggggggtaccagcttctgttattaataccctcaggcctgtgatctcctggctccttacagctcttaggaagggaacagtagtctttccctgcacattgttctgtgcagttagtagcgacatacactgacgccccaggccaaagttcc

SEQ ID NO: 14771 - DNA, 1204 bp, Homo sapiens
tgctgttttgtccaggtaagaaaatgtgcttgtccatttagcccacaaatattgtgatttcccaggggttacaagagaggagacacattcttcgtccttacagcgtgatggtcattgaatccttggtttcttgggaattatcttctttccctagttccctttgcaggagcagcagtggactgcaagtgggctctgggtgcgggttcgacggccatttagcaagttgtgacttgtgtgaaatcactcagattctgagttttggtttcctcatatgtaaaattaggacagtaatgtctaccttgtggagtaatggtaaggattaaatgcaaaagtagatatataaaatgttaatactgagtatagctatattgggccattcaaccccactggactgaactccatgagggcagagcccatgaccatcatcctccaccatgactgagctgtgttgctcttcactcattaggatatcgtaagcactccttgttggacgaggaagaaatgaccctgtgcttttgtccccagggaaaccatctgccgtgtgactggtgggatgaaggtaaaggcagaccgagatgaatcctcaccatatgctgctatgttggctgcccaggatgtggcccagaggtgcaaggagctgggtatcaccgccctacacatcaaactccgggccacaggaggaaataggtacgagtcgcagaggggatggctgggtggtagaaaacctgctgggcttgggtgctggagcacctggatttgaggtttgggttttttgttgtgaccttgaacaagatattttaggcatatacatacttaataattggctcctgtgtacaccccccagcagctcagtgttgagcacccactgtatactaggagctgtgtttcaggtactagaagagagtgatggggaaacagacatggtctctaccctccttgtgtgggaccgaggctggtgggagagtcagactttaaacaacagagcaccagggagtatgtggttttcatttgtgacaaatgccaggaagcacaagtaaggagttggtgataaagtgtaatttaaactagggtctaaatgataagtccggagtccttccagtgaaataaggacaggaggagggtattccagctagagacaactgcagggaaaggtcttgaggtgggggtgaacctgggcacctgtgaaggaaagagtggcatgagg

SEQ ID NO: 14772 - DNA, 1950 bp, Homo sapiens
ggggtcgcactgtgttatatatatatatatatatatataatgtgtatatatatatattctattttttttggttgggttcgtttttaattcagtcctacaaaatggtggtaagccccagtctcaggggtcaccctgtcttagagctagagatgaggtggcagggagggaggctgtgtcctcagtggcctggggctgagcagaccttaggaaggggccctccccagtgccgtggctgctctggggctaccccaggtgaacagaggtggtgagatgcgcagggaagaccagctctctccaggacatcgggctgcgtgaagtccagtgaccctgaggggattttggccaaaggaaacagccagggctgggctaggagagctggggtcaaaagctgccccacccactctccctcacatggtgctaggctgggagctgccctgagagctgggatgcccaccaaggcccacagaactgtctccaggcccttgtagacagtgggatctctgggctgatttctggttggggtctgctcctaccccaccccatttaacaatgtgaagtgactgaggctggggtgcctctccctggccccctccaactgccaaattctgcttccctctgaaccccaggaaatactttctggagaggcttgtcttgttcagaagactctagcatcttggggctggaaggtcctttgacgggtatgaaacaggtccagaaaggggaggtggcctgcttggccgacgtcatggagccagctgggagcagggctgagcgttgaacccgaggctcccggttccaagtcccatcgtgctcctcttccaatgccacactgcctctgagcccatccttgggaccctactctgtgccaggttcctgtcccttcctccgtcacagcatggtcattccaggatatggggacaaaccactccttcccagccagggtgcctttgagccttctcattccgaggtctgcgtttgcatccctgtcgtgttctccctcgaggggtccttccccagcctgtgggggcctgggtctgttctgagctgattcccttttctccagttctctgctgggatgaagaaagttggacactcagtgggaccagctgcaggtggtttcactgtgtacacagcagtgtccccatcatgcctctcaatggggcctgcaagcctgggaacttgggcatcgttgggccagcaggatgagcagcaaagggtctgaggacagggtggcatgtctgcttgtgtgctcatgaagacatgcccacgccatggagccaggggcttatagagaggggcagtgacttccagagtcccatccgtcagtgaggggactgggctgcgggatgggtgaggatcttacagctcccaggttcggaaatctaccctctaggcctggaggcctctctcgcagagcatggaaggcaggagaggtgggctggcctagggcaggagctccacttctctctgcctctggctatgggaaggagcaggcggttggaaatcctgtgacagcagagatcttctggatttttgcctggacccttctgcaagcctggagactggacctgccacatgttccaagtctgtctgcctaggtcactgctgccacttctcctcccactaacagacctttcttgaagacccactaggtccagacactgccgggacttgcaggtatggggggtagaaggagaggcagataagctgcctggggggctgttagctaatgggtacaaggacaccccctcccgagaagagaagccacagatgagtgggccagcgaggccagtcttcaatgtccactaattcactctaagcatttggccaaaaaaaggagagagaaataactgaaattgttcaggtggctccatcgtctattctgtggtcccctccatgagcctttgccccagggtgggtgcaggtgcgagtgtcacctgcagctgcctc

SEQ ID NO: 14773 - DNA, 1258 bp, Homo sapiens
ttggtggtcccagcacagagctgtgcccatgggcttgttagtgggaaaagcaaatacaacaatgttttaccaaacatttaattatgaatgcccactccccagcatctagatctaaaattattaacattttgccacattctttttctctctctgtgtatgtatatgttttctctgtcctaatttaaaagtacattgcaaacatcatgaaacttgatccctgaaagcttcagcctgcatctcctaagagttagggcattgtcctacacattggcccagtatcacagccaagacgagaagtcatttcccagcgatgtctgctatctaatctgtattcaaatccccccaattgtctcccaggtaacttatgtgtctggttttggaatcagcatccagtcacggtgcacacattgcattttctaactatgtttttaaaacctctttgaatgctgaaaggtcttccctcagctcactttgagtttttaaatgacattgtttttgaggccctaggcctgctgtctttttgaagccccacattctgaatttgtcagattgtttgctcatggtgtcgcataaccacttcttctatcccctgtactttcaaggataatttaggctacatgagattttgccttttgtgctgacttgacagcttcacttctgcctaagatgcgcctccactgtcacctgtaccaagtgccaaaacagcagaggggccagttagagcaagagctctgggggggccggaaagtctccctggagaaggccgtaatatctgggccttggaaggaaggacacagggctctggaaggaggaggctgcatgcctgaaggctgggccttcgaccctggggatgggccacagggcaccaaacacatcatatgtctctctctttctattttggggtcccagggttttcatttcctggagacccgtggtctgtgtgcactggagcagagccaggctctcagttgcagcagggaaaagcctacatggggaactgcctcccgcaagctgtggtgtgagaagagccctggctggcagcaggagctgtgaagtttcatcccagccgggtgcatttagtagctgcctgaccatcttcctcccaggccctcagtttcttcatctgtagaatgagcagataggggccacagcagggattttcacacatcaaaggaggcagcctctgctctagttgatgtgaggatgagggggcggcctagaccccctgctgcccaggccgttgaggcaacactgggtt

SEQ ID NO: 14774 - DNA, 1137 bp, Homo sapiens
aacatgactaataaaaccgaacgcctgttccccttacccgtgtgggggacacgcagatgagtgaattggaatgtccagcagagttaccctcccaattatatgttcattttgtatattttttggtcgggggaaaaattgacctgcagtaaaaaaacctttgaccatttttatgtccattggatactttcctttttatcatcttaaaaaaagataactagtactaatcattgtagtggcctaagtgtgatttaactcttgaagtcacaccctccgaaagatgagtagaaaccagcaccagcacagcccagatcttctctttcctctccttttcctcatttattcctaaaggaatctgaccattttacgtctctacggcccaaaaaaagacaaaaataaaaattcctttttattcctgtcaactggatggaaacacaaatttcatggagctgtgtaccatcgaagaaacctggtgtctggcatgaaattactgtaaagaacttcctgtaaaacacgttctttaacaaactgaaatgaaaagcattggagcgtctgaatgaaagacgtgacctcctgctgggactctgatggtcttcagcattcaccttcgtgtgtcttcagtgtctcattgtcatccctgcttctgtttggtcttagagtgtttggatataactgaattgtagatggtaaaggaaatttgatgtgttttttgtttttaaataattaaaacgggtcaatttttcacatgttgtcatgggtttatttctagattcctctttatcctttggtagctgaactcgaggtcagtggaagttatttaatagaaatgagttatatattgtaaattttttaaatgttgctttagacttttgattatatccattccgtgatgatttacttatttttttttaacctcagcctattcttaggttgattccatgatgatttaaaaggctcagacctctttagtatttatctcaaagggtgattgtgaggttgaaataagatagtgcacagaaacacttagcacagagcctggtgtagggtagttgataaagggtaactttaagaagtcacccagctgggtgcatgccgatagtgccagctacttaagaggctgaggtgggaggattgcttgag

SEQ ID NO: 14775 - DNA, 1218 bp, Homo sapiens
ccaccggaccacggtcagcaacgtcaagatggacatcctgtcctacatgaggcggcaggcagccctgggggtcaagaggaagtaactgaaggccgtctcatcccatgtccaccatgtaggggagggactttgttcaggaagaaatccgtgtctccaaccacactatctacccatcacagacccctttcctatcactcaaggccccagcctggcacaaatggatgcatacagttctgtgtactgccaggcatgtgggtgtgggtgcatgtgggtgtttacacacatgcctacaggtatgcgtgattgtgtgtgtgtgcatgggtgtacagccacgtgtctacctatgtgtctttctgggaatgtgtaccatctgtgtgcctgcagctgtgtagtgctggacagtgacaaccctttctctccagttctccactccaatgataatagttcacttacacctaaacccaaaggaaaaaccagctctaggtccaattgttctgctctaactgatacctcaaccttggggccagcatctcccactgcctccaaatattagtaactatgactgacgtccccagaagtttctgggtctaccacactccccaaccccccactcctacttcctgaagggccctcccaaggctacatccccaccccacagttctccctgagagagatcaacctccctgagatcaaccaaggcagatgtgacagcaagggccacggaccccatggcaggggtggcgtcttcatgagggaggggcccaaagcccttgtgggcggacctcccctgagcctgtctgaggggccagcccttagtgcattcaggctaaggcccctgggcagggatgccacccctgctccttcggaggacgtgccctcacccctcactggtccactggcttgagactcaccccgtctgcccagtaaaagcctttctgcagcagctgagcctactgtgtgtggtgcttcttcaatggtggccgcccccgcctgggtgggaagtgaggaggagaaggtggggcagggtaaaggggggaggatgagaaaagaacaaatatgacaacaaaaactttttacagtgggtgcaaaggtaattgcggttttcgccatatggcaaaatccaaggctacctccccaccccacaattctccctgagatcagccaaggcagactgcaagggccatgtagccctattaggggtggcatcttcatgaggga

SEQ ID NO: 14776 - DNA, 1223 bp, Homo sapiens
agagagcgtcctgagcagcagtgggaagcgtctgggctgcatcaagatcgctgcctctctaaagggcatataacatggcatctgccacagcagaatggagcggtgtgaggaaggtcccttttcctctgttttgtgtttgccaaggccaaactcccactctctgcccccctttaatcccctttctacagtgagtccactaccctcactgaaaatcattttgtaccacttacattttaggctggggcaagcagccctgacctaagggagaatgagttggacagttcttgatagcccagggcatctgctgggctgaccacgttactcatccccgttaacattctctctaaagagcctcgttcatttccaaagcagttaaggaatgggaaccagagtgttttaggacctgaagaatctttatgactctctctctttcactcttttttttttttgtcactaagttaaaagcgaagtgagagtattaacgtttttgttctcctccggccccctgttacaatgaaggggcaaaagtatttgctcttagtctattcctcccttaacttctgtgactaatttttatttcctttctagatttgcccaattaatactagggtgcagtgtatcctggagaggtagggtgtgtgggggaggaatcccttgggggagatattaggagtgctctgttgtttacaaactcaggtacccgcagggcctagcaagagacttaaatgactgataagaaccgtgagaaacatgttgcttccaggcttgatttcgatttttcgctttttttttttttgagacagaatctcactttgtcaccaggctggagtgcagtggtgcaatctcacctcactgcaacctccgcctcctgggttcaagcaattctcctgcctcagcctcccaagtagcttggactacaggccctgccaccacgcccggctaatttgtgtatttttagtagagatggggtttcaccatgttggccaggatggtctcgatctcttgacctcgtgatctgtccaccttggccttgcaaagcgctggattacaggcatgagccactacacccagccgatttttcctttttgattaaagatgctattacaatgtaaatatttcttacacagaaagtcacagcacatgtgcccattgatacaaggctgctgaggcctggtctccagttggaaatataattaagggtggcaaggactggagtcagttgg

SEQ ID NO: 14777 - DNA, 1928 bp, Homo sapiens
tttcagaaggccattgatgaattccccctctttagctgtgtatttgtgcacgtgtgtgtgtacgtgcgtgtgtgtgtgtgttcctgtgtaagtaacagaccagactccttttctcttctgtcccgtcaccaggctcttgcttcactgcagatacagttcactctgaaagctggttgaaggagagcagcaaaaatgtatcaggggttttgcttctgtgtttcgccaaagctcataagggctgtgacccacccatatggccccagttttttctgtctcttctgttccaaagccaggagagctgacttccaggtgaagggatgggaaaagtggactctcattgtagtgactcccaacctacctaataatttgttaacttaggaatatgctatcattgttgacttgttcttccttaggagaaggacgattttcacccaccctttctgttctatggtggactcttaacaggtgctatgtgaccaggaatctagccgggagtagcagaggccctgtcttctgaagtctcaggcttagaagttaccaaagtgggctcagaaactgtcatctcctggttccaagttcgggctctggcagcccagccgctatcttagctgtctttcccagcggtgctaagagtggtctcagtgagaaggtagatgccaactggagggccagacctgtgtcctgcccatgtcctccttggtggacgtttctgtttactcagagctgctagagaccatcctgcccatccgagttctgagattgggactgtgatgttgggacctgaggactggatggtagaatactggggtcccccagctcttagcaggatgcaggctattgcttccacacccctggccgtgagaacgtggtatgtaggagagttggctgtagctttaggatttctggaagccaatttggcatggcctatttgatctctggcttgtgctcctgctacactgacagactgattgcgtggctctttcagaagacccaggaagggcagctccagccagaggaccttcctggctatgcaggtgcacagctcttaggcatcaagcaaagggtcagccagtcagtagtagtgggaggaagcccttcctcctcttatgcaagcagctcgcagccagcccagaatctcttatgcagcccaaagggcttcttgaggtagagagccctccccagtgtcttcccaggataagtagaaatatgatcacagagcaacggagcaaaggctttcgggagtgtgaggctgcatctgctggagcaaagggaaaccgtgggcttttccggccagatactcttgagctctgtgaccctgctcctgtcaccccaatttctccaagccagaggtagctttctcagagccccttggtggttctgtcctccaaatgctgctgttgggagcgggcttccagctctcagtgggcagtgcacctcctcctaaatgcaggcacttgctaggaagagtgtgagctggcgtcttctgttcaccctgcctagcagttgtcaccattcacaagtggcattatttatgttgtgctgctgtccagctgctaagatcccttcatctgcacaagccctggctagatatgtgtgaatgtgtggcatcatttcacttcagccgcccaattccatctctcctctgcagccagattcactggctgatgctcactgctcactgtctatccccacgaaatttagttttatcagtagtcttaaagtgttgatctcaaacaagtacattagaaaaatcatgtttcttctctctcatcttactttttcttctcagatttctcccttcctagaacattctctctgtttagcactaatgttcacctcgtattttttggaagtgcaaaaatctcaatttgtgtctgtttacagctctctctcctcactgctcacagcaaggggttctgtatcagtgg

SEQ ID NO: 14778 - DNA, 1961 bp, Homo sapiens
gccggctgcttcggcatcaagcagagtgagtgtctgaacaaagaagcaaggggcatgggcagaaacactgctcccagggtgctgggttgtcatccccccactctccgctctcttggtctgtctgttgtctgtcctctctgcctgtctctgctctctctgcctatttgactcctgtctcttgggcgtcttcctgatccttctctgtccatccaactgtccctctctctttcccttcctcaagcgttagcactcacccgtgctaaacactattttgggaactggcaggcacacagagaggaaacaggaagtgtaacttggcagcgtgtgtaagagacagggacaggccagagacagagagagcgagattcctccgtcactgacttcctgggtgaccttgcatggccacctagacccctgcccctggggatgggtgggagtccactgactccttgggaagtgcgttatcatcgacacagccttatttttaaccgtgctcttttcttgctttgcagaggatatcgacaaggatcttgtgatctaaatccactccttccacagtaccggattctctctttaaccctccccttcgtgtttcccccaatgtttaaaatgtttggatggtttgttgttctgcctggagacaaggtgctaacatagatttaagtgaatacattaacggtgctaaaaatgaaaattctaacccaagacatgacattcttagctgtaacttaactattaaggccttttccacacgcattaatagtcccatttttctcttgccatttgtagctttgcccattgtcttattggcacatgggtggacacggatctgctgggctctgccttaaacacacattgcagcttcaacttttctctttagtgttctgtttgaaactaatacttaccgagtcagactttgtgttcatttcatttcagggtcttggctgcctgtgggcttccccaggtggcctggaggtgggcaaagggaagtaacagacacacgatgttgtcaaggatggttttgggactagaggctcagtggtgggagagatccctgcagaacccaccaaccagaacgtggtttgcctgaggctgtaactgagagaaagattctggggctgtgttatgaaaatatagacattctcacataagcccagttcatcaccatttcctcctttacctttcagtgcagtttcttttcacattaggctgttggttcaaacttttgggagcacggactgtcagttctctgggaagtggtcagcgcatcctgcagggcttctcctcctctgtcttttggagaaccagggctcttctcaggggctctagggactgccaggctgtttcagccaggaaggccaaaatcaagagtgagatgtagaaagttgtaaaatagaaaaagtggagttggtgaatcggttgttctttcctcacatttggatgattgtcataaggtttttagcatgttcctccttttcttcaccctccccttttttcttctattaatcaagagaaacttcaaagttaatgggatggtcggatctcacaggctgagaactcgttcacctccaagcatttcatgaaaaagctgcttcttattaatcatacaaactctcaccatgatgtgaagagtttcacaaatccttcaaaataaaaagtaatgacttagaaactgccttcctgggtgatttgcatgtgtcttagtcttagtcaccttattatcctgacacaaaaacacatgagcatacatgtctacacatgactacacaaatgcaaacctttgcaaacacattatgcttttgcacacacacacctgtacacacacaccggcatgtttatacacagggagtgtatggttcctgtaagcactaagttagctgttttcatttaatgacctgtggtttaacccttttgatcactaccaccattatcagcaccagactgagcagctatatcctttt

SEQ ID NO: 14779 - DNA, 1194 bp, Homo sapiens
tttcctcatctgtcaagaagggataataataggccaggtgcggcgggtaatgcctgtaatcccagcactttgggaggctaaggcaggcagatcacaaagtcaggactttgagaccagcctggccaacatggtgaaaccccgtctctactaaatatacaaaaaaattagccgggcatggtggcggacgcctgtagtcccagctactcgggagtctgaggcaggagaatcgcttgaacccaggaggcggaggttgcagtgagctgagatcgtgccactgcactgcagcctgggtgacactgtgagactcagtctcaaaaaaaaaaaaaaaaaaaaagaatcatcccacttactgactttaaaaacctactttaaacctactggcttttaaaatctacccattttataagtctttataaaagaccccagaggccatgaggaaccagaactacccagttatgcatctggtggtagagccaatcttgagattctcctataaagaagtgattactctgtccatgaaatagattttccatcaccctcaaatttatttttgcccctcagaggtggaggaggagagcactgaactgtaatgtttatacccagaagctggtttctggcttctgacctttatactgtgggggatgggacctactccctgtagtcagcgacagaaagtttcaggtatctgttgactttaggtccttgggcagcaaaaaactgtgctccctaaaaatgtgtttctagtttcagagcttctgctgagagtcagggttatgagggctggcggtgtactttgcttttccagaaccagcaagatttccctggagcgaagaaagcctaggttcatattccatactcagtagttatttgccacatgactgcaagctacctagtgaactcttgggaacttcactttcctcctgagtgaaataagataaatagctctctttccaggctcagtgaggactaacttagatactgtacaaagataatttgacatgtaatagacaatcagtagatttagctcttatgttgatcttgcaaacccttcaaagctttggctcagtatataagtacaaaccatagatgaattgattttctgctggttatcctagagcaagactcagcaaacttttttttttacacggcaccgatagtaaacattttagtcttcacaaaccatagggtctctgg

SEQ ID NO: 14780 - DNA, 1973 bp, Homo sapiens
gggattacaggcatgagtcaccgtgcccagcctctgctggttcattattacagctttctttatctttgatagtgatagccagctcatcagtactcttaagtctggtcaccttgattcttacagcccatcatgttcagaggtgaggtccgtctgaatgtcgaagagaagaagactcgagctgccagggaaggcgaccgacgagataatcgccttcggggacctggaggccctcgaggtgggctgggtggtggaatgagaggccctccccgtggaggcatggtgcagaaaccaggatttggagtgggaagggggcttgcgccacggcagtgaatcttcatggatcttcatgcagccatacaaaccctggttccaacagaatggtgaattttcgacagcctttggtatcttggagtatgaccccagtctgttataaactgcttaagtttgtataattttactttttttgtgtgttaatggtgtgtgctccctctccctctcttccctttcctgacctttagtctttcacttccaattttgtggaatgatattttaggaataacggacttttaaagaagcaaaaaaaaagactgaatttccttgcttactttgcatatacagactggattttttttttttttttacagccatttccccaaaggaatgtcttgcatattactgacatttggtatgtttcattcattggaatatttcttattttctacgtgtttgaaaagcctgtaagaaatacaggatttgataatattttgaaggcaggaaaaacccaaattgtttcttctttgagagtcatgactaccttctggtgtggagaaattgccattggaaaatttgacaattttgattctcactggtatgtttaaaaactgaataaaaggaatagaatttttttttgataaaggatcacaaaacaattctaaaacctaactgtttttaccattgaaatttaaattgtgataataggttttaaatgtctagaatgcaactgataggcttttcttgaactgttagtttttttgaagtagttttttcatgtttaatttgtatttgtaaaaaaacaaaaagcaaaaaaattcccaaaacccagataacaaccagagcaaaactgttgtgccttctatttatctttgatttcagtcttggcaattgtttaaaaaaaaaatctagatttgttttattaggttcagagtatgtggggaattatagaatccctctttcatcactttgtgtatgtcttttgttaacatatttgttatgccttattctaaaattgagtctcaaactggaatgcctttgaagacagatgcttctatagaggttctttgacctaaatagttcagcatttgtatttttattctggtatctaatcagattcctaatcatagcccgtaagaaggaatgttactttaatattggactttgctcatgtgctcgtgtccgcatttttttttttcttaaaatcatagccatatggtaaattttctattttgttatggttctcttttattgatgggcatgcagtgggtgttacttggaaatggccaatttttattaaaatatttctggaagaaaatttaatctggcaatatagactaatactcgtttcacatatgtgttatttgttgagtgctgtgtgtgagatgggtgaaggttttgtttacacgtgtgaaacaaacttttgtgtgattgtcattactaattgaagggcaaccaggttgtaaaattcagcgtatttattttcttaacagtattcatctttaggactgtcgtttgaggatagcataggaatatttggtttgcattactgagaaactctaggtttgctgtgatggttaagaccacagtgaagttggtattaccagtttggttccagttcctcaaatatttgaaaattggcagcatctcctttacataaacttaatgtaactgaatcacatggcttttttgtagggttaaag

SEQ ID NO: 14781 - DNA, 1143 bp, Homo sapiens
aaaaaaaattactttgtggtaacttcaaggtcataaattatggatagcctagaaattatccttcatgagtgaatactaaattatacatttcaaaacagaagttcttcctacttggagacttaagggcattaactagatgcagcaatcctcagcttggtgttatcacatactagaggacatttggaaatgtgtgaaatttggaagggttgttggagagacatgcatctggcatttattgggtggggtctaaggataccaaatgttgtgtaaaaatgaagcaaccccattgagaacactgatagtccctattcctgtgggtgggtggagctgtgggattaggaaaactggaatgaagactcattcttttgaaactcagcctcagataaataacaaactaggaaatggaaatctgtttcaagaattgcagtaacatctactctaaggaattagtaatttcactttttattatttgtaccaaatgtatgtgtgtgttgtgtatgttggtgtaaatgtggagaggtggtagcaatacatactgatgctgcttgtaatttgttgcagggaattactgcacaatctcagaaaatagaaagcttccccagtgctttctgtcatcagagttgggatgattgtgaggttttgaatgatagtattggacctaagaaataggattagcatcatgatcagaactgttgagaatccttgtacaattatgtacattattgcatgtagagtaaacctgagagcttagagatgtatacgtttccactgctggaaaatcattataagttagggcaacattttctataggtggcagcagtaggagctcatcacattgaacattttcagattttaaaatgaaaattttcatccgtaggaatggcccaatgtatagttattagctactgagcttagaactcttgacccatgagattttttttttaaatttttatttttatagaggcaaggtcttgctatgttgtcaggctggtctcaagctcctggcctcatcagttctcctgccttccaagtagccggaactacaggtgtgcaccattgcacctggcctcatgagtattttagttagataagatttgtttggttcagtgggtcttagttttttaagacctgttaatttgtaat

SEQ ID NO: 14782 - DNA, 1638 bp, Homo sapiens
ttaaataactaatattttctttttcttgttttttcaatcctggcaggcatcaaacagtgcctcctacatccaggacgcctttcagctactcttacctgtgctagagatctctctcattgagaacaagattgaatcacacagacatgagctgcagggccagaaacctttgttagaacattgaagaatggagacgttttgacctgggacttgtgacggccaaggaatgccaccttattctggctactcctgcagaaatgaaggagtggggttattttagtatataaaaattcaggcaggagagatggtttaaagaggaagattgttgccttcagtgtttgattgaagtattcaggttctcacagtattctttccagttgttgtaattcataaattatttgaaaagaaacttttgtagaaagtccaagaataataactctagataaagattagtgggacactcaggcaaaaatgttggtctttctttgacatgttgcaaaatgttatcaattttgtcatggatataatttgcagcccatggatataactggttgataagccagagaaaaataatttagtgttctaaaattcatggcatgtgtggtttattaatgccatgtactttctcctttctggaataaaatctatggctttaagaaaactgagcatatgtaaactctgtgatgattaccctttatcacatgaattcttggaaatagaaagtttcatctgcttttttaaattcttagtagatatttggcattgaggagaaacttgtagactattatagccatgtgaattaactgtagcaaagtgccctttttcttcaaattgctccccctccccaggatgacacacttcatgtcatagctgaaccctactctactggattcaaggccagtaaatgcaatttagagaagcagttttatgtttgcagatattctgagtctcttcaggatgtgtttcgtgtctaccatatatgcaggataaattctttaacagcaaactccaaaggaatgttgaagctgttttagcaatgaggatttttttgtttgagtgttgaagtgggccatagtcctttagaaatgatgttcatttatgataggatttaacttctaaggcatagtttattttttcctctttcctttttgtttgttttaatgtattctttagcatgtttttgatataacttttatcctccagatcttaagctttcttttgctctcttcagcaatttaagagactattaagctgtcgtcttcctaaaagctattttggtatccactctttttaaaaaaattctccaactttgtggttttttaatgattaaggtaatttgttagctctgcccctcatcttctaaaacctttgtaataaaatgtattaatcatgttatttgatcctttcatttacttttgtaaacacgagccctaatatcttacttagaccaaaaaaaaaaaaaaaaaatagcaaagcaaagccataacatagattagtataaagactgtttctacgtaatcttctttggggcaggagtcagttagtaagcaaggaagagaaataaatttggtttaaaaaggtataccaacagcactacaatgttactctgcctatattctgtcttaatatgatcagaaagtt

SEQ ID NO: 14783 - DNA, 1198 bp, Homo sapiens
aggtggaatatggataaggcagcgggcatatttagtaatctttttgctataatttttttttcatttctgttcaattatcaggtggaaagtggttggtttctgataacttcctaaacatcaccaatgtagcttttgatgaccgtgggctctatacctgtttcgtcacctctccaattcgtgcctcctactctgtcaccctacgtgttatcttcacctcgggagacatgagtgtctattacatgattgtttgcctgattgcctttacaatcacactcatcttgaatgtcacacggctgtgcatgatgagcagccatcttcgcaagactgagaaggctatcaatgagttctttagaactgaaggggctgagaaacttcagaaggcctttgagattgcaaaacgtatccccatcattacctcagccaaaactctggagctcgccaaagtcacacaatttaagaccatggagtttgctcgttatattgaagaactggcaagaagtgtccctcttccacctcttattctaaactgtcgagcctttgttgaggagatgtttgaggctgtgcgagtggacgaccctgatgacctgggtgaaagaattaaagagagacctgccttgaatgctcaaggtggcatctatgtcattaacccagagatgggacggagtaattcaccaggaggagattcagatgatggctctctgaatgaacaaggccaggaaatagcagttcaggtttctgtccaccttcagtcagaaaccaaaagtattgatacagagtctcaaggcagcagtcatttcagtccacctgatgatataggatctgcagaatctaactgtaactacaaagatggggcatatgaaaactgtcagctgtaacctacaatgctgtaacccagtacctacaaaatcagctcgctctcagaaaaggaacctgtttcttagaagaagtaacatttttgccaaaagatgactggggttttccgtttgttaatattaagcacatcagaacgtgaattgccaaagtcttcattagaaggcagcatttttcctctctgatacttttcagtcattttccttagagctttattaaattatgcatgctaagatttaaaggagccccagataaacatgatggggaaaagcactgaactaagagtcccatggtttctcttctggtcacagttcttccattggttgga

SEQ ID NO: 14784 - DNA, 1164 bp, Homo sapiens
ggtttttgaaaaacatctgagtgtttttcagatgttttgccatgtggagcatataatgatatgtgcaagattgaatcttttcaatgtagcacatgtctgtagggttatacagatgtcagagagctaactgctctgtaaactactttccatgagtaaattggtccttggtgggggtgtatcatatttttaacttactgagatatcattttagttcattgaggttggcagggattgcctaactgatcttccaaagtgagcagtttatttctaaggtataacgtctttgatgcttttagaataagaacagtgtcaaatcatctgtcttctggaaaatcatggattttcatatttctgttaacagaatttctcaggctttccctttttaaaagtattggactctacaaataggttctatatttgggatctcatcctaggagaaaacccaaaactggattcctcttaagacctctgtcaaccctcctgccctttgtggtcttaggtatggtgctataggttgcatgcgtctttatcttgtttgtttggttaatattttgttgttgaggtttttatttttgtttacttcagatacataattctgagctatggctgcttttgtagcctttccaagaagcactaacctgaaataagattagataattgtgagggtgtgttactatattaaaatacacacacaactgatctagacatcaagaggaagaaaaatgatggatgatgccacctgcttcaactgtatataataaacacttatgatgacatttcttgcctggctgagatctgatataatggaattgtaaatactcttcagaacaatttcttcagctacaggaagcgtggtgccatataattttaagaacttggcagtggagctccatttggggcttcacgtttcttcatatgacttctgattattgaagcattacttcagctagaggctcctgagggaaatgttcagaggaggttttatcaggattttaatttaaggtttcaaacaggggaagacaggaaattcaaagcgtgacgggataaaactcatgcctccctttgtccaggcttatcagaagtaatacatctgctctgaatagcatgaatgaatcaatgtgcagttttatcagatggcatcatggataaagatgataatgctgc

SEQ ID NO: 14785 - DNA, 1266 bp, Homo sapiens
gtaccaccctgtcagtggcagctgcatggactgcagtgaaagtgaccataggatcttcatgaacacctgcaacccatcctctctcacccagcagtggctgtttgaacacaccaactcaacagtcttggaaaaattcaataggaactgagccctcatgtccccttggcaggccccccagggtctggcactcactgcagacttcctctttcaagggaggcagggcccctgtgggcactaggtgtaaaaggtgctggccaaatggttcagggtgaagagggctcttgattcaggggctggggtctgcctggtccttgagcccctgagttgtgggggtagggtgaagagcatatcccacaagaggccccacagggagcagagactgctttaatccctgctgacatcacggaaaagcaacagagccttttcaactttgtcactatgtccccttgaacattatgtgggagaacaccaaggtagcctaggccacccaaaagtgagtcctgcgaggttgcccagccctcagatggctctcctacatgatggtgctttagaaacaaaggtaaaatttgcctgtttggggcagcttttagtatcgatgccactcatctgcagcagaagagaaagaagtcctcttggggctttttagtttctgccgtcctggggggaacattgcagttactgcacagcttctgttctctgtcacaaccccaggtgatttggtccggtcaaaggccatacttggggccctaagagtgttcagtattgaatgctgatcagctgccaggtgaggagtcagaagagggagcccccctagacatttctttgcagctatggacatgcgggatatctccccctgctctctgggtatttgaaatgtcaattttagcactctccaggcacaaggacagcccagcaccagctttacagggcagtgtttcagatggccctgagcccacggaaaaggccaggtagacctccaaactagaaatgctggctgatttgccctgatccatgcttccatttccctgtctctcttccccaggcaattactggcctcaaaagaggaacagaggtgctgcgaggtgctcacctcacagagtctggaggcctccaggatcaactgtgggcaaagtgcctgcctctgacctcatcatggttctagttctcatacagaactccagaatttttaaagaactctataattggattgcaaactaggatgctacataggattctggtattccacatccaatatggatttctaga

SEQ ID NO: 14786 - DNA, 1174 bp, Homo sapiens
accactaaaccactcgccttagcctcttctgcagtttctggtggctctatctgtgggcaagggactcctgcctgtgagaagtggccaggccctccagagcaacggggtctggcttcagggagcagtggggtgtggggaaagcaatgttcatcttggctgctccatttttataccatccatcaaggactcttgcgcttctctccacctgtgacgtagcagcattgccttctttcctcttggtgcttctgggcaaaactggaatttgaaatccagaactggcgttgtcttcttaaagagtatggttcctgcctcagttccagcctggtatggttctttgatatgccctgaaggttctcacatggaaacatcagtatcctgccattcatgttgttttaagatgttttaaaaaccaatggacaaacttcttgcttcaaggaacaaactcttaggttggcaacagcatataaaaaaaaagatcacagctgaatctcatgaaagattaaaaaccaaaggattcaagaccggtgttgtaaaatgaagaggaattttacttacatgttacagctgccaagtttttagatgttcctgtcatagctaaatagtcactgctagcctttcagagaacagatagtaacaattgtttgcagctgcagtgttgcatctaattttggtgtttaggctttttattttgtgggaagctttttgttaatatcctgcagggcaactgcctgttgggagggagaggatggaagaaggagcttactctgggggccttgcctattgagggaggctgttgcccagagcagttgcttcatggaagtcatccaaaggcgctctcagtcattacaatgacaggatctcaaagttgggaaagggctgttaagtcatccagtctagtctccacataggtgctgacattctgcctacaaccatcccaccaaggggttgagcagtctggacttaaacacctccgaggacagagaacccactacctcgtggagaagcctgttctttgtaaacctctggcttttctatgttctctgtaatttccatcttagtctctgccccatgggggccacatgggacaagttatttttggcaaagcacctaattgctggcactgtcccaaagcatagcgtttgccttttggaaagaaacaatgctaggacatgga

SEQ ID NO: 14787 - DNA, 4037 bp, Homo sapiens
agaggactcctagtcagttctcttcttcccagcacttttgttctggccagtggcttagagtctttactcactggctgtggccgcttttacttcacagacagagttgttgttgataggccagggggcatctcttccttcccacagactacctagacaacatggccctgttgcagggaataattttgcccctgtgagcctcagcaccgctgtcctgaaggttgtctctgtcacttagacttggaagctggagagataagttgccttcccaccttctggcctatttgaccatgcttcccactgaaaccatctcaggtgtgaaaatgaccttagaatacatcccatccagcctgccattgcatgctgtggctcctgcctgcccttctagtgacagggagtgccttccctcctataccatgaggcactcacactcacctcactgttactttacttcctgctatagccacagtcccacaagcctcagcctacccgtaaactgccacccaagaaggacatgaaggaacaggagaaaggagaagggagtgatagtaaggagagtccaaaaaccaaatcagatgaatcaggggaggaaaagaatggagatgaggattgccagcgaggcgggcagaagaagaaaggtgagtgactgggagcaggacttgggagaaggtggcagggtagaactgtgaaatgtcaggactccaggggactgctggaggagctttaggtgccacctctgaaaagtcaatggggaaactgatggatgtaggctggtgagatagcagtcttcaaccatctgtcattaatcagtccctcctttcaaaaaacctgctgaaattttggcttctctaatgctgatctagagtaaccatggtttaaacaagataaaactttctttctttgatgtaacagcttggtgtaaatacaccaggcctggtatggcaactcctgaatcccttcagcttgctgtggtacaccggttcttcatatcatcactgatggcttcctatttccttcttcttctagctaggaggaaaggaagagggaagggtggcccctttccttttagggactcaacctggagttggttacttcagcttagctctcgtaggcagtgttttggcacctgtctatagggactctggaaagcatggtcttcatcctgggctgccatgtgtctgactccagaaggggattctgtggccatggagacactgatcttgggagttaacgaggagtctctaacacactgacggccactgaccagcttattttagagatgaaaaagagggctaatgtgtgggaaagggatctgcccaaggtaaccagattgtgatttgggcccaagtccagggcagaagaagaggagttgggtagagctggctaggagtggcctctccctcaagcctttctcatgtacccatgctgtctcccaggaaacaaacacaagtgggttccattacaaatagacatgaagcctgaagtgcccagagagaaactggcttcacgccccactcgcccaccggagcctagacacatacctgccaatcgcggagagatcaaaggtatgcactacccactatggagggcctggacttgggagacaccctcaggcctgacctggtacccctctccccatagggtctgagtctgccacctacgtgcccgtggccccccccaccccagcctggcaaccagagatcaaaccggagcctgcctggcacgaccaggatgagacatcgagtgtgaagagtgatggggctggtggggcgcgggcttccttccgtggccgtggacgggggcgtggtcgcggccggggacgcggccggggtggcactcgaagtacgtgaggcccctttgggctccgggatgtccaagggtgtgcagcaggggtggtgggcaggaatctcctctccctcatggcacccgtttcccccatagcccattttgactaccagtttggctaccgaaagtttgatggtgtggaggggcctcgtacgcccaagtacatgaacaacatcacctactactttgacaatgtcagcagcaccgagctttacagtgtggatcaggaactgctcaaagactacatcaagcgccagatgtgagtgtgcggaagccttcttaccctggagaaatgagtgagaggttaggggttgctagagtgtcatagctgggcaggcccttctggtgcttagcagcagtttcagcctcaggctgaaaagatagcttttctcattgtttattaaagaagtgataccacattctcattgtttattacagaagtggtacaacatttaccttaagaaagttagaaactataccattacaaaaaggaaggaaaatatttagaatctacccccttctgttcttccatttgtaatgacaacattgacagaatactaacatttattgaatccttagtatcggccaggctcagtgtttattgttgtagaggcattatcttagtcctgcagttcttatctgttgaattcctatgagctgagtcttttagccccagtttatagacaagcaaaccggcccagtaatttgcacagaatctcacagctagtaagtaacaaagcacagatttaaatccttttctgtcctattatagaacctttgttcttaaccactctgatatattgtctctcagtccagtaaggaagtcatacaagaaaataaatggttgcaatagagtgtttataagtgttttaggagcagaagagaaagtgaccaacaatatttggactggaatttaaaggaggatgaggagtttgacaggcatgtcgaggggcttagggcagagggagtgatttgacccaagcaaggtagggtgtcatgaagggatcacatcatttcttttcagccctcaacactgttggtatataggataaggatggggtaggtcagaggctgtgtgagattgctggggtgtgtagcagaacaaggaaggcatactcataaaactgatgcaccaatccctcggtgataactacttcttccctccacttagtgaatactacttcagcgtggacaatttagagcgagacttcttcctgcgaaggaaaatggatgctgatggtttcctacccatcacccttattgcttccttccaccgagtgcaggcccttaccactgacatttcactcatctttgcggtatgtcttcctccctggagctgggatgcaggggaaagaaaggtccttagggagctggagtttgggccaaggcagaaagccctggaagagtcatcatctgatgacttctgctgaagtctcaaggcttggctagtctcctcctctccctccttccttcctttctctccctctcttgctcattatggaaaatgtcagacacttaacaaaagtagagtagtataatgagcccatcatcagcttcggcaggtatcagtttatggctaatcttattccatctgtaccctcatctgtttattctcacatactacattgaagaaaatcctagaaaacctagcattttgttcacaaatatttcagtatagatttctaaaagatagacttgttaaaagaaaatagccacagtatcattatcatacctaaattaacagtttaacatattaacagttccttaatatcatcaaatatttagttcagattcatcccaattggcgccatatatatatttatatatatattttatatatatttatatatattttatatacatttatatataaaatatacatttatatatatttatatattatatatttattatatatttatatttatatattatatatttatatattatatatatttttatacatattatatatttatatattatatatttttatatatattatatatttatatattatatatatttttatatatattatatatttatatattatatatttatatatagtatatatattatatatatattttatatatttatatatagtatatatattatatatattttatatatttatatattatatatatattttatgtatttatatattatatatatattttatatatata

SEQ ID NO: 14788 - DNA, 1123 bp, Homo sapiens
tgagttcctcggtgacatttttcttaagggatcatgcagcatctggcagcgatgtttctggcttcttgattcttggctcttctttttgctccatctaaatttctggggctgcgtttttggtgtcttttccctgagtatgtccccactatcatgtatgtaagccccttaggtcctcagaagaaggaagggagagggagcagatgcatggcccaaatatggagttagtctacacaagtctgctgcactaatggcaaggtgaccttgggaagcctgttcatacctcaaggcttcagtttctccatctgcagatgaaaggaaggagacattagaatattctagaaatagtttatatatataaacagatgaagttcactgttaaagaagtattgcaatctctaactaaaattactacttcctttttaagtgctgaatttttctccacatacctgctcactgtcacccactttggagacctctggcctggggcttgtgaggagactgcagaattgaccttgaactttgggtctatggaattctatactcccttatctattttcccacagtgattacctctcatctcctttctcttgcctgcctgttcatacacagaattccccacagttgtggcttcagccctcaaaaagtgttggagatccagccagagacatgaggagaaaggtagtaagtagatgagggttttacaaagtccaggcctacaaagttttgtttgaaacaggggtcagacttagctcccattccagaattagagcccctactctgacctggtctatcttaaaccttaaaaaaagataggtttagagtttatgtgctcttggcacagcagggaatctacttttgaataaatactgtgggtttagacaaatgcttctctctcagcgtctcatattcagtctatcaaaacaaatagtttttctttgctgaaggcaccgtgttttctcttgcctttggaacaatggtattctttctgcctagtctgtccctatcttcatctggcttacttatgttcatcctgtggtagtcacttcttgaaggaggccttccgtaaccattcttagtcacagttgactaagctcctttaactgtgtgcatccacaaacctgct

SEQ ID NO: 14789 - DNA, 2990 bp, Homo sapiens
agggtcatagttgaacagtcttatgttgagaggctggagcttccctctcatggtatagctacagaatctgggccaaggatctctggtgattccttttccccttcgtctgtcctattttagaagtcagaggagtccagattttcccacctgacctctctgcctcagcagctgccttcccagcagctgatgtccaaggatcaggatgagcaagaggaactggattttctgtttgacgaggagatggagcagatggatgggcggaagaacaccttcactgcctggtctgatgaggaatctgactatgagattgatgacagggatgtcaacaagatcctcattgtcacccagacaccacattacatgcgccggcacccagggggggaccgcacaggcaaccacacctcgcgtgccaagatgagcgccgaactggccaaggtcattaatgatggcctcttctactatgagcaggacctgtgggctgaaaagtttgaacctgagtattcccagatcaaggtgaggcttggacatagcagtgagtgtggagcctggtgtgcctgtattgtacggagaagaggaagcctgattagctgtgcaattttaggcaggtccttataattcagagtctcaggatttttatatatgggaaggggatgatgactgacatctagcttgggcattaggagtgaggggtgatgtgtaaacactgcaaactcttcaggtgaggcggtggtgattattatcctatctgcggatccatagttaatattctgacagttggctagacacttttgtggggaacagaaaaagggttagattgttatttctagtcttaaatatttaggcatctaaaaatttagaagccttttaagaagcttgtgttgagtatggaaaatggagaaaagataagtcttttgaaaaattgctgctgcctggaaatagtcaaaacatctctgttgtgggattttagagtgggtatgtttggtggtaggttgtcctagggtgagcctttgtaataagtagcagtgtgtttcctggaagtaaggaggaaggagagttgcccagccactgtgtgataaggcagtagcagaaagagagatggggaaacactggagctttcaggggggagtgtgtagtgagttcctgaggagctactgtcagcctgatctcagtcttactacagggagggcagggcaagcactgtcttcttctgggctagcacacttgtgccaaggtaactggggtgaggaatggtgactgggcagctgagagcctggggaccagaattccacgtatgtcgacgtgggagctgccctctccaacttcctgccagtcttgattccttaaacaggctagagcagcctgcttacttacatctttccccactcatctcatgacctctgcagcaagaagtcgagaacttcaaaaaggtcaatatgatcagccgggagcagtttgacacactgacccctgagccccctgtggatcccaaccaggaagttcctcctgggccacctcggttccagcaaggtgagaagcagacacctgagatcctgacatgggtgagaggatctagggcccttggactgggggctatcctggggtggatgccacaggcctttccctgcttcctgactcctctctctgcctctgcagttcctacggatgccctggccaacaagttgtttggtgctcctgagccctccaccatcgcccgctctctaccaaccactgtcccagagtcaccaaactaccgcaacaccaggacccctcgcactccccggacaccacagctcaaagactcaagccagacatcacggttttacccagtggtgaaagaaggacggacactggatgccaaggtgaggcattcctgtcgggctgctcagagtcttgggtctacttcattgcattccagtgctttgcttctctcccttgccttgtctgagctaaggaagtgctaaatccttcacctgctctgtgttctgaggctggtgggcttacctaggattaggtagccacatctgcaaaatatactgggtgtgggagtggtaaccccatgttgaaaggcctaaggaggattgaccaggtatgagtccttgggcaaatcactgcattcccaaaccttgatttcttcacctgtttgaaataggcataccagttcctagctcaccactgtgaactttatacgagaatgaatatgaaaatgctgttgtaaaatgtgagagatcatgcccatcttagtcctacaagtgcttgatgctcctcagagttgtaggagtacaaacagtaacaaaccctgggctaacctttgcagatgcctcgaaaaagaaagacaagacacagttcaaacccacccttggagagccatgtgggctgggtgatggattcccgtgagcacaggccccgtactgcttccatcaggtacctggggcagtgggggaagagtgatcaggctgcctatgggatgggtgggcgagccatgaaattgactggaccaagaagattggtctgaaaattaaagggaccctcatctaagaggttttcaaaaaaccagtggtgtggaaagctcagcccaggacctgggaatgacgggtaggcttttttcctaaagaagtggtgtggcagtcacgtgagaccagattttcatacatgcagagagaaaatctctgaattggtttccaagcctggctatctactttctgtctgaggaagaatagccaggtagttgaataaacagatttctggcagtctctctgagcctactatgtcttgggaggctacttgaaaagttttaaaaattaaaaaaatacatatttattggccccaacctgtatctgctgaccctgcttcttggggtagggcccacactcttttttatttatttcagtaagatggccccagtgtgtgtttcctgtttcccaaagcaagctttgagagccacctacctatgaccaatgctctctactccctgcagagatggcacagactgc

SEQ ID NO: 14790 - DNA, 3842 bp, Homo sapiens
tgtgactccttcctctgttgcagccccccatgggtgaggagggcaaccacaagcgacactcagtggtagcaggaggtggcggcggtgagggcaggaagcggtgcccctcccagtcttccagcaggcctgctgccatgatcagccaaccccctacaccacccaccggccagcctgtccgggaagatgccaaatggacaagccagcactcgaacacacagactttgggaaagtgaaaagctccttagccctggggcttgaggggggaaaggggtagggtgggtaagagtccatgggggtgcccagtcccaggaaaggggacaatgaagggacaggcctggagttactaggacaggcctttgtgctgagtagcaatgtatacaccatttgggctatcagaggtacccctgggcaggagcctctacatccccttccccctcctctctccatgactcttgacatcctagcttcttctaaggggggagggaaaggggggagatttttatatatatatacatatatatatatcaagttttaaattattgatagttcatctggattaccaaaatcactctgcagccctgcccgaggctagtaggctgcaaccctggtccccacccctaacctcctgctccccctcaagccaactatgcagcccacaagaaggccctgcgggcccccccattgcccagcactgtctcatagaaggctctggtggtacctctgggccccaggagcatcagccccttgatcatctggggtttgtcatcaccatattttctccctgctgttcccaccatgcccttctgccatcttctgggagaaggaaaccaaaggatctaaaactggggtttgggggaaggtttcagcctctccccactccccttgccccacaccctttactccccagcccagagagacgctgcttttaccaggaaagactattgaaagatgttttattttatttttctctgacctttccatccttgaaaaaatggggaaaaaagaagaaaaaagacaaaatcgaccataaaagaccaaaaaaaaaaaaaaaatcagaaaacccccacctaatccacagaaagtaatgtctttcccctccccttggaatttttgttttgtttttggaaataatatttttttaaaagttgccttattgtggagcgggaatctgaaatacccaaatgcctgttttcctcggtggagtcaacccgaagagctcccaccttctctggatgtgcctgggcttggactggctagaatctttctctggactgttgcatgtacagtgcctccatcctggaggcaagagagttgggagtggctcgaatcagagccgtgcccaagatatccctgctgttgcatcgtttgaagctgacgtcctgtgtctgtacactgctgccactgttgtgtcctcgctctgcttgctgttgcctcacgccaggccccgtcctgccgtgacacccttcatcctacccttggaaccccaaggccaagttggttcaaactgttggagaacagagttggcctgcatctggaacacacttgtcctcagcttaccatctcctcacaccccagagtggaaaggtgaacacctgcagctgaggcttggaaacgtttcttgtgttgccctgaaaaatctttgagacctcagggaggctctgtctctcttaaaaggtggagaaagatgccattctctccctaaggtctggtggagtctccccatcttgcatacccttctgcaagccatctatctctgctcactctccaattgacccgcctgggaacaagggatgaggaggagttgggggctggggggaatcctgccagttggtgaagccctgtggcaggaaggtatatgtggacatagagtatacctgattctctttcttcagccactgactgcttgggttgggctgtgaatgataatggaatggctggagtctgctgttgtcagaaggcagggagggtgatgaaggactgacccacatggactgggatgtgtgtcggttatgggcatgactgcacgttcactctcagtgggatctgggcaacatggagttcattgtcctgttgcttacttactgcaatgtctttggccctccttttcaactggttcctctgttgggcccaaaggttgggagtaggagacagtatcccaggctgacaagggcttgccctttaccttgggcaccttgttaatttttagcctgtgcccttccccacctttgccctcccagtggttggtatgtgggaagcccatctcagttcctgtgacttcatgtctcaaaccaaggatgagcgtctggtctctgctatgatggtggtatccgaggcctttccctgcccagtctggtgcctgccccacattgtaccggacactggattcctggacccccttctcctttcctttctttccttcaggtcacgcagccctgtactgtatccagcaccacagaaacctcagtgtttttcctctgctggtttggggcacaaggaagccttagggtatggggaaaggctgttattacctagagtttactcccaggccagggggctgccatcttcttcacagacatccctgaaaggaagcccctttggggcagggaggtgaggacttcatctcaacatcggctggtggttggtaggggagctttttcttttctttcctttttttttgtttttgtttttgtttttgtttttggtaacatgttaggagttaatgttgcaaagagtagtttacatcttcactttctgaagacacttgaatttaggaccgatgtatctgtgacaagcatgccagaagtggcaggggccatcagggctaaccacttcacacctaccatcgtcccatggggatccaagacctgagataaagcaacagcctgcccagatccctctgttcatcctatcccttccaaggttggtccatgccaacataacctctgggcatcagacatcagcaggtctgtgtgcctcagccctgttaaggggcaggtttctctttagccctcttcctgcacttgggagcaaaggcactaccagtagagaagggccatccagccgtgccccagcctggacccctggggctcagatagaggtgctgagcccctgtgtcaaagttgttaaatgtttttgttttgttccattgtagctctttttttttttttttcccctttcctggtgattgattttacaaaagaaagtaagctgcttagaaggccctggaagggaagtgaggaggagggacaaggaagatgactagttacggagggtgagggttgttttttgccaaaaagcctgggtagagtgatctgaattatctggcaccctcctgaatggaaccccagagtacctcctgtgtggaagggtccctggattttccctaacacccaccctctcccccttcagccatgctgatggcagagaagataagaacttggagcccatttctcactggagaggaaaacttgtcatctggctttgcggagaaggttccaccttacgctcgtagtacattatctttactatgtgctaggatatcatatttaaaaggacaaaaaaatgtaaaatacttgaatgagcttgtattataacattaatattattgagagtatctgctttccaggctgaagtgattcattcattattctagtcctgctttagtcctttgtaatttgtggtaattatgcttttctttttaatacaaaaaaatgtataaaaataaacacttgaaaaggcaaaatactggctggtcttccatctaggttactgctattgggtgtgaaggatgggtttctggtagagttcccccagatccggaggaaccctgcactcaatgtgca

SEQ ID NO: 14791 - DNA, 2431 bp, Homo sapiens
caggcgtgagccactgtgcctggccgagcctttctatactattagtttttttttctagtttggtatattttcagggctttaggaaggctgggaggtggtgatgtggtagtggtttttttcttttttgagatggagtcttcgctatgttgcccaggctggagtgcagtggtacggccttggcccactgcaccctctgcctcctgggcgcaagtgattcttccgcctcagcctcccaagtagctgggattacaggtatgtgccaccatgcccggctcatttttgtacttttagtagagatggggttttgccatgttggccaggctggtctcgacctcctgaccccaagtgatctgcccgcctcagcctcacaaagtgcttggattccagacgtgagccattgcacccggccagatgtgataatatttatacttgtcatgacttctagcataactctcaccatggttctctgtcccattctgcagttgttttttgaggacagcattgatgatgccaagtactgtgggcggctctatggcttaggcacaggagtggcccagaagcagaatgaggatgtggactctgcccaggagaagatgagcatcctggcgattatcaacaacatgcagcagtgatggcgccaggctctgcagggtgggcctgatcccagagtggtgcttactgtgctgactgtgtacttatcttccccaagagaaaatgcttcttttgagcacactgtacctaccatctgcattgagcagaaagacttttgttttactgaagacaaaagatgtttttattttagacccagaagagaggagtttgctctgaatttgtaaataagtcttccccattcctcatactcgagcctctcctctctggttgcctcctgccaccagcatccatggctcatttgacacctttttaaatatcaggacaagtctgaaacaaagtagtaaaatgtatataactcttacctgttgtcattctttttcttttaaatttgttgctaatctctgataatgaagattcttactctgattctcagctgagctgtgagggcttccagggaaaatggaacaaaatggtgttcttaggtaatgggttgtagatactgagtcttcctttccttttctgacccttctcgaggacatttgctttcctcacacttttgtagtctctctttacatattactatatggaaatgaattgctctgtgctgaaatttgaagaccagataatgaaactgaaaagcaaacaattttactgaatctgtctacccttcattcatgagaactccagaatgagtgttgaccactgaagcatcttttaagtctgtgttccattgtgccattcaggtttgctgtcacatatgcatcatctgaaatcatttgaaatttttgtacaataaaatatcctggatttgatcctgaaggaaactagtaagatcagatttttgggtcatgtctgttgtattttcagtaatgtgatttcagatggtcatctggattctcccacttctctactccattatttctctacttttccttccagcaaacctgaaacgtgagggagatggattaatgtgagtaacaggaatgtgtctttaaaaagctagagtggttacatttaatcaggcagtaagataatttgggttcttgagttgttttggagtaatatcccacaactggggtaggaagctcaggacttttttctttaaagctagtcatttcaaaagcatattgtatttttttgaatgactacagtatggacaatttcaaaaaccaaaacccactttggattggtggaagtaaaaactggtaactcactcaagtgaatgaatggtcttgcattttaaaagcttatgggaaactcaatttgaaatgattagaaaatgtcaagtattataagctggtatttaagatgcttgtaaatactatttatgtttttaattttgtaaaataaagatttctttttaaccactggcattaaggtttggtctttcatagctatggattgctggctctggaagatggtcatttgccatcagtgaaataagagcatcttgcctccattgtccccaagttggcttacatacaaaatatcacttggggggtgggttcgggaataaaaaaaatacatatcacttggtaggaagcttttcacgagcacctgtgtaaatggaattgtctcttcatactcaagattgttgggtcttaatattatagaattaaaccagtctaatatttcctggggtcactccactatatatggtggattagcttgttaattagtgggattcttttaaacaacctgaacttcagatatcctagagttggctcaagactttgtttccagccatttctgttgacacaaaatatgtggggttttaagaagtctggtacaggggcagatatggaattgtgactgggaa

SEQ ID NO: 14792 - DNA, 1158 bp, Homo sapiens
aatcgcttgaacctgggaggcagaagttgcggtgagctgagatctcgccattgcactcccgccggggcaagaagagcgaaaccatctccaaaaaaaaaaaaaaaaaaaaaaaaaaggacatctgggtaaaattggcagaacttaaatagagagtatggagtaggtggcagtagtgaatcgtgttaatttcctgatttccatggttgtactatggtgacgtcggagcatgtcctgttcataagacacacactaaaatatttgggtgttattgggcatcatgtttatgatttaatgaaatttcaaaagggtttggttaatattgtgataatataattctaaaagttcattgagaagaaagggaatgggtaaaaatgctattaaagaggaatgagatattggagtttaccacctagagtgcttttaaccaagaatgtatactttagtcagtcctttattgtgattcttgtaggcaaaaaaagtattgaattggagaaaaaacggctctctcaacctaaggcaaagcccaaaaagaagaaaaagcccaccttgagaactcctgtaaagctggaatcgattgatggaaatgaagaagaaagcatgaaggagaactcaggacctgttgagaatggtgtgtcagaccaagaaggggaggagcaagcacgggagccggaattaccctgtggccttgctccagcgggtatgtggcagaatcctgtgtatcactaggatttcatggtcgtgtctgggaaactaagctaggtccttactcagtttgaaacttcgctgttcccatttttccaactcttggaaacagcattagttttttttgttaagctttattcaagtctctaaaataaacatctttgaagttttaaaggggttctagtggatgtttgtggtggaaatagtaaagttctacagagaaaacttcttattcaacttgggcaaggtaaaaccgtgggacgaagcgaagctgggtcagttgtgtacataggaacttacatgggaaaagttttaacagtatgacatcagtagccacatttggtgaaagaaactactgtcccttacaaatgtctgacctagaagctaccaccactgtgggaacttgcaagctctcacccccttacgtggagtttgtacgcggctttctgtcttctc

SEQ ID NO: 14793 - DNA, 1165 bp, Homo sapiens
tctttattacctctccaacactggatctccctttttatcaaagacaagcaagcaggcattaagctcagaatcactggcaggcaatagaagctaagtcagattatttaatattatcttgttttcatgatgtttattcttatgtctcttcccttctgtttgcagcaggagggtgctggtttttcacttatggagtaatataaggctgtctttgaaaataagtttacgcttaaaaaatgagtcaatttaaaggaaagtattattaataatagtgaagataatccatggttttaaaaaatagagagcggtggtatgtgattgcctaaaagttggaaaacactccagagcaagggttctcacaaattatttccaaataatcccaaattatttccaaataatcccctcaagggcagaggaaactggacatctacctttgcccaaaagtgtacctctgagagcctacttgtaactcaagtgtttccttcaagtgctgtgttttatttgtcatgcaaatttttgctttctactttataacatatccatgtttgttttaatgttaaaacaatgctttcaattcttaactgtgtcctccgagtggacgctgctgctgagatgcctcgtttgtgccttggcataccctgggggatacattttccagcttgagaagctttgtcatggggcattcatccaacccaggtgacctacaatagcagtgacgtttgatgggagagaaatgggtagtctatagacacatttgtacaaacgacctactgtgtggaaagctttaggctacatgatgcgggcgctctcctccccactctcattccccacaatgaggcagtatagcgggtgggtcaccaccccccctctgtaaggcacccgcatcaggggcatcctggttggcttcgggatccagttcagctccatctctggagttcttgcgtggcatttccaccagggggagcccctgcaggtcttcctccctctgaccaagatccggggcctcctctggccatctcaccaacccattggcctcctccatgtggccagccctgtaagaccatcgcggctcatggcaacggacacaccagaactggaggcagatgaaggccaagacggctgtgaagcaggccagcagaatggccatcagcacccaaagggagatctg

SEQ ID NO: 14794 - DNA, 3088 bp, Homo sapiens
tgtttatttttcattgtgttttgtgacctcagcagggtgggggtcttcctccttactctaagctaaatctaggtgaggtttccccttagggagcccagctatttacaaagtacacacgagggagcaggctggtcattgacttcgggctggaccgttgccctctgagcagagaacagacccatttctgggagctgcccgagatcactggagaaggcagccagcagcagctgcactggaacagtcagagcagggagcctcttcctcaacccagctttttgtcattcacttccttttgttctctctctggtcactgcccttacctgaccctcacagaaagagagctctgagcaggtgagggggtctgcggtggctcctgtcttccctgcagcagggaaggagggccgtgtggtgctttgctagataggacggtttttgcaaagcacctggagatgtttgctgggagatagactcccactccacaaaggtgctgggtggctctccggacaggagctggcctgactctcactcctctgaggctttcctggggcctcctcccatcctgccatgagcaattgtttgctcttgaaaacctcactgcaaggctgaggctgagcttctgattcaccaccccagggcctccttatagttctctgcacacaataggtgcttcttggatgttcttgggtttggaaataagtggaaaatacgggatgtacccctgggggaaaagcctgggttgggtttagaaagatctcaggaaaatgagtttctcttccctcagggtggctgtgatacaggttccccatgtccttgccgtgggtcatccttgctgtgggtcatccttgctgtggagatccattccccacctttcctgtggcccaaccttttatttaaatgtgctaccctctgcctcaaggcttggttcctggaaagtaaaggtgaaaacatcccctttcacccctctgcaaaacaaacaagcaacatcctcaaaacccaaccccatgcctcacagagcttcctgtggcttctccagcctttctccctcacatcaggaggtagatagctctgaaatgacagcgccacagccatagtgactgcatgagccatctgaacctgcagtccaccctccctggaaccacaccagaaagagacctgggttgtcgttttcttgctttttgttttgttttgttttattattttcatatcacctccatcccataaagttgtactgtgaactggaagatggtggaatgttttggaatttgatagactttcggcaaccagttctactaatgcttcactcctggctctgttcagggaggctgcccaggaggaagactggccattatgcatccccttttctttccagtgcccagtatgctgttttgaggtgtcaaatacaaataaatctgggcttagggaaggagagaccttattccaaagcacgattgcagaaggggaaagggaatattgcaaaagggagaggaaggggccttatgggaatagtgaaaaggctcagaccgaccgatggcaagatctgcaagcgtctcaaagcccaggcagaaaaggacttttcttttattggaagaagtaaacatggctagaaagaaccacgttcagggaatgacgttgtgcccagcctttttttttttttttttttttttgtctccaggggaggggctgtttgctggctcaggctgaggatggcccaaagtccagggtctggtggggaggagggaagcttaactcaagtttgggttagtgagttagcaagctctttgtgcagatggggatgtaggtaaatctttttaaaagtgaaattaacctcctgccaattttacaacccaagaatttttttttaagggccttggagccatctctaaaacaaacctcaagggatttagtgccctgtctccctgtctctagaagccttagcctgggcacctggctcaatcttgtaactgcctgctagccatagattcctttcagccttgctgacttctccctataaaagtaaagcctttttctgccccagctctgagacacttgcagatcttaaggtctgagacttgctgattttctggttggagtgtttttttgtattgccatagtcccttccccctgaagcaatagcccctccccacctcctgcaatacgcctttccaatctttattggaagtctctccctgcctacttcctaatttattcttatttgacagagggtatggaagacttgcaatttgaaaactggggaccagttccaaagtcagtaattgtgttaaccacgtgtataacagctctgctggacacccaagaaagccatgggaacgccaactggaaaggtccccttccccaggggagcctgcgaaggagaggttctgtagaatccaagcccacatttccaaagtcacccccaacgcgtcctctcacaccgtccactgtgcgtttgtatgtgtctgggatccagggcaatgtgaattttctttttatttgggagattgttcacggaaaacagatcttcttctctcttgtccacctattaattgtttacaatatttgtacatctatgcaaaatacttgaatgggccatggtgccttttttccttgttagtatttaattaaaaatgaattgtttgtcatttgcaatgttatctggtttggcagctctttattgtgtgtttgttgtaatgtcctactgctcagattagataggattcatgacgtggacttcagaaagagttcccacaaggatggtcagttcagcctataaagccttcatggtggaccctgagccacagcaaagcctatgttttcctatgaccagtagagggggctgtttgtctttacacctggacgcaggctgcttattaaaggcctgaatgatcctgagattcttcgatatgttttttctcatcctacactactgcatatagaagacagctgagagcctctgctcacctcctcatcttattaaggcaagggatcatactttaaagaggggagacacttgccccaggtctcttgggctgggtaggcaggcacagccagggataaggttgggtgtgctttctgattccagaaccctgcg

SEQ ID NO: 14795 - DNA, 1103 bp, Homo sapiens
atatctcctaatgctatccctccccgcctcttgctaccctacaacaggccccggtgtgttatgttccccttcctgtgtccaagtgttctcattgttcagttcccacctatgagtgagaacatccggtgtttggttttctgtccttgcaatagtttgctgagaatgatggtttccagcttcatccatgtccctactaaggacacgaactcaagggatgaaaaaattctaaattaatgtattggtaaatgttctaaggggccagaatgtatgtgtgtgagacaatgggggtctgaacccaggtggagtcagccccacgggtagcaggagtgacagcacgagtgacacctgcctgactgctagatgctcaaactccccactaattccagccttgtcctctgccaggcacccctttcccaaagtgttcaatggatgcaacaggagggagctggacaggtatctgcagtcaggtggtggaatgtgtctctccaacatgccagacaccaggatgttgtatggaggccggaggtgtgggaacgggtatctggaagatggggaagagtgtgactgtggagaagaagaggtgaggggtcacaatggtgctagtgggaggggaagaatttgcattggtttcaaaactcaaggtcaaagagaacacaattgaaaatttcttagtcacaggtgtttcctacatataactgtccaataccccatgaaaaatcagatatgaagaagccttccagttggagtgtttgtgccgcctctgctagtttgtggccagcatcgctagtgtccaggatcagttcttcttatgagtgtctggtctaaccagaaaccacgatcacgtggcatgttgactctgtcttcctcagtggagctgcacatgcctgcttgccctccagctgcacggaatttattctggaggccacacagccagatatatgggcttgaacaggggccttatgaggatgcttaaaataacaagctcatgctgtttaggctggaggagagatgatggaaaggggatgtaggaagtgctgtcaagtcccaaaagggctgctaggaggaactgtttatgtgtaaactctctccttccttctgatctt

SEQ ID NO: 14796 - DNA, 1153 bp, Homo sapiens
aaaatgcagattttggccccggataggctctgaaggctctttctgcactacctcttttttttttttttttttttttttttttgagacggagtctcgctctgtcgcccaggctggagtgcagtggcgggatctcggctcactgcaagctccgccttccgggttcacgccattctcctgcctcagcctcccaagtagctgggactacaggcgcccgccactacgcccggctaattttttgtatttttagtagagacggggtttcaccgttttagccgggatggtctcgatctcctgacctcgtgatccgcccgcctcggcctcccaaagtgctgggattacaggcgtgagccaccgcgcccggcctgcactacctctttaaaggatgctctgtgagtagaaaaatgcaaaagaagtctctgcctcaggaaatttgctctacctgtggagacatcctgggaaatagtgggcagtgggataaaggaaaaaggtgccccaaatcacgggaccttgaagttggggacgaacttctaggtcagaacccgcaggttcaggcaacagaaaatacaagaagggaaactacagagcagaaattatagactgctgtttgcacaacccacagatttgagcattaatccatattttttctctatgttcttttccccatgtcctgagactacctcaccaacccaggaacccatatttgacaaaaacttgtttgctgaaatcaaatggaatcctccttagttagctgcaggcatccagggagatgaacagggttatgtgagccccagcgccatatcctgtcctttcttggctttttcccaaaaggagggcacactgaattgctcaaccagattcctggatgctcactgggccgcattactagtgagcaggatcactctattacaagatcaccttcaaaagcaaatgaatggctcaactagtaggcactttgcccagaggctctttggccatatgcttctgtcttctagtatcttaaacacattctaggactctcatttcttcaatacactgtccttcctcaagtccaaatgatgatggcttgagaaagggagagacgtcctttggtctaaccccatccatttgtgctccagcccagttagctaaagagagatcttatttgctcaagttt

SEQ ID NO: 14797 - DNA, 1145 bp, Homo sapiens
acatatgtattatgtgcattatagttagaaataggaaatttatggccaggcgtggtggctcatgcctgtaatcccagcactttgggaggccgaggcgggtgaatcatgaggtcaggagatcgagaccatcctggctaacacggtgaaaccccatctctactaaaaatacaaaaattagttgggcagggtggcaggcgcctgtagtcctagctacttgggaggctgaggcaggagaattgcttgaacctgggaggtggaggtcgcagtgagctgagatcgcaccactgcactctagcctgggcgacagagtgagactccgtctccaaaaaaaaaaaaaaaaaaaaagatttattactaacttttaaaaaattgcaaagcaaggagtccacagaacataattaaagaatttggtctttttctgtatgttgaaagagggtgatgaaggctaaagagaaggctaatatttatcattgtttgctttatagctatttgatcggctgaaacttcaagattcctccaagaaggaagcagattctaagtctgcagttgaagattccactctgtctagatactcacagacatccacttggaagttggcttcagtgtggggaagagcagacactggccggggctcacacaagcgttcccgctctgtcccttcttccctgcaggcctctgcaagggaggagtccaggtcagagctgtcagggaggactacacggacagacggctccagtgtgggaggtaccttttccagggctaccaccctttccagaggccagtcccgtaagaaaaagcgaaagcccaaagtggattaccagcaggtattcactcgacacataaatcagattttcattcgaggcgagaatgtcctgctggttcatcttgcacagtgaccagctcagcctgagctttggtttttagaaataaagtgcatgaattgctgctatgctgtatcctagtatcccagtgaaactctgagttggaatgattccctctggtcctgcatatgcagaggacggagcaggctcagccccctggaagatgagctcaaggggaggacaggccttgggagggcaggcgtttgcattaatatcaaggcaaaaagcattcatagatacatgcatctgatttggtattgtgat

SEQ ID NO: 14798 - DNA, 1121 bp, Homo sapiens
tgatagggggacccatgcctatgagcatgcccaatgtgatgactggcaccatgggaatggcccctcttggaaatactccgatgatgaaccagagcatgatgggcatgaacatgaacatagggatgtccgctgctgggatgggcttgacaggcacaatgggaatgggcatgcccaacatagccatgacttctggaactgtgcaacccaagcaagatgcctttgcaaatttcgccaattttagcaaataagagattgtaaaagaagcagattgaatgaagaatttttagctgtgcagataggtgatgttgggatggaaaatgctaatcaactaccctttcttttatcaagtaattaaaataaatctacataaagaaccaaaaaggctgttttataaaagtgaaatatccagtatttcagagggccaggcaagagcacttcagatgaggcagtcaaaatcatttttttccagtgaggatagaccacaagtgggtggtgagaccattgaaagcctttatcaactgaagagtccatttaacagcataatttgtgggaagactggaatagggctgaataaatgtgtttgaatctctaattttatactttcttttcctgaggaacttgatttttctgtccctggatcgccttgtcataattgggtctgttccttttactaccactcttgagtccatatatgaaatcattaaagttggatgatcagttttttataaaaatatatatttttgtccaagaaaaaaaaaagcatacatatgtgattatggctaaatcaaaggtaactggaatgtatatacttttgctaatgttccagcaacactgctattatactatccaaatttttattgtaacaaaacctctttaagcaattggtgattgccatgggacttttcccatgtcttctgctgtaattatcctgtgcagaactaggaagaaatttttttcaggactgctctatggtttcctttaaaagaaaaaaacttctgtttgtttttagcagtcattatttacaatttgcagtgattaacttggcaaggcttccttccgtgtttatccctgtagccatcatttaagtcaggaacagtcagaaaaatatttattttattttt

SEQ ID NO: 14799 - DNA, 1211 bp, Homo sapiens
atactgaggcgtgacagttattgagactttttagcttattgggacatgtagcattcagattggagttccttcagttgtattttttaagatactgttgctatccaatgcttttctgaaaattgggaaaccattaagggacaggaataaaatataacatattaagtgtcttttgtgaaaacagaaagattttcatttctcttttgcttatatagcttgtgttggttttgtgttttccactactcctttcagtagcctttaagaatttcctgatatgctgtgctgtgcattaaggttgtgtaagtattcataaacaaaagcttttgaatctgcattcctgccacttaatgactggcattacatgctatgccttgctgtaattgtgttgattcagcactgtgggagctttctgttttcctttgaaaatgattttattatgaggaaaagcctgagaaataaggacttgtagataccttttgaatttaatgtcgttagaattgcttctttttttaatgctctatctaggtgaaagatatgatcctgagcccaaatcaaaatgggatgaggagtgggataaaaacaagagtgcttttccattcagtgataaattaggtgagctgagtgataaaattggaagcacaattgatgacaccatcagcaagttccggaggaaagatagagaagactctccagaaagatgcaggtattttaccactttgtctcccgggtctcttagaaagagccctaaatttatgccactgggtttttggttttttgttggttttgtttggggtattaacattatctgaaattgggcctttttttttttttttaatagacttcatttgtttttagagcaatttaagctcacagaaaaattgtgcataaagtacagagttgtcatatacccacttccccttcataacaggttctgtgaacatcttgcattactatggtgcatttgttaacaattgaaaagccagtatggatacacttattaactaaagtctgtagtttacgttggggtttcctatattgtacacttctatgggtttcgacaaatgcataatattcctcattactgtattgtatagaatagtttcactgccataaatatgccctgtgcagaaatgtggaacaagtcttaaatgtgcaagttatccttgcacagggggcatgctaatcttccctgtattgttctggttttagtacat

SEQ ID NO: 14800 - DNA, 1686 bp, Homo sapiens
ggaaggttccagggacaataatgagtacattgccagacgaccagataaccaggaaggggcttttgaccccaaagaatatcctcacagtgcgaaagatgaagcacatcctgttgaatcagcctagaggagaagcagcaggaatgatgctttgatactctggaggagaagttaactcaagatggaattcatgttctgatttgaggaatgaaaatgagatgatcaggcaggaaactgacattccaaggatctaatccaggaagtactctcagtggggaccacctgctttcatcccctgacattgtgggagaaattttgcaatgtatgctaatcaaaatgtatttatatgttctctgctgatgttttatagaggtttgtgaagaaaattcaacctcagcaacttcagaaactgcccctgatacgtgtgagagagaaataaaatcagattttgagtgttgaagggactgaggaagtgaggataaagagcatgaggacagcatggaaagaaggaggcagaagtggaactgaactttcactctccatgggacagatcaatctcattatcaagtctgaatagcaaccagccctctcctccaccccgtttctcctcagttaattggagctcagtcaggtgattattgagtcttgtacagcactgaaatgaaatcaaagatgaagaagcattgattgtattcaaagattgaagcacgctcatactttgtatgtgctttagggaaggggtgggtgggcacttgggccttgcgggtgcattcatgtaatctgagactcttgaactttatgacggagtcttcagtattttgatgtatatgaaacttttgttaaatatgttgtatacttcgctggctgtgtgaagtaaactaaaactctgatgaacactttggagtctgctttagtgaaggagaccaaagtgggaagggctttagggcactgatagaggccctgggtgtacttttcaatcctgtgtaatgtttaattcttgcaactgaatcaaaacagtgttaaattatggcaatatttgcactttgggaatgagtacataactgtatgatcacactctgcaaatgccacttttaaagctgttaatagactttgcaccttttctttgacaaggatgtgtcatatttaaatttttacattcatcatggctacaggtagaactggggaggggggaatgtaattttttatgggaattttgatatgaaaagaaactagtcatttatttatacaataggcttggctcaaaaagtgtttttcagacctcggtattcctaatgtgggatgtgactttattttatttttagtagcaaatttggatgtagactgacagacatagctgaatgtcttaataaatttaaatttgaagataattatgttttgttcttgtggtttgttgtcattataaagtgctttttttgaagttctgttcttaggaggttctgtttttaatttagttggacttacatgttgatccttgtcagaaatgccctgtagatggcaaaactctttgattgaaaaggaccatttcttttgaaatcttctacacccagtgttagcaaacttacctgtgcttcagaagtgtttgggaagctttttattttaaaaaagtacacatttctgaaccttacttctgattcagattgaatcagccttttggggtgcctgagcatt

SEQ ID NO: 14801 - DNA, 1186 bp, Homo sapiens
acgtctgacggtgtggctttttgttttctatgcctggattactaagatcacccacattttagtcatcagtgtcttctctttagagttgattttttatttattaaaacttttttttcccctggatactcttctgtatatttgaaatattgcaccctaaaaacatcaggaatgtgttattgtttaaagcctatgaaaaaagtatcttagtgatcatatttcaagatacgtacatttttttttttttttcaggttctgggaacactttttatttatgtcttatttatggttgaggaattcagaaaagagccagtggaaaacatggatgatgtcatctactatgtgaatggcacttaccgcctgctggagtttcttgtggccctctgtgtggtggcctatggcgtctcagagaccatctttggagaatggacagtgatgggctcaatgatcatcttcattcattcctactataacgtgtggcttcgggcccagctggggtggaagagctttcttctccgcagggatgctgtgaataagattaaatcgttacccattgctacgaaagagcagcttgagaaacacaatgatatttgtgccatctgttatcaggtaactccttcaataagaatgtgtttgggtaagtcatacagtgtatcccttgggactgtaaccatattaaccaaattcaacttaaatttctaggcaaaattatcttctggattaaaaaaaatggacctcagaaattatattaaagacctgataaaatatttccattttatttctaaattaagttttaaatttagtcccttgggttctaatgtattgttgttttcaacattattgctcacccataaataaaggaaaaacaggtcaggtgcattttatatttactcctgaatacacactcacacggactattgaatatactatccatgaggggtcagcaactcctgaaaagtggtgtgccaaaattctgactcttttccctctagtatttccagagtggggaagaaatattcatgtacctaacataggtagagagaatatgtgcccacctgtgggttgctaagtatccgagggtacaagcatttggtgggagtgggtgaatatggtaaaggctaccaaactgatgtaaaattgaagttggcctacctatagtctttagcacatgcaccataaagagcctgat

SEQ ID NO: 14802 - DNA, 1184 bp, Homo sapiens
taacttatgatttagttatttggggcagtttacttggccctccaaaaataaagattaaaaaattatcagaacaaatattgttgcagtatgatcttgaacaagtaattatatctcttggattttatgctttcacctatagaccagaacagttaaatattgcgtacctttggaaaagaagttatgtataaacattagcaactgaattgtcacaatactgaattagacattgtttaaagttttcttcatattacacatggcatcacagacgaccagtggagatttatgctgctctttccagatcagccctacagaattagtattcaaaattcacagaacatgtgaatatgtaattatagtcagatgaagtttaagtttgatttaaaatattatctacgagattttagttagacttcttcaaaagttgtgttattatccttatcaacagtgttttttgtttgtttttattttgtggatgccaaatactcaaaattaaatgtattctattccctattttaggtcagttggtggtgtgtactttatgctcctgtgtcatgaaaacaaagcagatttggctgttttcagctcacatgcttcctctgctagcacgactctgccttgttcctttggagacaattgttatcatcaataaatttgctatgatttttactggattggaagttctctattttcttgggtctaatcttttggtaccttataaccttgctaaatctgcatacagagaattggttcaggtaagactgctgacaaccacaaacaggtagataaaattctacataaatgttaagtacattaaagttatagttcatttttatttcacagttatggtaccattcatttttgcagtttcaaaacagctgctattttcagcccaattaggagcatctgaaagattcttgattatgttctattgagaaggcagtaaagtgaagtggttctcttaaagcagatttatctgagatcgaaccctgatgctgctgttcactagctgtgtaaccttgtgataattgcgttactttctgtaaaacggagctaataatgaaagctgtgctttcctcatagagttctgtgagatttaaatgagtttagtaccaggcagacaatgttccatatgtgttagctattgtaatgaagacaaaaataataaagaattgaatacctataag

SEQ ID NO: 14803 - DNA, 1236 bp, Homo sapiens
cagtgtcaaacttctcatgcatggagcatgaattcttactaatagagactgtagtttttttcttgtctttggtaaatatataaaagaccttaatttttcttttttaatgaatggagaaaacatgagaaaaccagatggacctgttagtactacatttttaaggcattttatatttgatggtgccgtacttttaataataataaaactgaagttttttagtggcaatactgatttattttttaaaccagaaagataatccatattgattacttactacaaaaaagggaaaatatgccaaaaaataaaaaaccttaaaattcatatgaagcaacgtaacagataactgagcacttggctcaagtggtcagacttttcataatgttactgtgtaagtttggaattacctaataaccccaggctcaggattaacagaaggttctgggtgagttttaaaacatttaatatacctatgatttgttttacaacttgaagaaaaggcaggcagtcttgtgtctaatgagcttaatgcaaattctaattatactgcaaataatttaaagttttgattgcattctacaattgtctgtttggaaaattacatattatgaagtcattatatattttatcaaatcagaaaaagtcagctcaggaactgtagcagcagggagttctaaagatgacatgaactatactataggggtgccctactctatatggcctagggctttggtttgggtcagtcttgttctttcagatacataacaccagcagtactttcgggctcacttcaagaaccagataactctcccaaaccatgatacatgaagtgtataatcaagatttttaattaagctttagaattctttatttgtgtagagtgatggaaatgaccaagaagtaataatataaagcaaaagaattgggagagatcaggttttaagtatataaatattttttttttctcatggcatattctcaaaggtgttttgttacaaaccagattttcattttttaaaaaatgagacttggtggtatttaaaacctacacctaccatgttgctatttcactttcattgctttagttgcttaatatttaagctttgcttcatgctaccttttgtctgtatttcaatcttcataagcctattttgttttgtagacttgaatgataaaaattgtttctcatcttaagtatgctcagagttttaaatgttaaagaatgttgtgtaaccttta

SEQ ID NO: 14804 - DNA, 1866 bp, Homo sapiens
atttactgaaaatgttgtatatggttcagtgaatgtaatgtatgtgatgcttaacataaagctatctgagaaaacattctgattcaagactggaaatatctactttaagtatagtcaactattctgtcattgcttagggcagctgtttgtttttaccaaaaatgtagaacctaaagaaatgaaggtctttgaacttttgggggaagagatagtagatttttgtagtcttgttttttaatatgaaatagttttcgggaaaggttatataaataagcatcagatgttgtttacgtttaagaaattgaattatagatgttaacttaatgtcttctttttttcttccatttctttcaaaggtttgggccccatggtatccctgtgacagtatttcccaaaagggaatataaggataaaccagaagccatgccgctccaaagtaatacattccaagaagggacagaagtcaagtgtgaagcaaatggtgctgttcccgatgacccttctcctgtcccgcatcccgagctgagcttggctgaaagcctgtggacttccaaaccaccacctctcttccatgaaggagcaccttatcctccccctttgtttatcagggacacatataaccaatcaatacctcagccacctcctcggaaaattaagcgacccaaacgaaaaatgtacagggaagaacccacttcaataatgaatgctattaaactacgacccaggcaagttctgtgtgataaatgtaaaaacagtgttgttgctgaaaaaaaggaaattagaaaaggtagtagtgcaactgactcttctaaatatgaagataaaaaacggagaaatgaaagtgtaactactgtgaacaaaaaactgaaaactgaccataaagtggatgggaaaaaccaaaatgaaagccagaaaagaaatgctgtggttaaggtttcaaatattgctcacagcagaggcagagtagtaaaagtttctgctcaggcaaatacatcaaaagctcagttaagtactaaaaaagttctccagagtaagaacatggatcatgcgaaagctcgggaagtgttaaaaattgccaaagaaaaggcacaaaagaagcaaaatgaaacctctacttccaaaaatgcacattcaaaagtccatttcacacgtcgatatcagaatcctagctcaggttcccttccaccccgggttcgtttaaaaccacagaggtacaggaatgaagaaaatgactcttctctgaagacaggacttgagaaaatgcggagtggcaagatggcacccaagccccagtctcgctgcacctctacccgctcagcaggtgaggccccttcagaaaatcagagtccctcaaaaggccctgaagaggccagcagtgaggttcaggacacaaatgaagtgcatgtgcctggtgatcaggatgaaccacagacattgggcaaaaagggcagcaaaaacaatatctctgtttatatgaccctaaatcaaaagaaatctgactcttccagtgcttcagtgtgtagcattgatagcacagatgatttgaaatcttccaactctgagtgtagttcttctgaaagctttgattttcctccaggcagtatgcatgcaccttccacctcctccacttcctcctcttcaaaggaagagaaaaagctcagtaattccttgaaaatgaaagtcttttccaaaaacgtctctaaatgcgtcacaccagatggcaggaccatatgtgtaggggacattgtttgggccaagatatatggcttcccttggtggccagcccgtattcttactataactgtgagccggaaagataacggccttttagtccgacaggaggcccgtatttcatggtttgggtct

SEQ ID NO: 14805 - DNA, 1062 bp, Homo sapiens
tatgcctattgatatgatctgtttttatatttggcatttactttaaatttatctcttttagccttctgtgttggcattgtctatcattgcattagagatccaagcacagaagtgtgtagagttaacagaaggaatagaatgtcttcagaaacattccaaggtatgtgaaggacatagcctaaatcctattaacagctgtaaaagaaactaaaccccttctatctcctgaagtaaaatgagatgtcatatgtttatttgaaacttaagtagctatcctcaaatgtttttaatgagcaaagacacatgttcataggattgcatttattaatgtagttaaataaggtgggacttacttggagtaataattttttaaaatttatgtatgtacagataaatggcagagatctgaccttctggcaagagcttgtatccaaatgtttaactgaatattcatcaaataagtgttccaaaccaaatgttcagaagttgaaatggattgtttctgggcgtactgcacggcaattgaagcatagctactacagaataactcaccttccaacaattcctgaaatggtcccttaactggtaaatttggtccgttattattctccagatagagaacattttccaatgccataattttcaactaaagaagagtaattatcttcaaaataaacaaaatggagttggaatagtaaagggggagatgacatcactgatctagtcagctaatatttgaaggcctttactatatacaaggtacaacatcttaggagtaaggaattatccaacctctgatacatacgttagccatttcattaaattttcagcttagagaacagcatcctccttgtagcactaaaatcatgcttttttttaattgcacatgatcttgctgtatgtatctgactgatttaaaattacataagctgagcaggacaacagcaccaaaagtctgaaccaagtatgaactaatttgagactgttagcttataagcaaaatcaatatgaacttggatattgtacttaaaagaaaaaaaagtaggccggatgcagtggctc

SEQ ID NO: 14806 - DNA, 1781 bp, Homo sapiens
tagccagtcgcggtggcgggcgcctgtagtcccagctactcgggaggctgaggcaggagaatggcgggaacccgggaggcggagtttgcagtgagctgagatcgcgccactacactccagcctgggcgacagagcaagactccgccacaaaaaaaaaaaaaaaaagaaaaaaagtaggatatgatagatggtctctacattgggtatctggaaactgccagagtgtgtcaacactatactaacctatcattgctatagcagctggactactgcaaagtagttatatgcataaaaaatgtaaacttgctttctgcatatgtgatatacattcttgccatataaatttcctaactcagtgatgatttattctactcaaaactaaatgttaacatttaatacatctacatgtgattatgaatattagatatgaacatttcaattttcttagtagtatttaggcagactggcttctgttaagttggattttgtttgttttctttatttaaataggattattacagcaccaaaaaacttctctgaagcctttctccacaaccttgttctatggattccataatgttacaatggatttaagctatgaagcctcaaaacatcacgagataagcatgatggtctcagacttgggaaaactgcctaatattatgctgtagtggaattatgtttagatttgaattcatctgtgaagcattcaaatcaaagctaaaagcctaaatgtgaaatgctaatgacaagcctgagaaggtaaactgtgaatcttcatttctatcattgatctaactttagatattggatcaatatatttaggtggtattgaaaatgctattggaggagtcacactaatactatcaactatcagtcttcccacagcttcaatcactgtcattattctaatcctactcctacttaaattttaagttatgaggtttatgtcaaaagcaacatttcacaaatgtacttttaaggcataataagggttaacattctaggcagtataaacacaccccataatgcaagtaataggtaatctagagatgtggactttattgctatatgggaattacatttaaatttgagggcattttatataaagaaaaatacagacctataaagtttggcatattcattaagttatcttttaatatttttttctagaaaacaggtgacatttgtatctacgataaaaatttttatacagaacctactgcctcaaactgaatcccatcaagaaaactagtttctattgtattagtaactcaaaataaattatcacttcgaaaacttgctttcccacactaaggtaagttcagactagattgaacactccagaattttttactacagactgtttttaagttagaagtgatggcaattttataaatagagaatatacttccactgatgcccttactgtgccaaaacaaaaatcttaagaaaagcaagtagacaccttcataactatgaatgaagctgctgaagtagtgtttaggatcctccatggcagttagtgaatgtaagaagtacagtgttaaagtgttgtaaacagttactcagtgcaatgtatagcctgagtctatccatgatggctatatccaatttgacatcacgttatggatcagtacacaatgaaaaaccaaagaaccacagtatatcttattcttaacttttgtaaaccatgttttatgggtaactttttagttttcccaaaaggctgataaatttcaatattttgaatacatcattgttaattttgagttggcaga

SEQ ID NO: 14807 - DNA, 1357 bp, Homo sapiens
gcctgtaatcccaacactttgggaggctgacgcaggaggatcccttgagcccaggaatttgagactagcctgggcaatggagggagatctcatctctgtttaaaaatatatacatatttaaaaaaaggtcagggggaacaaagccctcaaaatatagcctttcacttacttttgatttttttgtgtttatctttctttaaagattactgacagccctgtcctaggagcacaacgtccgagaaatgctcagcttgactgctccaaattggagaccttgggcattggccaacgaacaccatttcgaattggaatcaaagaatcactttggcctttcctcattgacaagagatggagacaaacggtctttcattagtttatttgtgttgggttcttttttttttttaaatgaaaagtatagtatgtggcactttttaaagaacaaaggaaatagttttgtatgagtactttaattgtgactcttaggatctttcaggtaaatgatgctcttgcactagtgaaattgtctaaagaaactaaagggcagtcatgccctgtttgcagtaatttttctttttatcattttgtttgtcctggctaaacttggagtttgagtatagtaaattatgatccttaaatatttgagagtcaggatgaagcagatctgctgtagacttttcagatgaaattgttcattctcgtaacctccatattttcaggatttttgaagctgttgaccttttcatgttgattattttaaattgtgtgaaatagtataaaaatcattggtgttcattatttgctttgcctgagctcagatcaaaatgtttgaagaaaggaactttatttttgcaagttacgtacagtttttatgcttgagatatttcaacatgttatgtatattggaacttctacagcttgatgcctcctgcttttatagcagtttatggggagcacttgaaagagcgtgtgtacatgtattttttttctaggcaaacattgaatgcaaacgtgtatttttttaatataaatatataactgtccttttcatcccatgttgccgctaagtgatatttcatatgtgtggttatactcataataatgggccttgtaagtcttttcaccattcatgaataataataaatatgtactgctggcatgtaatgcttagttttcttgtatttacttctttttttaaatgtaaggaccaaacttctaaactaattgttcttttgttgctttaatttttaaaaattacattcttctgatgtaacatgtgatacatacaaaagaatatagtttaatatgtattgaaataaaacacaataaaattaacacttgatccagaatgttaacttac

SEQ ID NO: 14808 - DNA, 1126 bp, Homo sapiens
tctcagagattgacattgggtttggaaattgatcctggtttattcttttttttttttttttttttttcagacagagtctcattatgtcatccaggctggagtgcagtggcacgatctcagcttgctgcaacctccccctcctgggttcaagcaattcccctgccttagcctcccaagtagctgggattacaggtgcctgccaccatactggctaatttttgtatttttagtagagacggagttttaccatgttggccaggctggtctcaagctccttgacctcaagtgatccacctgcctcagcctcccaatgtgctgggattacaggcgtgagccaccacacccaaccccctggcttattatttgtttgactactccaaatggagaatcactgtcatttagtaaatgagtttgccccacttacatttattgtgatttgtctatgcattttgctttttgttttctgctagtggataccacaggccaccagcccaacagatatttgtgagatgctgacctagaatctctggggtctgttccagaaaccactcagattgaggatcctcgagtacaatggcggcgggagcaggaacatatgctgaaggattacctggtggtggcccaggaggctctgagtgcacaaaaggagatctaccaggtgaagcagcagcgcctggagcttgcacagcaggagtaccagcaactgcatgccgtctgggagcataagctgggctcccaggtcagctgtgagtacctcccactaccaccacccccaccgacaccaacagagaatggccacactgagttctgccaatattgcttctcaagtctgcccatttctcttcacctctactctttgtccaaaccaccatcttgtttactgctcttcctgctcctacctgtgccttgcagtgattcatttgccatttgcgtttcattttatttcatttgtaatcatctcagaatgccagtcggattacatatctcctcatttaaaagctttcagggactaggggaattgggaatggggaattcttagttaacgagtacagagtttcagtttgggaagaagaaaatttctagaggtggatggtagtatgttcacaacagtgtaaatgtacttaat

SEQ ID NO: 14809 - DNA, 1146 bp, Homo sapiens
ttgcaggttacagattatatcataaaaccttcaaccaaaataacatgaggaaagagcttttgttattccattcagagagatgagcaacttgcccaaggccacacagccagtgctaagaggttagtgcctggtgatgaatccacatctctattgtaccaggaacagggcaaggacattgccttgttcatgtctgcaccccattcctgcagagcctacttcattgttggcacatggtaggcacccacatgtgtttgtttagaaaaaaaataggttccttgagatgacaagctgatcaaaggaagacagtaactgtcaaagattgctctgagatgtctgtttcttcatggcatctcctgttccctcagtgccattaggcacaccagtcatgcttgctttcttggcccccaggatcgccaacctgaagatccagctggccaagcttgacagtgaggcctggcctggggtgctggactcagagagggaccggctgatccttatcaacgagaaggaggagctgctgaaggagatgcgcttcatcagcccccgcaagtggacccagggggaggtggagcagctggagatggcccggaagcggctggaaaaggacctgcaggcagcccgggacacccagagcaaggcgctgacggagaggtggggctggggccccagggtgtgtaggacccttctctcactggcagtctgtcctcagcccccagatgggggaagaatgagggggctccgggcccctgggctccaccctgagcacgctcagttcagagatctctcaggttgccgacataggaaatcaggaaagatggtttgccatccagtgcgccagctaccctggaattttgcatggtgaatcatgctaccaaaaagtctgcttaggtgcaggtgttcaaaaatgtatcttctgactcaattaagccacataactctatataacttaaagcagtcattttccaactttttgacagtgatgcacattttatactgtaacctgatccaaggttcacaaaatagtgcatgctctttctacctctgatggtcctctgatgttttctcccttctgttgcattttgtttcatgcagtttgtgactcaccaaattgatttcaccccatgctaagtaaggggttgcagtttg

SEQ ID NO: 14810 - DNA, 1244 bp, Homo sapiens
agtatgagtcaactgggcatagttcccaacaacccaaaatacatacgtacttcactgaagcagatctcatgattccattgacttcatttctaaaattggactttgagcagccaatttctaaggattaaaaagaaactttaatgcattgtagacctctgtacacagaaaaatctttgtaacttttgggcttaattttcattcttaaaaaatctggtaactttttcaaatgcaaccactgtcagtttgctgtgaggctaggcaaacaacacaaggtatagaatttcccatcaccaccaccctgaccccgcgagaagattgccttttaattagagacttgtagaactagtgccttttaagttctacactcatcttttccaaagactattagtaaacttgccatgtaatttgacatggcagttccttgctcagctactctaaataaagttggaaattaggtggtctcttagtttgggtaaagtcagtactattgccagtaatatacatggtaattgaaagcccttaaagtggttcagattatttgccaaatattagactctataaaaatttctgaggttttttttcttttacctttgagtgtacatgtgattgctataatgtaaataccagtcccttaaagactgtttctataagcagaatgatgcagcacaaagtggaaaggttttcctcttattccagcagtattcttgccttcaaagagtagtccatcttgccttgatttttaaggttgttttcttggatggaaagcttaactggatagtaatttccatatgttctttataaccactctgtatattataagcaaagttttttcatattgtatctttttctgttgagcactttatgcattttagtctattgcatttgagaatgtagtttagaaattcactgtttaaagccatgtgaaaactgatagaggataatgaaaatgagtgtacattattttgaatttaacttaactgttttgtggtgggtgtgaacaaaacattagaaatatattatctttttgtgataatactctctgacctcacttaaagtgatctgccatgaggtatccatgatcaagtttatgtttattctaatacctaaggaattcagccaactttgtttctatcatcagataatctcagaaaatagtgtgttttatctatattactgcctcttttcaatatttaagagaataattgtcttctggtttctactgagcctagtaataatcactaaag

SEQ ID NO: 14811 - DNA, 1157 bp, Homo sapiens
actctcccctcatacattagaaaatggccagtatctcattctaaaatgagtagagggccagtcaacactgacctcaagattattctttaaatagcgacagttgttttcatttttttgccttcacctttagttggcttgattaaaaagatcattatatggagcccttctactgagaacatcattaggtaaaatccctccaaataaaagatacatattccccttgcctttctgctttgtcgtaatctcccccctttcttctttcctcctcttcctcctcctcctcttccccctcctccccttccctgtgtgtgcccttctgttcccaatgcattccaattgatgaccattgactccttcattcattcttgtattcattcagtaaacatctgttgtgagcccactattttcctgtcattgttctgtgcttggaaagacagaaacaaacaaaacagacacatttctgcctgtatgacacttgccttctagtgatggaggggataaacaagcaacaaagtaaagtaagttagataacatgtcagaaggtagattctgtggagaaaaataaaataagaaaaggacatgaaataagcgagagaaccaaatggctatctggaggaagagtattataggttgagggaatcgcatgtgcaaaggccctgacgctggagtgggcctgatgctccagaaggccagtgtggctggagtagagtagacaaaagggatggtaacaggggatgagatcagagaggtaaggaggggccgcatcctgggacgttttaaagactttggctttaccttgattgaaacgggaagaagcatacgacttaccacagtggagtggagacttcgcttcttctttcttcacctactttgccagcttttctttaattcctttacagtcccattttccagccatagtagacacaacccatgcctccgcaccctctggcaggcaggagctggttagtaaagagtcctttctgcctgccctctccgccttctgcggccctccaccttcctttccacaaatactgacaattcattcccttagggttttaatgcacctctccttcagtccctgtggtccagtgctctagctttagagagcgctccctctacggaatctacttagtcctcacctacttctcctgctcctc

SEQ ID NO: 14812 - DNA, 1220 bp, Homo sapiens
aagccaaagagaagaaaccctgggtgataaagagcttacttcatggactttgttgcctgagcggtgctgactgctggagagagagcaaggtccatatggcttccttatgggggacgtggaagtcaccagccctgctgcagccaacatggagacatagtcatggctctcaccctgcaggagcagctctctaggctttggggtagcctggggccagattctgttgccctgagcttcagaaacaggcaaaggaaagaaaggtggtgtgtaggaaaggcctgcagatattaccagcttgtctgtggaagccacagacatctcagggtgaaaacagagaccaaaagtacctcttgcaaaatagtcattaggctgtgaacataggaagacgagaagatatagtggaaataatagtcaataacacaaccacgaagcagcaactattatttgttgaacgcttacaaagcaccaggggctctaaatgccataatcttcagaatctcctttaatcttcataattatcctgggaaatgggtattaccatttcattttattatggaggaaatggggctcagagatgataaataatttgctcaagctaaaatttagatggtggcgctgataacccaaattgcctaacccattaacctttctgtgtactaggagtgggaagaggggaaaccgcagatttgaagccacactaccatatcccacctccaccacataggtccataattttgtttttctaagcctcagtattcactgtgtaaatggatatagcaacagccagagttgtggagacagtcaaggataatggtgtattgtaagtatcagtctattctctgactcatattaagggctcatctggcccttcttcattttgttccttcttcccatgactaagacacagacccaagctttccatcattgccgtcattgttcattgtctatggtattcctcagagctctgcaggaagtgggatccacagacccaccttctgcctttgaagtatttgccatctaaaatgaacatacatttatggaacacacagtcaggagccaagaacagcccaaacagttgtgaaaagagcaaagggtattttcatcatatgcatgtcaaagggagttgcattttagaggaagattttttttttaatcattcgtctttgttgagcttcagctccatgggataaagagcggagagagatctggaaatatgcaggtgg

SEQ ID NO: 14813 - DNA, 1136 bp, Homo sapiens
tgtcccgctccactgcatcccaaggaggtaaagtgagaagacgatatttctgactcagagagcaaccctacacctcagttcacttatttttatttcatacagtttgtcacatgagttacctgtctcctgctgcgatctggtgactaaggtgaaataccgctctatggtgtactgagcaagccgcaggtgttccagtccacgcacagagtcgttccctctcagccaggtgaactccacatcatttccatcatagccccctggcaaataaaatggagccctggtcagtgcaagggtgttccagattgaactggtctggtctggaaaatgctataatatggagacagcatgagttctttcttcatagtgataagtccaaggacaatcccatgcagaacttagcaagatttcccaagtgcaattgcaatgtctgctctgaatgaagtgacctgccaggacgatttgccgtcaattgagagctggtcttgtgttaggtactgcgtagatctggtggatgataagtcattagaagtggcctccctcattatttaaattacatttattaagcacatatctgtgaacacgcaaagatactgcctttcaagattgtataatagctctgatgatattttcagggacttaagaactgatctgttcatatttctatattggcataaatgcaaaaacaaaaacaaaaaacctgctttattaaagcctgtaaaaatgcacgttagataagtctcaaagcagtttaattaatatacttgataatagtaacaatagttaccttttgaacatttataagtactttatacattatgtcactaatgttcttgtaaacttgcaaggtagccatttctatatttcctcaattctaagatggacatttctttacattttctgaaattgaactggatcttgtagttgatttatatctatataatatataaatattataatatatataatatatataatatataatataatataatatataatatataaacgtatatatgtattttaatatacagtaaagcttatattttttcctgaaatgttattattcaataaatgctgttccatagaactcagtcactataatgattttcccacattattcttgaaaactctcagat

SEQ ID NO: 14814 - DNA, 1143 bp, Homo sapiens
agaaagaatataaatttggttatctgcaacttgtgcatgatcatttcccccatccatctccctaacctcatctggtatctccttgctgtgtttatcagccgcactgacctttaatgctttgagatgactaaattccactctactgaaggaccctggtaaatgttctttctttgcctggactgccttctagtctttttaaaatctgattcactgttgtaggtctcagcataaatattatttcttgaggcctacctttccaaatccttgttgtagacaagttctccctttcttgtacttttccattgcagaactatcaatttgtaagtaaataatttggggagtaggagatgggcctgttttgtttgcaactgtatcccctagtaagtagttgtatatcgataaacatgtattgaattaatgaatacacatgtgatatttgtatcccttgttttttgtggttaaatatttacctcatttttttcattgaagtaaaatgttaatttttttttctttgaagagtttggctgaattggaagtgttatgtactcatctctacatagggactgatcttacacaaagaatagaggctgagaaagcactcttggaacttattgacagtccagaatgtctcagcaagtgtcaacttttattagaacaaggaacagtaagtatttggtaacaatgattaaccatgaaagatcagtagatgtatgtcattgttaatgaactcgtgtgttagcaatggtaactgatagatattgccacatggtttttttgtttttgtgaaactatagtttcactgtcaaaggggttaatcaggaaaagaattggaaaacctggaaagcaaacttagggaagagccaggaaatgaaataggaatgaattgagatagtttcttgattactattggtctctttttatgtctcatattagtgggcaaatttacatttttaggaagttgactaacaacttaaaaaaatctagataggggaggcagattgtaattacctcagaaacatgaaaggatgattcgaaagcatgctgattacctcttgcctgcctcccatctagatattcatagtctagacattcatattcatttagtaaaatatttaaatgtcaaatcagatgctgtactgctta

SEQ ID NO: 14815 - DNA, 1184 bp, Homo sapiens
ggtaagggttggtgggggtatttgaaaaatatctattaatttgattactttgctggaaatgttcattacagggttttaggtaaaaaaattcattgaaatgtatataataaaaattgagaagctatttaaatatctaataattgaataatggcttgagaaactataataaaatctatgtgaagaaataaaatttttacagattatattatagaaaagtttttaaaataattttaagggagagattataaaaccatgtttttcacaggatgtcaactctgaaaaatattcatggaatgattagagggaagtagagtaatattttaatgttactctgggtggtaaaataatagagatgttggtttctttatacttttttgcatttataaatttgctatattatgtgttcattagttttatagtaagaataaaagttaatttaaaaatgtatgtttagtaattttattctgtaattcttattgtaggaagatgtaatattttaaataacttctgctttatttctttgtagcactgggaatttgctcctaacagtgttcattatttattaactctgtggcaaaggatggtagcatctgttccttttgtgaaatcaactgaaccccacctattagacacttatgcaccagaaatcacgaaggcctttatcacttctcggttggactctgttgccatagttgtgaggtattcaaaaactaaatgtttttgttgtatttccttttgacacttggaattttttaagataaagttataaatttaaaattcaccccttttagcgtacagttgtatgatttctgacaagtgcacacaattgtataactaccatcacaattgagatatagattagttccatcaatccagatagttcttttggctcctttttcagtcagcccctctcctcaccctcatctctggcagttactgatctgttttgtgtacctgtaattttttttttgtcttttccagaatgttgtataaatgaaattatacagtatgcagctttttagtctgatttttttccacttagcataatgcatttgagagattcctctgtgttgtgttagtactttactttcattgctgagtagtataccattttgtggatatatcagtttgtttaccaattcacctgttgctggacttttgagttgtttatgtttttggccatt

SEQ ID NO: 14816 - DNA, 1133 bp, Homo sapiens
aaaaatattttctgtttacataatcatgccatcttcagatatagacagttttattttttaccttctaatacatttctattttattttttatttcttttcttttttctttttttttttagagacagagtctcgccctgtcaccccagctggagtgcagtggcgcaatcttagctcactgcaacctccgcctcccaagttcaagcaattctcatgcctcagcctcttgcgtaactgggattacaggtgtgtgccaccatgcccagctaacttttgtatttttagagtcaggatttcgctatgttggcctgactggtctcaaactcctggccccaagtgaacctcctgcctctgtcttttattcctttattatagaatttttatttaacatgaagtttatttgtggtgaataaaagtgcttcacattctaatgttgtctgcaaacttattctgtgtttgcagagatcacttagatgatccactggatgatactgccactgtgtttcagcagttggagcagttgtgcacggtcagcagatgtgaatatgaaaagacatgtgctcttcttgtgcagttattcgaccaaaatgcacagaattaccaaaaacttctgcatccatattctggtgtaactgtggacatcaccattcaggaaggtcagtaaactttatatgactactgagtattatgttgaatattaagtaacatcattaatcactttaatagttttactgcaagttatttttatgtattttccccaattcctggtcccctaataaaccattaattttattaacctcctgggtatattggtaatttgttggttgatttttttttttttcagttttcctctataagattgataggatatacttctctctggaatcaatatgaagaaaaattgataatggcccttgagcagatagtttatgaacataactatcttaactggttgtgttttcttctttgctatacttgattgcaaactcagaacccaatttcagccaataaaaagtatataatatatcattgtgattttgcttttaggtattagccttcgttatggctttactattatttttattcctcaatttctttattttgtttttaaccctttattgacggaggaggtattt

SEQ ID NO: 14817 - DNA, 1147 bp, Homo sapiens
aatcttggattttttaatacatcatgcataaaaatacagaaggaacaaatttattactatctattatgttccaagcaggggaaatatttaaaatgatcacactggtactatcatgacattgaccattcagaaaagatgctggtccttggatcatgagagtacatcctgactgaataacagatctggtcctagacagtttagtgttttgtactcaaatttattttcagtcatgtcttcatggtagacattgttttttccattttacaaatgaaaaccctaagacttaaagagataagtaacttatgcaagatcacatagcaaattagtagagctgggattcaaattagttttatttggctctaaattctatgccattttcagtgttctactgccttgataaacttaaaaccgatctgctttctatccagaactgagttcacaataatttatcactcatttggaagaacagatcattgtgctgattttggaatttcccccaagataagctacgtttctatgaatacttactaaacttttttcttccttattctatattaggacgtcttgcatggctggtatacttagttgggacagttgtaggaggaagattaacatataccagtacagatgagcatgatgctatggatggagaattatcctgtcggtaagtaagagctatgtaatttactgaaattcactaaatagttaaaaaaaattagttattgaactagtattatgagtgaagacattttgtatgtggccttttgaggaaggtattatttccctttttattggtgagaaaaccaaggctcaaaggttaaatgatttgtagaagtcaaatctctaataagtgatagactcaaaatattttgtacatgtttgtgcaaataatgtgataaagatttaggttgctttttattacttaggatgtgagcaagcacatacagttggtgtgtattggaaaggtggcaaaattgggtgacatacatccaatcagaaagtattaggtagtcagttacccatcgcaggttttgtcacctattggccacagtcttaggaaaaagcagttgaattattctcttcaagtttctattctaacctgaggaaaatttctatatatgaataatacaagtgaattgattttcca

SEQ ID NO: 14818 - DNA, 1233 bp, Homo sapiens
aatacctcccaagaagttcatcacaagattacagaaagaagatgagctttttgacaactacatgcaacaagatcccccatgaattcttaaattacctactaaatacaattgctgatattttacaagaagagagaaagcaagaaaaacaaaatggccgcttacctaatggtaatattaataatgaaaataataacagcaccccagacccaatgcgggttcatgagatttttcagggaacattaactaatgaaaccagatgtcttacttgtgaaactatgagcagcaaagatgaagattttttagacctgtctgttgacgtggaacaaaatacatcaattactcactgcttaagggctttcagcaacacagaaaccctatgcagtgagtacaagtattactgtgaagagtgtcgcagcaaacaggaagcacacaaacggaggaaagtttaaaaactgcccatgattctagctccacacctgaagagatttaaatataaggatcaacttcatcgatttacaaaactctcttaccaggtagtttttcctttaaaacttagtctatttaacacttcaggtgatgccaccaatccagacagaatgtacagccttgttgctgttgtggttcactgtggaagacttatttgtagacttgcttcatatgaaagtgtggagggtgtgtgcagcctcattgtcagcattggtcccagtcgaggccattgtattgtaatagttaagagtcatgatttttggttgttgtttgatgacgacattgtagaaaaaatagatgcacaagctattgaagaagtctacgggctgacatcagatatctcaaagaactctgagtctggttacatccttttctatcagtctcgggattgagggggaaccgtgatgaagagatactttctgccgcatttcttctctggttattttggaaaggatcaagcactgatttttcaagaaaagagaaaatgcaggaagctctgggggcagtagcacactttgcacacgataaagcaaagacgatggattgacaagcccttccgatcacagtagttgatttatttgctcaggtatcatgctgtctgtacagttccattcaacaaggaggtgaaatcagagataccagttcctcttgtaaaacagccttccagtattaacatgcattttctctttattaattgcaccaataatgccatgaattccttgggggtgcagtagaaagaatcggaat

SEQ ID NO: 14819 - DNA, 1236 bp, Homo sapiens
aagtggggaagctgggatgtttaaggatcacacatactgcacactcatcccacagtggatgagaaccagatttgggactctgcctccaagactgccggagtctgccttggtgagggacagtgggattcttgagaacagacctggagttccacgtgggagtggaccctgtagggacatcctgtctcaaggagaaagcatgcacagacacacaaacctatggaggccatgtgaaagacgactaatggggctgctgggtctaatcagatcacacgtggatccaacttaactcagagtgaacagcaggaaaaaatagtgctggcagttccaaggggcctaccacttcacaaatgtgctccaagaggatgagatgggctgctgtttgcacacccgcccttctgatgggattctagtgtacagatagatggatggttcatgcaatgtgggtgccaagtcaagccagctgcttcagggatgctcaagcaagaaacagtcggaagggatttttactttgctcaatttttgccttccacactgacttcagaacctggcccctgagaaagatgtattctgcctgtattccggatgtttctgttattctgttttccaatcaggcttctttaggatgggggacaaaggagtgtagagtccctgcactgagtgtgattatccgaactgcgcagaaaaaccctcctagccttctggactcccttctattggccctgacaacctagaagtacctacggattatggtagtgggggcccctttcaaaatgcaaaagtggcttgccatgtagctgttagctgagattagtgaccagattagctgactaccaacagctgcacatgagaaccaaaaacagagtggatttggtgagaaaaattgaagaaactgaaagatctggcatatgggaaacccgatctagatgttcagcagttttggggaagtcctatttgagagaactcagctccttatgatgaggagggaaaggagtgcctgaagagaaaagcagggcagagtaaaaagggagaaagtaaatgtttgttttttttgtttttttttttttgttttaagacaggatctcactcttgtctaggatggaatgcagtagcatgctcacagctcactgccgcctcaacctcctgggctcaaacagtcctcccacctctgcctcctgagtagctgagactacaggcccatgccactgcacccagctaatttttgtattttttgtaaag

SEQ ID NO: 14820 - DNA, 1301 bp, Homo sapiens
tctctggcacctgaactttggggtaacgattaactgcgatccgaagccttcaggcaagtaaaaaattcctgaagtgattacgcctgtttggaggcttgcagggcactaggggatggggaaaggtgaatcgaggtgctctctggctcattcgcagccggctaacccgccatatcttacacagctaagggctgccgacgccattttgcagggtgggctgcgcagactcttggcgggaggccggcgcgcttgagcgggagaggacgtggaagggttggaggtggggagtgcgcgttacgactggaaagcacgcgtgcgcacaggcgacagcagcggaggggtggggccagtgtacgagtgcgcgtgctcggtgggagcccgcggagtacctggaaggaggtgggggcgaggtagaaaggagtggggttgaaaagcgcttgcgcaggacggctacggtacgggggtgggagggcttcggagcacgcgcgcggaggcgggacttgggaagcgctcgcgagatcttcagggtctatatataagcgcggggagcctgcgtcctttccctggtgtgattccgtcctgcgcggttgttctctggagcagcgttcttttatctccgtccgccttctctcctacctaagtgcgtgccgccacccgatggaagattcgatggacatggacatgagccccctgaggccccagaactatcttttcggtaactgctggggggagctggagcgaggccgagcggggcctggtggcggtgagggtgggggtgaggggcgggaatccggctgcaaccgggtctggtggagaccgccagaccgacgggaggcctgagcgggtgggaagagctgcctgagccctggacctggagggattggagccgcggggggagccggtggcgtgaagggggaggagacgagcggcctgaagcgtctggggcgtgagcggtccgaggcccggggcctgaggtaaagtggaaccggccgcctggaagttcggcctttgccggggatacgtggcggagctccaggcgtggtttattttctaacggcggtggttcataggcttctgatgccaggccccgggttggtggtcctggaggctgggttcaccgggaagcatgggcctgcttgttggagcgggtagatgcacagcctggcgttattctggcctcagagcctggagctgccggacgtagacttacctcgcgtgcttcggccagttactgggggtggggaggcgcggcgcggcgtgaggaggccgcaaccgctgggagcacgtggttgccacgtggttgg

SEQ ID NO: 14821 - DNA, 1546 bp, Homo sapiens
agtggtgtaatctcggctcactgcaacctctgatttccgagttcaagtaattccctgcctcaccctcccgagtagctgggattacaggcatgtgccaccacacctggctaatttttgtgtttttagtagagacgaggttgttaccatgttgtccaggctggtctcaaactcctgacctcatgatctgcccgcctcagcctccctaagtgttgggattacaggcatgagccaccaagcccggccctttcctatgcttagatgcacaaatactgtgtttcggttgcttacagtattcagtacagtaacactgtacaggtttgtagcctaggtgtgtgtagtaggctataccatctaggtttgtataagcacattcttatgattgtacaaagatgaaattgtctaacaacacatttctcagaacctagccctgtggttaagtgacgcatggctgcatataacatttagtgggggggtgtaaaataggtggaactcaaaagttgaagtagtattttttttttgttcacaggtcagtttaggggctggtgcaaaggatgagttgcacattgttgaagcagaggcaatgaattacgaaggcagtccaattaaagtaacactggcaactttgaaaatgtctgtacagccaacggtaagggcacttacatactttggatgttgtgtcaaggtttaattctgttttaaggtaggtttggtgtcatttagttgtgccaaggagatagaaagtggttctttatcttctgtcactggagttcgatggtcaactcttgaacatgggggcttctgctgctacttttatcagaggtggaaaaacaggttcactggtttgttgatttggcttatgtgtttgcctgtaatgtttattgttcattttcttcacatgtttagtgatgaaaaatttctcccttctaggtttcccttgggggctttgaaataacaccaccagtggtcttaaggttgaagtgtggttcagggccagtgcatattagtggacagcacttagtaggtatgttatttttatatattatactacttagtttgtcctctttagtgcagttgcttggttcccagtttggacttaaagcatgggtatagtactactgtctttttaataggttccaatgtgagtctagaaattggagaggacaaataaatttttggggcgggggggagaggaaatcttgctgtcacccaggctagagtacagtggcacgatcttggctcactggaacctctccgggattcaagcgatcctcctgtctcagcctccccagtagctggggccacagacgtgcaccaccaagtccagttgcgtttcatagttatagtagagaaggggtttcgtgatgttggccaggccgatcttgaactcctggccttaacgtgatctgcacgccctggcctctcaaagtgctagtattacacgtgtcagccactgtgcctggcctaaaaattattttttaataaagacagtctcattataacggctggagtgcagtgatgtgatcatagcttgctatatcctcgaact

SEQ ID NO: 14822 - DNA, 1092 bp, Homo sapiens
ctccacgcctggctaattttttttgtatatgtgcagatggggtctcagtatgttgcccagattggactcttggcctcaagtggtccgccttggcctccccaaagtgagattacaggcatgagccaccctccccaggcttcttgcatttaaaacctggcagtgaacattaggcctcaaaatacttttgttaaaaagttccttttcccatgtgctctttttttttttttttttaaatagaatagaagtctcagtttttagagtatttactatcagtgttctttttttttctgacttcttgctgcttgagttttataatgtctaataaattgtattttagctgtggaggaagatgcagagtcagaagatgaagaggaggaggatgtgaaactcttaagtatatctggaaagcggtctgcccctggaggtggtagcaaggttccacaggtagagatggcaattttattataggttttgtattatagcttttagtttggtgatagaacagctcttgttcatgagtacgtatcttttcttttaaaagaaaaaagtaaaacttgctgctgatgaagatgatgacgatgatgatgaagaggatgatgatgaagagtaagtatgattttagaaacttgatatacttccggaatcttgacaaaaaaaggaatttgacatagttatatgcatgagggttttataaaagtcatttacaaaaagccatcctatgtaatagtttataataaaagggcaggtggtcatctgttgtcagtttaagttaaatgagctgagttgaaaggatattgggtctgtgagcctttacaatgctgtgacttgtgactcttcagaagggtagactatagtgtttgtgaagtttgattatgtccctttgttctgaagatttagtggatgtgttatacccatcaagcctggtatgttttatggtgagcagttaatgagattgggttgaaagaaaatatgattaaatagctctatattcattttacaagttgttactcaaggtttgttattccctaaaaggattttgtcttatggttttatgtagatatttattgacaaaaataagattctaaaagggat

SEQ ID NO: 14823 - DNA, 1401 bp, Homo sapiens
gagctgaagtgatctgcccgcctcagtctcccaaagtgtagggattacaggcgtgagccaccatgcctagcctcagcatatagttttttctaaatgtacacatgcccaggcacacatgcacaggcaattcagaataagtttctggtgtttatgtaactttatttgccaaatctggccaactctaaagctgatctcgggagatgaagttggaagtaacattggccatatgggtctctgttctttctgttgatttccttaagtaaataatgctaaactattaaataattattagtatattgttcacatttttatgactgattaaagtgtttggaattaaattacatctgagtataaattttcttggagtcatatctttatctagagttaactctctggtggtagaatgaaaaatagatgttgaactatgcaaagagacatttaatttattgatgtctatgaagtgttgtggttccttaaccacatttctttttttttttttccaggctattcaagatctctggcagtggaggaagtctctttaagaaaatagtttaaacaatttgttaaaaaattttccgtcttatttcatttctgtaacagttgatatctggctgtcctttttataatgcagagtgagaactttccctaccgtgtttgataaatgttgtccaggttctattgccaagaatgtgttgtccaaaatgcctgtttagtttttaaagatggaactccaccctttgcttggttttaagtatgtatggaatgttatgataggacatagtagtagcggtggtcagacatggaaatggtggggagacaaaaatatacatgtgaaataaaactcagtattttaataaagtagcacggtttctattgacttatttaactgctttatactttgtcaaagaaataattaatgtagttaggaatggcaaatagtcttgtaaaattctatgagaatgtccctgccctccccttcaatattctctctggagctaaccactttttcatcataaggatttagtgctgtgttcccacctcctgatgatagttaacaattattataactatgcaacatgtttccaaatgttccattagacctcctatctgcctattctagcctcacttgcaaagaaaatgtggcatgttaaaacagcttaaaagcagcctttcaacctgtatggttttttcccctaggctggagtgcagtggcacaatctcagcttattgcagcttctgcttcttgggttcaagcaggtctcctgcctcagcctcccaagtagctgggattacaggtgtgagccaccagcccggctaatttttgtatttttagtagagatggggtttcaccttgttggccaggctggtctcgaactcctgagctcaagtgatctgcccacc

SEQ ID NO: 14824 - DNA, 1311 bp, Homo sapiens
cttcccgtggaagcacactctactactaaagggaaggccctgggctctgatttgtcctttgcattgagaacggtgtggggatcagtgtgtgtgtatgtgatttgtttattgagttggctttgcttttttagtttttcttttaaaaataaaatccttccttcccatgttactaaattaatttatgtttttgagaggttgagtctcaaagtgtaaacaataaacctccattcataaggtggatgttgtaagcttgatggtggttgtgaaagtgatttagctttgaccacttttcatcctacagcttcaatatcaaactggttaggaaagcccagggggaagggagggggcaggggaggaggcaattctgaatgaatgaatggattttttgttgtttttgcatgtttaatatagaagttcccctcgttccttgggagatgatggcctttgaatatgcagacaacctttgaattgtgcctactaaattatagcaggggactttggcacccaaggagttctgactttctgggattataatagtaattcccagccatactctggactttattttgctaaccataactgagcaaatgtaaattactgctatattaatgttttaaagcactgggatagtctaattctaacttgtaattaattatgtttgccaattatctgtttgaaataaatttgtgtctgaacagctattgaaactgttaaattgtacagatattattcatgacagctttgtactgtggaatgtgcttaataaaaaacaaaaaagtttgacttttgtccagtaaattgctaagtaatgtcaataaatcgagtatgggtattatgcagtgcacctaatctggcttcatgcaattgttacttcagctactgattcaaagccaatactcttaataaagtgttgcaatactctgacgttctgttaagaaatttttcaaagaaactgttaagtgctgttaggaattcagtgacatacaattaaaatttatagatctttagaatcatctgttctgtaaaatgagtttgaaggcaaactggttttggcgtgtgagaatgttgtagtagatgatatgattccttgtcttgggcttttgccgaaagctagcttgaacttcaggagttagctgagggctagctaagaactcttgccctgcaaatctgcttcccacacataattaattgcttcacaagttactgtcaacatgaaaatggcctctgagacatcccaagtggctttcaggtgtgagtggatcctccccttcttgaagaagggccatggaggtgtgaggggcagtttcgcag

SEQ ID NO: 14825 - DNA, 3719 bp, Homo sapiens
cctcgggtttttctccagtcatttggctgttttcctgccaggggatttgcatctgcttttttttcctccctgccccgtctagattgacatttcccccaactgtacccttcagtccacagggagcttctgagtggcggtggcaggaggtggtacttacctcctgtgggaggagctctagggtaggaaatagggaagccgtagtttctcaagcactgaggcctggaagggaatgttccagagaaggccatgtcagtgggggtcctgtgagtgggagacccacgtgtggcctgcagatctcaccaagtgccatccatcctctctcttccctaggctctggaagaggatctgaaccagaagaagcgggagcaggagatgttcttcaagctgagcgaggaggcggagtgcccaaacccctccaccccaagcaaggccgccaagttcttcccctacagttctgcggatgcttcttaacaaccgcccggggctgtggctggcagcttggtgggccccagggccttctccttcattctctgtgaacatgtaactcaggaccccttttccctcttgcgtctgtgccagctcaaatccagcccctcgccctgtgccaccccaactgtgcctgatagacctgccccagcgttcctgacttcttgctggcctgtggagggtgaggtgtaattatttgtcacctgaacctaatgtatattctccttgagccccagatcccttcaagctggaagggatggggctgttggtggggtcagggtccaagaggaatgggtgttctgtggcctcgagtcctctcctgtttgcgaaaataccagttttgctctctgtgggacaaagcactgctgatgaagtccccgtgggctcatccgggctggaattcttggtttttcagccattccctgcagagtcactcaatcatcaagtccctcacagccatttctgttcccagaggagccaggcctgcagctggctgctcaggagatggcctcattcctcctgttctcccagtttgctttccacttaagacaaagccttgtctatgtggggggcggggaccggggaaagagggaggctgaaatgtttattctgcttctcccgtgtttcatgccatctcgcgtcccccttcctgcacatgggtgtgaatgcacacacatacgcgtacacacaggacttggtctgctggcctggcctcttctgcccaggtgggttggaacacgtttgctgcctgagcctgtgccactgagcatgttaggtggagcagttggtgtggcacgtgcggggtgttggcaccggaggcatggaaaagcacaggctgtactgccaggctgcgatgcgtgctggcccccgcacaggctcctgtgtgcagggactgattcctcagcacacgaggcttccacaacccagtctgctccatagcactctggcccaccctgtctgcaggtgaaacaggagggctgtttgcctctgccccatccccccgactgtgttcaggagtcccaccttgcatttcagacctgggctggcagtctgttggacttctcttcaggaagaaaaagcatcagggggaaatggaatgcccctgccccaggaacatggcagaagcacaggttctgtacctcagatggactcctgctgggccttcggggtctcagttggcttcccccagattctgattctacagctgcagaatgtatataacgcaataaaagcaaatgtttgaaccagtatgcgggtttacttacaaggaaaccttttttcaccctgatttctaattattttattgaaacaactataaaatgtatggtttctccaggaagatatctgctttttaaaacaacaaacaagaacaacaacacaaaactggtaatgatttggagtaatcatgcgggcatattgagtctgggtagtgtttcgctggtggtagagtggttgagacttcctgggaggactttttccgccttcactcctacagatttaagattctttatttttaggccgggcatggtgactcacctgaggtgaggagttcgagactagcctggccaacatggcaaaaccctgtctctactaaaagtacaaaaattagccaggcgtggtggtgcatgcctataatcccagctactcgggaggctgaggcaggagaatcgcttgaacccaggaggcagaggttgcagtaagccaaggtcacaccactgcactccagcctaggtgacagggcgagactctgtctctcaaaaaaaaaaaaaaaaaaaattctttgagacagggtctctaatatgttgcccaagctgatctcaaactcgtggctcaactgattctcccgcttcaaccttgagtagctgggacgacagatacatgctactgcacccagctaggttaaggttctgtatactctgtctttctaaagcaattccctggaaattttctcaacattggttataactgaatgcttgggaagggaggggcagcccttcaacaggaaaaggggactgcccaaatcttaaatgcacagtcaagattctcttggagctagcaatggttctcaggttagtgagcatttagcttgcctgctgcagaatttgacccagatgggggtgttttttaggtctctcacaaatgagacaagcgaaacaattgtctccttttattctctttggtgcattggtgctggggaaacatgaactagcggcagtgtaactgcagaacatagacccagttctaccaggccaggccagcgttgggaaccaccagacagggctgctttgggctttgcttacagtatttccatgtgtagcctggcgtgtgagaaagtattaggtgaaatgccagtttcatggttcaggtgaaagtctgtgatcattcccctcgtggctcgtccttcacatcacttttgcccttcaaggagttgccgcgtccccgctcagtgccgcctgagccctcagagctcccctgtgcttttctggatggggactggcggggtcacctagcctcaccgtggagccaccgtgcaatgcccatctctgagaggcccacgcggtattcctcgtgccctgtgttagtgctttctgtataagggacagacagaactgggtttttttcctctgtctggttttagagtaaatgtaactaacttttattttccctttatgaaagatagaaattatttttatgtagtttccagactttatacaaaatttttgtaaaatgttctctggaaagttaactacaagaatgtaaatatgcttctaataaaataacaaggttatttgccgttcaggttgttcttttggattggggtggaaagcagggcacacttaaccatactcacccggcaagaaagggcttatcttccaagtacgcaggtgcctcccaggtcatacggcagctcagacttcgggtttctctttggaaagacattatgcttggctgagagagagcatgtcatggggcatgttctctacagacatttaatatcattctcatttaacaacaaacattcattgaccccaaaaagttttcacctgttaatgtactgaatcctttcaacaatcggaggaagacaccatcattcccattttatgtatttattatttttttagagacagggtctccctatcacccaggctggagtgcagtggcatgatcatggttcaccgtaacctcaaactcttgggctcagatgatcctcccactttatcctcctgagtagc

SEQ ID NO: 14826 - DNA, 1288 bp, Homo sapiens
ggtcatgagggtgtgagtgctgggccagggagctcctgcgttagcttgtcagcagctaggagcccttgagggttcaccctgagtgtttctggttgaaggccacggagggaaagaggggaaggagggctggcacactgagcagctgggcgggagacccctggcatgacaactttggtgggctgctgagggcacagagcactgggcggagagccagagctgagctccaggcctgccagtgcctcctagctatgtgacctgggacaagtcagtttctctgcctgggcctcccttttctcttccataaaaggcgatggtggtacctctgtgtacttcatgggcctgtgctggagaaaggcgggctgctcgttgccctgcagcaagagaccataagagggtttgacaggcctttttcatcctgagcccgcaaggacctgggcctcccaaggcccaggcccgtggtgcataaggctcctgtcctctgctgactcacgcctgccagccaggggccttagtgggctctaaactcaagcccatgtcagctggccaccccggctctgtgtctgctgtcctcaggtcaccccctttggctttatgttgggcccttttcctgcacatagtcagttctgctgtgaccgtggttttctctggggccagattttctctctcctaaatagagtcgcagcccttcctgcgattgaccgccttcatcaccatgcaaagattaactgtgttcaggcagggacagcacagctgtacattgtgtgacacccagaccaagccctgctttggttccagtggcctgaaccatatttgatacatgcctggcacggccgtccagaataaagacagggaaataggaaccctgagccctgactgctccgtcctttggctctgacccacacccaggcttttcatccgacaggtcagctgggagccttccctcacacctgccactcagccaggttgctaggagacttccgtagcaaatgatcattgggtggggttcctctgctgattccttgcacatgtccccttttgcttcctagaaaaagaaacccatgtttcagaatctgggtctgggacagtggagtgagttttagatgctcccttacctccgaagaggcattttctgccagagagggctgggggtgaactttctacagtgatcgaagtgttctgtatgtacctgctctgttcaatacggtagccacagtgtggtggcacgtgaaatgtggctaatgcaactgaggaactaaatttttgcttcatatctattaatttaaatagc

SEQ ID NO: 14827 - DNA, 2034 bp, Homo sapiens
agctcccacatccctctgctcctttttatggttcttgttgtcatttcctactctgcggcgtgaaatctatttcactgctctaaattccctatgaatggatttagttctgaggaattaccagtgaaaaattccatctgtgatggagaccaacaaaaataataaaacacaaagagccaggctttgagactcatgtaattacaatttctaatttgaaaggcagttaagaaatagataaccatttattttagaacactcaacaactatgtaatggctatatttcagtgacttggactgtaaatgaaacattgcatccatgaaggacagcaccaagcacctttttgaatacagaatttttttagaaaaatatatcaaattatataatttccagaaaccataaataatggatataaaacttaacctttttgttttgttttgttttgttttgttttgttttgttttgttttggttaatggaaactgaaaagagcagtatttgaggttgcttctattctggttttttattcttagctcaattaatatttagccataaatgagtagagactggcaaattgtgctttagtgttgctttcctcatccccacatcttgagctccttatttacattcacactaaattttggtgccttccagcacattagtggcaggcacccttctggaacactaggcaataatttcatcaatacagtcaggtctcttgagtttcaacagatactcagttgaaaagtcgctgtcatcttgctgcataagtattttgaaaggtctgtataacgaagccatttttatatccaggcttagaaggtcactactatatagtaccttcattgatctatctattctgcttggaacttttcatagctaagtataacccccaaatgcatggttcctgggtcaggagacaccaaaatcaattatagctgttcccactcaagttaataaagtaaatgatttcctccactttgcatggaggggtgtaaggaaagcctattttatctgtgcctgggagaactgtgcctattttcagtcttttagaggaaatttcaactcaaaatttttaagtgtgaaagatttactggtgtcacataaacattagcagtgagaccaaataatgaaacattgctttataccttagtgctttccagttcactgttacctctagtcatggtagatgacaattttcctccctcatcttttgtagcaaagaagcaaattaagagccttttgcaagttagattaggggactgaaaaatccagggagataacctgattcttctatactatgactggagtaaagctgccaagagttaggttgaatttggagccttttaaaagttggttccataagtgagaaggggggctaacatgtgaccactgtgcccctgagaatccatgagatggaaaagtacagacaagaaggcacttaacgctgttctcagttggaaaatgtcagccctccacacctgtttggatgtgaagtgcattattaattttaatgacaaaatgaaactgctaattagtttaaatgtaatgtttaaatggtattgaatttcctattgcctgattaaatatatctgtaattgtaacatcatgtttctgagagctttaactacttccttatttttatgcaatcattttaaagattgtggctatatctaatttaaatttgctgatgattgaatctaaattcaagtgaagaccacagcattaatcccaaaggagattttttttatgtttagaggtggagatattagggtaaatcagtatattgctcctgtcatcaaagtttttgttcatttgtgtgccacatcgaatagcagcacttctcaaagtttgtcaactggaaaaaagtgtttaaaactgtttttttcttaagcagatttggtgatgtcatcaatatctatgatatcgattggtaaaaggtctttctttgttgaggatttgagctctctttttaagagtttattttattttaaaggaacatatgctttgaataacaattctctgggcatgtttaactaa

SEQ ID NO: 14828 - DNA, 1125 bp, Homo sapiens
tctttagtgccttcgtccagtcggcctgcaaatcccatttcccagagaggcttgggcagggcccacttgccacttggccctgtgcccagagcgttgggggcagatggcagccaggggaagaagggaggtggggaagggccgccaccgcttgagggtcccctcccttgagaggaggccccatggcagttttcctgagttcttgatccactttggtttaaacaacttttgtgaagctatgtgagatttgactgcatttcaaaagacaaaacacatgtttttttctgatttgctctttgcctttcagcgacgctttcagatactttgtgagtgtctactctgtgctaggtgctgagtagactgggatgtgtgtggctccatccctggctggaagagctttgagtcctgtctgctgacttcactgaaggagtttctctcttgcttcattccttcctcccgggggtcagctgggtaggagcagacttgccctgccttcctctaggcagaaagttttcctgcaaatgaaagaatctgccattctcttttgctatgatgatgatgattattctgacatgacccgcgggtactgaagccacagtcctctctgttcactgttctctccttgagtcatatctatggcctgaggacgtctgtatccagctccttttcctacaatggtagacacttccccaggcagtgggtgggtcagggtggccagtcactctcctagctgtccttgcctggggacttagatttaccccatccaggactgtggtcgctattctgtgagcgattgatggcgcatatgcagaactcccctggagtcatggctctagaaagtgtccaggcccatcgtgacaatggtgccaagcaccgggctggtgaccagtgcctaaacacacacgctcctttaatccttacggcaagcctgtgaggcggataggaccagccctgatctatagtgagaaaattaaggttcagagggagaaggtccaaatagtggccaagctgggactgagatctcgagtttgggtttgtttggttttgttgttgttgttctttccctcgtgtccatgacttttctctgccattagcagggaagtgtgcggagggcttccagggaatcaa

SEQ ID NO: 14829 - DNA, 1116 bp, Homo sapiens
ccagacccctcggctgggctcaggtccctcagctgggatatttcgtgtgccagaggtagcagcctcagatggctttgtcagggttcagactctccttgctatttagaaaagatgttgtctctaagaagtcatggagaaaatgaatcactgtaaaaatcaaattttcttatccacttgcattattggtttagagatggcttctctccaagataagtttttggtagactgcagatcaaaatgtttaggggcatctgggggtgtcatgagaagagccccagatgggacacccgttcttccttgtgacattagggaatttggtacagctttctggatcagtttttgcctttaagatgcatctggactcatcaaacccagaaagtgtagagcaaatattcctattcccatgtccttggcagacattgctaatctatctcagggctccaacagagttgggtctcagccttaccagcctggcagccactagacttgatccctgagatgaaacctcttgaccacacaggaactccatgatcttgaagctcccttctggctctataacttttatgtctctctctctcttcttgctgtatctttcattctactgactattctgatacaaaaatacttcacgttcaagatttaaggccaagttcacaaactgataatactcaggccaaatctgacccacagaagtgtttcctttgctttgcgtattattttatttttgaaacacttgccatcattttttaattggtgattttacctaattccccagatttctggtttcacttaacgggctgccctcggaccccttggttccagccatgtgccaagctgggaggctttctatggactccacagtttgccacaggccacacccagcccacttctctaatttccagttcctgcctattctcagtaggcatttttctactccagacaagtatacttctgtcccacatgtaaggcctggctgtctctcatttgctgatgtgagctgctagatgaccaacgctccggtctgttaactcacttgggatgctgacgtttcctggaatctctttcagagggaaaggtgtttcctctctatgaatcataactgcctgatgaattagt

SEQ ID NO: 14830 - DNA, 2928 bp, Homo sapiens
gtgataaattcagagttgaggttaagaccacaggctccagagttaagacgtacctgtgttcaagttgcatctctgctagtggtgaacttaggcaagtcacctgatgaacctcagtttcctccgctgtgaaatgggtctaataattcccttcctcattcagagggtgaatatgggaattaaaggagctcataatggtgaaaattattttattattattaaatccaccatccaacaactggttttctttgagccctaagtatgttccggacttggtgactatgtagtgggtattatgggcttaacgggcaatgtctgccttgcagagcccatcatctcatgatgtgggaggggtctggcctggttcatcctccagcactgacttctgacactcccaccccacccctgccctcttgcagatctgtgccatcattggcgggaccttcaccgtcgccggcatcctggactcatgcatcttcacagcctctgaggcctggaagaagatccagctgggcaagatgcattgacgccacacccagcctaatggccgaggaccctgggcatcgccagccttgcctccagtgccctgtctcctttggccctcaatctggtcccaaatctggctgtgtcccaaagggtgtgtgggaagtggggggaaagtagaggatggctcgatgttttgcagctacctcttttccccgtgtttctttttagacaaattacactgcctgaagttgcagttcccctttccctggggagccccaagaacagagtcaggcaaggggtggggagtccagggatcttggggacccctcctaggagagctgcagtctcttccctcaggggaacatcccagaatgcatatcgatcagctctcagccaggcttcgacaatctcgcagcccccactaggtggacacattaatgatttggtttctcccctgggcagccaacctgccccagaggcaccagacctgggctttcagctttgggaccaggctgcccaaaggtactcctttatacacccggcaccttccacgaaagatggtacttcccaagcaagcccctatgatttgtcactatagatggaaccctgacttctgccccatcccttcctgcccaacctagaacccaggcctcaagtctttaccccacccctttcttgttcttccaagaagcagatgcccagttgctcagcagcagcggtagagacttgaatctgcccaccagtcacaaggcgggtcacagattcctcttcctctcttctcctcgttcctctgaaccctccaccaatgtgcctcagcctgtgtgctgtgtggcaacagcattctggttcccactgccaagatctcccaccactctgctgggatctgcagtggcagggagtgggggttgtgtaaaggggaagtcatcttttgagatccagatagacatggtttgtgcacttacgtccagatgggaagcatccttcctgcaaccctaaaataatcatgcagcctctcagacggacgccatcggtcccaaggccttaggtggaggaagcaaagcaggccaggcctgtcctgtccgtggacctctaccttctggactccctacgggtgcagagcacttgggtttctctacagccatcgtggcccacttgacactgtgctcctccatcagctggtcacatgccaacacgttcccagcccctgaggcagctccagggtgccccacctgctcctgaggtgggtccctaccctgctgctcctcttcatcctttcccttttgtcctgaaagggaggagcaatggtccaggcattaattccacccagggaattttagctatgccctcatgtcccagggagagagccacacgcctgttttccatttatagcaagattgtttgcatacttttgtaatgaaggggagtgtccagtggaaggatttttaaaattatcttatggatagctcaagtctctgccatttgtaatttttggctctaagctccgattggagacgcttctccttgtgcatgtgagttgactgatgttgtgagtgtaaatgcatttggttatttctggtatcggtggccacttggatggatttttttacattctgttccccagttacaggaaggagtccctttggtgtgtgaatatgtgtgcctgtagagggtggggcagggtggggtggggatggaaatgtgtggcatgcacatgagttgaaattcttttatgcatttttttgaagaaaaaaaaaaaaacaactctgaggacataggggatgtcagtttcctatggaagagacacctctgacccgttattcttataatcaaaatctgaagggaaaaaaatgttttagttctttccccactcgttgggttcaactagattaaaaggctgattttcagaaatattatggtgtgattctttctaccttgactggggctgggtgacccaaaggctggaatcacagccagaatggaattcacttctagaggagagaaggtagaagagttgaaaaggagatctgtgaggatgatcagaaagtcaaaccccggccaggcacggtggctcacgcctgtaatcccagcactttgggaggccgaggtgggccaatcaggaggtcaggagatcgagaccatcctggctaacatggagaaaccccgtctctactaaaaatacaaaaaatgagccaggtgtggtggcgggcgcctgtagtcccagctactccagaggctgaggcaggagaatggcatgaacccagaaggcagagcttgcagtgagccgagatcgtgccactgcactccagcctgggcgacagagcgagactccatctcaaaaaaaaaaaaaagtgaaaccccctttggccaggtgcagtggctcacacctgtattcccaacacttttgggaggcagaggcgggtggatcacctgaggtcaggagttcaa

SEQ ID NO: 14831 - DNA, 1176 bp, Homo sapiens
cctcaagtgatccgcctgcctcagcctgccaaagtgctgggattacaggcgtgagccaccgcacccggcctggggctcatgaacttaaagatcatggcccagtgccaggcacacgggaattcagaatagtaagggacaactattgttaagttctctatgtctgttgcataagtagatgaggctgtagataactacactctttgtctaaaagggccaagttctcatcagaacactttgctgagccccgggtgaccgaatccctagctctggggtgagcgacatgcctccaaggagctgcagccaggagacagccaggcgaaggcggggctctgcctctgggctccccgaggggcggaggccggcgcgcgggtcacgtgggggcgcgggaggcggggcttgcacacgctggtcacgcggtcagctattgacacttcctggtgggatccgagtgaggcgacggggtaggggttggcgctcaggcggcgaccatggcgtatcacggcctcactgtgcctctcattgtgatgagcgtgttctggggcttcgtcggcttcttggtgccttggttcatccctaagggtcctaaccgggggtaagtgcgtgaggcccgccttgggaggaacgggcggtgaggagctagcaggccggggcggggaaaggcacgacccccacacgggtcagagaacgttgcatgggcgccccccgcgctgcagagtcaggcccccgacccggcggaactccttgtgttccttttcgcagcagcttcagtgtcctccggcctgagcgagtggagggtgacctttggtggaccccccttggaaacgagtttcaggggaattttttctcatcatagtcctgtgtggggaggtgcagtcggaaatgagcaggccgaatctgggagaaactggggtttgtccctagtcgactgtccccctttagccctgccttccacccacatgaggcctcgtttgcctgaacttaaggatcaaataaataaaacagaaattggcttctctgcctcccatgctgtcgcggttgcgtacagaacaagctccttcgacaacattgagcccaggccttgcatctagtgggcgccaggaggcggttggggcctgatctaaagcgagattaattaccaaagagcaggaggtattgttgagaaacccctgcgtcatg

SEQ ID NO: 14832 - DNA, 1364 bp, Homo sapiens
gggcagcctccagtacaagaccaatgcaaggagcccgctccccaggagcctggccccagagcagagttcgccatgcctgcggaacctcccctccatgctataagagggaagggaaaaatacagactcttgaaactgcggtgaattcattagattccagcacaatcaatctcagtcagcttcattcttcctgctttctgtaacatagagtgttacttgtgctcctcatttcagcagtgtccttggttactggaccttttgccacagccctgcaaaacctggccaaacttgcaccaagttgattatcctgtgtttcatattttgttgagcatctgtgcattttaaagtgttggcttggttaactttctcgatgttaactttttgccttcctgaggaatgtatgaggaccagttaccagaatggttttgttttgcaggtcacgagaagagaatgccttctagatgcaaaatcacctccaaaccagaccacttttcttgacttgcctgttttggccattagctgccttaaacgttaacagcacatttgaatgccttattctacaatgcagcgtgttttcctttgccttttttgcactttggtgaattacgtgcctccataacctgaactgtgccgactccacaaaacgattatgtactcttctgagatagaagatgctgttcttctgagagatacgttactctctccttggaatctgtggatttgaagatggctcctgccttctcacgtgggaatcagtgaagtgtttagaaactgctgcaagacaaacaagactccagtggggtggtcagtaggagagcacgttcagagggaagagccatctcaacagaatcgcaccaaactatactttcaggatgaatttcttctttctgccatcttttggaataaatattttcctcctttctatggaaatctgggctcggtgtttgtaaagttcatttttataagcttttctatcgctacataatgcctttttaaaaaatgattttgtagtctaaacttaggttgagtatataaaccctgccatgtagcttgagatgcctgaaaagactggtaagtgcgtttcttaatcgttcagtaactatttgagtgcctactgcagccaaggcactggagggatcaaagatgtgtaaatttggagtccctgcaagttcacaagctatttggagagataaggttagtatacatagaactgtaatataaggttgtgttggagcattgtccttaaagatggtaccatggtgagcagttcaaggttacctgccagctgcagaacaaggcagcaaatgctcctgagatggaaccatcacagcctcagacataggactaaagaagtcaagagtgatta

SEQ ID NO: 14833 - DNA, 1173 bp, Homo sapiens
caagcagagcagctgctcctgtgtgttcttctaagactctgcaggctgaggtccctttgtcagactgtgtccaaaaagcaagtaaacccacttcaagcacacaaatcatggtgaagaccaacatgtatcataatgaaaaggtgaactttcatgttgaatgtaaagactatgtaaaaaaggcaaaggtaaagatcaacccagtgcaacagagccggcccttgttgagccagattcacacagatgcagcaaaggagaacacctgctactgtggtgcagtggcaaagagacaagagaaaaaagggatggagcctcttcaaggtcatgccactcccgctttgccttttaaagaaacccaggaactattactaagtcccctgccccaggaaggtcctgggtcacttgcagcaggagagagcagcagtctttctgccagtacatcagtctcagattcatcccagaaaaaagaagagcacaattattctctttttgtctccgacaacttgggtgaacagccaactaaatgcagtcctgaagaagatgaggaggacgaggaggatgttgatgatgaggaccatgatgaaggattcggcagtgagcatgaactgtctgaaaatgaggaggaggaagaagaggaagaggattatgaagatgacaaggatgatgatattagtgatactttctctgaaccaggtattataatgcttgcaagcttaccagactgacctttgtattactattttgaaatagaaaggtttttgtttctgttttgtttggataatttctttattttagtttgggaattaaatgacttaaaccttggattggatatgtaattggtttttctattcaaatagctctaaaatgatcacttttgctcacatagggattcataagctgattccttgagggcttattttttattattttatttcttatttttaaaattaaaatagagatgagagcttgccactgtgcccagctgaggacttattcttaatgtatcttatgttaagtgacctgttttgtcactctcttgagcatttatgcaaagacaccaataatttattggtttaaaaaatattcctgtttagggccaggcgcagtggctcacgttagtaatcccagcactttgggaggccgaggtgggcggatcacctgaggtcaggagttaaa

SEQ ID NO: 14834 - DNA, 1866 bp, Homo sapiens
ttaaagcaaaacattttggaggagtgaaatagtaaaatgccaagtattgtggcagatttatgctctgaaccacacaaaaaaattgaggaagcatttttttaaacagtcggtttaaattgtttttagaattattgctttttgttctaattttccacaaccattaatctcacttgtatatggcacacccagcacttgtgcctgtgggccatattagatgttcattgtcagagctcaagatgatatatataaatatatatatatatatatatatatacacacacacacacaaatgtctgtgcaagtaagaaaaaaaaagcatattctttgtgccttgtattttggggaaactctaaaactggtaatattttgtatgatgaaaaccctaatgagaaaaaacaagatatatagatggaaaaattatggggtttaaatgtttttttgttccaactctttttcagattttttgaatgtatataggactatgttgaaatgtagatatatgccacagagtctgtgtattgtataaaaaacaaaacaaaaaacaacaaaaaaaagatggctctagaaaactcatatttcggtacttgaccggaagaagacaaatacttgcacattattgcgattgttttattttttgtaccaaagacaaatgcaactgatatggcaaactgccagtctaagtaaagttttgcacagcttacatgatactgtatgaatgtatgaaaaaaaaggagaaaaaaaagaaaaaaaaaggtcagggttagggatcttactgaactgtgaattttatttctgtttgggtccaattatctacagaaggagcatccatacatacaaatattattttgctgttcctctagttcgcttccatagtagataagttggtggccatttagatgtcttttatttctgcacttattgtaggaaattttaatatatttcattttagtaagctattgataaaatagtttttgactttgaaaattaaaatgtttatttagcttattgtagtatacttccaccagacaacaaaatagattatttttattgtattatgtatatatatatatgtaaagaaagaaaaaagctaaaaatatctaattctttagttgccacttttccgattgatgtattattgtgcatgtaatattttcaaagatcaacacaggctaaaacaaaaacaatttatagatttttatatttttgtacaggtattttcaaactagcttcttcaaacttaacatgtgacttattcttctatagtttctagaattgagaaacattaacacatttagtttttaggtgctcttttttgctcatataaaacagcttcattagtcagtgttttaactgtgttcaagctttacctcttgatgagaaatttcttatgtcaaggcagcattataaaccttcccccacagatttttccatcctgtctctcttactgttttattctcaaatcttgtgctttgaactctgaaaactggtggcttaaaaactaaaaaaagaaaaaaagcatatttagcaaggaaaaaaataccaaaaatttcaggcatagctgctggaaaaattatctatttctccattacccactgtaggatttcttttttaattatactttgactataaagtgtcaaagtataatttgttcttttcttttactttgttaccccatttgtaagctatagcatatgaagctatatatatagcttgtgaaggtttgatctagaacacccagtaacaaatgaacaatgttgcttacctgcttctttgacatcttaaaaaagaaatccaaggaggattgtaaggattgtcttaccaccttagctgaactgtgatgcacaagatttttctatgtgtttggtg

SEQ ID NO: 14835 - DNA, 3124 bp, Homo sapiens
aatgtaagttcatcgtttaaagcttttcctttttaggttggagaaggcaaaacacaggcttgcaagttggaagtatatgaagtcttgacagagtgtgtctggtaaattgaaaagtgtttcaaactatggcagttttgcaatcaggtgaaaatcacctcatgatattcagctgataaggtttataaaattgcccctttctagctgctctgttaggaattctggtttttgatacttttttcctgtctgcaaaccagaatttgattttttggtcttgcatttcaaaaaaaaaaagactttgaatctgtttagtagattccatatctttgagtttcagtgttttatatgtactacttaagttaaatagttaaaagcttttaaatagttgagctttttaatgttgacactttattttgtacctatttatatatgtatgtatatcttagaaaagcactttgttaaaaaaaaattgcattttatatgattcctgccatttgctgctaaatctgggctggtcagaatgctgcagcgatacttgatctatataaaaacctggcagtaaaatgtagagtgaaagttaaatcctcttgctgttttaactttatcataaagatgacataggcaagctgtgcagctttacattttaaccaggggactctgtggcatttaaaaccgtctagaaatggttgtactttaatgccagtaataatctgcttcctctattgtcattaaaatatatacgtttagtgtatcacacaaaccaatcttataagggtaatgtaaaaaccccaacaattgtacatgttctgtttttgaaaattgtggcatgtatttttgggtgaagatcattagagaagagttctctaaaggttttctgtgttcatacatggtatacagatagctcataatgaagtccagaatcttacttttaagtgaaggcattgtgaattcacctcaagtaaacccattgttccaaagcaattataaactttgactctagtactactatgatttaaaaaaaaaaaaaaccaacaaaaaccttttttcctagtttcagatacactggattctttatagagtttgtctccatatgaaagcatgctgtccagtcgctcttgttaagatcttgtctgagttttgaattgggtgccacacttttccagtcaatataattgcttgttctactgtaccatgtatgattcttgtcctttcctatatccttcatgacagattatgatgtggctttatattgtgccttacttgtacatttaaaactaaacgtcttcattcccttccacttcctacatctttaactttgacctttttggtaagagaatcagaactattacaaaagcatcatgaaggatttcagatgggtatggtttcaaattccctctctttatagttattttatatttgtatgaaagaccagttttggatggtctttgaatataggggggaaagattagcagtaatttcactacatcccttttctctgactttcatgcatttctcatacatcttctttctgatgcttgactttatttgcttcctagcaatagtctgcatttaaagaaaggtgtgttcaattcatcagcttgaaattgactatttcatttttccaggattttttaggagaagagtacccattttgttttataaaaacagatgacaagtctctttaaaagaaacagaagtacagtacttttgaaatacaatgctgttagtttggatttctttttatatatatatataatattcatacaatgatctgatgtttgccttcattaataaagctgttagtttattcaccaaaatgtcaagaatggatgtgcttttctttattccacacatttaaaaaaatttagctgctaagatttaatgttataagaaatgaattcaagttgccttcagcaagaattaacaaaaacttatgttccctttctttatatagtttcctaaaattctgttcaagtattttctagttaattatgtaacagaatgttagcatctctccatatcttgaaacttgaattttgagaatgcattgaattatgctttcagtgttaaagtaaaaggtttcaattatccttctagtgaagtctgttgtggaataccatttcccatggaactgaggccatttccacaactttgcacagaactgcagtcttgttcttcccttggatcatgacaaataagtctcacacagtgccgtaatacttgtggattcttttgtaatctttgtaatcttaataagggcattatgagaagacgactccatgtttttttaatacttcaaacacattgggatgtaacaatgaatgtcaactgtaggaatggtggtttcgttttaaggaataagcatgttggggaaagatgatgaaaatgtactactgaaagttatacacttccataggcaaatgggattatgtgttgaagcatagtcctcatgcttaataaactgactgaaatcgtagaaattacacctaggaactgagctaggccaaattgccatttttgtttagagagttttggaggtagtagtgaggggacagagccttaaaactacttccaaacagtattttggaattgaagacttggtaactagtgaagaacatcaaagttgggtatttcaatgtgccaagtttgggtgaactaggttcggtttgcctctttcataacaatgtaaacacaatggtgtagttaattaaattctgggtggataggagcaggactgattactatgtcttgcccttcgccctttgtttttttcagaaccaaataacagaaatgtgtatgtgtgtactgtatctgcctttccaccacatttttatgacactgtattccactgcctgcttttttaccttctttccctaggatttgtcctacagcttagtattgtggttgacagcgatactagggctgacagcacagaagtcacaagagaagagtggaagggcaagaattcaaagcatttgttcatacaatgtggcaacctcttttgcatagttgcgtaggatcctgtttgtaatgctatcataaatattctgtagttttttttttttctctcccaactggagctatgacactttttattggattcagtcttgtctcttgtctagaaaga

SEQ ID NO: 14836 - DNA, 3062 bp, Homo sapiens
ttgagaagaacacttcactttgaaccttacgggctattttccagactgtccaaatatgatttgtttcctctcaccatcatttccagtaccctgtcccaagtgtttgaatatagacattgatatgccctgatttttgctctacttcagaaaggatcggggatgtaatttagccctctaggagcttggaactaatttgtttgtctatttcttgtttgcttccaagttgcttattatgtgttacaggtagcaactacagctgaaggccatggtgaattgctggtgatgtaaatactcccagccctgactgatcggccttgtttaaattttaaggattagtaaacaggttgctgctggagctacttctgcttaggctattaggagaataaatgttgaaggaaatggagtccaattcggggcttactggctttgacagtacgaggaagcttttcagtgccacacgtgtcaaactctttctcaccatgctgtcatttgtttgttgttttggagcaactcacttagttttgtttttgattcttttgtacaaggttgggtgattgtgggtgagattgtgcagtaggaataacagctgctggttgagaattacccctcaaaagtgaaaatagcgtgagctgtatatggtaagtggattgacctctaaactccctagaagggctgtagctttgaaggtggacatttattgggctcgcacgtgacacttattggggctaaagatgaatcccgaaggaactaaataacagaatgatctgtttgtctccacaaggtcagggatgttggaagctggagtagacaggattatttctcaggtggtggatccaaaacttaaccacatcttcaggccacaaatagaacgagcaattcatgagttcctggcggcccagaaaaaagcagctgtgccagcaccccctccagagcccgaaggccaggaccctccagctccatctcaggacacttcctaaggtccagtatcctatcttctgtccaggagtatgcatctctggcttgtagatatgtaaaatggataggaatggggtaggccgtaattgaggatcattcaggaagtatttactgcagatggacttcacctactgttataagtcactttttactgagaactaattagtagcagtttcctgtgtcagtgactgattttctgttccaccagcgctaaacatgtaagctatggatagatgcttcattagaaatcagctgggatgattggtgtgcataaaggggattcaaatgaaagtcttattttgctgaaatgtttaaatgagtctctcctggacatgagttaacttaggcttgcaattttatttaaaatcaagcagtgccttctgaagtgatatcctaaatgggattcagagtctgctttgagtgcgactcgatttccatgaatttagaaggagtttgtttaccactatcaattaccatgggattcttctgttaggaacactccccctttttaaattaaatttggaattaaatgtaattttaaacagctgtagatgtacaaaagaatgctttttgcaggttttgggagacattagtaggagcagcgatgaagttagcagtggacttttcgccgttgttggtgactgctgggatatgttttatcccttcattctgatttggtgttctttttaagattctctgagatgcctgttataatcagtaagtgaggtgaattgactagggcgttttgagtgtcagtgatgagcaacgcaagagcatcaggactgtctttttgttcctctattgagagaagcccttgagtccaatatggagtgtaaaacattcattttaagtctttctttttaattgtaaattcctttaggaacataaaagtgaatatagtctgttatcaataaataacattttgatatgattatctttcctttttagaatacgccagacaccttttgaaagctaatttttggtgaagaaatggattcggttacataagagtgcaacttcagactgaagataggccaaggtcgtcactgatctcaagatttcaaccttgaccatgggcagtgaccagattgaaaggggagcaagttcggcagtgggagagttgaccgtgtcaccccctgcattgtgctgccatttggccagcctgtccaagggcatgacaccaagtagacactacagagagagaaacactacagcaacccagggttgtcctgaaacagacttttatacttgaacatggagactgcacatggactttagggtttgtgctgtgggataaacggaagctacagtgagaacatagccagtcccaaagacaatttcaaagaaaaatgacagtaaagattagctgggagtagtctttgacagtgcttatttgatactgtctctcagagtttgcaaaccagattgtacaagtcattagcgtcagatagctttaaagttgtgaccttcttgtacatgaatcttctagccagtttcctttcctttgtaacgaaacatgaaatcctagaatgtatgagaagttcagacattaggcataaggaaactcgtttgcaggctctctgtccagggctgcttcctgtcctggaggggccagtgagtcttaggtatgtttattttattctcacatttgtgtttttttagaaaagtgaatggtcaataaatggcttatctttcataataaaattatttgatacttttactccgaagcttcagctgaagcttaaacctcaggtctgtgaagggcaacctttgtcttctgcctctgtgcaccacacatgatctactggcagtgaagattggtacatataacttggaactatgaaactagtaggtgtagctagtagtgggctgtttctctcctccctgagccattactgacactggtctttagttgaggtagtccgtggtatgtgtcagtgtttgtcatccttgtgtgtgcagaagtagcacctggggatttaagggaaaatgcatatttctgattaagaagttctggggtgggacctaagagtgagtgtttctgacaagctgccaggtgatgctgatgctgccaggcctctgaacat

SEQ ID NO: 14837 - DNA, 1104 bp, Homo sapiens
gctggtgctggtgttgggaaggctgctgcgtgccaggcccaggtcaggagctgtcacctgccctctggctgacagcccgatgcagctgcactccagtcagggtggctgtgttgctgggcaggttgggagcagtttgctgaatgacccctgactctgtctctttcttccccagcacaaacgctgtatcccagcctccctggatgcttactactcctcccaggaccccaattccagaagccgcttctacacagtcatcagccactacagcgtggccaagcagagcactgcccgggccatcgggccgtggctgtcagcagccgctgtcatccatgagcccaagccgcccaagacccagggccactagaggcctgccccagccagaatggggggcggggtggagaggaggacccccattggctaagccaagctccagttacaagacaacactgtactcctgggatatgggggcgggggcggggcagggcagggtggggggaagaacgcaccaaaaacgtggtgtgtgctggagttgtctgaaccgatatttctttttgttccttggtattgttgattcgtcgccgagtcaggctcatgtacaaaggcatgtttcgtgttgattgttcccatgtaagatatttttaaagccactgcttattctttgttaggaaaatgtaacagcagaaaaggaaagaaacaaagaacatgaacaaaaagcattaaactggctccatcagaagacgttgaagggcagtgaagagcacagactctgtgggcttcttagataagaaaacgtagcttcagtgggggctccagggttgcagagtatgagtgacacagaccgggactattccattagcctgtggtctgcagggtaggcccgcaggaaatgaggaatggccgagctggagagaagagctgattttggcattactaagcccagaacgcacataacccatagtgaaatgtgctggcctctggtgcattttgcaagatgagcacaaactttctgggcctccatcctaggacctgggcagacccacatggcctgggctctgaatgcccaccctgcgacggtgggttctgcatcagcaaacgctgaggagt

SEQ ID NO: 14838 - DNA, 1233 bp, Homo sapiens
acctgcctggctctaaatccctctattatttcttaaactagttcaagtcatatggctttcttgttatagtgcttatcttcagctgcatattttagttatatcttccaataagtttgggaagagttgtcaccagtaacacctaccaggactgtggtctgtgcctgactctgtgtacgaagtgctaaatgttcacccatcctgacagcccaccagaggcattgcagagggcagtgtgcctcaggccacagctctgaagagaggcaagagcatctctctctctctctctctctccccactccaaagcccatactcctgcaaccacacttagctacaaggccttagaagcttgcatggtcccagcacacccatgtgggaaatatacaaatactgctaggaaaagttttgaaagcattcttggcctgagtttctatgcaaatgggactctgcatttttcagagttttcaagaagaaataagttatttccatttactagtacaggaaaaataagataaagctcttgaaattttctcctctgcagcatgtctcaccactgataggacgttttgttccctttgctgccgtagctgctgctaattgcattaatattccattaatgaggcaaaggtaagacgaatatgcactcttagtagggacatgtgcttgacaggagagtctcttgtaataattagctttgttgaaactttcaaatgcttgttttaatatgtataggtgaaattatatgagatcttggatttcttttgaaatactctggggttggggatgaggatgggcgtcttgagaaaacaagcttagcgatgagttactgattattgaagcagactgaggagtgcggggagggggctgatgctggaatagtctttctatgtccgtataataaaaagtttaaaagatatatctcaagcttacattgagttgtgcttgggttggacaaagtctatccaaagaaagtttattctctaaaatagattccttttttttctccagaattttcttttggggcttaaagtacattattctatatctttggaagtattgttgtagaactggcaaaaattaaaggagaagaaagaacaacaaaagcattttggaatggataacgaaaaacaggggtaacggtagaagttatacttagtgttagtaaatatagttaataaatatacagtagggccatgtgcgagtgactgtttccatgtcagcatattaagtttgttg

SEQ ID NO: 14839 - DNA, 1212 bp, Homo sapiens
ttgtatttttagtagagacggggtttcactgtggtctcgatctcctgacctcgtgatccgcccgccttggcctcccaaggtgctgggattacaagcgtgagccaccgcacccggcctgaaaatattttctaaaaagataaaaaatatacataacgatgaaaaataatacaaatttaaaaaccaatacagtataacaactatttacatagtgcttacattgtattaggtgttataagcaatctagagatgatttagcaagtatacaggaggatgtgcctaggttatatgcaaatactgtgccattttatatcaggaacttgagcatctgcagatattggtatcggagggcggtcctggaaccaagcatccacggatactgaggggtgacatttcatgaagtgtagatcattgtattcagagattgtaaatgaaaaaaatatagaaactatttagttttggtagattttttttctgacaatgtgaccagactgaatttcctcataaagaaaaaatggcgtgccttgtgtctgtgtttctcttttctctgaaaggattaatagatctgaagctttgggccactcagagccttccttgatgctgccagagtcttcttatttagattttctgtcttaaaccattggaagcaaaacggttttcccatgacattctggccttggacagattctgttgtcctcgacgcgtctctttataaagtggtaaaagcctgaaattcagggcagctctccatgaggtgctgaagggctcttttcataagaagctaaggcactgctgcctgccccaggtgtcccgctcctctcagagtcctccccctaccaggtagtgtgtagctccatttcagaatgttaacctccagtgaagagctaatgactggttagaagattgacaaactaaccaaaattttacacactccggttatgtgtgtgaaaggttataaaaggaatggccgggtgcggtggctcacccctgtaatcccagcactttgggaggccgaggcgggtggatcacctgaggtcaggagtttgagaccagcctggccaacatggagaaaccccgcctctactaaaaatacaaaaaattagccaggcatggaggcacatgcctataatcccagctactcgggaggctgaggtaggagaatcgcttgaatccgggagctggaggttgcagtgagccaagatcgcaccattgcac

SEQ ID NO: 14840 - DNA, 1163 bp, Homo sapiens
cagaagtcaggggaaggaaggagcctgtgtccctgggacgacagtcaactggagctaggtgttgacctcagaactgcattttatttattaatttataagcagaacaggccagagttctaggctctgtttctaggtgctgttttcaaaaccccagatgacagtcatagaaaatttggaacttaggaaaatagctggaatcatgaatgacaatgagataacatacagatgtcagtggagacaaagttgtgggttcctcctcccacctggctttgaggctgtcgtcgatatcatagtactttacatggattcacatgaactgaaacgccaccacttggcccaggatgttgaaagggtgcaaattccttctgggtagataagaaatgactctgggagaggatttcccttatgtgaatctaggtaaaaagatggaaaaaaattgtattatgtgatcctaaggacaggaatagcagaccagccaacgggatggccttgggtacatcactcagcctttctggacccaatttttccccagtgaaagccaagttggactgaatttctggagttctcatcagtgcacattccatagttctccagtgcttggcgatcagcccaattgaaggactggctctgtactgacacttattatcggtacaggcaaagaggagcctgttgtctgttagggaccactaaatcaacaaccacaaatggattttttttttaagaggagctgtgcacctcaatttgctgtctagttgagaatagagattgtgtgccttcatttcatttgacatttacccagcatgcctcagttccacaccgtgaccagtgtaagaagaggaactatgataaaaacagttcaacaagccgcaaggagggtgggaaattctgaagtccagaagcgagtgtgatctttggaatagtggctgctgtgcccttgggcgccatttgaagaatcactgttcttgaaagtgctggttcactttctgcagtaagaagtgatttatgggcttttatgtaaaattttaagaatgacttgggtttcagagtagcctttgaaactttgctggcagcttttcattttgtcattggaaggctaagagacttttctcctttgttctatgaactccttgttcttcagggcttgaaggcaaaaaaaccttaga

SEQ ID NO: 14841 - DNA, 2245 bp, Homo sapiens
tggggtctgaaccaaaggatagcagctcttcattcctcttctgacatgtgcatgctgctccccccagccctgggctttcctgaattgccaagcctggtgcctttccaaaggactagcagggcctgtggtggagccagcagaaccacaggagagtgccctgcctgtctcagtggaagtgtattattgttttaaggatagaaccagaggccttgaagggagccaagacagaactcccagcctgtgtaatctattggaaggcacattttcatttctgatgcagccaccttctggaggcagcttttatcctttctctctattgctatgttgaagtaatagggttttttttaacctctggatgtctcgtctgtggttgagtttatggtaatgggtacatgggtcaggccatgtattaacagatgccagtgcgctctgacaagtattccaaagtgttctgtagctagactggtgcaggctcgttgtaccactgcaaccgactgacgttactgtagttcctagaatgctgtgagggcggggggttcagatcaacataaagcctaacttgctggagttgtagtctcaaggctttctctcttgcttaactaaaacctaaggaccactgtttttggtagcaattatatggttactatccactgcagtcctcagttgttggggtaaatcccacatggcagagtaaggcaccccacagaaattaacttggagagcctgagaaattcccagtggccttggcatagctgtctagaacaccatctctaggaaaatttaattctgtccctggccagctattgttcttccacttcgttttctgctgtcccaaggccagatgagtggaatcaccatctgactgctgtcaataaaatgtatctggcgtgaacagcaggataacccatgttctccacataaggataaccttacgtgaaaccttcctgctgacaaccatgcagaggaatttttccacttaagtcagagccttcctccccatctggaattcacagctgttccctggcagcacacaggagggtattaaggacctttgtgaggctaggtacactgtccacacctctttggggaagttacgattttttttttccatcataattcagtctcttcttattctacagtgtgcactttatgcctctcgccttttgataatagttgttcagtgaaggaagtcagctgccagaatattaagaagggtctccctttatgtcagtacaactgttagggcggccttcccatttactttaggtttcaagaggattcaccggaagcacatgccccggtctagtcccatttgaaacagttctgctttactgagaccctaggccggtctccttgctgaccctagcgctgctgcctaggtgccatttcctttcctcctcagtcaaatacaggctgcacattttgtcacttaatgccagtacaatctgtgttactcctaaggacttttgggattttgatgagacctgcgagggagaagacactgagaagccagtgatctgcaagcatttgctcttgtttccacatcacctctgggatatttcagctgttgtttccaaatggcaaatcatcaactaaaagcacttgtttcaagttttgttctgcactcccacgactgaagttgtagattgagctgaataaccatgggaagtgaccaagcaaagacactcgattggagtcagttgaatatttgtaccctcagtggagcccttctggtcttttcttccacttctgcagaatttcctctagcaaatacttctttctccttgcttgcctccaccatgatatttgaataagagatggccagaggataacacttgtctcttaaaaactaagctaaaaagaacctagaaccttcaattgagcagttgtgaaaattgctaatggtgccaaggccaagcaaagagtttcagaaaatgactgagaaggagcgataacccccagaatgcaaaatcaggggcatcattatccggtgcttgaacaaggagctccgctctacaactggtttttttaggacttgtgaggaacacagcaacggaaatccatccacaaaggatgcagtgccccaacttgtactgcgcctgaatagtcatgtgataatttactgaagaaatctagtgtactttaaatttttttcataaaagtttacattgtattgtaggttaacattaaatgttttatagcaaaaacttcataacaggctgtggatctttctgtgtgggaccga

SEQ ID NO: 14842 - DNA, 1587 bp, Homo sapiens
ccgggacccgacgcttttcagggcatttctccctccagccagggcccaactcccacctgcctgggcgaatctcctccaaggaagtcccaggaggatggggaccaggaaggctgtggacccccatctccagggggccttcccagcctgatccctgtcctccaagttctggaggaggccgctgtagggtctggctgagcttcccacccactttccctggtcccaatcctttcttgtcctatacccagctggggttgctgccctgaacgaactgcgtgtggggccggcacatcctagcaggcagcccctggcgcctgctgcctcagggatgctccaaccaccctcgttctcctcgcagtggccctggctcccacctcccgccccagcctgccgtggggcccgtcagcctggtcccacccccatggagaacccaaagtcttactgtatataactccaggtgacgtttctatatttatagcagtgttgaaaacccacgtgttttacacagaaccaccctctccaacccctcccttcccgaccccaacaaaacgttttcaaaccccttacagttcctggggcaggcggaaacaggctcacagattgtgtgtcggctgcagcagtgattccaacaagcagctattgggggggaaacacagcatttaaaaagatcatcattaaaaaacaagatttatacaacaattacttaggatgtttgtgatctgccgaccttgctatagatgccatgttaccaatgatttcctgtggtgggggcttgccattgtttactctcttatttaccaacttctggcctaggcatgacagtgggcaccttcccccagccctggctgggcccagcgcctgtgttctgtgttagaaaggttttatatatatataaaattacatatatatgtagaaatatatgtaattttgggggccctgttccttgcacattttacagttacctcatttttcccatgtatgtatttgagaaaatgctaatatatagagaaaaaaatggttcttaaagcttaaatgtgtggttttttccattccatgggattcacattggtttgtagcatttaacataactagtatgttgtattatatatatgtgtatactgattgaaatttttaacagatttgtactttttttaaaatgaaagttgctagttctgcttgaccaagtagtgcaatcattattttttttaatattgttgctgatttcagagggatattcactaataaatgtatgatgtataccaacgaccgcccacgctgcctttggctgcccgtgtctttttggtgggaggtgggatggggatgaggcttaacacctgtaatcccagcactttgggaggccgaggctggtggatcacttaaggtgaggtgttcgataccagcctgcccaacatggtgaaaccccttctctactaaaaacacagaaaaattaggccgggcgtagtggctcatgcatgtaatcccagccggtggctcatgcctgtaatcccagcactttgggaggctgaggtgggcggatcatgaggtcaggagattgagaccgttctggctaacacggtgaaaccttgtctc

SEQ ID NO: 14843 - DNA, 1105 bp, Homo sapiens
tctgggtgggggtgatggggtgtgggatgatgccagccggcatggaggaaatggggtggcacggctatgggggtggcaggattcccctcctgtccctgcactgaagagaggagggctttgtagaacctctggggcaagtgtgggaggcctgctgcagacatggggcccagcggtctctgctgccacagggcttggcccagcgcctgcctctcaggtagtctggaggaagccacagtcattgaaccagtatccttgtcccactccctccctttttctagcctctcttgggtcggggaagggggagctcagtgtcccctcccttgcacccctctgcctccaccagcctggaggttgggcccaggcctgtgggggtggggaggtggccacccacttggctgtcccagccctgtcccagacagccctgtattcctgcagcctgggcttgttcccaaacagggtgaggctcctgggatgggcctggctcacctggggctctcccctgcccccacagtggtcttgctgcggagcccgaggccccaatgactggaacctcaatatctacttcaactgcactgacttgaaccccagccgggagcgctgcggggtgcccttctcctgctgcgtcagggaccctgcggtgagtggggctgggggaggagaggtaagggactttccagtgcacagactctggagaaacctcccacagggccccgctccgctctgccctgctctgggggcgtggatgctgggggacgtcattttacatgggtggcactgaggcctgttggggcgcggctgctttccctgttcagcaagacctgtcttttttatcgtagtgagatggaaacagcaggaccctggggcacagggatggggactggcctggaggcctccctgcaccctatacctctacataaacacagccgcagccattgtctgctcctggccagcttgaaggttggccaggctgtcactctcagttatggttgtatgtgacgggggttgcctgggtcattgccagccagcaccccactgggccaccgttgcagggtagcagggagtggggacctctgtccctttacgactttcttcagggcagaaacct

SEQ ID NO: 14844 - DNA, 1156 bp, Homo sapiens
taaccccaacactttgggaggccaaggcgggcagatgacctgaggtcaggagttcaataccagcctggccaacatggtgaaacccagtctctacaaaaatacaaaaattaggctggatgtggtggctcatgtctgtaatctcagcactatgggaggctgacacgggtggatcacctgaagtgaggagtttgagaccagcctggccaacatggtgaaactctgtctgtactaaaaatgcaaaaattagccagtgtggtggcgtgtgcctgtggtcccagctactcgggaggctgaggcaggaggattgcttgaacctgggaggcagcggttgcagtgagccaagatcgtgccattgcactccagcctgggcaacaaagcgagaccatctcaaaaaaagactaagttgaatagcttctagaaaacttatactttaagtaaattatgatctttttattctagacaaaattattgtccttttattctagacaaaaggatgccacggagaaagaaaaaagttaaagaagtctccgaatctcggaacctggagaagaaggatgtggaaactaccagttctgtcagtgtgaagaggaagcgtagacttgaggatgcattcattgtgatatccgatagtgatggagaggttagtgaagtagagctgaaaagtagagctgtagctctcaaactatgcttctttacccatggggagtttgtttcgtgactgacttcaccttaatgccagctcaccaaaaccatgaaatttttactcagctttgttttaatttgtaaatggaatgaagaattacttaaggtagtaatcctgttgcttggttgaggatggatcatagttcttcagttttataatatagtaatccaaagtggcattttggaactatttgaatcatctaaatcaattgtaaatcttagttttcatgtgtctagaaagtgagaggaaaaacacgtgaatgttcttaagtctcttgatatgttctacatataatagcacctagccatctgtagctgtttaaaaataactaaaattaaaaatcagcttctctgttgcactagtcacatttcaagtgattaaagacacataaggctagtgtcagttgtattagacagcagagctatacaacatttttatcattttagaaagctt

SEQ ID NO: 14845 - DNA, 3094 bp, Homo sapiens
tcagatgctgcttgagctcaggtgctaactacctggctggttccataaaagcaggaggcctgacaggtttgtaaaagcttctgatttcaggccgggtgcggtggctcatagctgtaatcccagcactttgggaggctgaggtgagcggatcacttcaggtcaggagtttgagaccagcctggccaatatggtgaaacccctattctactgaaaatacaaaaaattagctgggtgtggtggcgggtgcctgtaatcccagctactcgggaggctgaggaaggagaatcacttgaacccgggaggcagaggttgtggtgagcgaagattgtgccactgcactccagcctgggcgacagagcaagactctgtctcaaaaaaaaaaaaaaaaggaataaaaaaaaaagcttctgatttcatctcccttttcccccacccatttctttgataagtgataattctttttctcctttaaatttaaggttcctcagaaaattttgagtaaatgggaagccagtgttggacttgcagaacagtatgatgttcccaaggggtcaaagaaccgaaaatgtattcctggttcaatcaagttggacagtgaagaagatatgccatttgaagactgcacaaatgatcctgagtcagaacatgacctgttgcttaatggctgtttgaaatcactggcttttgattctgaacattctgcagatgagaaggaaaagccttgcgctaaatctcgagccagaaagagctctgataatccaaaaaggactagtgtgaaaaagggccacatacaatttgaagcacataaagatgaacggaggggaaagattccagagaaccttggcctaaactttatctctggggatatatctgatacgcaggcctctaatgaactttccaggatagcaaatagcctcacagggtccaacactgccccaggaagttttctgttttcttcctgtggaaaaaacactgcaaagaaagaatttgagacttcaaatggtgactctttattgggcttgcctgagggtgctttgatctcaaagtgttctcgagagaagaataaaccccaacgaagcctggtgtgtggttcaaaagtgaagctctgctatattggagcaggtgatgaggaaaagcgaagtgattccattagtatctgtaccacttctgatgatggaagcagtgacctggatcccatagaacacagctcagagtctgataacagtgtccttgaaattccagatgctttcgatagaacagagaacatgttatctatgcagaaaaatgaaaagataaagtattctaggtttgctgccacaaacactagggtaaaagcaaaacagaagcctctcattagtaactcacatacagaccacttaatgggttgtactaagagtgcagagcctggaaccgagacgtctcaggttaatctctctgatctgaaggcatctactcttgttcacaaaccccagtcagattttacaaatgatgctctctctccaaaattcaacctgtcatcaagcatatccagtgagaactcgttaataaagggtggggcagcaaatcaagctctattacattcgaaaagcaaacagcccaagttccgaagtataaagtgcaaacacaaagaaaatccagttatggcagaacccccagttataaatgaggagtgcagtttgaaatgctgctcttctgataccaaaggctctcctttggccagcatttctaaaagtgggaaagtggatggtctaaaactactgaacaatatgcatgagaaaaccagggattcaagtgacatagaaacagcagtggtgaaacatgttttatccgagttgaaggaactctcttacagatccttaggtgaggatgtcagtgactctggaacatcaaagccatcaaaaccattacttttctcttctgcttctagtcagaatcacatacctattgaaccagactacaaattcagtacattgctaatgatgttgaaagatatgcatgatagtaagacgaaggagcagcggttgatgactgctcaaaacctggtctcttaccggagtcctggtcgtggggactgttctactaatagtcctgtaggagtctctaaggttttggtttcaggaggctccacacacaattcagagaaaaagggagatggcactcagaactccgccaatcctagccctagtgggggtgactctgcattatctggcgagttgtctgcttccctacctggcttactgtccgacaagagagacctccctgcttctggtaaaagtcgttcagactgtgttactaggcgcaactgtggacgatcaaagccttcatccaaattgcgagatgctttttcagcccaaatggtaaagaacacagtgaaccgtaaagccttaaagaccgagcgcaaaagaaaactgaatcagcttccaagtgtgactcttgatgctgtactgcagggagaccgagaacgtggaggttcattgagaggtggggcagaagatcctagtaaagaggatccccttcagataatgggccacttaacaagtgaagatggtgaccatttttctgatgtgcatttcgatagcaaggttaagcaatctgatcctggtaaaatttctgaaaaaggactctcttttgaaaacggaaaaggcccagagctggactctgtaatgaacagtgagaatgatgaactcaatggtgtaaatcaagtggtgcctaaaaagcggtggcagcgtttaaaccaaaggcgcactaaacctcgtaagcgcatgaacagatttaaagagaaagaaaactctgagtgtgcctttagggtcttacttcctagtgaccctgtgcaggaggggcgggatgagtttccagagcatagaactccttcagcaagcatacttgaggaaccactgacagagcaaaatcatgctgactgcttagattcagctgggccacggttaaatgtttgtgataaatccagtgccagcattggtgacatggaaaaggagccaggaattcccagtttgacaccacaggctgagctccctgaaccaggtaaggacatctaaatgtgataaaaaaaaaaaaattggagaaagtgctgataaac

SEQ ID NO: 14846 - DNA, 1105 bp, Homo sapiens
tcctctggagagggtagagaggttcgttcacttgaaaggctttaaaagaatcacagagttccaggcaagcattattgttgtctcccctctccctatttattctggggctgatttcctagttgtcaggacagtggtttgagttgggctttcccttgttgaagcaggctcactgacagttacgggatttgattccttttggagacttatcacatagctcccatctgagttttcttgatggatcgagtgtttaagatccatcatcttagtggtcattccttctatttgtgacattttttcagtgctaacaaatagacttgaataactcacattctttttatatttaatatttttgtttttcttttgcttgtccctgattttcctgctttaggtcggttgatgcgctgtgtccgctgtcctgtggcataccacgccaatgacttttgcctggctgctgggtcaaagatccttgcatctaatagtatcatctgccctaatcactttacccctaggcggggctgccgaaatcatgagcatgttaatgttagctggtgctttgtgtgctcagaaggtaagaaatcatttcttcctctatttgtagtctaaaaagggattaaatcaatgttttaattggaacaaaaatacttttcatcatattgccactggaaaaaatattagaaatgatactattcatctgccattcaggaaatgatgtcccgaattaatgattacatagcagaactttttttttttttttttttttttttgagacaacgtttcactctgttgcccaggctggagtgctatggcacaatctcagctaactgcagcctccacctcccaggttcaagcagttctcctgcctcagcctcccaagtagctgggattacaggtgcccgccaccatgcccgactaattgtttgtatttttagtagagacagggttttaccatgttggccaggctggtctcaaactcctgccctctagtgatttgcccgcctcggcctcccaaagtgctgggattacaggggtgagccactgtgcctgtccagcagaactttttaaaacttggctttgttgcccaatagggagaggttttatttttctt

SEQ ID NO: 14847 - DNA, 1172 bp, Homo sapiens
tgagccaccgcacctggccttagtttttataataaaaccctttcttggtatttacctttgtaaacatttctcaaattgtgcactaggatttgtgagatcttcacttccagatattctgatcttactttgggattgggactccgcattagtatttaaatctccttaggtgatttctaatgtgcatctgggttgaaactacctaaatagaaagtgggacaagctgctatttgtagggcagtggtcctcaaacttcaatgtagtcagaaacccctggcagccttgttatatataacgcagaatgctgcaccccacagtctctgctttagtgtatttgaagcacaacccaggaatttgcatgtctaacaaattgccaaatggtgatggtgctggtccagggatcacactttgagaaccaaagttctttgggatcttttctctgagaggttcagtctttacaaatagaaactccaacttattagagagaatagtcaaattttaatccacagcagaggtctcaggaagtctgatgtgtagcttcttttggaattctaggaccgaatcattgatgctggtcccaaaggaaactatgctcggttcatgaatcattgctgccagcccaactgtgaaacacagaagtggtctgtgaatggagatacccgtgtaggcctttttgcactaagtgacattaaagcaggtaagaatcatttcaggattctgcagctgacatctgaatttcagggcttttgttttttacaaacagcttcctcagattataattttaaacatttctatatgtaccgttctctggaattaagttcatttacatttttgtgcaaccatcaccaccatccgtctccagaactcttttcatcttcccctgctaaaactctatacctactaaacactaagtccccattcttctttttcttcacagcccctggcaactaccattctactttctgtctctgaatttgactactatatgtacttcatataaatggacaatatttgtccttttctgaccacctcatttcattcattcattgattcatttttaatgtttagggacagagcattgctctgttgcccaggctgcactacagtggcaccatcacagttcactgcagcctcaaactgggctcaagcaatcctgctgcctcagcctcctgagt

SEQ ID NO: 14848 - DNA, 1055 bp, Homo sapiens
ctacagatttctagtgttattctgtactgagatgcctctccagagtgctgccaggtaacatgtgttcacctgagaacagacaaacaggttttcctcatacttgtattcccagggcctgacacattgataagttgttttttgtttgttttggtaatgaattaacatattttgaatctgaatggttaataaacaaatgaaaaacaacttgaggtaattaacacctctggaggaagagttatcttaaatattacttgttaagccatttaagttttctctgttaaattgtattacctgattattaatgttataagattagaattaattaaaatataggattagagctaaattctttttaaaattaatctgttctcttgggagttggtatcctttgtaattaatacagaaataatgtaattaaaaccatagatattaatattttcacggtctcttatgcaggcactgaacttaccttcaactacaacctagaatgtcttgggaatggaaagactgtttgcaaatgtggagccccgaactgcagtggcttcttgggtgtaaggccaaaggtaccacccttctagacttctgctttgggattagtggtgcggtcctccctccctaacagtgttagggcagtctacattttaagaagaaatctctttgaaattaatgacattcagccaggcatggtggctcatgcctgtaatcccagcactttgggaggctgaggtgggcggatcacctgaggtcaggagttcgagaccagcctggccaacatgatgaaaccccatctctaataagaatagaaaaattagctgggccgtggtggcatgtgcttgtagtcccagctactcaggaggctgaggcaggagaatcccttgaacccaggaggcagagattgcagtgagctgagatcacaccactgcactctagcctgggcaacacagcaagactccttctcaaaaaaaaaaagaaaaattcaatgacattgaataggtgttgatagggccacttgcaattcactaagcattcggctgatcaattatataagaggtttt

SEQ ID NO: 14849 - DNA, 2050 bp, Homo sapiens
tgtgcatgcgcgcacactcacagaggtctcctctatagatgcaagggtgctgcattgaggccagcaaggctgttggctgtggggtcgccgctgctgcttttgtctgggctgtgcagagtctcaagatcagtccttggaggagcaggtggtcaggggcagtcgggctctgtgcgaatgtagatttccagcagtggaagaaggcatttggcaagcttctctttctttgcttttgtttctacctatttttctctttgtacatgaatccaccccatccctatttccctaaaacactcaggtgctttcagatttcagagcctcgggcagtggacatagggaatctctggcaagctctgagctagacacaccagcttcaggaagagtaccagatcctgatgggaaatttcttttccccattccttttccctcctgagtggagggagtcctcttcttcgcctccctgagaattgctgtgctctgtattgagagcacctgcctgctgacttagctcaaaggcaagccagaacccttccctgaagactggcaagaggtggtgtttagagcaacgtccaggctaagagatgactcctattaactgctgattatctgttactgctgccctgagctggggcccaagggctgggaaatctgttggtgctaccctgccctaccattcacccagctcacagactgccaacaggaagtgctgtttggctagtttcctcccacttgtctacccctcctttgtccttagaccaacatgtttacctctctgctttgccaacttagccagcaggccatccccggccctaacgtctcctggccattatctcttagttatggctttcacgctctcaataggattctgtatttggtcccaatttcctcaagttcttattgaggttactcccatcaattccacggagggaacagtagttattatagaagcatttgcgctttatctaaagattaaaaatagaatctgcttttatttcccaaagtctgtctctgaggttgagacacttgaactcaggcagagggacgaggctgggcagggctgtcctgagtttaggggcctatccctgcatttcactgagacctcggaatctcctctgtgaattccacctgcctagttctcccctttcatcctctctctcttcccacatcatcaaagaggaaaagctctttgttcaaaaggaagagaaaacgtaaagcatcttattttcttttaaaagaattttaaaccatgaaaaagatatttttaaagaaattcaccgagaacattaaagttcattatattaagtatttatcatgtgtgagaataataaatatataactgcagctagtaggtccctttccctaatcttttaggtcatatgagtagggtttgcttggtgccagtcctgtgcccttttctctccagtcatctgtagttgtgatcagaaaaaggtatctgcactgcactgtcagagtctcctttcactatgttgtgtgttaaattaccgtagctctttgtttcatgaaataaactgtgaatttggggggggcggggggagggcgtgcaggccatgtaaaaattttccgtggagaagtttgattctaaagtagcttctctaaagtaggctttggtaggtaatcaacttgacagcagtctagatgtctcacaggacaggagggagtgagggaaaggggccatgattggctgctttgtggttttattttggttctttccattctccgccattcattggaggcttcgttccagacctgcctgggaaaacagcttctgagccattttggggagcagttcttcatctgaatggatggacatctgggcttccttcaagggccattgaatgggaactagaaaaccactggaaactagaaatttgagctattgggcccaccagtagcagcatgtgatactagatggttaaaatcatgaaagcagtcactatccaattagaagcagagtcacaacaactgttgggaaatgtgactcttggaggaaggtggggagggagtggccttgccagccctgtgggacgtcccc

SEQ ID NO: 14850 - DNA, 1128 bp, Homo sapiens
tccagaggtggaagagatcctatatccaggtgaaggtggccattgagtttctcagggctggggccaccttgtccatagcctccgtccacgctgcctggagcaggttgttagagagctctggttgttgggtcttcctcagctcccttctgcccctctctacctcttccactcatggaagcccctctactgcttatgaagattaagggtagtattttctaaggaagtggaaagaattaaactagaaatccacaacctcggaagaagtgtttcgagtttaacatgcgctgtttctgcttatgtggttccttctctagagctgctttcccatggctttcaaaacatcaggttattgtggggcttcaggtgtaaggtcctggaagttcagcaaagtttcgtggacaagacatgggcacagagagtagaagcagaaataaatggttctatgttttcaacttccagggttggggcaggccagagcaaggcggtctcatcgaggtgggtgctacctgtgtgtgtgtagatgagtgtgctgaaggtggggagggcagcacacagcagctcatggcagagccgcctcctaggtcttggcaaagaggcaagctgacgatagacatctacctatattgttaagaaaggggtcggggggatcagccaaggtccatcattgcttttttgccgcgcccccccccccccgcccccatagattgtcagctgtaagtgaaactcctagtgaaaaagaggggagccctgtgttaggagtccccataaacatgtactgtaattctttgtatatagaaaaaaaatttactgtaaagtaaagtttaactttactcatatatggcccttgccctgtgttttgttttattggctgtggggagttgtagtctaacaggagggaggattgtttggggtgagagcagaagccagccccagagatagtacgaggtggggggcggggggcgcagggatactgtgaagctaagcccttcctccaagcacgtcatgggaatagtgtgtttcctctcagcagccacagggctgcccaagcctctttctccctctgttgggagtggctggtttcagtttcagtctccctccacaggaagcccccatcactcatgaaggaag

SEQ ID NO: 14851 - DNA, 1217 bp, Homo sapiens
gaggctttagtcacttctctttacagatatcaaagctcagctctttgaaacatccagcaagacaggccagagtgtgggtgagtgctgtgctggagcctcacagcaggaacatgcaggggcaccagaggaagctgaatagggcacagagggctgggtcactgggagatcccagggctactggcattgggccctcgctgatcatcatttttcctgccagacgagctcttccagaaagtggcagaggattacgtcagtgtggctgccttccaggtgatgacaggtgtgtgcttccccagcctttatggagacttactctaggcccacagcatctagcccctttcctgagttacctgatcccaacagaatggtgctgagctgccacctctctttttgacagaggacaagggcgtggatctgggccagaagccaaacccctacttctacagctgttgtcatcactgagtcagcactcacctggcctgggggaattaaaggaattccccgtaagggctggacccagctcctttctgggcttgggtagtcaaatgtctgagctaccccaggtcctcatgtcagcagagtggcgcctgcctgtgctggcccatggaacggagacagcattgggctgactgtgggcatgaggagggataaggctgatttggaccccaggcttctgccctggacagcacttgtgtctgcagattatttaagtggcttttgatctgtaaataaaatcagtgcactgtgcatcacacccagcccctttccctgctgtgtggattaggtgtcaagacacctagttcttcctggggccacccggctggcctcactgcttatattaaggctcctcccaactctcattttcctttggaaaacaagacttttttccccatggttaccgctgagatactggggctgtagtagtataaaagctcacagttccttctgagtgctgaaaagagtgcatgagttgcttcgaaataaaagggtcaagcattcctacctgagacaggttggtctgactagctctactgcatctgtcatgtttgggcccctatgtcagacctgtgactcaggtcctgagcttcccagtgacatcctacaatgtggtttaatggtaggaaagtcctaagttctgtaagccagaaaggtctaatggatccagatttggttccaattcagctgctaatttagaaaagggacttaaatcctcatct

SEQ ID NO: 14852 - DNA, 1230 bp, Homo sapiens
ttgcccctaagagactgcccgaggggattcccatttggaggctccgggcctagagaggccacgccttcccgtaaccttgcagggtggtatgtgctatggttcaaaccagagttaagggcccatcccagggcaaattcccactcccgccatctgactgacctggattcctgccttctagcaggaatggacctcatgatttattgcaccccaggaaagcgccacgggcagagaaataggatttccaactccaagatccctcccaactcccatactgccgcctcttcttgtctcaccacactgagaaaagaatcttacactaaggtctcaagtaaaccaccacccaggcccaacctcccttcaggaccttgcaggcctggcctggccgcttccccgataaggtctacctaggattcgatatcgagtccttcctggtcccagtacttgggggttacccataattcgatctccagatagcgagatggcgcggttttgctcttccaaataccacgtacctatagggattcgggtaccgctgccagaaggcggcgaacacttggtcccaggaactccggagcacgctctggcccaggaaatacttcaccatcgtcccggccgaagcgggctcagcacccgcgcagcatcaggggtgcggagcctgggaggcacgcgagggccgggccgggccggggctcggcgcacacccgccgccaggctcgtagctcagtcaccaccgcaccgcgcccaagcagctgccgccgccgccgccgccgccatgagttgtccggccgcgcgccacttccggcgcagccacacagtagccaccgcttccggcgcccgcgccacgtgaccttgcggccccgccccctcgccctctagccccctcccgcgggagtcgcggcgctgcgggtaggagccgggttgcgggagaccccaggttcggttgggattcccagccagaacggagcttaagccgggcaggcgagcgaatgacggagtagcgagctgcacggcggcgtgctgcgctgttgaggacgctgtcccgcgcgctcccaggccgccccgaggcttggggtcttcgaaggataatcggcgcccggggccgaacagcgggggcacacggggcgctgccgaagtgcaaggccacggccagagctcgagcccgacgcgctgtctggagtcgtaggttggcgccgtttggggtcggggtctgaggcttgggcgctgcctggg

SEQ ID NO: 14853 - DNA, 1189 bp, Homo sapiens
aaaccgcgccatctcgctatctggagatcgaattatgggtaacccccaagtactgggaccaggaaggactcgatatcgaatcctaggtagaccttatcggggaagcggccaggccaggcctgcaaggtcctgaagggaggttgggcctgggtggtggtttacttgagaccttagtgtaagattcttttctcagtgtggtgagacaagaagaggcggcagtatgggagttgggagggatcttggagttggaaatcctatttctctgcccgtggcgctttcctggggtgcaataaatcatgaggtccattcctgctagaaggcaggaatccaggtcagtcagatggcgggagtgggaatttgccctgggatgggcccttaactctggtttgaaccatagcacataccaccctgcaaggttacgggaaggcgtggcctctctaggcccggagcctccaaatgggaatcccctcgggcagtctcttaggggcaagcttctgagggtcaccttcaccctgacacctgcagcaaacatgtcttgacggaagacatagtacaccgggaggtgacccctgaccagaaactgctgtcccggcgactcctgaccaagaccaacaggatgccacgctgggccgagcgactatttcctgccaatgttgctcactcggtgtacgtcctggaggactctattgtggacccacagaatcagaccatgactaccttcacctggaacatcaaccacgcccggctgatggtgagacacctcctgttgtgattctgcacctccccctctcccctccccccgagatagagagctcctcagatacatgtggctagagagccataaggcagcttttgtggccggaggcaggtctgggttactgagggttgacagctgtagagtatgacctcaggttttcttcttttcagctggccatcctctctggacctgtcctttgactcattcatacagtgggggaggggtacctatcttacggagttgtcctaagttctaaatgcaaagcgctcccatctggcatctatggcacagatatatgttggactcacaggagtgatgctgagtggcggaggcagtgcttttcttttttttttttctgttttttgtttttttctggtgacaagagtctcacccaggttggagtgtagtgacatgatctcacctcactgccac

SEQ ID NO: 14854 - DNA, 1776 bp, Homo sapiens
gtggcagcaggtgttaaaggtcccacgctgtggcagcaggtgttaaaggtcccacgctgtggcagcaggtgttaaaggtcccatgctgtggcagcaggggttaaagtgatcgtgccggtctctacttggctgtcacggtgggcacccctttccattggaacatagccttgttgtacctaagaaaagttgattgtttcaaaattcatacctagaggtgcttccctagaacgatcgatgtgtattctgacatccgcatttcacacacgcaggaccgtgatgccatagtctatgtttttgccatgtgtgtctaaaaatttgaggtatttcatcatacaaaagttaaacgtgaatgtgtggctatggacctgccgtgcgacgtgagaaatatcacggacgcacttggatccctctgtctcctcctgccaaaggtgattgctgcaggatctgactttttgtgtctgtctgaaaatttttaccacagggatatgtatctctacatacattgtattgttttgaatttctgaagactaagtggtacatggacgtattcctcaacttttgcaattcagcatggttggtgagtctttggattacatgtggctcaagatgggtgtttctcactgtgaggtatgaacagactccagtttctccattctgctgctgattggaggtggtttagggcttttgctctgctacatgatactgctctaagcactcctggatgtgtcttatttatttatttatttatttatttatttttgagacagagtcttaaactctgttgcccaggctggagtgcagtggcacagtcttggctcactgcaacctctgcttcctgggttcaagcgattctcctgcctcagcctcccgagtagctgggactacaggtgtgcaccaccatgcctggctaatttttgtatttttagtagagaaagggtttcatcacgttggccaggctggtctcgaactcctgacctcaagtgatccacccgtctcagcttcccaaactgctgggattacaggcgtgagccaccgcacccagcccattttcagttttactagagggtgcctcgctgctctccaaatcgggccgtgaccacagtggggtggcacctgccgagatcccctctgtccctcagcacctgatatagtcagagctttccatttttgacaggtggatgcaaaagctttcgtttgtttctctgctagccatgttgggatgtgtgtgcgtttattggcatctgtgtttctgtgtggtggtttagtccgggccctttcttccggccgtgtaggagtgcctgtgcggggctcctctggtgatatgcccttggcgcataccttccagtgtgcctgggggcttttgcttttcaatgacgtcatttgatatacagcctataatttagtgtgatttcataatctattctaaagattttgtttttgcttaaaagctttaaaattttgcttttcaaatttggcatttaatcgaagtggagttaagctggcgtagggtgtgatgtagggaatccatttttccaattgtctccagccagttccagcaccatttaccgacccctgggtccttctgcaccctctgaggcgcacactcaggtggccacgccacatctgctcctaaccctgcccctcagcttcctcccctctcgggctggaaggctatatacttggctgagctcccggctccttccagctagggcggccgtgtgcccactgcggctggtcagatgcccgagcctgccgacgagggcctccagttcctct

SEQ ID NO: 14855 - DNA, 1092 bp, Homo sapiens
gagtgcctggcacatggggctgggtaagagagaaccctggctctgattgttgccgacttcctgtgaacctcacaacagcctagtcaggggacggatgagtagtcccatttgatagagaggaaaggcagagtcagtcaccaaggggtggagactccttggtctccactggggaggcccctccggggtggagctgtcttccactcatctagagagtcctgggagtcctggctctagatccttcctctgctcccttgagtccgggctgttgccagggagagcagggctgtctgtcgccctggcagcaaatgagtctcgcaccttgctccacacctggcccccggaggcgagtgagctgggggggctggccccttctgactccctggcaaactgagcagcatctgaccctgctcttctctctgcacagggacctgaagcccgagaacatcttgctggatgaccacggtgtgtaagggtgcctggggtgggtcagggtggggtgagatgcagaggcctggcctgttaacgggtccacctgtttctccacccacactcaggccacatccgcatctctgacctgggactagctgtgcatgtgcccgagggccagaccatcaaagggcgtgtgggcaccgtgggttacatgggtgagtcttctctgcccggcccactagcctcctgggttccctcactatccacccacccagccacacccacttctgtctgggagtcttctctcaaaaggggcctcagtagaaagggcccatgccgatgctcctcttctagaggttaggagaccaagactcagccggggccgcacacagttgtgaagccatgtcgttcatttgctgaatacttattaaaccctgctatggctgagcctgcaggtggctaccgggggatggaggagagagacccaaacctgtttccgtggccccagtccctgccctccctgtgcccatctgtgagggaggccagtggaggggccaacatgaggccccacattccacctggagaccgagagacgcaggaggcagagtcctggctctgcaggctccgcctcttgccggttgcgtggccttgaaccagacactc

SEQ ID NO: 14856 - DNA, 1152 bp, Homo sapiens
aagccagatggtttcacatacaaaatacagatttctgacttcttgtgtaaaatctgaagacccggggaccctgggcgcggcctcctgcagggccgtattcaccccgcttgatggggcctgtgctctcctactggccaaggtcccccctggccagcgggtgtgagtgtatcccagacctaacgtgcactggcgttcctggggcctgagggtccactgcccgcctcctgcccagccctaactcccatgccgcccgcccagctccggaggtggtgaagaatgaacggtacacgttcagccctgactggtgggcgctcggctgcctcctgtacgagatgatcgcaggccagtcgcccttccagcagaggaagaagaagatcaagcgggaggaggtggagcggctggtgaaggaggtccccgaggagtattccgagcgcttttccccgcaggcccgctcactttgctcacaggtacggcagctcacagaagcctggccagccagggctggggtggatgcacctttccctccctcccacccactcacctgcctggcctgcctggccgactcacccctgccacagctcctctgcaaggaccctgccgaacgcctggggtgtcgtgggggcagtgcccgcgaggtgaaggagcaccccctctttaagaagctgaacttcaagcggctgggagctggcatgctggagccgccgttcaagcctgacgtgagtgcagcccactcctgctgagggcggggcccagccagggctggggctcaggggctcttgtagtatcagccaggatgcttccagtgcaagtggcagaaaaaacaatctagtggcttagccacagaaataaagataattcacaaaaaggaaaagccccaggatgggtctggcttgtggcatgcctggatggggcttggagcctctgacaatgtcctaggaactctctctccttcccctcactgtaccgttgagtgtgtagtcttcatattggggtagctctccccatggtgcggcagcagtgggccccagcagctcagccaccacagtagacagagagcttctcttctcttttctcttctcctctcctctccttccttccttcgttcttttttcccttcttttttcctttctttcctttcttccttttcttttc

SEQ ID NO: 14857 - DNA, 1606 bp, Homo sapiens
caccagcagttggcggtagcagctactccgagcgccgtttacagttttgcacagtgatcttccccattgtccactcaagtcgtggcctggggaacacagacggagctgtccccagtgtcctccgtccctcagcccctggcctggctgagtttggcagggcctgggccatccctgggacaaaggtgcgtcccttcagctcttctccgtggagctcggggctttctgtatttatgtatttgtacgaatgtatatagcgaccagagcattcttaattcccgccgcagacctggcgcccccgccttggctcctgggggcagccagccctggctgggagagcgggagctggcagaggagccactgccaaactcaaggctcctctggcccagcttggatggctgagggtggtcacacccctgagccttcagcactgtgctggccaccccggcctctgagtaagactcgtgcctccccctgctgccctgggctcaggctgctaccctctggggcccaaagctgtcccttctcagtgcttgtcagcgctgggtctggggcctctgtatgccctaggcctgtgccaaagtggccagagattgggctgcctgtgatacccatcagcccactgccccggccggcccagataggtctgcctctgccttccagctcccacagcctggtccctgatactgggctctgtcctgcagacacctctttcagaaacgcccaagcccagcccctaggagggggtggggcatccctggtcaaccctcaaacattccggactcccctcataacaatagacacatgtgcccagcaataatccgccccttcctgtgtgcgcctgtggggtgcgtgcgcgcgcgtgtgtacctgtgtgggtgaaggggatagggcgaggctgtgcctgtgccccaggtcccagccctggcccttcccagactgtgatggccatcctggtcccagtgttagggtagcatgggattacagggccctgttttttccatatttaaagccaatttttattactcgttttgtccaacgtaagctgccacatgtctctgtgtgaatagtccgagcacaaacctggctagccgcccctgcctgcctctttcttgcttccggtgctccaggggtcttcctgctcccctggcccagctggaagcgggaagggattggaggtgggcctggagggaagcagggtgtgcccttccgaggcccaggagcccccagggctgactctgaactagcctctccagacagccaggctttggtagcctttgggctcacccagtgggtttcccaacttcctaaatgggatggggcctaaggaaagaagccttgggtacccactgggatgtgggtctgtttctgactgctggtaaggcgggccccgttggtgtcctcccctccaaggctaaggtggcctggctgcctaaatgtggacgtaagagtagggtgggagctgtgtaaggaatgtctgccccaggcctgcgttacctggacgccagccatgtacgggccccgggctgaggcacgtgcatcatatccacccctctgttttgcccttgacacattatgggcaaagacctagacagtgggtgacgctggc

SEQ ID NO: 14858 - DNA, 1199 bp, Homo sapiens
tgttctacaacaagcctccaggtagtactgggctggatgatggggaggaatttgggtgcgggggctggatttgagtgtgggtagccaccccaccactacccaccgctcacagaggctggggacacaagcggtctgctaggtccctaactcctctccctttctaacgccacagagatcgacatcacatgctgggatgcagacccagttccagaagaggaggagggcttcgagggtggtgattagcggtggcgccagccctaggctacccttgccaaggccgcccacctgcatcagcctctggccagacggcccgccgtgcctgcattcgcagcagctccgcctggcacccactccggattccggccctggctggggacttggccgcttccctacccacagggcctgacttttacagcttttctctttttttaaaaagttgataggagacttgtacagttgactggctttcctctcgttggtagttgagacgctgttgcaaattccacccctccttccctggtccagattgtagctcttagtcctccctgctcagctggccgggttggaggcctcaccctgcttggggcctggcgtggggggagctctggtgggaaaatgtcccccacctcttttcctagttttatgtttcttgggaaaatatcactttgtattctctgtccagggcttcagatattttgcacgaattttaaaacatggcaataaatggctcgtgggctctggctccctgggaccccctccccgcccttcttttgaccccttcctgtctggcccaaaggaagtagcaggcccagctggggcccctcggctaccccccgtctcctgccgggcaggtcccaggttggaggccctaggcgcggttcaggtcagggctatggatggggcccaggggctttggtggcccctccccaactccttcctctttgcttgggttcctttttcacgtttagtaactgttttttttttttttttttttttttttttggaaagcacaaacttctgtaacgggtcgtgctcatgtctgttaataaagaaatccagatcccttcgggctgccgcctgccctgacccaggttcccaactcctcccacctccgaggccgcagcacctccttgccaccagggggcgtcctcaccctaattccaaggcccgccaggcgggggcggggtgggggggcggtg

SEQ ID NO: 14859 - DNA, 1169 bp, Homo sapiens
ctggggagggagagggacatggagtgggtaggacaggaacggggagggctcctgctgtagccatgacaacagggccaggcatcggttcaggcgggagcccagcagggtactgctggaggcctgggtcaggggggcgcaggcagtgaggggagaaattgctggctggtcgagctcagtgcgcagcatcccggccctggccctggcagcctacaacccagtggagcgggtgtgtgatggagattccaaggcgacggttccttggttaccgttccctggctaccaggatcctcatcccccattggctagtgccaggaacttacctggcacgtgccttggtccccgctgcccctcccccggggagggaggaggagaagagagaacctggtgctcccaacagctctgggcatcccccagtaaccatggcaaccctgcaattggcacacgactggcccaccccaactgcattctccttgaacacaaaggaccctggggacccgccctcagcctcaatctccgcctctctgaaatggggatgaggtcactgcagtcactctcgcccagactctggccccggggtggccaagcctgagctccaggccttccagcccctaggctgcctcagtcctggctgaggcttcctgagactgctggcctttccttctgtctgagctctaacagaaagctgacctggtggccttcctccttcctcctcctccctagctttgtgtgccctggctccttttgataggctgcggtgacagagcaaccattgcacagaagggaaggcagagatgcctcctccatcaccccatgcaggcccaggctgaggaccctctgggagggaggagagccggggcctaggaggaagggccttgtccctgaagtttgaaagggctctcaaccccttctccaaactcctattccccaggtgccaaggcaggaggctggggctgtgaggaggggaggcagaaagggagggcaagggagaagagaaagaggaggggagaagcagagggagaaaccaggagaggaggaagaagagaaaggacagaagtgaagggacaaaggaaatgaaggcgggagggatggaggggacgtctcaggaggttgtggccagggccaaatggcctcagcccctccccttcctggattcccggcttcctacctcc

SEQ ID NO: 14860 - DNA, 1182 bp, Homo sapiens
agaccagtccaccgctctccaccctactgccactaccttaaaagccatcagtggctggacattgccctcgggcacaaacactgtagggcctgcagggcccttcacgatcagcccctgccagctttatctctcagcctctcctttctgaccttcctgcccacctgccccacccaacccccacatcccccaaaaaatctgggctacagctatacctctgaatgatttgcattcccagaagatactgagctttcccatttccagcctttccacttgctattccttctctctagaaaatgcttgtctcactgcctccgggatgattccactccccattctgtgctcagtgcagatcctcccacctccaggaagcactccctggtgaaccagtctgtgttgggagcatctcctctagattcccagatcaccccgtgctttcttccatgcagcacttgtcactgtcactctgaattcaacaggctgtttgctgttgtctccctcagcagactgaagtcagcgaggcagagaatgtctcacgtacgctaaactcacagggcctggcctgctgcctcacagcctcaatggtcggtaaatggttgtcagatggaattgagaaacataggaacttctgaagatcaggcctgggtgtattgtcctggctctgccacttcctagccacctcctcctcctgttctttccaaagtcgaggtttctcacctataagcagagggtcatgatgcagcaaagacagtggcgaggattaaaggagacatctatgggaagtgctgacggtacagagcagaaagtgtgtgtttctgtgctttctcctctggcttccagagtgtatatggttccatatcattccctccacaccagcagttgtcaaacttttttttttttagcagccaaacttttctgtgaaatctgtgtggtgctgggggagcgaggtgaagggcccttggtcctcgttggtccaacccagggcctctgagccctactcacagctagaaatgctgctgcagctgctgcagaccaagctgctccctgagggccacgaagcccagccccaccttcgcacatgggaaaggaccccacacagactctcagctgtcctcatactgaccctggaatgtagagatgcctcttcttcctaatttacaaataggaaaagtaaggttcagagag

SEQ ID NO: 14861 - DNA, 1249 bp, Homo sapiens
tcttttttgataatacatttgtgcattatttggtcgttctctttaaattcatttttaaaggtagaagcaaatcaagactggtagatgctgtgccaaggaaagtcagggatcctaggttcgaatcctgtctctgttcgcaattcgctccgcaacctcaaacaaacgacctcagtttcatctatgaaaagctggtaaccatcgtcagttgccaggccatgaagagagtcaacggaaataagtttttattctagggcacccgctctctctcaggtaaaagccgcgccccaatcaggtactgccgcgccagggccgcgggacatctcgggatttgtggtccacccggcggaactcgcggtcccggcaggcaccgcggcggcggcagggcgacgtggcgcggccggctgcggctgcgcaggcaggtggagcaagatggctgtggagctgggcgtgctgctcgtccggccccggcccggaaccgggctgggtagagtgatgcggaccctcctgctggtgctgtggctggcgacgcgcggaagcgcgctctactttcacatcggagagacggagaagaagtgctttattgaggagatcccggacgagaccatggtcataggtgcgggggcggggaggaaggggcgagtttggaacgtgaccgtggtcttggggcgggggatgcgagacagtcagctctctagagccgggaggagacggcctcgccgtgcccaggcggtcgcggaacccatgccacctcgcgctcctctgacctgggctcgccctgcttccctcaaggaaactaccggacgcagctgtatgacaagcagcgggaggagtaccagccggccaccccggggcttggcatgtttgtggaggtgaaggacccagaggacaaggtgagccaaccgcccccctcctctccgccagcctctcagctaggcgggctccggtacttcctcttctagttcctgcatctgctaaagtgggagagacagttgatgttgtgggaatatcctgctgacttgcagaccccgcccggtctgtgaaatgggcggattaattgtggtgataaaaatcaaagagttttgtcaactcttaaagtcatctagactttaagatttcacagaacatgatactttccccacaaaatgagcagcttttaatcttcccaagtaaggatattaaaacgaacggcaaaacccttcagctctcaccttctgtcacttttcgttaaaaaactcatggcggggtgtgg

SEQ ID NO: 14862 - DNA, 1072 bp, Homo sapiens
ggggagaaaggacctcctggaactgacttcttctgtcaggaggactggtttccagccatacctgttctggaagggagaggggctggaggcacccacaggcacaagctgaaggcagcagcttggctaatactgagcaggtagtggggcaaattcctgccctctctctctggcctctgggccgtttggtagtaatcacccaagggctggtaaagcccctcctcttggcacctcagaatcacagtgttactgatcagggatgtgaggctgctgttgggggtggggggaggggaatgggcaggcaagccagtcttctgtcttcctttgctaacttagggttttgagcaggttggggtatggtgcctgtcatacccacctgccaccctgggaacctcactgttctctctttcagcctagacctgctgatccagggtgtgtgtgagttgagggtgggtggaggggtttgcagtgtgggaatgtggccctgcagttgacctgagctgcttcacatggttgtccattctggggcttaaagaactgggaccagaccaagtagaggccttggtgctggttggggtggggcctgcagagtcttagttactgatttcattttcaataaatgtaggtttgttacatgagtttcccaataaaaaaaaaaatgacttcttgtccagtgcaagtgactcagtcatcagtgggcacacactgcagggtgcctcagggaatgccagttcttccaaagagcaaagcacttcacattccaaagtgaattcccaccagtcagcttcattctttccttcttctccaggccttcctgtggcagggaatagtgggtttgtccaagattatacaacaagtaaattgggctggggctcaaatttacaccctttcctctgtgccagctccctggtgaagttccctctttctagagtcagtaagcaggattgtcatggatgctgccaggaagtgcctggtaaggaggtgcattgagcaggggagtgctacaggacagccaccctgggctggcagggacaaggatgttgatgggctaaaccaacagcaagtgatttcaacc

SEQ ID NO: 14863 - DNA, 1164 bp, Homo sapiens
ggaacagggtgccagggccaggggctcggcccggaggccggacactggagacgatgcggcgagctacggcttctgttactgcccgggcagtcacaagcgcaagcggagcagcggggcctgccgctactgtgacccggactcgcacagggaggagcatgaggaggagggggacaagcagcagccgctcctcaacacccctgcaaggaaaaaattaaggagtacatccaaatatatttatcaaacattatttttgaatggtgaaaacagtgacattaagatttgtgctctaggagaagaatggcgattacacaaaatatatttatgtcaatctggctacttttctagtatgttcagtggttcttggaaagaatccagcatgaatattattgaactggagattcctgaccagaacattgatgtagacgcactgcaggttgcgtttggttcactgtatcgagatgatgtcttgataaaacccagtcgagttgttgccattttggcagcagcttgtatgctgcagctggatggtttaatacagcagtgtggtgagacaatgaaggaaacaattaatgtgaaaactgtatgcggttattacacatcagtagagatctatggattagattctgtaaagaaaaagtgccttgaatggcttctaaacaatttgatgactcaccagaatgttaaactttttaaagaactcggtataaatgtcatgaaacagctcattggttcctctaacttatttgtgatgcaagtggagatggatgtatacaccactctaaaaaagtggatgttccttcaacttgtgccttcttggaatggatctttaaaacagcttttgacagaaacagatgtctggttttctaaacagagaaaagattttgaaggtatggcctttcttgaaactgaaccaggaaaaccatttgtgtcagtattcagacatttaaggttacaatatattatcagtgacctagcttctgcaagaattattgaacaagatggtatagtaccttcagaatggctgtcttctgtgtataaacagcagtggtttgctatgctgcgggcagaacaagaccgtgaggtagggcctcaagaaatcaataaagaagacctagagggaaatagcatgaggtgtggtagaaagcttgccaaagatggtgaata

SEQ ID NO: 14864 - DNA, 1243 bp, Homo sapiens
actcgcccaacctcggaagcccgggttctgccacttccagccacgcgtccttgggctgcgaaactttctccagcccagtttcctcttttgggacatggggaggcggaggctgccaatgctgggatggagtcctcgagagcaagagaccagcggcctcgacgagcttacaatccgattaggccctcccaccgatgtgctgtagctgcccgccgccctggacccggcgccgtcccgcccggcttcgggagccctccgtagcggccggactcgcgcgcgttctaaaatgaggacaaagcccgcccaggtctagagcgcgcgcgccgtggcggccaatgggacgctgaagctaggttgagtgacggacttgagcagccaatgagtgtgcagtttgttgcgatgtggcacccggctccggcattataaagggcgccacgagtcggcattgtcaggcggcggcaccgcgcgggacggagcttggctgttggtcggtgggttcccgtgcggcggcggccaaggaggaggagacacagttggagcagctccgtgggctgactggggcgaggcctcagcagcgcgagcttgagtgcggccgagcctgcggcgccttcccctgcgggtggggacgagcgggccccgcggcgtcatcggcggcgaggtgagcggcggccggcgggcgggagctctggcgggagccgcgccggcctgacgcgctgtcgccgctggttgcaggagccgccgcgcctcggcctagcatgtcggaagcgggcgaggagcagcccatggagacgacgggcgccaccgagaacggacatgaggccgtccccgaaggcgagtcgccggccggggctggcacgggcgccgcggcgggggctggaggcgcgaccgcggcgcccccgagcgggaatcagaacggcgccgagggcgaccagatcaacgccagcaagaacgaggaggacgcggggtaggtgcggccgcgggcggacgggggcgccgcctttgttccggggccgccttttgttggcgccacgcggcggggggaggggcggcggcctggcccgggtcggggctggtgcggcccgcggactgtcgccgctgcgttcgcgggccgggcctggcgctgccactcgcgctggagtttgcgggagtttgttgggtcgactttggcgccgccccggggccgctcgcgcgctgccagggccagggccagggccggagccggcgcaggggcgggcggatggcccgg

SEQ ID NO: 14865 - DNA, 1196 bp, Homo sapiens
acagtgtaggagccactggcagcaggggctttggagtcagacaggcctggctcagccatgggagctacttgattttgagccttagacttcggggtcttaataacatgaggaaggcagtctctgctgtcacggctggtgagggtcctgggaagatgcatatcaagcgcgtggcacagggcaaatgcttgtaaatagtagctgctatggttgttctcgtccctaggtcagggtagtacaaactacggcaagagccagcgacgtggtggccatcagaataactacaagccatactgaggcggcagcaggagcgaccaactgatcgcacacatgctttgtttggatatggagtgaacacaattatgtaccaaatttaacttggcaaactttctattgcctgtcccatgtgcatcttatttaaaatttcccccatggaaatcactctcctgttgactatttccagagctctaggtgtttaggcagcgtgtggtgtctgagaggccatagcgccatcatgggctgatttttattaccaggtcccccagaagcaggtgggaggctctgcttcctgctgccgctctgcagcctggacctgtggaccctggttgtaaagagtaaattgtatcttaggaaaccagtgtcacctttttttcaccttttaattttatattatttgcgtcatacatttcctgtaacggaagtgttaattttactgtactttttggtaccttttgggaatctaatgtattgtaaggtattttacacgtgtcctgattttgccacaacctggatattgaagctatccaagcttttgaaataaaatttaaaaacccccaagcctgggtgagtgtgggatatgctgtgtgagacctcttgctcagggtcgagggaggcggggggggggtgccaggtgccctggacttggggctttctcctgcagcaggctcttccagctgcaggcccagttgtgggggtatcctttaaggactgccctgcctagggctgagccccccttcaaagaaaggaatgagaggcctatggggagtgaggatggggcagtgatgagggcttacatccccagcaggcatgtcccctcctgggacaccttggaacaccaaccttcttggctgatgaatgaaaaaatgggattctttacacactagggcagtgccagggccgtctgaattggggcacaatag

SEQ ID NO: 14866 - DNA, 1142 bp, Homo sapiens
gtagaaaacgcaagtattttcaccataaccagctagattgggatgaacacagttctgctggtagatatgttaggagacgctgcaaaccgttgaaggtaaaagaaaaaagattaaaggttaaataaaccacgtgtttgcactattaataattttttttaaaacaaaaacatttctcccccaggaatttatgctttgtcatgatgaagaacatgagaaactgtttgacctggttcgaagaatgttagaatatgatccaactcaaagaattaccttggatgaagcattgcagcatcctttctttgacttattaaaaaagaaatgaaatgggaatcagtggtcttactatatacttctctagaagagattacttaagactgtgtcagtcaactaaacattctaatatttttgtaaacattaaattattttgtacagttaagtgtaaatattgtatgttttgtatcaatagcataattaacttgttaagcaagtatggtcttgataatgcattagaaaaattaaaattaatttttctttttgaaattaccatttttaaatacctttgaaatatcctttgtgtccagtgataaatgtgattgatcttgccttttgtacatggaggtcacctctgaagtgattttttttgagtaaaaggaaatcttgactactttatattcttaaaggaatattctttatatacttcaaatttagaacttaactttaaaagtttttcttctgtaattgttgaacgggtgattattattaactctagataagcaggtactagaaaccaaaactcagaaaatgtttactgttagaattctattaaattttaagtgttgtattctttttcattgggtgatgtcagggtgataaccagacattcatggaaaggcatgcagtttgtccattgtgacagtttgtttaataaaaccacatacacactttatttaagattaaaatctaactggaaagtcagcttggaaaatggacatttccaagtatgtttggtgagtcacagatataaaaatagaaattctgatgagaggtttcagtttttaataccaagtccttaggagtcttaacattggccagcatctgtttatcaaatgacataaatacgtaaacctataagaattaagttt

SEQ ID NO: 14867 - DNA, 1216 bp, Homo sapiens
gactcacaactatattcttttttcttatgagtccctaattatgcctgcttttgttataattgtacttaaatccttaaagctagctgaggtccagatagtgtaattgcttttggaggcttcacatataaggttgccttcttattacacatattttaggaattaattattttatggaaagttatatatgaagagtttattattaagcattcctttcatcagtttaaatgtttaattcctcccaggcgtttttcctccaattttatatttgatttttcattcaattcacagttggtatcattaaaaaaaattctaatacaattagctagaccttctgagaaaaatgttagaattaaactcaagcagtcagtatagtatatttcttaaccgactggttttagcttatcagaaagtaattattttatgtatttaaatacatttacaaagaaaatgaggcttttaaacagacctcactatttaacattgtacccagtagtggtgagcatgcttagtacccaaattttggtttctaaatgccattccccactaaaaggaaccagggttccttggagaaatggctgattccatgtttggagcaggggaagtgggtggtgtggctaaaatactttttattaagaaaataaaataaaaagcaagatagtatttgaagactaatggggtaatgtcagaagggaacaggcgccaagttgaaggtattctcactggccaaatttaggacaacttagaataatcactcttactggtgataatactaagaaggaaaagaagttcataatgatgaaagtagagaaaaaagaaaactctatacaattatttgaagaatgtcttcttttaaatgtacatggaatgatagatttggaaaaattaccattttacaacccttaatgtaattaaatctggcaaaaatcgatggtaaaacccattaagtggaaaaaattttaaggaactttgtttacaaggtgtcagaacatcacagatatctattgcaaaagaattgcctttacagtgagatttggctatcaaactgcatttcactacttctggaataagccagcattatgtggctcttgatgggatgcggtatgaagcatgtgtgatcatccttgatgtactgccgaaaatgtttacctcaaatttaattaaatcttttgtctagacttatcttcctgtttaaagaaatacaggaatagaggaacaa

SEQ ID NO: 14868 - DNA, 1200 bp, Homo sapiens
cgccttggccttccaaagtgctgggattacaggcatgagccaccacacccagcctatgaacttaacttttcaaatatctattgacttattctcattcttcttttttttgtttttttttggtggggggatggagtcttgccctgtcgcccaggctggagtgcaatggcacgatcttggctcactgcaagctctgcctcccgggttcacgccattctcctgcctcagcctcccaagtagctgggactacaggcgcccaccaccacgcccagctaattgtttgtgtttttagtagagacggggtttcaccatgttagccaggatggtctcgatcgcctgacctcgtgatccgcccgcctcggcctcccaaagtgctgggattacaggcgtgagccaatgcgcccagccaagttttaacctttttctaccatgcttaaaaaataaaaattaccttacattttttaaaattgtggtatattttgaaatacttcataattagcttgctttccataagcaaacaattcctcttggtgtccttgtttgatacagataacaaaacaggataccaaagttgagctggagacttacaagcaaactcggcaaggtctggatgaaatgtacagtgatgtgtggaagcagctaaaagaggagaagaaagtccggttggtgagtgtgcaagaccgagtgtctttagaaagagtttccccgtagtgttaattctgtcaacacttttcatagacatgcttcaccatcctgatggtcatagaaagtcagaagctgttcattaaaaaaattttttttaagtctatggttacaactcagttgtgcattgtcactcatattttttcccattttataaatattttttgtttgtttgggttttttttcaagacggagtctcactctgttgtccaggctggagtgcgatggcgcgatcttggcccactgcaaactctgcctcctgggttcaagcagttctctgcctcagcctcccgagtagctgggattgcaggcacccgccaccacacccggctaattttttggtttttggttttttttttgagacggagtttcactcttgtcgcccaggctagagtgcagtggtgtgatctcggctcactgcaacgtctgcctcccaggttcaagcaattctcctgcctcagcctccagagtagctgggactacaggcatacgccaccatgc

SEQ ID NO: 14869 - DNA, 1316 bp, Homo sapiens
catgttgatcctgaagaatccgttaaaatggtagcacaagagtctggcaagttggtactgcagagaaaaggggttaattgaggcttgtttggagtcgggattcccctttcccaaacatgcgtctcgccacttggacagcagccatttgtactcgtatactttttaaactttttcttggaatactatattttatttgactggtagtctgatattactcctaacttgtcaaattgatctctttgcaggtaaccaaggagcagtgaacagcagctactacagtagtggaagccgtgcatctatgggcgtgaacggaatgggagggttgtctagcatgtccagtatgagtggtggatggggaatgtaattgatcgatcctgatcactgactcttggtcaaccttttttttttttttttttttttctttaagaaaacttcagtttaacagtttctgcaatacaagcttgtgatttatgcttactctaagtggaaatcaggattgttatgaagacttaaggcccagtatttttgaatacaatactcatctaggatgtaacagtgaagctgagtaaactataactgttaaacttaagttccagcttttctcaagttagttataggatgtacttaagcagtaagcgtatttaggtaaaagcagttgaattatgttaaatgttgccctttgccacgttaaattgaacactgttttggatgcatgttgaaagacatgcttttatttttttgtaaaacaatataggagctgtgtctactattaaaagtgaaacattttggcatgtttgttaattctagtttcatttaataacctgtaaggcacgtaagtttaagctttttttttttttaagttaatgggaaaaatttgagacgcaataccaatacttaggattttggtcttggtgtttgtatgaaattctgaggccttgatttaaatctttcattgtattgtgatttccttttaggtatattgcgctaagtgaaacttgtcaaataaatcctccttttaaaaactgcactctgtcttgtctgtgcttcagtgtcatgtggactgagtcttggtgctctgtgcccacctggggcctagggccacatctctggcttggcagttgaggctgttgcgtagatgtcttcagtcttccctccagtgcaactgaaggtaaactcgtctttggggccctggtggaagggctgtatgtcatttggctgcacaggacctgatctgaactgcctgtaactcattaagcacttgcacaaaacaaagggggaggcgccagtgccctcactgcatgcctgcatgtctttga

SEQ ID NO: 14870 - DNA, 1471 bp, Homo sapiens
gggttctgctcacgcccgtaggggcccgcgttcgctgcaacgggcccttcctgatggccgatcgtcggactcctaccccttttgccggctgccgtttgccccgtcagcgaagggcgcgcgatgcgtcccaagtctcggctccaggaaccagacgggtgagggctactgggggttgggttggaacgccccgaaggcaccacagcaaccgacgcgggaacgcctgttaaaccagccccgccccgagacgcgcgcgcccggcggtctcgatccagcgtggcccgcccctcacctcccgcccaaccaacagccacttcctgcctcactcccggccaatcttcacactccacgaagaatagccgtagggggcgtatgggacggtgcgtagagcgatgcccacgccggccaaccggatgtcggggcttgcgcgggagggcgggacttggcgccggctgtggctactcaggggccaggggcgggcacagggccgggcttcgtgcggtggggctcgctcgcgcggcagcggtggccgaggcctcttggttctgcggcacgtgacggtcgggccgcctccgcctctctctttactgcggcgcggggcaaggtgtgcgggcgggaaggggcacgggcacccccgcggtccccgggaggctagaggtgagaggggagacctgagcgcgtcctcgggcctgtgaggacctcggggggctgggagcgcctctgcggctgaggggtcgggcgtggccggcgactgaggggtcgggctggctcttgagggcccaggccctggccgacgcgcccgccgtgagcgaggaggcccgaatccgggcgtctttggttgggttgcgggcccaggccgcgccgccggggtcgggaggcgtggcaggtggcccgacagccttctttgacctctgggaaagctgacttattcctatggctttgcttctagggctttcttaggcctctttgccggctgcctgggcagccgcgaggtgggctggagtaactgggtaaaagtatagggtggaatcgggcctactaggtacccctagtagtagggaagggtggtattagaccgagagggaatgtttacaactagcgttacagtttaatatttgaaaatccaaagcggagactggaccctagttccctgaagagaaaggggaatgtaccagaaggagaacacgcagtggttgagaaacttagcagttacagcacctattctggaggcgagtaatccagttggagagggacagggcgttaaaagcaggaaagcccccgaaagctcatctaagtgcatctctttccacaccggaggcctggaggtatgaaatgactggcccaaggtcatgcgattagtgtactgatggtgctgggattatagttcagggatagaccgtgcagtggttaacgctaaggccctggctcgagtctttgattggtcattggttgctctgtgaacttcggcagtttt

SEQ ID NO: 14871 - DNA, 1220 bp, Homo sapiens
gtcacttttgctttcagagtcactgctgctgtaataatccttgtacatgtctgggtgtatgttgtgagtatttctctaggtagttatctagaagtgaattgctggttgatgatcatgtgcgttttattttaaatcaccactgaagaagtacgtactgacttatgctcccactctcattagcagttgctaagagtggaggctgttgaatgggccaggaacttgaggggttggtttggaccaaggtcatgggtgacagtagaaattggaagtagttggaatcctgcagtcttagaggcagagtgcgtaaaataatctgtagcatttgttatttattttcctgttgcttatttcaagtttcatgaagttggcatttctctccattgttcatgcaaaatttctcttacggtagattcaccataaacttttgttgatcattatctgaaatgattttctgaaacatttttttttctagggaatctggaaacccaggaaaataccaaatccagatttctttgaagatctggaacctttcagaatgactccttttagtgctattggtttggagctgtggtccatgacctctgacattttttttgacaactttatcatttgtgctgatcgaagaatagttgatgattgggccaatgatggatggggcctgaagaaagctgctgatggggctgctgaggttcgtgtttgctgcttgtgcatttgtgtctgttattgtaaggagctgttattttgtgaaagtctgtgttaaggttttttttcttcatttggcaatattggcataaaaagtataaccatatgcctgcaaaagacacaatattgggttttggggcatgatttcattagtctaatgtagtggctttagagtctgtttgtgttcagggttttttttttattatttgtctgggtatatatttcgaaatttgtcatttaggctatattttaatacactcttatatgttgaatctcggtttacactacatacagaattttcaaacaactggtcatgtggccgatttaagaattggagagccagggatactgagataagaaattcactggatcctgaggttaagggagccttttgcaggtgatgtagaagccagcttttgcacctatgagagtgaaatcatcttgattataaggagagcaagaggatggaggctttctctaatttcttttttacattttatgagcattttctctgaaaa

SEQ ID NO: 14872 - DNA, 1085 bp, Homo sapiens
ccacagccttattgttagtttttcttgtttagcctttttttttttgcatgctatcataaaaaaagaaagtcttattttggactctacttctgctaaatgaggattatgcttcatctggcattcatagcactttgtaactggatcccaagttccttttccagcctcagcctctgccactattctgtgtatcggtgcctcagtcaccttgacttttttgacctttattttcctgcctggcccttttgtttttattgttctaccttgaaacacacaagcacatgtgcatacacacacgtacatacacgctcttcagggtaggaattacatcctattcgtttctgtatatctatccctgtatacagcctggaacagaactttgcctgtaggcattcaggaattatataacataatacatgaacatgtaaacaaaattgtactttggggaacatttcagaaacagaccagtggtatggagtataagaaaactgatgcacctcaaccggatgtgaaggaagaggaagaagagaaggaagaggaaaaggacaagggagatgaggaggaggaaggagaagagaaacttggtaagaaacagagtccagaaaatctgctttaagccaagaccctacgatgttgttaaacctttacagtcaagttaaggattgtttttagccaggcgtggtggctcaagcctgtaatcctagcactttgggaggttgaagcaggaaaatcacttgagcccaggagtttaaggctgtagtcagccaggatagtgccactgcactccagctgagcaacagagtgagaccctgtctctctctctctctcttttttattttttaagacaaggtcccactctgtcactcaggttggagtacagtggcacagtcacagttcactgcagccttgaccttataggttcaagtgatcctcctacctcagcacccctccaagtagctgggaccacaggcatgcgctaccatgctcagctgtttgtttgtttgtttgtttattgatttatttatttgatatggtctggccctgttgcccaggctggagtgcagtggtgtgatctcggttcactgcag

SEQ ID NO: 14873 - DNA, 2633 bp, Homo sapiens
aatggggctagtgtgccataggccagtagattgtttgggattaagcaagattaagaaatcacagtgtctgatccttttttaagaaaatgtttatgggttagattgagaaaagtgtatgtttatagaaaacaataaagactaaactgaattagagtaggcataattccaccacctctgagacaaccattcttcttggtgcattttcttctcatcattttcctcatttttttcctcaaataagttaccctcagtctggctgatcttgaaaatatggtgaacttttattattttttaaatgtgctaattataatgaatttcttttcaatcaataggaggatgaaattttgaacagatcaccaagaaacagaaagccacgaagagagtgaaacaatcttaagagcttgatctgtgatttcttctccctcctcccctgcaagagtggtcctaggagaggacctggcacaccttaggttgacattcagaaaacttcaagacatcaccatcagcaggctccagttgaacactagtctgtgtaactttaaacatctagcagtaaatacttgcagttgtgatataaaggaccctgtttctgtagaaaagaaaacatttaacataatggttgtgaaatgtaacatgaagcaaactaacttttttttttttaacatctttgtttttaaaatagaatgatagaactttgccagtctttaagatcttggcttaatttaatgtattaatctgtttgtgcaaacataataccaccatttaaaaatgttagggagatgagttgcagtttttataatagattttttttaaagtttggtattgtaaaacattcacacctctgtccctcaaaattgataattacgtttaaagtgcagtcatttgtggttagaatcttgttttgtttgcttccattattgagttcctcctaaggaaattgaggagagggactgaatagaagcccaaattcatataaaagttgcgtttaagttgtattaaaaatagatatataagaaaaaattctttcacttgatgtttgttagaccagaaagtgtgtgtgttctgtagctcagttcccagacagctttttaggtagtggaggaggtggcttcatgtggcacttgggcatttatattccacttgggagggtcaggctgtggccttctggagcaggtggcttgttaaggaatgctagcagggcatggcacgtgagctccggaatagatgtcttcatcacttcttccactgtgtgttgacactgttttccttacctatttcctcagatccccagctttctcctctgctatgcattttcttcacagtgcagcttgcagtccgttgctgaaaatgattataagccctgcataatgttaagctttattgtgattacgtgtatgtttcttctttcttttaagcagacccatacctttccagggtcaaagtacagaatagaatacattgatacaaagtacagaaaaatactttgatttttatccatttcttttactctgtgtaaagacttgagaagtctaattcacaggcaaaccaatacagaattgactgcagttgaacagactagaagtatttgtgggaggagtgacatgaagcatgagttatctgattttttttgtagctgctatatattttaagccttcatttgcaattcatgtaacagttgtgtcataaattacacaataaagcagtcctgttcaaatttttttttaacgtggcttgtagaatttttaaaaaagtgatcttaggtttgttttttcatgcgggatgcagatgggtgctatcagagcctctcccacaccactatagtgtaataatgttattattactctacactgaaacgtattcagagttagatattattttagcttcagttgttctttagaggctttcaaatgtaccgatgatactgtttcttgcactgaatatataaacactccacagtgtttatattgggaagatattgggaaggaaatatatttgtaaaagatgaaggctgtatctatttttttttctttttaaagtttgttcacttaaattcttttgaggatgggatgtatttttcttgctgttcagtgctttttccttttcatctgttgttctgtggtcacagtgaccttagctacatagcagactttcccaaatgtattgattacaaataaacagttgttacttagcaagacctgaaaatatgtctgcaggtttctccttgaagcaaatgtgtgggatcattgcatttccagaaatctgcctccttcaccctccgttgacagtatatgtcatgcctcactttcttctagctgagctttaaatcattagagcttaaattgtcagatcgttcattgcctttccagggttatttagtaaagtttgttgaaaacaaaaacgccttttcttggttcttttttcagttattttgaaggtccagcatcctgattaaatgtctgacacattaatgaatgaccagcagcagctttcagctcttaaaaagacacttatattttgattttacatgctggttacctgttccattgttgtcaaatgcccactctccatcagatgtgttcctccattttcttatccacaaagtactcctcacttttcaatttgtcatgttacta

SEQ ID NO: 14874 - DNA, 1931 bp, Homo sapiens
ccaggaatcccttcctcccatgtcctggcagcaggaccccaggctacatatggaaggtagagatgtgggggtcctgtatcctggagtattatgtctccccaccttctgcagttttctctgaacatgtatgttgcccatggtgggagcgtggtcactgtgcagttgtgcacagatgtctttcctttaccgttggcctttctgtctgcctctccttcctctctgcagcccaaatggaaaacaattatttactccattggagggaaaggaagagtcttagaattcctaagggaaccttagcataaaggttttggggaaggaggccgtaggccggcccggaggaagcaattccacttggtttgacaacttctgccactcccatgtcagatgacttgcacttcttaaagagattgctttataacactaagacatcctttctaaagattcaagtggacttgactaagctgagggtccacgaaatagaatatgacatgtgagctgtttttggaaaacgaagatggagagagcacttccccgtaacgaaagcaaagtggtaagcacagggtgagacccttttacacagaatggtggagagaaaagagaatgctgaaaagtggctcagatgcagagtgttctgtggagaaactgcagccccacttctgtttccctggagtctcccaatggatcattcaggagtgtcctatgtgagaattgagccaaggaaaatactcatgcaaccagcctgagtcgcggtgaggggacgagaggttgtacacacattggtagttattttgcaccagcagtgcctttctcactgggggtacttggaccctcagatcttcttttctaatagccatttgccaccccaagtggtatgtcggccatttctccttaaaacaccttccctacctttcccatgtactcagtttagctctcaaagaaggggtgaatcataaagccagtgaaaatttcaccctctgagggagttccccaatctgaaggggaagagggtgacctcagcggcttttctcccaaaaatcggctgaaggctggttgtggatccttgttcctctcctgaccccatctggctgctgccccgtctcccacccctgtccccggggctcgctggccctgcactccgccttagtcctggggccggcgacacagtgggggctcctcacttgctgcagtgtcatagcaataaaatgtgattcttggggtccccccagggagctgcccatggctttatttatgaacctggttttcgggagtcaggggaggagatgactttgcttctgtgcacagccccgtcttccaggagccacaactcagaagaaaagggtgctcagacttttgttatacacatttgctttgtgtaaataaatgtttacaattttatatgaaagatggaataagcgctagagcttccaactgtatattttttacttttatagattttaaaactatgatcctttatatgtgtgttttgggggagctatgataagttttatggcaaacggttggtattgttaactttttattgtcatcaaaagttcataaaagtcctattaatccccatattcttctactgcccttaactctggtatacaccaaaaagaaatctttactttccttgttttatcattataaaaataaagtattttgctagtatggaaacaacctttgtatttgacgtcacctggggtctgctggcagaagtttggggattggttttcttttgtaatttagctgcttgcttttcttggttttttaattttttctttttaaagaaatgcttgtcgagtcatagatttagctgctttcttattgcacattgttgggtgggagctggtttggttgaagcctcagaggagcttctgttatctgctgatagatactaaattagagctagcatcaccctgagaaagcaggct

SEQ ID NO: 14875 - DNA, 1295 bp, Homo sapiens
cgtcgcccgcccccagcttcggtcccgctccccaggagccccgcccgcccgcgatctttccccggccccgccccgctccccgcccggccctcacctgagctgcgcggagcgcgcgtagccctggaagtagcggaggcgcgcgaacaggtagaccaggccgcacagggccgccgcccctgcgagaggtacgcacgggcctggtgagcgccctgcgcgggtcccgggggtccagcgcgtgcgcccctgccccacaccccgaccttcatgaaagaagatgccggcgacccagagcgtggcgaggaacagcgggaagtactcgctgcagttcaccctgcggtgggcgggtgggatgagcgcgccggccgggatggtcctgcgacccggacccgcctggggctcgctccccgccccgcgccctcccgccgcgcctcactgggctcggtagacgcgctcgaactcgggtgggccggtggtgagcggcggcgacacgcggaaggccctgcgcgccgagatcacctgcagggagaagtaggctgggggaggagggggagcgggagtcaggtctggacacccgaagccccagagatgggagtgggagggatcctgcaatctggcccttcacttggccgtgtcctctcctccctaaggcggaaccccgccccctccccgcccgaggagacctctcgtctcacccatccctggcctgccctgtgtccctgacattcagcgaggagggcagggctgaagcctggggcgcagagaggccctgtcccaacctgtgagtgtatgggggagggtgagtgattcaggcacagggacacctgctccgcgagagagaccacttgagtccttgtttctgaatcatttcactctcaaaacacaggcaaatgcagctttcaggtccctggccaggaagtgcctcgggagtctgagggcagagctggctgcatcctcccaggtgcaaggaagcacactccctgtagctaacagtccctggtcacccacctaccagcgcccaccagcagggccctctgaccctgcctcaggccgggatcactaaagcctgcgtccctgtgcctccaaacctcagtttctctgttcctgcattccggtcccaggcctaaatctgacagacaccttctctcctgctcccaggaggttgcagctgggactctcctagcctaaccccaggaccccagggctggggtagttgcagagggtgggctggccctaaagtttctctgtgggcaggagcccttctcttggtcaggtgaggccaggccagaccacacaca

SEQ ID NO: 14876 - DNA, 1127 bp, Homo sapiens
ctgattctaaggtccccaggagatggatcacctgatgacatgagaatgtcttgtttttggaaagcctggtcatgcaatttagcagaaggtttgcggtgaggtggaaggcatttatttgctttgtcttgctaaccctcaaaatcaaagcctgtcccagcctgacagcttccagcagaaagtgtcagaaccagaggcccagccaaggcccaggcagggcaggcggtcctcctgggccctggcattgttcttacacatggagggcatggccatcttctctttcagggacaggctggcctgacatggaaggtgaaacaaggcagcagcccctgcctccaggagaactctgcagactgcagtgccggggagctgaggggtcctgggaaggagctatggagtcccatccagcaggttacagccacatcctctaaatgggcgcaatttgtcctgccacctagaaaaagttcacatgtggacagtgagcagccaaggtctcttcagagggaccccaggccagctggtccagcacaggctaagcaagggacccccagagcacaggcctcaagagaaggcctcagcaggcccactgccgctgtccagcttcctcgggccacacaccccgtcacatctgggtctgagaggccttgcgggaagacctcatgggacgcaaggactccctgggcagagggtgggcccctggtcctggaggcacagaatcctcgacccacacgactatgtgacctctttataactggggaagacttcgatgatgatgtgtgatctgggactggcaggttattaatcgagatacacttgttaggagggacagggttcccctaaggcacttttaaagatactctgtaagaaccattaacaataaacttactgtcaatcatttctctctatgcaaacgtcattggttaaagtgctgatgccatttaattagattgtttacaaatttaacaggatggctacaaagagatcttattttaaaagcagctgatggtttggaaatgagagaactacagtggtgaagagaccaggaggcagctctcagtgaaaccaacattgcggatgcccttcgtgagccttctcagtcccagcaggaagcccacaacactggcctcccc

SEQ ID NO: 14877 - DNA, 1305 bp, Homo sapiens
taggctaagagtaacagcgggaataaatctatatttctgatagtcttcatgatattttctagttttttgactttcttttccaaatctgattggtggtgatggtttgtttgtttttttgtttttgtttttgtttttttttaagacccagtttcgctctgtcgcccaggccagagtacggtgacaccatctcagctcactgcaacctctgcctcccgggttcaagcaattctcctgcctcagcctcccgagtagctgggattaaaggtgcccaccaccatgcctggctaatttttgtatttttagtagagacagggtttcaccctgttggccagggtggtcttgaactcctgacctcagatgatccacccacctcagcctcccaaagtgagaggattacagccatgagccacgcaccagttgtaatggtgatggttgttttttaaccctttatagtagctaaaaagagagaagtatcagctctaccagtttatttttgctggggtttttaaaaaaaggcatttgtccatttgatgagggacaatttagtaaaaagtggatcatttcgtctgtaaatcctgtaactgagtagtgtatggctattatactgttggcagtattatctgaaaacaaacggatgaatgagagagtcactaccatccctgttgcatttcagaaatccctctctttatttaggacaactggtataccacatgagacagacagacacacagacacatacgcgtgcgcgcgcgcacacacacacacacacgcacacacacacaaagtcatctgacattcaggttgaggaaagcagccagtgttaatccttaattaaatgccagtaaaacttaacttacttctagctgggcatggtggctcagagtgactccttctcaaagaaaaaaaaaattgcattttttgtttgtttgctgtttttttttgttttttttttttttttttttttttttttttttgagacagaacctcactctgttgcccaggctggagtatagtggctcgatctcagggcctggctaatttttgtatttttagtagagatgggttttcaccatgttggcctcaaattcctggcctcatgagatctgcccgccttggccacccaaagtgctgggattacaggtgtgagccaccactcctggccaaaatttatttcttgttaccaataaccagcagagtaattttttaaaaactcaaatacatttaggaacacccatagataaaagatcaataaaacaaaaattaagtcagttgtagttctatatgccagtaacaaacaattagaaa

SEQ ID NO: 14878 - DNA, 3329 bp, Homo sapiens
cttttgtgatactgcattttcagataaatatagctgtgtccttttgatgtctgcttgaaagcagcaggtattttttaagtagctaacatgattatacatggccacatatatgtttagctactgagaaaaaaagaagaatcttgcaaggaaagacataggaatatgggactcttggcccaaagaaagactcaaggaaaagttcagaaagtccagctgactgacttcttgtctatactcatagttaggattgggaaactgcaaaaggacagagccgagaaatggcctgcagtctcgctgcctggatttgcagcaatgtcgtgcctcagattttattatatttggttttcttagcacagatgcagcagtaagtagcaacgccactccttctcagtcttcatcgatcaatgacatttcatccatgtccactgagcagacgctggcctcagacacagacagcagtcttgatgcctcgacgggaccccttgaaggctgtcgatgataggttagaaatagcaaacctgtcagcattgaaggaactctcacctccgtgggcctgaaatgcttgggagttgatggaaccaaatagaaaaactccatgttctgcatgtaagaaacacaatgccttgccctactcagacctgataggattgcctgcttagatgataaaatgaggcagaatatgtctgaagaaaaaaattgcaagccacacttctagagattttgttcaagatcatttcaggtgagcagttagagtaggtgaatttgtttcaaattgtactagtgacagtttctcatcatctgtaactgttgagatgtatgtgcatgtgaccacaaatgcttgcttggacttgcccatctagcactttggaaatcagtatttaaatgccaaataatcttccaggtagtgctgcttctgaagttatctcttaatcctcttaagtaatttggtgtctgtccagaaaaagtcgatttatgtgtattaattggccatcatgatgttatcatatcttattcccttttatgctatgatttattctatcttttgtatttcagaagacatataattaaatctatttaataaataaaaatatatagcttttcttagatttgtgatgtttggggctgagaattatcacggctaaaaccaagacacttatgtggacatcttgttttctttaaactgtcttgtctgggatgattgtacattcagctttactgcacgatacaattttaagttttgcttagtgctgcttgaaatcctagctaccttatctcttttcttcttggtcttctagacttcttatgaatttaaaatgctacctagaacttcaccttctttattaggtgcgtaacactccatcttaattaaatatgatggcagataggttcctgcatccatggcctaacgttggagtggaattttacaaaatgctcactagagatcactgcagtcatttcctaagtgcttcctttgccacagactggcctgggtcctttatttaccttccctcattcactttccctcggccaataccacgttcttgattttctttcttcactggaagaaagcagataaactcctctttggtctgttttcagaggccaggctgattcagatgcctgttgctattgttgctctccattgttgggaggcattccttttcacaagaatgttctgggaaactcttcagaggacgtgaaggaaataccctgaagagtcatgattaactattgactattttctgatttaaaactgctcacctgaaattgatacttttagactttacgatcagtaaattattcagaattcatgaagatgctgagtatgttaagtgtcactgcaggaacggagctgtggtgatcacgttttgcctgcctgtgcccatgtctcttcccttgagcttattctgttgctgattcatatcttgtgttcaattattttggaagcttttcagtcgacattctgtagagtgtgttctgaggaggaactgtgataagaaagtttattataaatattatgtaaaatatatggctctctctgcaccagttatatcttattggttggtcatatcactggaaactggaacctttgattagcaaaattaatattgaaataagaaatagttcttttatattgtgtcatttggacactttcaagtacaaaatggtaataataacttggattgaggcggaaacacctattttatggctatctatctaaacatcttaaaatggccttctctgtaatacactttcttttaaaagacttcactaaatctatctttaaaaggaaaaacaaaagggagaggttgaaaatgcgcgagctgccctgcactgtgtgatgctccctccccgggagacgtggacgggggacgaggcacccgcagacgcccttctgctcactcgctcctctgtgcattcagcgagccacttgccacagatggagcccgtgacggtgtggagggtttcctggaaaggccatcttccaccaggtagaggcgagcgtgcctaggacaggccacagggctccacagaaatacctcaccccagcttcagggttctctctcctgagcctagatttgccagggtcttggtgccacgcaaatggtttcaaactgatctctatggataaatgctgatgttggttaaagaactgaaaaatgtgctcaactgtttcatcttttctattttatttttgtaatttatattgtacacaacccaggaagtaactattttggacatgtatttttataaaccaggtaatttactattatcctggaatttagactaggtttgtttcatttgttgacttagtttccagccaagaaggaaacgactgtctcccccatgtccaggtctcagtttcaagggcagagtccagagagcagacagagttctgtgagagcaggagagcagtctggaaaccctggctgtgcataccgtgtcagccgtgggcctggagatgggagcaggtgagacgcagagccccagtactgagaggaggaagccctcttacagggccccttgcccaccccaagtccgtgtctgaaacacggagcgggtgctgcttcaacccgcatttaatgctgtgtaagtagcgataaccacgtacgagtctgtctggttgatttctaatgtgactcctctggtatttcctcctggtaataaatacaagtgtgacctttcagattgcatatctcaaaagtaacattgctaatgttttataataaaatatattatgtgtgttttggttggtgaaaataatacagactacattttaaaagataaatgtatagcatgtccaatttttgtgtgtttttacatggcaa

SEQ ID NO: 14879 - DNA, 1856 bp, Homo sapiens
ccaaagtgctgggattacaggtgtgagccaccgcacccggcccagtagaagcgtacttatgaaccattcctacctttccttcccactccaccctaaacaaataagtcccatggaattcatatatattcttgcaagaaaagttaatttttaacagtacacaccaagttacctgtgtttaaaagcatgaaccttattctttaaatcatgttaacagatcatgacacacatcaggtgcacagtaaatgtttattgagggactaaaccttatacggttaaatgaggcttctggactaaggaatctgcctccaagacgcaggtctctaggttggtgaccatggtgaacatctgtctcttgtttttaagtactctgaaaattgtctgtgagaggtagcatgttgctgagatctttggggtcctgaacagtcactttctttcattttaggttgacttccccagaaatctggccaagtctgtaactgtggaatgaggctgagaccgtgacaagaccatcaccacctttcatctgattccagacctgtcccaacagcagggatgctacatgggaagagaagtggacatcccacatgttctgcgtgctcctgtagagcttgacagcttccacgtgccttctacccaagtgcttttgcttacagcagatactgtttctctgtgtcctgaagtcgccagaggagaagggaatcattgtttacacatggggatcagagcagacttctccactactgtgcaatagagatacagctctcttcagagtaactgtgaaccttttataaccaacactagagttagttttaaaagacaagatatttataatgacgactgtatagcttttaagttatttttctagtatgtggctttctgtagccgtggtaacggccaaactgttcatcctagctacccatgctctgtgtccaggcttgctcctggcaggtggcattcatctcagatgtgagcacaaggcattggccctctggactcctttctccttttctttcctctctaggctgctcctgaatcctgttctctgacatccgtggagcccctcctgcatccacctatgcctcctataagtccagttgaaatctcagcctccttcaacattttcttctcgtgtgtggcccacatccctccacttctccaacttctgtttaatctgatcacggctctttttaagccctggcagcattttggtccctgctccttgcccatagtaaaacagcttgaaatatcccatgcaagagagtagtttcaagtgggcaactctgctctctatttaaaagcgtgcacaatcaaaagtactatgcaattttaggacaataaagaacatacagtttttttgtgtgtgtttgcattttgttaacctcattctttttgtgtactttgaattttgaggactgtgcaggagctcggcagtgtttggaggggcagccctgtttgttagtaacattggcctcgtccacacctgagacctatgggtttctagtaggaaaaggagggctgttgtccaggatacaacaaatccaagagatttgggactcagcagaggggccactgaacctggaaggggttgggcagaacctgtagacagcatagaggggtgaaactctcaaatttgtatttttttcccaataaggctattatagtccctggtttcattaatacaatcagatggaaagattgaaagccagagagttctgaagttttgtgaagtcagaacttaggcttcctacgtaagtgctgtcacacacaacctgaatgatgtcttcatgacaacgggtgtgtgtagccctagtatctcataaaccctgtccaggattacctatgggctactcagcaaa

SEQ ID NO: 14880 - DNA, 1152 bp, Homo sapiens
gaaaattactgaacttcaggggagagtgggaatccttggattcatagtcagttgctcagatgtgtgggtggacccctggcttgcaacaggtgcctgaatcgagggcagtcttatggaaagctgtgcccctgccctatgagacctgacctaactccaggtagttcccatcggagctgcttggccgcagaacctggggaaaccctgccccagggatgtccaccaggagtacctcccctgagctccaggctaggatctggtgctgctcacagcagtgtgggtccctgggccccaccaaagagctgtgtgggacagctgcgggctgaccagctcctttccaagtgtgtgcactccccacaggcggcccgggggagggtgtgtggtcacagccactcactggccagaccatccatcactggtactggcagacagtggtgaggtgggcatgcatggggaaaagcaggagagagctggcccagtccagtggagagccctcacctggcgggccgtgacttgctgcagggcgttctggcatttggcgaagcaaggatccttcataatgaccatgatgacgggcatctgcttgtcaatcagtgccaggggcccgtgcttcagctccccagccaggatgccttctgagtgcatgtaggttatctctttaattttctggaaacaggaggtgagatcagagtcacactgggcagatggggctggagcagatcagccagaggggaagaaggggaaccaggggaaggatgactctggaaggcagagagccaagggttgcaaggcagacagatgcctggagtgcttgacagcactgaggacacccagcaagggcctggggagaggcctggctaccatccagagcatgcaccagcccgggacacaacctctgtgtccccacaccagccccgggcactgctgttgtctctctccagtcccacgcacagccaccccttaggacaaacaagtcggagtcagcctagctcaccccctgctcctccctagccagccacgtgtataacgacagcatcgtattcagcttagctacaccttcagttaattatctgattaagcatttgcccattaataacttctaaagagtggttccaagcaaaatcacacaaactggggtgttatttgaattaattt

SEQ ID NO: 14881 - DNA, 1151 bp, Homo sapiens
aacagttggaactggagaaatttaatgtgaagtatagaaaaaatggaaataggacttaacgattgtcttaaatctaagaaagagggtttagatgtaattttgtgaggctcgatttaggacatccaaactaagaccaaaagtttcagggagacagaattttaaaaatcaagctgtcccaaatagggctatttttgtacaagtagtgaatgccctgtgctggaagcatcagcccaggttgagatgtgtatttctcgggtttgttgtagggcacattcagtcatccggtgggaattttaggtgtcttttctattctgggactctgagagattatttgctttcagacgctgtaagaatatatgggctgatgggcgggttttgtctctttctttgtttcgtttttatctaatgtagccggaaagccacatcttggaacagaaaaacaacttattcttgtggctaacgcccacatgcattgggaccctgaatactctgatgtgaagttggtacaaactatgatgttcctctcagaagtgaagaacattattgataaagcctctcgcaacctcaaatccagtgttttgggagaatttggaactattccacttgtgttatgtgcagatcttaattctttgccagactctggtaagaaaataatgtgattttatgtagaatattttttgacataagatgatttagtaatgttttgtttctgatcattccaaattaagtccaaataaaaattcagtttgtaatggcagctatgagcaggttttaaacatcatgttggggtggaggggccattttgaagatgaaacgatattatggaaacttgaggagaaggatgttaatcatcttgaataaacacataagcaataacgtgaaataactctttaaagaacgtatgtagttccattttattactccaaagtcagagataattatggttattaagacagcctctttgggattccagcgtgtggtaatataatcatagtttaaatttgagttaaaattatagaatctcaattttgcatgtatttataacttgattagaaaaatacacctcaggtggaaaatgagctcctttatttgcacacatatcagtcaagcgattttgacaaagagcaaggatcttgatttttattaaaatg

SEQ ID NO: 14882 - DNA, 2580 bp, Homo sapiens
tgaaaatctgaacataggggagtgaggtatggccactgaggatttttgcttgcttaagaatgatttggactttcaatctgattatttgataaggatatagtatgaaagccaggtgctagcaacagacaaattctgagcccaatatgctttatactgctagacagggattggtgtgtttgcacctgtctttcatttgtcataagagattttcctatttcttctacccaatagaatattttcatgcctggaaataggaaaatgtgtgaacagcgtattctcttcacacagaaatctgtagcactgcttttttgaggccagtagcaacatccagagatcattcttccatactttactccctcctttttcagacttgtttgtaaagtacagaatctgaatttagcctttatgattgtatatgatccacagaagacctgatttatgaaattttgtactaaaatcatttggaaatgattgtattgtaaactgaggctaaatttttttttaaacctgtttcatgtgttataaaggccagcttgtaaaagaagctgcaacagactttctctgctcatgatttgcactcttagggttttgttagcccttttgtactactttctttttaaattgagaacatggttctttacatataaatctgcttcaaccttaggatgttttcagaccagaggcaacttattcatgaatttttatgaaaactatctactaggacagataagctgaacagtgatgatctgtagacatttatggactgaatgtaatggttgatatatgtacattctgatatttttaaatctttaactttttaaagttaaaaacctacagctgcttaggtccagcttcttaactctttttgagacacttcctgtcctatctccactgtgcctgcctaaatttgttctcaccaagcactgcctgtgcatgcagagaaaatctgtgcatcctcttttatatttttaaaatactgtttaacatttgtgagaattttatgaaaatgcttttgtatgagctgtggctttttcccattgtgaagcattgaatatcacattttggaacatgttatagggtgagtccctggatctttgctcaccagatccaagcactgcttctcggtgtcattgcagtgtgctgcttgtcacccagaatactactatcatgtgaattctttttgtcgtcagtgtcttttccttagtctttttgttgttgttgttgttgttgttttaatcattccttttttaagaagaagtaattttccatttatgaagcagtatgaattagatgtattttcaaaacaggtccctaagacaattcttcagatcatttttaaaatgactaagtcattttagtatgtcaagcaagataaaaattacatcataccgtctattttgcccatagtgccatttagagatgaaaaccagctttaactttgcaaagtgaacatgtacatggtctgctctcatttattcattcttctctcaaaagtcaaatgaatgcagagggagcttggtcaaactgcttttgtttcaactgcaggcaggggagcaaaaggacgccatgtgagcattaggaaaaaaaatactcactcttactaacaatttttatacagaaaatgagtcattttggaaatgattcttatgttttttttttttctccttttagaaaattctccaaaaggttttgatgttgaatcttggtcttggacctgttttttcctttgagggttttttgttttttgttttttctaggatttcattgtgatgttttggttttgttttttgctttttgtttaagttgtgctgacaccaaacacatccagtttataatcagtacattggaaagctggtattgatgtagaaccagtgcataactttttatggggttttgttattggtttttttttgtaaagtgtgaataaaaggtatgtttactcatttttcctgaacactgtgttggtaatgtgcatcatgacaatttccagtgaaggtgagctggagctggttggactaatgagactgaggaagcagcttttcctacgatctgcattatgtaatcacaggtccagagagctttatggaagcgggagaggaggagcacttactcatgttgtatttgttaatggaggatgtcatcttttcatagatgctggaactagagtgcacttgttagatgctaaaggtttgagctttacacaaaatgtcttcatctgtatttgttattgtctacaatatatttgaatttggggcagcatattaagatgtaatggcctgttatgtcttgaaaatacttgttttgcctcttccaggcatactgcattctgtggatcagtttgaacagcttctccaccttatttggacagtgataaattgaaccaagagtgtagatttacaagtgtaaccttcaaaagaggaagaactatttggggtctgtaggtaatgaacagtcacaccaaaatagactatgatgcttttgttaagaaaggtttcatgttttagatattttccgtgtcctaaataattttcaataatctataatccctaaaatgcaataaaaactagtatgttttcacgg

SEQ ID NO: 14883 - DNA, 1157 bp, Homo sapiens
cacaccttggcctcccaaagtgctggaattactggcgtgagccactgcgcctggcctactgtattattttaaagcatcagagacaacatatcattgccataaatacctcagtgtgttatctctaaagaaacagactttgtaaaacataaccacaaagcagtcctcacacctggacagattaatgattctttccaatgtctagcattcaaatatccccatctgttgaattggggttcaaaccaggcccacacattgcatttgtttgatttcagtaagtacttgttgagtggtcggggcggggggaagcaaaatctctgggaggcagagcgtgggggttggttgggccttggcgctgggtgctggggggattctagagggaaaggcaggcaggttgcaaagcaaggtcgggcgcggccctgcaaagactgtgccaggggcctggctgcgtggggacatttctccctgtctctgtctgcagtggagctcaccttggatcccgacacggccaacccgcgcctcatcctctctctggatcttaagggcgtgcgcctcggcgagcgggcccaggacctgcccaaccacccctgccgcttcgacaccaacacccgcgtcctggcgtcctgcggcttctcctcgggccggcatcactgggaggtggaggtgggctctaaggacggctgggcctttggcgtggcccgcgagagcgtgcgccgaaagggcctgacgcccttcactcccgaggagggcgtctgggccctgcagctcaacggcggccagtactgggccgtgaccagccccgagcggtcgcccctcagctgcgggcacctgtcgcgcgtgcgggtggccctggacctggaggtgggagccgtgtccttctacgctgtggaggacatgcgccacctctacaccttccgcgtcaacttccaggagcgcgtgttcccgcttttctctgtttgctccacgggcacctacttgcgaatctggccttgaggggcactgctggggagctcctgtctctgggctgccggtgggaggggatgtcgcctccccagagatgcctggtccgtcttgggtctgccctccgtgctcctgacccctgctgcccaagagagcctgctacagacacaaccccgaggcaggagagtgactgtggccaa

SEQ ID NO: 14884 - DNA, 1258 bp, Homo sapiens
gcctccagctcagccttctctcacctactatgtctgtccaacaggtctgcatgggtccctgataatgagaacagctgcctggtcttctctcccagtctgcctagcccagccctgggactggaatttgagtaggggatgaggggaaattgtaatttcattccttaacttccttttccccacccctgctcttcaacctctttatcagttctgaggctggagggtttgggcaaggcaacatccccattccaattccattttctgatgcagattttagctgagggatttggaagccatttggggaggcaggctgggccaaagggtagagctgggtaataaatgtctattctcctggggaggagggattctaaactttccttccgtcctcaatttctacctccatagaccggccagaatttagcttcacttgagagagatctggaatggtcgccatgattgaaaccacgcaccattacatcatcattacattaattacatcaacataaattatttcttcccccttcccttttccagcactcaaccaaggagcaaagctcatcccaccccacacccctcccaggtctgctcactgccaggctcctctcccctttgttcagtggagctggcttttctcccagcccctttccatgcctttcactccatttggcaagctctgagggggagcctggggacgggtttgggtccccaggaggagagccttgggtataatctatttttctaggagcctcttgccttgtcacttgcagctttcgccctctgctttgatggctgaggtgaactcatgttctttgggaaaagggaaggcgtgctgtggaaataaaatgtttatttgcttctcttgtgaggtctgttccttcaggtgagggtgtaactcaggatttcttcctttgccgcccctgcagtgagaagccacacaactgaactggttagttgcagttaaaggcatgctttgcacctgttaccaggcaggctcctatttcaacagggatgtggaccctgctccccattttaatatcttaacctaacttactaactgttcagtctacttagagatgtttgccacacgtagttgaaactgaagccagaaatgcctcatcaccattataaattgaggggagtaggaagtggagggtgcatgtgggccttcaatatgctgtagttgcttagcacagaaaattgcaagggtagtggggtctcagccgcatgttgaaccattccatccctgtactgaggtttctat

SEQ ID NO: 14885 - DNA, 1076 bp, Homo sapiens
tagatggtggggacatcatcaacgccctgtgcttcagccctaaccgctactggctgtgtgctgccacaggccccagcatcaagatctgggtgagtgtgggttacaattgactgggtacctggctgcactctgagccctggcaatgttttggttattatatatgccatctgactcccacctgggagctaagctttctcagcctccacgtaatgacattttggtctgagtaactctgttgtggtgtgcagtcctgtacattccaggatgtttagcagcatttccagcttctactagatgtcagtagcaaaccatccttccactagtggcaactgaaaatgcatgtaggcattgatacatggaccccagggagcaaaatcatccctttttaacttgagaatcttgaggggcttttaagaggagactctcttgattggtaagtcttaaggttgcttttgccctgttccccaggatttagagggaaagatcattgtagatgaactgaagcaagaagttatcagtaccagcagcaaggcagaaccaccccagtgcacctccctggcctggtctgctgatggccaggtaagtgggtctgtcctctcaggtgattctgcttccagttaattttctccctctcattctgttagtatatctagtctgtcagacacaagagcagtgtccttggcataaagtgaaatgacaagccaggttgatgaggatgccctcgtttgccatgccagtgaatgtgtttctgcatcagagggaagactgatgtggaacgcagtggctgtcagccttcaattaataccttaattaatctgaccagttttcaaatgtctggagccttatcaccagctgtttcttcctcaaggaatacataaccaccacttacaagctggctgttgaaatgagagcggtttcttacagtctacccggcgttgtggcacatgcctactggaggctgaggtgggaggatctcttgaactgcaggggcttaaggctgtagtgagccaggatcgcacccctgcactccagcctagacaatggagcaaggtggacggatctcaaaaaaagccact

SEQ ID NO: 14886 - DNA, 1489 bp, Homo sapiens
tttttggagatgaagtttcacttgttcgttgcccaggctggagtgcaatggcacaatcttggctcattgcacccttcgcttcctgggtttaagcagtgttcctgcctgagcctccccagtagctgggattacaggcacccgccgccacacctggttaatttttgtatttttggtagagacagggtttcaccattttggccaggctggtctcaaactcctgacctcaggtgatccacttacctcgccctccctgggattagaggcgtgagcttctgcgtccagccaccatctctaaatttttaaaaaattttcttgtctggaatctaaagggattctattgagcttaacggtttgggttcttggtttttgaaaggtgctgccagccatcatcctactgaggggtagggctgggaggtctagcatttcatgggataggactgtttgccctaatttcctttccatcttctgtaggatgagagccactcagagtgggtgtcttgtgtccgcttctcgcccaacagcagcaaccctatcatcgtctcctgtggctgggacaagctggtcaaggtgagcgtcaagccaaggcaggggctttaccagtcagggtgtgctcccaggtggtcatacactccaagtcctgtggaaagctttgcagatgccctcagttgactctttctcttgtcacatggtctgatgtcccttgtaagtcagcacactgcattggatatgtgttataatctaacgtgaagtggccaggacatgttactgaatgagaaatggctaccgtatccagaagtgccaagcccttttttgttgggcctgaccctagctcatcaagagctaggatgttcacctgtcaaccgcacgtctatgcaggtatggaacctggctaactgcaagctgaagaccaaccacattggccacacaggctatctgaacacggtgactgtctctccagatggatccctctgtgcttctggaggcaaggtatttggggacaaggcgtctcctactcagtggaagacagcgtcatggaaggagcacttagccagcgtctctaacgtaaaatggcaaacattagccaagatggttttaggaggataatgagataatggcaatctgagaatatgtttccaaagattactttcagcaaatgacagttaaggcatactatctggaagaaaaagatgattttctataagcctgtgggttttttttgttgtttttttgtttgtttgttttttgttttttttttgagacggagtctcactcggctgccaaggctggagtgcagtggcgcgatctcggctcactgcaaccatctcccgggttcaagcaattctcccatctcagcctcccgagtagctaggattacaggcacccgccatcactcctgggtaatttttgtatgttagtagagaggattttaccatgttggccaggctggtcttgaactcctgacctcaggtgatccgcccacctcggcttc

SEQ ID NO: 14887 - DNA, 1839 bp, Homo sapiens
tttggaaggcagaggcgagtggatcacttgagatcaggagttagagactagcctggccaatggtgaaaccgcatctctagttaaaaaattagccagacgtgctggcaggtgccagctggccaagtaatcccagctacttgggaggctgaggcgggagaattgcttgaacacgggaggtggagtttggagtgagccgagatcatgccactgcactccagcctgggcgacagagcgagactccatctcaagaaaaaaaaaagttatcagggtacagtttacctctacgtgcgtttttagtctggaatagagccactcagtcctggtctgtaactgctcttgtctgttgtttccatccctccttaagcgtccttagttgttgttaacccactcatgaccttgacacttagtgaattatccagtgtgttaaacgggctgcgggttcctcactgatttttcttctgttttacctcctttagataagaccatcatcatgtggaaactgaccagggatgagaccaactatggaattccacagcgtgctctgcggggtcactcccactttgttagtgatgtggttatctcctcagatggccagtttgccctctcaggctcctgggatggaaccctgcgcctctgggatctcacaacgcaagtagctgctcacttagctctggggccttgggaagaatctgggcagaagtgaggtggatgcaattggctggtttcccaggggagatccagtccatttgggaactggaaagcagagcacacctacagaagatgtttggcctccctcactttaaataagttactcagcattgctgaggagtgtggctgaacatttttgccaggtgcaaaagttctgagtgggcagcagtttgaacatgttttaccttgaaagctcaggtaattggcaggtggaattagagggtcctggtgatgacagatggcattgtcagccaatccccaagtgggagtgaggacatgtcctgcaattctgaagggattctctgtcacttggctcttctctttcatatactcagtcacttgactctgtgatcagagccaaatccagggttgtatgagtgatgcaatgagacagagacaaagcccaggaaatgagtctgaccgttgaatgagagtgtttgctaagtctgagaatgacaaactcctccctctcaggggcaccaccacgaggcgatttgtgggccataccaaggatgtgctgagtgtggccttctcctctgacaaccggcagattgtctctggatctcgagataaaaccatcaagctatggaataccctgggtgtgtgcaaatacactgtccaggtaaagtgagccatctccaaggatctcttccaccctcttaaactttgctttttttttttttttttggcgacagtctcactcttgcccaagctggagtgcagtggcgcagtctcggctcactgcaacctctgcctcccgggctcaagggattctggtgcctcagtctcccgagtagctggtactacaggtgcgcagccaccacgcctagctaattttttgtgttttagtagagacagggtttcaccatgttgcccagggtggtctcaaactcctgggctcaggcgatttgcctgcctcgccctcccaaagtgttgggattacaggcgtgagcccccacctgcctatctttgcctttttttttttttttctcggagacagtttcgcttgttccccaggctgaagtacaatggcgtgatctcggctgaccacaacctccgcctcctgggttcaagcagttctcctgcctcagcctcccaagtagctgggattagaggcatgcgccaccatgc

SEQ ID NO: 14888 - DNA, 1839 bp, Homo sapiens; identical to SEQ ID NO: 14887

SEQ ID NO: 14889 - DNA, 1060 bp, Homo sapiens
gcaccaagtggaacaggcggagctcgagctatgccacataggggcggggaagcagcccggcggtcctcatgggaatgtgccgtacacttcacctctttcgcttctcgctctacatcatccctgagaagcctttttaaacacttgaatgtgcttgtttcagagtgtatttgtaaagtgcagtcagattttgttgtacggaagacgggactgtgatgccttgcaatttccctctgccttttgcattacatggcgccgccatcttgagcagaaatgtatcatggggctcgccattttgcatggtcgagcgggtatttccggttccggcggggggcttttctctctctctttcactgcaaggcggcggcaggagaggttgtggtgctagtttctctaagccatccagtgccatcctcgtcgctgcagcgacacacgctctcgccgccgccatgactgagcagatgacccttcgtggcaccctcaagggccacaacggctgggtaacccagatcgctactaccccgcagttcccggacatgatcctctccgcctctcgaggtacggactaaggtagatttcaggacccgagattgcagggctgggggattccgcgtgtcgtgtagggaattccgcgtgtggtgtggcaggccggtggcgcgcgagttggcggggactgacagacttctctgccccattgtgaattggggcgtgcggacccgagcctaggcctcaacccgggcgaaccacattgcagatgagaacctacgtgtacatcagctcgcagctgctaggagggttggagagttggaaacttttaaaatatcttttgccttctccttcgtagtgtggccgggggcctacgggccgggcggggcggtgatgaccccaacatgccatctgagtgtcggtgctgaaatccagaggctgtttctgagctgccgcccggcccaaggctcgtggggaggcaggtggactccagaggacctcgtggctcaagtgtcggcctactttttctgcccctggttctccccgtccctatccctgtgttcctgactgcgtttag

SEQ ID NO: 14890 - DNA, 1060 bp, Homo sapiens; identical to SEQ ID NO: 14889

SEQ ID NO: 14891 - DNA, 1478 bp, Homo sapiens
aaaaccctcatttcatataaatggccttaagttttctaattcaagcgggtttttggaaaaatttatggtctccattaaaatacatattacaactggggtagattatttgtggtccaggtgtctgtgatttaactttgcgttttgctatctgatttttatttttcacagggctaagcatgagctttcattctcactcactcttaatttgtcgtgcgtcactacacatgcacgtgttgcagtccctgaggccctgtgtgttatctgtgatggagtgtgaatgtgtaacgggcactgtgttacactctgaggtgttggcggggcggtcgcagacttcagggtcccctaacggaaaggccaggctccgcgtggacggccaactccctgcccgctccttcagcaggtgactgtctctgccacttcttacctgctgaaggatcttgctcagtagctggaacaatgctgctgtcacacagtctcttctctgaaacttcaggatgctccttggtcaccaggcaatgggagctgtagaccagccgcatgcacttgccccacattcactgctgactggcttcactggaataggttcaggtcaccgggacttctctcagagtcagcggcccacccaactccctcataccgtcgcatctgaaaattttcagagaggaattctctttgtagtcggcttgtcagggttttcaagtttttctatggttatttttaaatctctttttttaaatgctaaaattaatgtcctcattaatgcaagtaattttagagcacagtgtagccatgtacagtttccattatttaaaataaataaatgtgttggttcatttggtgtatggggggacatcatggtaactggaaatgaaagtttaatctttcacaaatgtgcttgataaagctgttaagaattgtctttcctaagtatgttaactgttgtatctaactcaactgtgagctaagtttaaaaactgcaatcatgaatgtttgtgatattttaaatatctactacagcacattcagccaataaagaatctgcctttaatgtaagttgtaatttacttgacatttttccctaagtgtctttatttcaacattttcatatttctactgttaacacccaaaatacttacattctggttaaccctgtattggtaaacacattgtcagaaaccatctgtcaggtcctgctaattctgtttgctggggacttaccatgtgcgaggcacaccatgaagtgcctcgttgaatcctcacaacagccttatgatacatgtgggctagcttaccgccacgtccatttagcagaggaaggaatcagggcttagagagaggttggtgacttccgtaagactgcaaggcagtaagtagcaggactcatgttcacactctggctctgtatgtccttgacttcactactgctcagctcttccttccagcggaatatgctttctgacatccatccacctgggtca

SEQ ID NO: 14892 - DNA, 1206 bp, Homo sapiens
aggggaaagagacaatggaaaaaaacatgagttatatcagtaaacaaacaaaaattaattctagaatgatagaatgtattttatcctaaattacactgaaatctctgaaggaagagccatagtttatagtatttaaaactaaaatgacagatttcagagtttaggcttcctttggtttctttactagctaatgagaaatgatgttgacagtgttgtcgtgggtatgatacctgatggtttaaccatacgacatcgttggtgaaaatggtagatgaaattcacctgtaaaatcggtagtttcaacttaattcttggattcattcatgggaattgtacgtaaaggttttagaaagataaataacttctcattgggataagaaaggttttctaatgaatcattctttaatcagaaacatagattatgtcttaagcatttcttttaatcaagttataaccatatttaatgttctcttgatgtacaagtgctaaagcatttcttatttttaaattatttctaatatgttttattttgtttttttaatttttaagactgctgagaagtcaggccagattgaaagatcaaagaatgtaaggcaaagacaaaatgattttaaggtgagtaagggtgataagtatgtagaccttttcacagggtagggtttttcctttctcactttgtattcaagacatccattactgcccaggcagcatcttttagttaatgtaacccgattaatcacatttgaacacggttatgcttgttcctggttttctagaaaatgattcaggaagtaatgcactccctggtgaagcttacccgcggagccctgcttcccctcagcatccgggatggggaagccaagcagtacggaggctgggaggtgaagtgcgagctctccggacagtggctcgctcacgccatccagactgtaaggtgagtatggacacattctcagagaaaggcgtacttctgttttttttaactttttggaaagaattaatacattcagtgaagaagaaattcttctttttcttctttttgtccttttgcctccactgtttcctgttcatcatctgacagctaagctcctcactgttcctggtttttgtgttggactagaatgttcttgagtttacgcatcttctccgttgtttcactcagtattactctgacagtacagtcccagttgtggtctgtttctgttt

SEQ ID NO: 14893 - DNA, 1117 bp, Homo sapiens
gggctcactgcaacctccgcctcccgggttcaagcaattctcctgcctcagcctcctgagtagctgggactacaggcgcacaccgccatgcccggctacattttttttttttttttttttttgtattttagtagagatggggtttcaccgtgttgcccaggccggtctcgaactcctgagctcaggcagtccgcccgcctcggcctcccaaagtgctaggattacaggcgcacccggtcagcctgcctcctttcttcgagtggatggattaagtcattgcaaggctgctttcctgattacattctgaccactttgagtagaaactactttgcttttaagattgttattgcttctgttttcactgtaatgtgtttgatagtgaaagcgatcacctgagggtaaccaagtggctgtttttaggaagtggagagactgattttggacctcagctcaagaacctcaataagaagctcttcacggtggtcgcctgggatcctcgaggctatggacattccaggcccccagatcgcgatttcccagcagacttttttgaaagggatgcaaaagatgctgttgatttgatgaaggtaggtctctgagggaagggccaggggaggaagggtggctgggcctgtcttcatttattttgtttaaattttgttgttatatttttctacaaaataataccatgtgattgctatagaaaaccccaagagttcaaataggtataaagaagaaagtagaaatagcccacagtccagctctctagagacactaccaaatcttggcggctctgctttctggccagtcttattacatcacaaacgcagtttcatattgatggcatcgtgctacacctaacgtttttctaacttactatttttgttgaacaatttttcaaggaaataactttcatgtcaataaatatgcatttatactagttgtatgataggcacatattattccattgtatggatgtactgtatcttatttcaccaattttctttttttttttttgagacagagtgttgctctgtcacccaggctggagtgcggtggcgcaatcttggctcactgcaacctctgcctcccgggttcaaacgattctcctgcctca

SEQ ID NO: 14894 - DNA, 1102 bp, Homo sapiens
tccaagtgtgagtctagtggatcccagatggcctgccccagacacttaggactaggtgggtcaggtgttttctctcctcatgtgtaagtatctacataatgtctttgattttgcttcttggccagcaaaacctaaaatatttatttactctctggccctttacataaaaggtgtacagatctcttcgctagaatatcacaagtctagtctttttcagctattcgacaattcacgtgacttttaagtacgctacttagtggcagcgttctgttgtagaattgtagttcttcacagtctttctgttttttaaatgaatatgaagctcttacggtgagtctgatgtggttgccagtcctgtctgtgctcctgcttgtccttattttgctcctgcctggtatccatcttgtgcacagtaggccattccgctctgtgaagggtctgtcccctcccgcggcctctaggacaggctgccttgagttcttcctccctctcctgtatccttaaattctctccactgggtcagtcctctcagcctgcaaaagtgggcacaattcttcctccagaaagttgccactcctacctgtggttactatcttcccattctttattctttcccacaaacttatggaaagagccacctgcattccctgcttctagggatcctcctttccttccttctttagtccattctgccccatctccctctctggcccattctagccccctctactgaaactctcctcactgacccctgcccacttgttctttcccataatcactatctcagttcatggcctgcagatgacccggcatccaggcagagtcccagatgcatccctcgagggcccagtcctcctctgccctcttcatttgcccaccttgccctgttcattgaactgtgatgctttctgttgttacataatacccctccagttatcctcacctctcttctttccccacattctcctggtttaggccgctagcttcatatggtagtttgttctccataggagagtttcctttgtaaggcaaaaatctaatcacttaattccactagaggacttaaaatccttcactaaccagcaaagtccgtgcagtttgg

SEQ ID NO: 14895 - DNA, 2041 bp, Homo sapiens
tggagccaggcacgatggattcggttaggtctggaccattcggccagatcttcagaccagacaatttcgtgtttggtgagtgcctggtgtggctgagagcatgagggattcattttacgctgggcagtggaggctgaagaggtgtgattgccagagggaaagcatgaagaacatccgcggtgtgccaacttagctttaatatagtgtaaaattgtttgcctttcagctgctaagagcttggtgtcctggccttccttatttataattatattcatgaacaaatattttaacgtttggccattttggtgataatctgaaatagtcttatctgagcattgactcactgatctatattgaggggtttgaggtaaggtatttagtacaatcaccggtgacttaagatttctctttccctctggcaggccagagtggagccgggaataactgggccaagggccactacacagagggagccgagctggtcgactcggtcctggatgtggtgaggaaggagtcagagagctgtgactgtctccagggcttccagctgacccactctctggggggcggcacggggtccgggatgggcaccctgctcatcagcaagatccgggaagagtacccagaccgcatcatgaacaccttcagcgtcatgccctcacccaaggtgtcagacacggtggtggagccctacaacgccaccctctcggtccaccagctggtggaaaacacagatgaaacctactgcattgacaacgaggccctgtatgacatctgcttccgcaccctgaagctgaccacccccacctacggggacctcaaccacctggtgtcggccaccatgagcggggtcaccacctgcctgcgcttcccgggccagctgaacgcagacctgcgcaagctggcggtgaacatggtgcccttccctcgcctgcacttcttcatgcccggcttcgcgcccctgaccagccggggcagccagcagtaccgggcgctcacggtgcccgagctcacccagcagatgttcgactccaagaacatgatggccgcctgcgacccgcgccacggccgctacctgacggtggctgccatcttccggggccgcatgtccatgaaggaggtggacgagcagatgctcaacgtgcagaacaagaacagcagctacttcgtggagtggatccccaacaacgtgaagacggccgtgtgcgacatcccgccccgcggcctgaagatgtcggccaccttcatcggcaacagcacggccatccaggagctgttcaagcgcatctccgagcagttcacggccatgttccggcgcaaggccttcctgcactggtacacgggcgagggcatggacgagatggagttcaccgaggccgagagcaacatgaacgacctggtgtccgagtaccagcagtaccaggacgccacggccgacgaacaaggggagttcgaggaggaggagggcgaggacgaggcgtagatgcccccgcgagacgggttagggaaagcggaggaggaaagcgagggggtggggggcttcccgggacgataacctggcagtggaaggaaagaagcatggtctactttaggtgtgcgctgggtctctggtgctcttcactgttgcctgtcactttttttttccttttttgtaatattgatgacatcaatgtaacatttgagatatttctgaattactgttgtaatggctaaaatcacataaacgtttgtgtcggaatggtgtcctctctttctcttcctttttctctttattaacgatttaaatgtaactttctgaacacattgcattgaattcttcctttaacaaaaagcaaaggcgtaggtaaaagctcaaatgaatttattctttcggtatggtaaaattgaaccaatcacagttaagatgagagatcaacctgagttttaaaatacctttaataaatattagttgaaaaaatgtctacttgaaagcacagtgtgtgtcttcatgtgcaattcctactatgcttttatctcctttacaaaaaaaaaaaaagcattt

SEQ ID NO: 14896 - DNA, 1351 bp, Homo sapiens
caataattctcagaaaattgaccgattagatggtgcacacatcccagagttgaccaaaaaagctcagcgacatctagtggctccttcccacccagcactgatgaacatcttaaagaccaaaaaagctcagcgacatgcatctagtggctccttcccacccagcactgacgaacatcttaaagaagatctcaaccttcgcttacagaaactgactcatgctgccccctgcatgctgtttatgaaaggaactcctcaagaaccactctgtggtttcagcaagcagatggtggaaattgttcacaaacataatatttagtttagcagttttgatgtctttagatcaagaggttcgacaggggctcaaagcctattccaattggcctacctatcctcagctctacgtttctggagagctcataggaggacttgatataattaaggagatacacgcatctgaagaactagatataatttgtcccaaagctcccaaattagaggaaaggctcaaagtgctgacaaatgaagcttctatgatgctctttatgaaaggaaacaaacaggaagcaaaatgtggattcagcaaacaaattctggaaatactaaatagtactggtggtgaatatgaaacattcgatatattggaggatgaaggagatcggcaaggattaaaagcttactcaaattggccaacataccctcagctgtatgtgaaaggggagctggtgggaggattggatattgtgaaagagctgaaagaaaatggtgaattgctgcctatactgagaggagaaaattaataaatcttaaacttggtgcccaactattgcaagaaatacttaattacattgggagcagttcatgatttagtcctcagaaatgggctaggaatagaaaaatcctgcttactcagttacatgttttttgtatttcacaatgtcgtgctaaataaaagtatgttacatgttttcccactaaaaatagaatgcaataaacatcttcaaattattaacaataactgtataaaaaagtgtatctttacagcaatattaaacatacagctactagaaaaaaactgaaattggtacaatctacagagctcattcagatttcacaagttacacatgcccgtgtgtgtttggcataactttttgcaattttatcacttgtgttgtcttggatagccaccatcacaatcaagatacacaacagtaccatagccgtaagagtcccgcatgttaccactttatgaacatacctattccctcttcccccattcctaatccctcacaaccagtaatctgttctccatttcaaaaatgatgtttcatcaatgttgcatagatgaaatcac

SEQ ID NO: 14897 - DNA, 1954 bp, Homo sapiens
attaatccaactaaggacctgttggctgacttgattgggtgccagagacttcctgaagaccaacgtaagaaagtacaccagctaaaggacttgttggaccagattctgatgttggacccagctaaacgaattagcatcaaccaggccctacagcacgccttcatccaggaaaaaatttaaacaagatgaagaaactccaagggtttgagtaaatacaaagactgaagaaatttcacagcagtttattaatgtatataaacttataaatatttctccagcaaatttgaggaagcatgatatatttgaattaacaccaagggtgatatttcttttagagatgttagttaatctgttttgtgtcttacgtgaaatttcactgtagactgttttaaattgccaagactgcacaaaattacagtgctaatgtatatggttgcagttcacataaagacaaaagcatctgttatgaaatgagtagtaatattgggtggttgatttgttcttagcagacttggcttcattttggtcttgagataaaatggccagcataaatgctgtttatattcacgttttcctaggtgtgtgtgtgcaggccacagcagcatgcccttggtgtagtcagtgccgaaaggggtctgttccttcttgagcctgcctgcagggatggtctccttttaaagcaggttgtgtgcagcattcagtacactgaaggtaagctaaaccatcaacatctctggtgttttaagatgttattttattggaacaactgacaaatgagggatgttagctttgtggcagaattccctgcatgtgtgataactgatcttgttttattttttggcattgcaactgtggcatagttacaatttctgtttgttcatcacatttaaaattggaagagaacgcgcttgatggatagagcgccttcagtgtactgtttcttattaactttactttttttaaatcaacttgctatagactttatatacattttgttaaatatagttcctagtgacatagaaacgatgcgtagttttcatttactaattacaaatgttgaggcctaattctgaaagtcctcatatttaaaggctagacaacgtaatgaaatttttaactatttgtatgtcattttgaaagtgtactgctttatggtaaaagtgtttttcatttgttcattgttttcattatttgtgatcatgttgtctttcaatacaggcataaaccttccactcttgaacaaagcagctgctttttaaaagcggtaattgcttctttaccttttatttcttttgtaaatgaagcttttctttaagaatgtgactttaaagtgttgtctattgcataaaacagttgacactcacttattgtaaagtgaagattgttctactgcatgtgaagtggaccatgcagatttctgtatgttctcagtatgcatcactagataataaagtcttttgtgaacaaggcatttgtagccatttttaaaagtttttgtcttcagtgctggtaagtcaggtaaaccataaatagttaaaagcaaccttttgtttttttcctgaaagtttttaattgaaagtattattagttaaagatgtaaacctagccaaaattaccagtttattaataattaggatcctaattatttcaaaaaatcctacaaatattgtcagctttcagtgtagtgagattattcctgtaggttatggggtataattcaggatttaactaatgtttctgctattttctcacttttccttttgatggtgcggaaagagaaaaaggaaaacggggcacaggccattcgacgccttctccaaggggtctgatttgctgagacaccagcttcaccttcttaacaaggttatttctgacagcatgtgtagataaacatttagcaacaatttaagacaaaatcgtttaaatcagcttggttttgcaacacaaaggaatt

SEQ ID NO: 14898 - DNA, 1232 bp, Homo sapiens
tacaccccgtctcttcacggtttagacttactaaaataaatacaaggtgattttcatcttcaggtagagtgaagccttttaattaaggcgtcacaggtgcagctattctaccttaatgaaatgggtagtgattttcccaccattatttatttcggtgataatatgctgcatattcaagtctcttgtagttattttcacccaaagtagttgacaatttgatgcttctggtgatgtttatggcttcattttatgtaattttttaagtaagttccactagaaacagttcatcttataccttcaaaactgttacctgttctttaaaaaacaaagttgcttgttacttgttctttgtgttttaggtgcagctcagtggaagatgatgacaaccagaagacatgagctaaggtttctgtcctataaaagatttattaaaaaacaatccttcatttattttttgtctaattttttagttttcagcattatgatttgggttttattggtgtttggtatttagaattagtgctgttgtggagtgcgtctgtaaagtgcttgttttatcatacttcctgcctctcccctcccccagtttctcctcccctaaaataaaaatagtggtcaactttagtaatataaaaggctgctggatgctgagattccacataacacatggttgtcaaaattggatgttaaggattcttagaaaaacagcaaccaccagaatagcatatatctgaaagtagtcttcagctttaggcagatgcaaaagaatacaaactggaatattaagaatactgttcaactcctttagtatctgttccccaacttaccctgtagaaacctcgttattaaccagtgttccagtcttaaagtagacaaaatattcagagccattttttttaagggaaatgaaaaagatactctgggttttttatactccccaatttagcatatctagactacctatttgaaaggaaccctatcaactgtcttatgtacgttacatgattttcctacactctgtaattttgctgaggtgcaatttggaactctgcaagacctactagattgaatttatttagtgaatgctcctgaataaatgtgcattcctcttttagagtagctgtatgcttttcaaatgctatctgccgtgaattttttgcttttattatactttatggcaaaagtgatatcaagtgattgtcagacttgagggctcatagaagtgttaggta

SEQ ID NO: 14899 - DNA, 1100 bp, Homo sapiens
gtatgtggtagagtaagtaaaatgtaatgttctcagttttgttccatatttgcattcctcttatgctttacctgtattttatcatttgtaagcagaactctagctatatggggtagaaataaaatctctgagatgaaacaaaggaatcaacatgataaaatttaggcgaagtagttaagaaatggcccttttgaatgttgaagataggaaagaaagccatatattcaaatatgtaattttcctcatttagttataatgacatctttaccaattgggcttcataaatgtgtttctttcttaatagtatcctagttccagcatatattcaacatgaattttatcattctcctcctaatggaatgtcttccttatagaaatgttcacgacaaattcatttgtgttttttacatgtcaataatgtatgctaaattaaaatgttttccagttattctgatagatgtcattatggcatccttaatttttcttctccttctgtatatagggtaagggactgttctgaagaacctttccatttagtgatcaagatatggaagctgatttctgaaaatgctcagtgtgtactctaattatttatggtaccatttgaattgtaacttgcattttagcagtgcatgtttctaattgacttactgggaaactgaataaaatatgcctcttattatcatattgtctcctggtttttttctttggttgagttcagattttcctcacaaacatcaaaacattttcaaagcattaggtgcacaacaccaaagagtgtattatattcgtgttcctgttacatacatttctgctttggttttcctagtaaaggaaacagataagtaatgagccaactcctgtttttataatgataaaaataaattggttcattgctcacatgatagcttgacaaatcttgggctcttatcctcagtatacccactctttattttcttcttttaaggaactgtttttggcttttcaaaacagtgagtaaaatagattcacagtgtagtttgtgaatcttagtgcatgcaaagcagataaggcaggcagaatggccttgtagaatgcacccacccaccccattggagcta

SEQ ID NO: 14900 - DNA, 1178 bp, Homo sapiens
acaagtcaccattggcctcccagataaagaaaaggtttggtaggaattctgtgcctggttcaaatccttaaaattataaattgcctaactttgcatatgctgattttcccaggattgttttgtgtattaaaagagctcacacgtgggaagggccggcattagggggaggaaggcagatgagaggagaggaagctataccagtaactttttaaacgaatggcaaaaagaccttttctattttagatttctttattgagtccctgtaattctgtagtaggttgtaaaataagacactttttgctttcctttttaagaaaaaaatcatcagcccgatagattactttcccacctgcccaatggactgcaccttgcacagggtctgttcccagcggcccctagaggatgtgccccatttccctgcggggctggtatttgtgaatgtttcccttcggtgtggattttaagggatgggtcttccccgcccgcctcccaccgcaattcatattacatccactcttcttccttgcaggcaaacgagatgctgctcagtggacggaagctgacagcgcaggaggcgtgtggcaagggcctggtctcccaggtgttttggcccgggacgttcactcaggaagtgatggttcgcattaaggagcttgcctcgtgcaatccagttgtatgtctaattgcttctgttacacgttactttttaaaaaatagaaacttttccctcagagagctcacaaatttgcaattattcctaagtcctttacgtttgtcctcaacagagcaccttcccgtgaagtcctgccagaacctattgccgccactgcccccacgcacgccttgccttccctttgcaaatacccaggaaccacagaaatggacttcagtctgaaatgtcagcaagttagcaaatgtcctatgaaagtcaacaacaactaacatggatataattctttactggttccaaagcctttcagtcacattattagcttctcccctgtttccccacagtgggcctaagttgtttttgggttgttgttgtttgtgagatggagtctcactctgtcgctcaggcttgagtgcagtggtggaatcttggctcactgcaacctcaacctcccgggttcaagtgatgcttgtgcttcagcctcccgagtagctgggactacaggcat

SEQ ID NO: 14901 - DNA, 1285 bp, Homo sapiens
ccactgtctctagaagaaagcttgttttgcagtattagtgaatcactgaatagcttaagtatgactatctaagttataagttagtctttagtgggttttaaatagtttttctgacccttctgaaaaataactacataagtgcttcttgttgctgggtgagaaatactactttatagacagttttggttttctgtttgcagatatgattgatgtatttcaccaaaataaaatatttttatgtttataaagtgtaatttttaggttcacttagaatatattttatttaataagttaaaattcttttggcacactattaaatgcaaaaactcctttcaaaacaaaaaagaactaccttatattcaacatttaatgttcttggcctctgcttttatgtctatacaatatactgagttcagtatggtgtccaagagtgccctgtgtggatagacatgtgcactccttccaggagtgggtactgattccagactccagatgcctattattagttaggcttctgagcttgcaatcatattgaatgtatgaagagcgaaatcaaattcttatttttgtacagttttgaagtttatacttagaactgaccacctccccggccacgcggagagctgtacagtgtgtaaatctgcctttatcttggattgattggtacagtatttttgcatctgtgggacctaccttttcgttcagtagtttgaactatatataaactgtacaatctgtaaagtttttatagaataaatattcagctgtgaaaactggttaaataaaactaatatttcttaacacatttgaaatgtttctctgattcttgtgagatttctcatgggatgttttctctttcgtgtgtgtgtgagatatacatgtgtgtataaagcatctgtacagttcaatggaatgaaaccctgtgtgactaacacctaggtaggacctaacaatttgaccagtatcctccctggtcaccttcacccgggtgaccatttcctcactttgtgtccatcatccacttctccttcaaagaacttattcctaaaataaattacttttagttctacatgtttttaacctttatatcatatcacaaataagcttctgtgactgactgacttcattcactgttaagttttctcttacgtagagttgtaacttactccttctttacccaaacctgtcgtggctgttttcactcctgttttacagatgaggaacctgaagaattaaacacttgcccaacgtcatgtaggtaatttgaacaggagtagcatgaagc

SEQ ID NO: 14902 - DNA, 1172 bp, Homo sapiens
ggaacaagtgtcaagaggtttctgtggagaaaaatactctacaagttacccaggcagttctcttcggtttggagcaagggaacagtaacacagcacaaaactacaccagaagccctccttttaaggagctaagattgtgctgaattctcagtgtaacctgctggatcatggggagtagagtgtccatgcaagcatattcctcagaatacaggttacggaaaatagtttctcctctgggtgaaagttattcaatattcgctttagcgaagaggtcaaattaaattagttagttggcagccagtgagatccacccaattccgaggaaatgactgaggccaaagagggtgcttttcatctcttataattagagaaataatggtctcgttttcctgtggccaacattggtgttggccccaatggcatgttgcccctaaacccaggtggcattttcaccacgaggctccttcatgaattacttgggtccattgtaacgtgcactgagcacttggcctacactccatccagttcctgtgggggctgtgaggacaggaggatgggatgaacctgctcctccctttgaggagaagacttttaaggggactgccatccctaccttgacctcatcagttcttggctcaagctgatgtgctagacggttatccccaaggaggtgcatgaacacatggaaagagacggagccttgagtcagctgggaccctttccccggggaggagagccacccgggaacttcctggtcttggagctccccctccctgacctttctcccatgcctgggccccagtgtagctgtttagaaagacattgctcaacagcacactggctggagcttcacaagcaccattttcctgtagtggtgaatggaaacttttcttagcagaatgcttgactttacagaagcaacagttttctcggataaaactccacgtgcagtgatggattagcagctcacattgtgtctatggcggctttccttgttttaggacagggagagtcatggaaaggtggctggacttggggtagagcttttttctttctcttttaatatccatgggagggggttggaggagagacatcaggggcaagctgggcgggaacgagctgcaggagcccactgcagtcacctgagcaccactggcagggaaagctccgcg

SEQ ID NO: 14903 - DNA, 1199 bp, Homo sapiens
ttaaaattaatgtacaagaggagctgtgatgccagtaatatgacgtccaggtcacagtagcagacaggtgctcagcccagcttacctcattaaagaaataagaaaggactgtgtgctctgatttgtaagcctgcatgccatgaaagaggcaatgaaggctgccaggcacttctagcattttaatggagggaaaatcaaggctgccacagaagatgggaaataggaagtggataggaaattagccttcaccttgtttcatatttgttttgggtccagtccaatttggtagttagtacaaattactaatctaaactgatgatgctactatatattctgcgtatagttaaaaaattatgctcatgtgtatgtatgtatctaatcttcttatataaggtgcatctgtgttcattgcttcgtttactcctcttaataaaaacctcgcaaggtagatcattttgacttcagccatgaggaatgaggtcccgaaaggtttagtgacttacccaaagttgctgaagcagttagtaacatgcctagaactggaactcagctcttctgaattcattgcctgtttttctgtattctgctttttttcatgacactcctttctacgtgggacctgcttatgacccaaaggggagttttggttccaagaatgctatggagagtggagtcagaagattgtggtgttttctgaattcctaacctcaactaaagtgttggtactaactctgacctaatcttaactctaaacaaaatgttttttcgtctttcagtttattcccctatgaataggatttttagagttgtaataatgttacagagacaattttaaacattttattattatcttttaaggtatttttgttgtttaatctttgtaattattactttcatcactataacgtgtatttcagcaagaagaaaagtaaatacagaggtgcagggtaaaaaaacaatgataagtatagaaatggatgagtcacagtaatctatacacttagctattaattgtggaaaaaaatcttttgtattttgaaaaatagtaaaatgaaaactctagtgaacagtaataaattggggggagtaatcaatagatattgaaagtctgctaaggctcttgtcatatttggggataggataaaattactgagtaacttcagactttgttggaaaaaaattagattgcagtacaatgt

SEQ ID NO: 14904 - DNA, 1218 bp, Homo sapiens
cctcctggaataacccaagaaactgttcacattgatgcaattgcacatatgctaagtgcattttaaaggcagacctgaatttatcactttttgagaaatgtattagtccttgttcaataggaatgatataactagggtaaaccgtcattattttattcagggtgcctaaagcagtagaagtgtgtggagctattgcagctcagctctgttcatgagtgttttatgtccagttctaaatcctattcatctgaccctattgccccttttaatactgaagctgaagagagtgatagtatatattccatcacggaaataaccacagagcctggaagatggggtcatgacttggagattttgggttgaattcaggctccaccatttactatgtcatggtacatgttattgaacctcactaagcctcagggttcttagttgagaaatggggaaataataaggattgtgaagattaaagaaaaccatatagtatgtaagataagcactcagcaaggtagcaaaggtactaaacggtgtgtaactattaaccgttagtactgcaagtggcagtgaagtgtgttataggatcatgttatcagtcacaggaactcagagtcaggatagataagtgtttagcattaatttgtaaggcagattgtatagatgaaactggtggtcaatagttattttttttttaatggctggtataaaaatgactactttgggagccacagaccagtcctcaatatctccttgaaaatctactatcatccaagcctcattttcactttgccacttgtaggattttgcaaagaagcaaattcttcttctgtccgttttcttttttctgtgccctttaaatgtgtgtttaaaatctagaccttttgggaaaatcttgttggctttctaaattttaaatttaattggcttttgcaatctacttttattcttaaatctgattagaagtaattccttgctcagtaattcctcagtagttctgaactactttctgtggcttttgtaagcagttgtagttggggttgaatttgtattctgggtcatttggatttgcacaaggacagttaggaaaatgtcagagaaatagaagcagtcctagtggaaaataaattatacaaactgttgggtgcgattaatggaaattaatttaatttcaatactgtggtatctcccaaacataaaggtaagtgagaggcagatacttag

SEQ ID NO: 14905 - DNA, 1387 bp, Homo sapiens
actaacaataaagaaagctaatttatgttttaaaaaatatattttccttaagaaaaactagagcagagataaatgaactggaaaatagaaaaataatacgaaaaatcaaaaaaatcaaaaaaagttggttatttgaaaagatcaacataattgacaaacctttagctacatgaattaaggaaaaaagaccactcaaatttctataattagaaatgaaagtgggcacagctgctgcacatcccggggctcctgacctctctgcgtttgcagcgtagcccaagtcggtcagcactggaggacctcagaagccatgttgaagccccatagtgaagccagggctgccttcattcagacccagcagctgcacgcagccatggctgacacattcttggagcacatgtgctgcctggacactgactcgccacccatcacagcctggagcactggcatcatctgtactatgggcccagcttctccattgctagagatgctgaagaaaacgattaagtctggaattaatgtggctcatctgaactctcatggagcccatgagtaccatacagagaccatcaagaacgtgcgcacagccacggaaagctttgcttctgactccatcctctaccagcccattgctgtggctccagacactaaaggacctgagatcccaactgggcccgtcaagggcagcggcactgcagaggtggagctgaagaagggagccactctcaagttcacgctggataatacctacatggaaaagggtaagagaacatcctgtggcgggactacaagaacatctgcaaggtggtggaagtgggctgcaagatctacgtggatgatgggctaatttctctccaagtgaagcagaaggatgctcactttctggtgacagaggtggaaaatggtggctccttgggcagcaagaagagtgtgaaccttcctggggctgccgtggacctgtctgccatgttggagaaggacatccaggacctgaagtttgggggcgagcaagatgtcgatatgatgttttcatcattcatctgcaagacatctgatgtccatgaagttaggaaggtcttgggagagaaaggaaagaacagcaagataaccagcaaaattgagaatcatgatgggggttggaggtttgatgaaatcctggaggccagcgatgggattatggtagctcgtggtgatccaccacaagccgtcgagatgagattcctgcagggaaggtctgccttgctcagaggatgatgattgggtggtgcaaccaagctgggaagcctgtcatcttgccactcagatgctagaggatgtgatcaagaagctccaccccacttgggctgagggcagtggtgtggccaatgcagttctggtggaagctgac

SEQ ID NO: 14906 - DNA, 1515 bp, Homo sapiens
tgccacctggcacccattaccagtgaccccgcagaagctactgccatgggcactgtggaggcctccttcaagtgctgcagtggggccataatcgtcctcaccaagtctgcaggtgtgcccaccaggtggccagatactgcccacgtgcccccatgattgttgtgacatggcatccccaggcagctcgccaggcccacctgtaccgtggtatcttccctgtgctgtgtaaggaccccatccaggagccctaggctgaggatgtggacctccgagtgaacttggccatgaatgttggtaaggcctgaggcttcttcaagaaggatgatgtggtcattgtgctgacctggtgacaccctggccctggcttctccaccaccctgtgtgttattcctgtgctgtgatggactccagagctcttcctccagcccctgtcccacccccttcccccaatgcatccattaggccagcaatgcttatagagctcactctgggctgtagtgtggcactggtgggctggaacaccagggaagaagatttatgcctcgctgaaacgtggctgtttttagagcctgctgtggcgggagagcccggagcctggctgcccatcatgtggccccacccaagcaagagaagaaggaggaatgcagaacagaggcccccagagtgtatggcaagagggtggcagcttcctttcttctgtgtactctgtttagttgctttagaaaatggaagcccagaggactcccaaccctgtcctggggtcaggaaacagccagtgagagttagggaccttagggcatggggcagtagttccagtttaagcagatcctgaccctggcccttacttgcttcccaatcccctgggccttcctcactggcacctgtgcccgctctccactcagctgtcctgcagcaaacacttcaccctccaccttccattttcccccactactgcagccgcctctgagcctgtggctatagagcctatctctatgtcaataaacaacagctgaagataaagaaagaaagtgggaacattaactacatacttactgaaataaaaaagattgtaagagagtgtaagaggagcaattgtaccccaacaagttggatacactagatgaaatggacaaattcttagaaacgcaaaacctaccaagactaaaccatgaagacatggaaaataggtcacagacctatgactagtaaggagactgaatcaataatcagaaatctccagacagccaggagtggtggtgcacacctgtagtcccagctgtttgggaggctgaggcaggaggatcacttgagcctaggagtctgaggtcagccttggcaacatagtgagactgtgtctccaaaaaaaaaaaaaaaaaaaaaaactccagacaaagaaaagtcccagagctgatggtgtcacaagtgaattcatctaatgttcagaagagagacttaggagggagtctggaccctccccacccccatgctccactctatcctacagccacagaccac

SEQ ID NO: 14907 - DNA, 1162 bp, Homo sapiens
tgcgcctggcctggttggtttttttttttttttattcttttttcaaggttatttgctaattttattcttctcagtagttccattttataggtagagaacacttcagcactccatggtgctataccagactctttcttggccttgttatatattaatggacattttcatggaaatcccagggttgaaaactccccagagttgctaatacctgctactggttctcaagtggtttgatattatatacataagtgtggagcattgctggacccaggttttaataatcagattaatagatacatttgaaacattgtcatattagcttttaatactactgaatttaagtcttctgtgcacttaggtttgctgtaacgcatggttaacatatataggttggtataaatttttctgttcctgattcagatagggtttttgtgtgttttgggttttttctccataagagaaattgttccctttgaaattttaattagttttgaaattaaactatagttgtgcatatgcatggcagctatacctcctgattgctatgctgaaggtagaaagtattctcttgttgtatagacattggtcatactgtcaggcaagggaaatgccactaatttctgtttcttgaattgcataccagaaataggaattcgttgtctgactgttagatgctcagggcagatggaaaagtaagaaaaaccaggacttcccaggaagcaagtggcagatctgtgtgctgactgtttcagggtggggatggcacagagggggcttgcaggagagatgtggccgagggtggaagagcttgtcttcggtgccttgtgataagcgacctgcagcctgttgcaatggcgactgcatttgagatggtgtgcttgtaacatccgccgggtaggcggagcctcaaggacacatgttgagaggttggggtggtggagccaggaggtgcagtgagcgaagcatccaggcgtggatttgaacagctgctggccgcccggagatcagcctccatgcatcagtcataggcacagagaactcatccgtgcggctggaggctgaacatggagaaggagggaagggagctgctttttcagttaatactcttgatgcttccagagcagtttaaagatactgcggaaatttgttgggtggttcattg

SEQ ID NO: 14908 - DNA, 1190 bp, Homo sapiens
ggaggctgacagctaggaagcctacaagcttgcctgcgcccccttgggtctctgcagcctccacctggagatgagcgtcaggcaagagtgtgcataccatacacacacaacgcaggcttggggtcgtttcctgtgaaactcatcaagaccatgctttggaggattaggggtaggggtggtcctgtgtatgttgcatgtttgtatgatctctttgcactggaaaaataacttataactcaagcttcctcaacttccctagcgctgcgagtctctggaatgcacccctctcctatctcgcagcccctgtctgccctgcctgagtcactcacaccttcctgggggcgggggcagtggaagccaggggttcaggggcacagccagccctgggaacacacctgaggtgatgtggaggctgcttttgcctttcttcacgtccccagggtcatcttggtcctcctgggggatgtaacaggtggtgaggatttgggccgaaagaagtcctcactggtttggggttcaggctgctggcgtgggtctagcccattcccggcgacatccctggcatgggcgtacctggtggtgcccctctgagccctccccgctgtgcttgccccacagacagtcagtcggatgcggagactgcagccgccgcgggcgaagtgctagacctcacctcacgggacagagagcagccgtcggagggcgccactgagctccgccaggtcgcaggggatgcgcctgtggagcaggccacggcggaaacggcctcgccggtgcaccgggaagagcacgggcgtggggagagccatgagccggaggaggagcatggcactgaggagagcactggggacgccgacggcgcggaagaggacgcgtcgagcaaccagagcctggacctggacttcgccaccaagctcatggacttcaagctggcggagggcgacggcgaggcaggcgccgggggcgcggcctcgcaggagcagaagctcgcctgcgacacctgtgggaagagcttcaagttcctgggcaccctgagccgccaccggaaggcgcacggccgccaggagcccaaggacgagaagggagatggcgccagcactgcagaggaggggccccagcccgcccctgaacaggaggagaagccccccgagaccccggcagaggtggtggagtcggccccgggtgccggg

SEQ ID NO: 14909 - DNA, 1249 bp, Homo sapiens
tgtgagcttgttcttgtgaatctgtgatagcaccgtttgttctgtgagctggaaacagaaggaaaaaacatacccttgggtacccatagccaataactggaagaaaatgatgtgaatttcatgtaaatgaccagaggaaagatggataagatgataatttcttaaatagacattttccttttttctttgtgcttcatggtggagctgtcatctggtccttggtattacaggatgtggttgatgaaggtttccaatatggtttcaggccaaaaccagggaagattctagcttcagcctcatgtccatttccagtctgtcagcattagacatggtcactgttcaagtttcaagacatccattcttaactatagagaagagttactcccctggcgtcttaacctatggaaaacatgcacggataggatatatttgattgcctcctcttccctttcagtatatgtattattaatattattattattattattattattagttcatcagtttgctgttctctgcagtgagcagaatcaaatgggcaatatttgtcctgggagacctgtgccgcacccaggtccccgtgttaacgtgtgcctgcggttgtggttggcaccctcgggtggtagctcttctactgtaatgagacaagcctttcttctgtcactgcagaatttagaaggggccgtgagcagtcttcccaagcatggtccaggagcagctcagagagggtggagtgaggatgcatgcatccagggaacaggcatcaagaagccagggccgtgcctggagcactgcagagatgactttggagaaagcaaagcagtgacccagtgaccaggcacattactcgtgagcgaggtattcccagtcttcctgctaagcctaatccaagccttacccagctgtgctactgtcatttgcaaagcaaggaaatactactactggtaataaaactacacatgcaagatgtcagataagaaataggtttatatttaccttcctgcgatgtggggttggtgcttgaagataaatgtgctgtttctagtttcttaaatagcccacacccctggatgcaaaaaggcagggttatttttacccatgagcatcctgtgcaggcaatagacttccctcactgtctccgcctgcagggaggagaatgtaccccactgcacctgagctcctggtccctcagccaagacctcaggggtccccagccagcctgctgctggggacccctgtgcttgctgca

SEQ ID NO: 14910 - DNA, 2039 bp, Homo sapiens
taaatcctcagatgccaggggtctgctctagcatcagtaagtatttagcagaaactaactccgtaatgaatggaattcaattccacacatggtttgttcaagcacacttaataagtagcctattttttaaatgtctttttaaaatgtaaatatttggatgaagtttttctttgttttgatatattcatttgctacaccaactatgttttcagaattcatcttttgaacaacttggtttcagaatatgtaaaatgactttaaggatcttgtgtatcaaacctatccccggatgtgtgagaataatgtgttcataaagcatggatctcgctttggttgtatagcttcctcatttacttcatggtcttacatagctggtgactttcagggctaatctgccctctaaagcattgtcccaggagaggaaaaggaaatgggacctcagaagtagaagcctcagggaaggagtaaagtagaaatcagaagaaaagaagcttcacttgatagtaataaggtttttaacttcaagtaccttcagaaaatgtgattttgataagaggaaagggcaaatttagaccttaaaaaatatggaagaactactgccttaaaagtgcatttgtggcacatcagcctagaactgtatcatggctgtgctggggagaagtaaatggtggtaatgtaacattgccacctttacttaatgatgtgttattttcgaggtacagtagatcaatatagtaataggcgagcctcatatatagcattcatcttgtacaatgatatccatacccttgatatgaaggaaaattgacttggtttgtgcatttgaatactgaaataattttttaaaactcagtgacacataccatctcttgccaagactagaccctgtattttagttcctaaattagatgtttaaatttaaaaacattttcagatgtacttaagtacttccatagtacttttttttttttttttttttttgccccctgagacggagtctctgtgtcacccaggctggagtgcagtggtgcgatctcggctcactgcaacttctgcctcttgggttcaagcagttctccctgtctcagcctcctgagtagcttggattacaggcgcccgtcaccgcacctgcctaatttttgcatttttagtagagacggggtttcgtcatttggccaggctggtcttgaactcctgaccacaggtgatacgcctgccttggcctcccaaagtgtgctgggattacaggcgtgagccactgtgcccggcccactgttcactttttgaatggcatcattttatagctgtagaactaaaatcaatgtttgccccaattttcttaagtaaaactctactttgagctcttacctccaacttagtaaaaagcagcttcacacacaaacaagattcttactggtggaatgttaggtttcgttgttaagttaatctgtctataagctcatccttagaggatatttgaggaggaagaacaccttgcagctgacttgcaaacatctaaataatttatttcgggtgcttatgaatgttactaatggattttgtatgaatttttatcccttttcatttatacaaaaacctgggcttttatgttaattatatcatctgaggttctaaggttttttttttagattttgaaatttagggataatagctcttaggtttgggtaccactttgctgcagtttaagaaagggggaagggaactcatttattaaacatcaatcacgtgctgtgttctgtttgttttctagtcatcatatcacacacctttacgacagctcactgaaggaaggtgatactgttcccattttgtagatggaatagacaaaacctgaatttaagtagcttgctcaaggttccatattgaatatggaaagttcaaatcatctcagtaatgaatataccatatatacttgctgtattgtatctatgataattcagttacccacaatacccttttaaatttctgttaatgacatacctttaaatgtctccttgatgaacagaatcatggtcttt

SEQ ID NO: 14911 - DNA, 1161 bp, Homo sapiens
ataggattcaggaatcaaagaatcagtgtactcaggtggtacaggaaagagagagccttctggtgaaaatcaaagtcctggagcaagacaaggcaaggctgcagaggctggaggatgagctgaatcgtgcaaaatcaactctagaggcagaaaccagggtgaaacagcgcctggagtgtgagaaacagcaaattcagaatgacctgaatcagtggaagactcaatattcccgcaaggaggaggctattaggaagatagaatcggaaagagaaaagagtgagagagagaagaacagtcttaggagtgagatcgaaagactccaagcagagatcaagagaattgaagagaggtgcaggcgtaagctggaggattctaccagggagacacagtcacagttagaaacagaacgctcccgatatcagagggagattgataaactcagacagcgcccatatgggtcccatcgagagacccagactgagtgtgagtggaccgttgacacctccaagctggtgtttgatgggctgaggaagaaggtgacagcaatgcagctctatgagtgtcagctgatcgacaaaacaaccttggacaaactattgaaggggaagaagtcagtggaagaagttgcttctgaaatccagccattccttcggggtgcaggatctatcgctggagcatctgcttctcctaaggaaaaatactctttggtagaggccaagagaaagaaattaatcagcccagaatccacagtcatgcttctggaggcccaggcagctacaggtggtataattgatccccatcggaatgagaagctgactgtcgacagtgccatagctcgggacctcattgacttcgatgaccgtcagcagatatatgcagcagaaaaagctatcactggttttgatgatccattttcaggcaagacagtatctgtttcagaagccatcaagaaaaatttgattgatagagaaaccggaatgcgcctgctggaagcccagattgcttcagggggtgtagtagaccctgtgaacagtgtctttttgccaaaagatgtcgccttggcccgggggctgattgatagagatttgtatcgatccctgaatgatccccgagatagtcagaaaaactttgtggatccagtcaccaaaaagaaggtcagtt

SEQ ID NO: 14912 - DNA, 2235 bp, Homo sapiens
taatgatgtcattttgaattcagaagtgaacacacagccccacggctgtgctttctaaacagtagtctgctcctgttttaatggaatatacacctttaaaaattagccacagaatttttccagccacaacggtaggagtgtatctggttttatttaggaagcaatttgcatgtgatctggaccgctggtttgcaaacttttttcttttttgttttaaggtacgaggctaccccacgttattgcttttccgaggagggaagaaagtcagtgagcacagtggaggcagagaccttgactcgttacaccgctttgtcctgagccaagcgaaagacgaactttaggaacacagttggaggtcacctctcctgcccagctcccgcaccctgcgtttaggagttcagtcccacagaggccactgggttcccagtggtggctgttcagaaagcagaacatactaagcgtgaggtatcttctttgtgtgtgtgttttccaagccaacacactctacagattctttattaagttaagtttctctaagtaaatgtgtaactcatggtcactgtgtaaacattttcagtggcgatatatcccctttgaccttctcttgatgaaatttacatggtttcctttgagactaaaatagcgttgagggaaatgaaattgctggactatttgtggctcctgagttgagtgattttggtgaaagaaagcacatccaaagcatagtttacctgcccacgagttctggaaaggtggccttgtggcagtattgacgttcctctgatcttaaggtcacagttgactcaatactgtgttggtccgtagcatggagcagattgaaatgcaaaaacccacacctctggaagataccttcacggccgctgctggagcttctgttgctgtgaatacttctctcagtgtgagaggttagccgtgatgaaagcagcgttacttctgaccgtgcctgagtaagagaatgctgatgccataactttatgtgtcgatacttgtcaaatcagttactgttcaggggatccttctgtttctcacggggtgaaacatgtctttagttcctcatgttaacacgaagccagagcccacatgaactgttggatgtcttccttagaaagggtaggcatggaaaattccacgaggctcattctcagtatctcattaactcattgaaagattccagttgtatttgtcacctggggtgacaagaccagacaggctttcccaggcctgggtatccagggaggctctgcagccctgctgaagggccctaactagagttctagagtttctgattctgtttctcagtagtccttttagaggcttgctatacttggtctgcttcaaggaggtcgaccttctaatgtatgaagaatgggatgcatttgatctcaagaccaaagacagatgtcagtgggctgctctggccctggtgtgcacggctgtggcagctgttgatgccagtgtcctctaactcatgctgtccttgtgattaaacacctctatctcccttgggaataagcacatacaggcttaagctctaagatagataggtgtttgtccttttaccatcgagctacttcccataataaccactttgcatccaacactcttcacccacctcccatacgcaaggggatgtggatacttggcccaaagtaactggtggtaggaatcttagaaacaagaccacttatactgtctgtctgaggcagaagataacagcagcatctcgaccagcctctgccttaaaggaaatctttattaatcacgtatggttcacagataattctttttttaaaaaaacccaacctcctagagaagcacaactgtcaagagtcttgtacacacaacttcagctttgcatcacgagtcttgtattccaagaaaatcaaagtggtacaatttgtttgtttacactatgatactttctaaataaactctttttttttaaaagtctggtctttccttcaatgttacagcaaaacagatataaaatagacaataaattatagtttatatttacaaaaaaagctgtaagtgcaaacagttgtagattataaatgtattatttaatcagtttagtatgaaattgccttcccagtacatgattgtgaaaaagacatttagaaaatattctaaaatttaatctgagcctcactttctacaagggaaatcatgatttccgttcataaacagcatgctcatccccctaacaccatt

SEQ ID NO: 14913 - DNA, 2235 bp, Homo sapiens; identical to SEQ ID NO: 14912

SEQ ID NO: 14914 - DNA, 1175 bp, Homo sapiens
acctcatagctggtgggggcacagaacgtccagttgtctctctttgggatgtggtcgaccatgacaggcagagcctgggtccgtccattccttagggctgccaagtgccgaggctcattcaagcgtcccttcattttttaaccaagagaaactcaccctcatttatcacctggttattcagcggtacagtgcatataggagaggtgggagaaatgcctgattctttccttttattacagttttccaaataatgagttgattgctgattgtccatcaaagatgacaaatttggttttgagtattgttatgaagtcatgaacagaaacacatttgatggagtccctttgtaccaattaaagtgctcatgccgaactaagatttgctaagcaggacaaagatctgattcttcaattaactctctagtgaggtctgacataaattacagttcctctttcccccgtctctgccttggctctccactccaggcgaccactttatcaagttcttcgctccgtggtgtggtcactgcaaagccctggctccaacctgggagcagctggctctgggccttgaacattccgaaactgtcaagattggcaaggtgagtgaaagcccttattaaactggaaatggactgctttgggctggattaattagcagagtggcccattattcattccgtgtgcaaagtcgcaaacttgatttattaattccatttagtgtgccacttgataattcatttcaccttcacagatggcagtctgattttgagttttgctggcttttccacagcctagagataaattatggcctcggctgctttgtttattttgaagagatggccaaatctgaattggcagccccagagcccgttctgcaaagagatggggtagagccttgtagaatgttcactggacgaacttggagaccgtccacgttcgacctcacccaagagctctctctaaaaggaccctggctctgtgctcccccaagcacgcagaagaccctccctcagtttgcactgtgcctgggattctttccagcatttcctactttatacagagaagccaagagtggtgtctgacaacttctgtgtaactggattttctggaaatatccagtgtagctccagggacatcacttttattcttctacactttccagcacccaccaga

SEQ ID NO: 14915 - DNA, 1175 bp, Homo sapiens; identical to SEQ ID NO: 14914

SEQ ID NO: 14916 - DNA, 1099 bp, Homo sapiens
tatagctggaaacttgaattctcacagtaactggatattcaggccttgtaagagttgaatacctgccaggtggcctggaagaataccttaattgcaaaacaacaccgtgtctgctccagtcctaatttgaacacagacaacaactgctgaagccgggaaagcataacagtagcttgcagggaaggcccgaggctgctgcagaggagcactgagtactgtagcttttgaggcctcagtcacagcagcgggctggaagttttcacctcattttagttttccttgaataaaaccagaaacttctgaaagtttaggattaactgaatgtattatctcctggaacgttatgtttgtttcctttttatcagagaggagcagatacatgcctggctgcagccccttgacagctcattttctgattgtttcactaaatgagtttgctctctgataagacaactttctttttgctctgtctaatcctttgttattctttcagcttaaagcttttcaagccaggccaagaagctgtgaagtaccagggtcctcgggacttccagacactggaaaactggatgctgcagacactgaacgaggagccagtggtgagtgtctacctccttccctccctccctccctccctccctctctccctgcctacatctttggggtaatatgtaacggggcagaggccagttgaggttaatgattaaggctgccattttaaagcaactctactttttttggagcttattggtattacaggtaaagatgaacttttacagaaactttttggtgtggaaatacctaaatgtgcacaaaagtcaagagaaggctaaaccctgagtttcagcagttaccaccattttggtgtttgtcttccccaccaccctgcgccttgtttggctgtagtcagtcttcagggaagtcacttgtgtggcctcacagataagcacttactctttgttaacactgccaccctgccactgtcacaggtaatacagttcacaactgtaccccagcatcagagactgactctggaccacctggggtcagggctgggcccagcctagaatctcctatccaagccagcactggagcctcc

SEQ ID NO: 14917 - DNA, 1099 bp, Homo sapiens; identical to SEQ ID NO: 14916

SEQ ID NO: 14918 - DNA, 1098 bp, Homo sapiens
tcgtctgtagcaaaaaatacaaatgcataaaagctcaggacccagatgaagcatttcaccacctgggcctctaaaataagttggcagctccaacgagaaggtgtaggttgaaaagaggtccctgtccctcacagctttaagcagacctgacagtttcttattgagagagagaatgttccttagttgacatgaaaagttttgatgacacaccaccctaattatcccctaccctctggaagagctgaatccacaacccaattctgggtgacatgtttttgcccttcttgctattatcagtctccactaactgatcatcacgtcatgttaacctgcaaatacaaactcctgagccatttaatgagaccttgatctatggccaacttgaggccctccttgcccatctcttcctccattgaagagcaacatcaaataatgcttccaataaaattgacgcgtctttgttagagatgtcaggtttaggggtgtctggcctctgaagctggctaatgcatgagtccttttctagacaaggtagagggctcattggagtgattagagcaattattcagggttacctgtcatatgtaatcagctctggcccatgtggtgggaagaggtgacctagacctgccttttcagaccaactattgctattggatggcatctttgccttcagcatctccttagatatgctcaagttccaaacatctatcggcaaaacttaactttcttgcatttttaaaaattctattttaatagccctcttactcagaggaggtcatctgaggcttgttatgatttatttttcttctgcaatttctcttttatcctacctgacatattttattgctaaatttcccgtgtgataaagcaagagtccttctgagttaaggaaaacttcttacttcctttcatctcatcaaatcatcctgaagagcagataaaagccttttagtgaaacctggtattactgaagaaggaaagaaattctaaaaccacagaaaatggcttatatctggtgcagaagtttttgatgaggtagactttattgttaatcattatgagccttatcatcatcattatcatcatcatcatctt

SEQ ID NO: 14919 - DNA, 1216 bp, Homo sapiens
agggagaggcacctccaccccacccctgggaaggccgagaggtgcaaagccgcctggacagggcccaggggtcggaggctctcgggcacggttagaaaggggaggttttggtgcctgggggacaggtctctgctccacagcgtggagctgaccttttacacatatttgcctgacatgtcagagaagacgatttaaaactggttctttgttcgtctccaagtcccggcgacagcagcccgggagggtaactgggcctggcccaggcgtcccaggcctagacccaggacaattcgatctcatagccgcggaatgggactggcaccgtctctgggagagtgtggcccgaggccaatctcctcaccctcacctccctcctggccaggtgcggctccgggagccccaaatcccgtggcttcttttaaagctcccctctaattagaagcagcggtgaaatcacttcagtgattttatctgtcatgggaaagcaaaccctaaaccaaacctcagttgcccatcccagagccaccaacgcccccattcttcctttaaaaagttctaaatggaaaagataaagcgctggaagccatagaggagtgggagaggggaagggaactgtgaaagtaggaagaagggggtggacctttgtacagaagtgctaagtctgagtgtgtaagagagagtgtgtgtgagtgtgtgtatgtatgtgtagagtttctctctttctctctacgatgggaggagactaaacctagaagccagaagtgacacagaatcatgaacgtcttcacctattgagcaacagtttcatgtggaatctaacgctgaagtggccccggggttggcagagtcagatccgctaaggccagccgtgccctgcacctcgtgggcgggtggggaggcggggacggcgacctgtccccactgtgtccaggtgcgcggggatcatggggtctggacgcttctagcagtctagcccttccccaacccccgacccccacccgggagtggagactcccccagttcgaaagttccgaggggaggctagccatgggtcgagcttgtcgatgccccaccactggagtgcgaaaacacactcacactcgcatcgcacccagcacatccagcagtcagtcagcttcggttcccgggccagggactgaccgggaaagcgggttggggctgttgggaaaagctggagctgatggcaagattgccg

SEQ ID NO: 14920 - DNA, 1198 bp, Homo sapiens
ccttaagtattgtgctgagatgagggcatttcataagttaacaaaagtctaaattgttgctttttttttttttttttagaaaaacatgggttttggtttctattaaatgtaaatatctgtggttattttgccagaagcctggtcagttttatcaatgtcaaataatataagaaaatcaagggaaaaagaattccccttttttccttacccctttctgatctcttgggagaccaaaagaatgatatctggataggtgtaggagagaatgctatctagatgggtataggagagaacgacatctacatgggtagaggagagaatgctaccttttcttctcttttttaggagagagaacaccttttttgctgtaggtttatgccatggcatgctggcttctgccttctcactgcaacagtgtggccccatgtaaatcatagaacctcatgggacctcaaatctctccagctacaaaatggggaacccaggtagaaagacccctttcattcctacacatacctttctttgcagaagacacaatgcctagaacaatgtaaagacctcccacgctgctagtgggaatctatagagagaaaggcagaagggctggtgagcctggatcatgtactgcccatcaactttggcaagcgcatcccatttcccttgcaggaattagaggcgagagctcctccagagagcaactgcctggagaggaaggccattgcggtccatgtcagtggtctgtcctgtctgattctgcaagggatgcctttcaggataacgtgccatgtcctggggctttgtttctttcctttcttagactctgggcaacatcctggttcagggagaaaggatatcctgcttctaggtaggccttcacaaattacaagtgaattacagcaaacaaatcttcaaatgctctagccctagtagtgcctctctctaccttcaaaggcagtggaaaatctaatcccacgctcgagtaactcccatggttttacacttgagcattctttgtgatttaagatttggcatgtgaatctggttcttatataaccacacagccgttaatcaatatcagctcttctattttttttgagacagagtctcactctgtagcccaggctggagtgcagtggtgcgatctcggcttactgcaacctctgcctcccgggctcaagtgattcttgtgcctcagcct

SEQ ID NO: 14921 - DNA, 1136 bp, Homo sapiens
atctctctgcatctctgtgctggcttccatcaggcaaattctccccagaaagccagaagtagctccaagtgtacttgcttttcacagtggttactcctgggggacaagaaatactttttcctgagagttccagcggcagcttaagggagacctcagattggccctgcttggtccaaattcccatccctggttgggcacggtggctcacaccggtagtcccagcactttttgaggcccaggcgggaggatcccttgagcccaagagtttgagaccagcctgggcaacaaagcaagaccctgtctctacaaaaaataaattattcaccaggcatggtggtgtgcgcctgtacttccagccactcaggagaccaaggcagaaggatcacttgacagagtcagaacttctctgaaaaaaaaaaaaaaaaaaaaacaaaaaaaaacccacaaaaacaaattcctatccataaacaaatcacaggggtgaagaatgctcaccaacatttcttgggtcccttttctaccctgaagccaagggctggggacaggctttggtggaggaggctgctcagggtgacgctgggcagagcaaagcacaggcccactgcaggacaccctttgtcctacactgggtggcagggtgggttaagggttgttaacaagcagcactttgggagactgaggtgggtggatcaccagaagtcgggagttcgagatcagcctggctaacatggtgaaaccctacctctactaaatatacagaattagttgggtgtggtgcacgcctgtaatcccagctactccagaggctgaggcaggagaatcacttgaacccgggaggcagaggttgcagtgaattgagatcatgccactgaactccagcctgggcaacagagtgagactcggtctccaagaaaataaacaaataagcacatccctcctgtgatattagaggggcaagatttagttttatacatatgggtgtgtgagtggatacaacattaaccatttgtacaattttaactgacctaaccgtacccttttctctcataaaaacatgttcaataataatgtcactctattatatttggacaatgcttaatttgcaagggaaatttcttacacattatctcctttaa

SEQ ID NO: 14922 - DNA, 1152 bp, Homo sapiens
tcgatttttaagagccttcaattgtagatgaacatctctgttatttatccctcattcatccatccgttcattcattcagccttcaatcaacatctcttgagtgtctattatgtacaggacatgtactgagacaaaaaggaaacataagagctttttcactctaaaaatcttggcaataatgtcaacaccagaaagcctcctctggagaatcttacagagtgattgtagtttaatacaggaacacacagggctgtgtagcatgataccaggcccaggagatcagtaattacaaattaagggttaaatcagagattattcaacagagagggagaaaggaggagacagagggaggacctgttgtgttccagccattctggtattcctttatgtatctaatttcattcaaacctcacaacagtcttgtgaggcccttatataattactcccattttgcagatgaagtaactgaggcttagaaaggttaatagcaccggggaacaatttctctgggtgagaattgggactctgttgctggtcttctcagttcatttcctgaggtggatttactgagagaaggtgaaataaagccatatttagtataccagagaaggtagattttaagaatggtctcagtgttaatactgagaaaaagtcctgtcagttcagaaaaaatgtgaagtctactttagtattcctgtaatactaaaccgttgagtttctaaatatttatttattctaacaaaaagcaattactacaaatggatgacacatttaatgaacacaattttattttttttctgtaactgtgcttgttgaatgtcaatcatatttaaagggaatgactttgaagtaaaaccttttttcttgctactgaaaaaaatggagttgttttgggtggtaaagtgttaaggaatagggacagctggtcacacaaggaactcttgaaggccacatgtgaaaacctgtcacttgcacagaggccagtcccactaaggtgaccagagtgggctccaagcacaaactgccattggctatagatgggactgtgtccccccaaaattcatgtgttggagccttaaccctcaatgtgatggtatttgagatggggcctttggtaagggaagtttagatgaggtcacgagggtaggaccc

SEQ ID NO: 14923 - DNA, 1418 bp, Homo sapiens
cctgttttcaagaaagattacatactctactctgatcatagtcgtgatgctgccagtataatattttatacctgaagcaaaagagtcagtatggagcaaggtctagaacagtaaactgagaggctggagtctaccataaatcagatctgtgatggtggggaggccttgctttctcttgcctccatttcttcatctcttcaaattactggcagttggattaggatctagctcatgtgtgctattttaagacctcagtgaaactgtcccttggcttgctttttctctggttcccccagggatggaaattttacctctgaccactcttgccttagtacctcctcccccacacagttgtgaggaacctgcagagtttagttccttaaaaacatagttgcctgttctatcctttacctgatgttttctatcttacttgttttaaacagtttgctgatggccgccaaagttggagttcgtatgttgatgacatctgattagcagaagtcatgttccagcttggactcatgaaggattaaaaatctgcatcttccactattttcaatgtattaagagaaataagtgcagcatttttgcatctgacattttacctaaaaaaaaaaagacaccaaatttggcggaggggtggaaaatcagttgttaccattataaccctacagaggtggtgagcatgtaacatgagcttattgagaccatcatagagatcgattcttgtatattgattttatctctttctgtatctataggtaaatctcaagggtaaaatgttaggtgttgacattgagaaccctgaaaccccattccctgctcagaggaacagtgtgaaaaaaaatctcttgagagatttagaatatcttttcttttgctcatcttagaccacagactgactttgaaattatgttaagtgaaatatcaatgaaaataaagtttactataaataatatttcctatggtgtcttcattgccagagctggtctagttcatagaatgagatgttgctagatatagaaacttgaaagtattttgttgatatttagaaattacctattttgagtaatttaaggaccaaggaaagttatttgattgtacattgcattgaagcttgtttcaaaaatgatctctgaggatttttttgtttgttttttaagagacagggtctttctctgtcacctaggctggagggcagtggtacaatcatatctcactgtagcctcaaactcttgggttcagtcatcccacttcagcctcctgaatagctggtactactggtgcataccacctcgctaatttattttatttttttgtagagatggggtcttgctctgttgctcaggctgctatcaaactcctggtctcatgcgattctctctccttggcctcccaaagtgctggggtaatgagca

SEQ ID NO: 14924 - DNA, 1383 bp, Homo sapiens
acagaagacagtgttggagcactctttcaagaagtgctgcataaccagtactcttgacaacaccgggagagacgttctgtggaaaaatgcagacatcaatgactgtggtttgaaaagtgattcagaagagttggattcagaatatgaagttataattataacttaaccaatttatttcacacattttctttacatatgcacaagattgatgtgataaaaatctgtttaactcaaagcgctgtttcaataaatataaacattttctgtgatatgaaagcattgtgtcatagtttaatgggcagtgttttttcttagtgatacatatggtgcatcttaacaattggtagtgtcttaggttaaattaaaaatggtagcttgtaaatttatttttctttttaagatagcagttatttattggggaatttgattctgactcttacaatgttaaacttgtaatcctgtgtgaaacacatgtttttgggggggagggggtaaccaagatttcagggtagtaacttaggaatctaagaactatcttctactttaggaagagtgggattagttactccctttgtataggaggactttatgctcaaggaatgtgttgtggagaaaaacacttcttcacaaacaattcagtgacaagacctcaaaggtaatgcgtattgaggaaaacagtagtgggtgaaaattcccgcttagctgtaaaatgactctcttgccaggtttccgtgtttgtctcaactgaactctgggctgagtgtttaccagggagaagagatgtgaattaaacaaccttcctgtttagtgttacctgctttgtacaagaatgaagtgcaaagccaacttactttattaatccaagttctttttatgtttttcttaacctttattaaggactagtcatcacaaaatatctatttaacctctattttatgatggtgtgttattatgtttgatacctcatacttcttgcttagagttttgtttaacagttcactggctctgtcccaatgtttgtgatgaacacctttttgctatattgtagctcttggagatactaaaagagaattcacagaacataactttagttttatgtgtttgctaggggaagatttcctagcagctgagagcaaggcacagtctctgtcttcatttctttattagatacaattttctatttttatgtgactctagggcataacaaaacagtgacagtttcaagcgttaattttaatgcttcctactagctaaatatcatcttaaaatgattatcagaaaaaaaaataatgcccccaaaaacttttgggggcattatttggtactgggaggatatttaaattagatttttcatagtctattgttttgaactatggattctgt

SEQ ID NO: 14925 - DNA, 1290 bp, Homo sapiens
tgatgccaatatgaagatctataaacaaatcctttgtttagaacttttttctcttcgtgcacctcacaacacacttaccatggtacatatttcttaatgccactaagaaaggcaagatagtgaacgcagaattatttatgtggtatagtgtttgttttcctgttttagtgcttttgtagctaaaacttactggaactgcatcacaactacatttgcagtctcagtgggaggtggactagcctgtggttaattttagagcttaaaagtttataagcattaaaaacacatacatgtattagaatcttgtctaacccctcacaaaggatgatggtgatcagcatgccatcttttgaagattaattctaaaattgaggactctggtaggttgttttatttccttcccaaccagccattcatttccaattgttctgcctttgaaactttttgtgaaaattgcctgtaccaattgcattggttgcgttgctctgatttaaatgccaaaaacactaaatatttgtgtagtgctgttaaatgaggtttttgatatttccatcaaaatgaatataaaattcacttgatggattttgtagtgatgttttcacagttgaaacaaacatattgctgtgcggtggacagccacttcacagacatgcagacccatttctttagagatattaggtttaaaacccattttaattttattttgctgaaggtttggaatatataaagtaatggattcacaaaatatgatatcttaaaacatgttgaaagatttgaaagtggtgcatttttacttttaagagcagcaatctttgaaattagtcaacaatgcagtcttttttaaaagtcagttttctcaagtagtatgttgtaacgtaagatgtaactgatataactagattttgactggtaaacttaaagtgctttttatatttgaggttgactttaaaaagccattgagcagtcctcagaggttatggactctcaagcgactaatggaatagtgttctgttgtgaagtctagaactaaagcaccttgtattgtctgcttctaaagtgtcctatagtttttaacttaaagtgtaaagagtaacattttatcttatgtcaattaaagttacatttttcatttgttggtgtacatgtgctacctgttttatggggaatgtttaacacgatcctccaagttggttctatgcataaccattcaccaaatactgctgctgtgattccttgaaggaaatattctgtggtctgctatgatgcattgccatcttgctgcttgacaat

SEQ ID NO: 14926 - DNA, 1100 bp, Homo sapiens
accaaacagtgttacagtttgttacccaatatactttcttagtatttgcagcatacatttcactgctcaaaaaagtataagggttttgtttgtactttaaatgagagaaataaagaaatgagttggcctgtatatcttgtatttgtgatatgagcaacgggataatttgaaatcacagaatgttgtgggaaaggtctttaaagaacctctaatgaagaaaatgtggctgccacattgatgtacctaggctgccactcatacagcaaataattctattttgtaaacacttcgtgtggatccactatgtaaagtgctctaccaagtattttctctagtaagaagtacaagaattaccaagatggaattctttaccttgagtacaccaagagctagcaagatgatttttaaatcctaaaaagtttgggacaacattttgcttcctgattttagttgagagttagcctgttatccctccaaattctcattttcctggttcatccactaaatagaatttccataactgagatatcatggctgtgacatagtgaagagaatacgagactccaagccagcaacacagattgaattaagactctgtcacttgtcaactttttgaccttgagcaaatcacttaacttctctgagcctcagttcatactccgtaaaatgtgactaatacctcatgtagttattgtgaggattacgtgagattgtttatgaatggcaaagcagtatgtatttcacagtaaatgatcaactgatagtctctagaatttttttaaattacattttgcaattgcattaccaattgaatatgttgttttgtaaaattcatcaattttgtttcatttctatattttccttacatatgctttaggaaagaaactaaaaacgttttcttataatcttgcttcatctccttttcactttttctttttaaaatcagcagatctttaagaaccttttgtgaattggtggtggtggaaatggccagtgcaagcaggattaaattaggagttctgttgaccactggttaaaataggaaaagggtagagaggtagtcagccttgactcccttatctattcccacttacttccct

SEQ ID NO: 14927 - DNA, 1102 bp, Homo sapiens
ctgtgttttgttaggactagaaactatactggatgagtatgtatactgcatgtttacacatgctgtgtttctttatatgtgaggcttcactgaccaccgtgcattttgaaattgtattgcattttgtgtgtgtgtgtggtgacaggtttgctcttctcacttaaggagctctggtctgtgtaggcagtacagtgttgttagggaggttgctgaattatctaaaaatgtatccatgaatttgggggaaataatgcttaatatctgaagtattttcagtaaatgtggagatatatcagataatacttttaaattagtggaaacacatttctgagtgaactgagctatgaactataatcatctcttcccctgagtttagggaagttgttttcacattctttacatttattgcacatatactgaacttacataataactcttccctgattttgagaacgaatttagcaatttcctaaaaatcttcctcctctttccatacagatgtcgtatgttatagtttaaacatatgtacaatttgttgatagaatccaaggagctggtttaggaaagaatactcttaacccctacagttatgcagctctaatcttactgaaaagtaaatactttaggcaagtcaggagagcatgaacctcatacatacatttttacgattatgtactgcacccacatgtatctactcttggtagtaacatgactccaccctttttgggaatgtatttaggtggataactgaaacggaaaagcagtttgacacaaatacacagaaagaggaattgcggtgcataatcaatcgtctgagtcccataactgtaacactttttctcttataaattggtagttcctaaaaatcaccactttaaaaattttattctgtcttgctgaattaagcagaaatcactttttttagagccttgtttaaaggaacgttaactcgagagtactactgatgatgacgcttctcttgtttttaaagtatttacacatcattgttaagtatttttggaatggaacattttaaagttttctccatagaaagcaacatagtggcacttgttgagtaaatgatcataaaaatgacttgctt

SEQ ID NO: 14928 - DNA, 1151 bp, Homo sapiens
ccaaaatccccactgagaaatcctcttcaggcaaaacataaacaaaatacagaagagtcatctttcgccgttcttcatagtgcttcggagtctcacaagaaacagaattatattcctgtaaaaaatgggaagcagtttaccaaacaaaatggagaaacacctggaataattgctgaagcctcaaaatctgaagaatctgtctccccaaagaagcccttgtttctgcagcaaccatctgaactgcgtagatggagatccgaaggcgctgatcctgccaaattcagtgacctcgatgaacaatgtgactcaagttccttgtcaagtaaaaccaggactgacaatagcgaatgcatctcttctcattgtggcactacgtccccctcctatacaaacactgcattcgatgtcttactgaaagcaatggagccagaactgagcaccttgtcacaaaagggctcaccttgtgcaattaagacagaaaaactgaggccaaataaaactgcacgttcccctcccaaattaaaaaacagttcaatggatgccccaaatcagacttcacaggaattggttgctgaatcacagtcttcttgtacctcatacacagtccatatgtctgctgctcagaagaatgagcaaggggcaatgcagtcagcttctcatttgtatcatcaacatgaacactttgttcccaaatccaaccaacataatcaacagcttccggggtgttcaggtttcacaggatcactgacaaatctgcaaaatcaagagaatgccaaacttgaacaggtttataatatagcagtgacatcatctgtaggcctaacttcaccttccagtagatctcaggttactcctcaaaaccagcaaatggattctgcttcacctttgtcaataagtccggctaattctacacagtcgccccccatgccaatctataattcaactcatgttgcctctgttgttaatcaaagcgtagagcaaatgtgcaatcttcttctgaaagatcagaagccaaaaaaacaaggaaaatatatttgtgagtattgcaatagagcatgtgcaaagcctagtgtgcttttaaagcatatccgctcccacactggagagcgaccctatccctgtgtgacttgtggattttcatttaagactaa

SEQ ID NO: 14929 - DNA, 1174 bp, Homo sapiens
ccaccatgtcactgtgtcccccttaagaactgacagtccaaaggccatggatcccaagcctgaactttctagtgcacaaaagcagaaggaccttcaggtgacaaacgtacagccactttcagccaacatgtcccagggtggagtctccaggttggagactaatgagaattcccaccagaaaggcgacatgaatccactggaaggaaagcaagactctcacgtaggaacggtacacgcccagctacaaaggcagcaggctaccgattactcccaagagcagcaaggaaagctcctgagtcctcgaagtttaggaagtacggattctggttacttttcacgttctgaaagtgccgatcaaacagtgagtccaccaactccctttgccagaaggttacccagcacagaacaagactctggaaggagtaacggaccctctgcagctcttgtcaccacgtcaacaccctctgctttgcccacaggggaaaaggcattgcttttaccaggtcagatgcgcccacctttggccacaaaaacacttgaggagcggatatcgaagcttatctcagacaatgaagctttggtagatgacaagcaactggatagtgtgaagccgcggagaacctcactgtcaagacgaggaagcattgattcccccaaatcatacatatttaaagattctttccagtttgatttaaaaccagtgggacggagaacaagttcaagctctgatataccgaagtcacctttcacccctactgaaaaatcaaagcaagtgtttcttctgtctgtaccttcacttgactgtttacctatcacaagaagtaattccatgccgaccacaggttattcagcagtacctgcaaatataatacctcctcctcatccactaagaggaagtcagtcatttgatgacaaaattggcactttctatgatgatgtctttgtatcgggacctaacgctcctgtgccccagagtgggcatccccgtacacttgtgagacaagcagccatagaagactcttcagcaaatgaaagtcatgttcttggtactggacagtccctggatgagagccaccaaggatgccatgctgctggtgaagccatgtcagtgaggagcaaggcactggcacaaggcccacatatagaaaaaaagaagtctcatcaagggcgaggg

SEQ ID NO: 14930 - DNA, 1096 bp, Homo sapiens
atcaaggtgacaaagtgaacatccaagagcaaagtcaacagccagtcacttctctttcattgtttaacatcaaggacacccagcagctggctttccctagcctgaaaactacaaccaactttacatggtgttatctcttaaggcagaagtcgttgcatttgcctcagaaggaccagaaaacttcagcctatactgattggacagtaagcgccagtaatccaaatccactcggtttgcccacaaaagttgcacttgctctccttaattcaaaacagaacactggaaaatcactatactgtcaagcaataactacccattccaagtcagacttattggtctattcaagcaagtggaaaagcagcttaagcaaggtacttgaaatataatttatcttcagatatggtttgcgcaaatttgtttccatgtgtcttgatacctttaaatattttaactggaaatattttaattttgagtgacaaattgtgctgtaaatgtcttatttgaaagacagggtgatatatttaccccaggagttacattgataagagttaccaagagtcttgcagtgattctatcttgaaagattttagaaatgatttaccctgagcacttttctttttctcagctaactatataagtctttacttagtagtacagatgatcatggttttactttgatgttttacttatattgaggttttgtttttcttgttaagtgaaaggaaatcatggttatgctttgttcctcctcatgcagggaaacaggtgtagataatcaaagatagttgtatttcatcctgaaatataagcagaaagccatttagacttgtcttgagcttactagctacacgcccctgtcatgctatgtagctgtcttccagtgtagctgtgagaaccattagcactagagagaagtttcacaaaataattcatatacttggtaagttgatttggtcaagatttataaagtaatttaaggtcatgaaactgtaacttggggtaatttgtggaatcagtctcattagaattatcagctttataaaatgggaaaaagtcatttacttgattagaataataggtaagcatatcacgttcg

SEQ ID NO: 14931 - DNA, 1224 bp, Homo sapiens
gcgcacacacacacacacacacacacacatctccgaggaaaaagatacaaataaagaagatggacaggctttcctttccgtctggcggcagccatcaggtaagccaagatgggtgcatacaagtacatccaggagctatggagaaagaagcagtctgatgtcatgcgctttcttctgagggtccgctgctggcagtaccgccagctctctgctctccacagggctccccgccccacccggcctgataaagcgcgccgactgggctacaaggccaagcaaggttacgttatatataggattcgtgttcgccgtggtggccgaaaacgcccagttcctaagggtgcaacttacggcaagcctgtccatcatggtgttaaccagctaaagtttgctcgaagccttcagtccgttgcagaggagcgagttggacgccactgtggggctctgagggtcctgaattcttactgggttggtgaagattccacatacaaattttttgaggttatcctcattgatccattccataaagctatcagaagaaatcctgacacccagtggatcaccaaaccagtccacaagcacagggagatgcgtgggctgacatctgcaggccgaaagagccgtggccttggaaagggccataagttccaccacactattggtggctctcgccgggcagcttggagaaggcgcaatactctccagctccaccgttaccgctaatataagtaaagtctgtaaaattcatacttaataaacaatttaggacagtcaaaaaaaaaaaaaaaaagaagatggacagaaaatgcttttatttgacagattcctcaagagggattaatagtacacagcagtatgagtgtggtcagcagcagtgaatgtcctatacacatataagctcttaaaagatatttgaaggctaaagaaacacactagagggttggaatgtgtctgtcttgtgattttttaatcctttggctatttattctacataacctaatttaatttgaacatttgcatataaaaatgcctggccaccatcaactaatactctaactttgacttcactaagtttgtgagatgacttttgccatgaacacgttaccctccatttttccaagggagtgtttttggaacctaatcaaactgagaatttgcattcaaaggtatccattttctaacttgcaaagctgactttttaatcagacttcttatctgcaagca

SEQ ID NO: 14932 - DNA, 1145 bp, Homo sapiens
ccagactgactggggcttctgggacttctcataggaagagtcaagacctcctgcgcttctttaaaaggtgatgggctcagtgttcccagtggcatctggaggtgaagccggtactgtctcaggagtggaaggcaatggcccactggcctttttctcccccacgtcacagtccccatttgctggagcccttgagggggccaccgaaactgtggctctcattcagcctcccaaagtgttgcactactgaatactcctttctgtttacaccagcagtgaatagagtcatgaaaagaacatattatatgcaatggcttgatgcttagtgtggcaatcaaaagcttgcctgggcagatgtaggcaggggctagacaatagtcatggagttgtcaccaggtcactgtctctctccttccccttccaggtctctactgtcccctgcagccaccacaagggctaagctgttgaatgagccccttggtttttccttataaacgcaatgacttacttgtgattcttggtctaatcccaggctaagaaacaaaacaaaagcttgtgatctgacccattcctttgctgccttccttctctttcaggcacctggacgtatttagtattctgccctgtgccttgcccaggggagggagaagtttctagcaaatgtgactttctgtctgctgcctggtgcttttatagtacttcatctgctttttattgttgttgttgtgttttttaaccaaaatggcatttgtttggctgtcattgtcgagtatatatttattgtgttttacaaacatgagtatatatgtatgtatatgtataaaaccaaacttatatatataagaagtcaaggcatgtatactagatattttaaagagttatttatcaagggaaaaagatgtgtgttataaagtaaacagagtctatattttctatataatgtagatagtcaaacatagcttataaattataggaggttttggttttcttttttattattaaaggaaaaaaagaagaaaaaaaaagacaatgaatgcaactgttcttagtgtttttaaggccaaactactgtggaagctgggaggcggccctccctgcgggcctccagcagccctgtgcctgccgctaggagctccagagctgatgcc

SEQ ID NO: 14933 - DNA, 1173 bp, Homo sapiens
tttttttttcttctttttttcctttaataataaaaaagaaaaccaaaacctcctataatttataagctatgtttgactatctacattatatagaaaatatagactctgtttactttataacacacatctttttcccttgataaataactctttaaaatatctagtatacatgccttgacttcttatatatataagtttggttttatacatatacatacatatatactcatgtttgtaaaacacaataaatatatactcgacaatgacagccaaacaaatgccattttggttaaaaaacacaacaacaacaataaaaagcagatgaagtactataaaagcaccaggcagcagacagaaagtcacatttgctagaaacttctccctcccctgggcaaggcacagggcagaatactaaatacgtccaggtgcctgaaagagaaggaaggcagcaaaggaatgggtcagatcacaagcttttgttttgtttcttagcctgggattagaccaagaatcacaagtaagtcattgcgtttataaggaaaaaccaaggggctcattcaacagcttagcccttgtggtggctgcaggggacagtagagacctggaaggggaaggagagagacagtgacctggtgacaactccatgactattgtctagcccctgcctacatctgcccaggcaagcttttgattgccacactaagcatcaagccattgcatataatatgttcttttcatgactctattcactgctggtgtaaacagaaaggagtattcagtagtgcaacactttgggaggctgaatgagagccacagtttcggtggccccctcaagggctccagcaaatggggactgtgacgtgggggagaaaaaggccagtgggccattgccttccactcctgagacagtaccggcttcacctccagatgccactgggaacactgagcccatcaccttttaaagaagcgcaggaggtcttgactcttcctatgagaagtcccagaagccccagtcagtctgggtggggggtcccctgaaactcagagcacgctccagctgctggctcctgtgcctggcggggagaaggtggagaggcgggcatgcctgccgctgagaaagacataataacgctccagctgcacaccccttttcttccacggccctcctctttc

SEQ ID NO: 14934 - DNA, 1197 bp, Homo sapiens
atcctcccacttcggcctcctgagtagctgggaccacaggcgtgcaccaccacgcccggctcattattattattattattattattattattattattattattattgagacaggatctctctgtgttacccaggctggcctccaactcctgggctcaaggcctcctccggccttggcctcccaaagtgctgggacaacaggcatgagccaccacatctgaccttctttttctattaatgtgaaatattttaagatctgacccagggacgcgcgctcggacatggtcctgccccgctgaccgctgtcttcctcccacccgcaggcatcggcaagaacgtcatctgcgaccgcacggccacgccgctggacgctttccgcatgacctcggccgcccactactaccccaagctcatgagcatcatgggcaacgtgctgcgcttcctgccggctttcgtgcgcatgaagcagctgatcgaggagggctacgtgggcgagccgctggtgtgtgaggtgcaggtgcacggcggcagcctgctgggcaagaagtacaactggagctgcgacgacttgatgggcggcggcggcctgcactccgtgggcacctacatcatcgacctgctcaccttcctcaccggccaaaaggccgtcaaggtccacgggctgctcaagaccttcgtgaagcagactgaccacatcaagggcatccgacagatcaccagcgatgacttctgcaccttccagatggtgctggagggcggggtgtgctgcaccgtcaccctcaacttcaacgtgcccggcgagttcaagcaggatgtcactgtggtgggctcagccgggcgcctgctggccgtgggcaccgacctgtacgggcagcgcaacagcgccccggagcaggagctgctggtgcaggacgccacgccggtgagcaactccctgcttccggagaaggccttcagcgacatcccctcgccctacctgcgcggcaccatcaagatgatgcaggcggtgcgccaggccttccaggaccaggacgaccggcgcacgtgggatgggcggcccctcaccatggccgccaccttcgacgactgcctgtatgccttgtgcgtggtggacaccatcaagaggtccagccagacgggcgagtggcagaacattgccatcatgaccgaggagccggagctgagccccgcctacct

SEQ ID NO: 14935 - DNA, 1116 bp, Homo sapiens
attccacttgtgttgacagccccttatcttctagaagccaaaacggatgctagttctgcaggctggcttgcagctgtcccagcagattggcagagcccccaaaagaagtcccatcagatatggcttcctattttttcctcgcatttgcagaaggtagagacggcttgctttgcatttcaagtagggaactcattatcttcatttatactttgttccttcaacatttctgtgctaggcactgggaccaaaaaatgagtaagaaagatgaataagagctcacagtctagtagaggagaccaatcaggaaaggcgtgattatggaatgcagatctcagaaagtgataaacaatgaaaccatgaaggaagggctgcccaaccgatttgggcatggaagaaagttttgctggagagggaacgtttgagctgggttctgaagcatgcataggagcttgcctattcatcattcagagtttggttcgggtataaaaaatggtctaaaataagattaatggtgtttaatgtggaatctgggaaactgctaatactggactgtttataaaaactgttgtgtgtatatcctgatgcacagttttctgagagaggttcattagattcttaaaataatctgtgattcaagaaagattaagcagaattggagtttagagtaaagaaaaagaaaaaaggcaggtcaaagacaaatctctggtttcaacagaactaagcatatgaacagagctatttataatccctccatccctgcaccctgagacatgggacatttagtcactttcactctctcactcacttactgcaacactccatttagcccagctctttttccccttttatttttcttcctgctaatctccttcctgctcccccaacacacacacacacacacacacacacacacactacgctttttttttttttttgaagttagaaactgcaaaagaagtggaagtatcatcaggattgacttgtctaaatctcactcttccctctgtcccttcctccatatacattaaaagaggccatttgaagagactaaatccccgattttcaatccccatgaaagttcttaacatcaatacaacttcccaactcaaaagacta

SEQ ID NO: 14936 - DNA, 1233 bp, Homo sapiens
cccaaatatacagaatgaaaacagtaaatttaagctattaaatgccagactagctgagatcatacttttatgataactagctttaacatgcagtttatagaaatgtatcatatataaaatgtgggataaacctgagttatgtgtttatagttgaatttctgtaactactatatgacataatcttagaacaagaattacatgcacatatattagtagcataataccacgtggtataatacaacgtagtccctgaataaataaaacagagatcttgggtctctttgttttttcttgatgattacattgcaggaagtgatattttttcatctaacatataatgtattttagatcatttgttttagccttctaatattttgattgggattttaaaatatgaagtaaatttatagttctattcttttaaatgtaacattaaaagaattattaaatctaacataaaatggatagatgtttaatgaaatatgctatcttacagccaaatttgtatcctactgtggggcttcaaacaccaggagaagtggtcgatgccaattttgggcaacatcctttcgtgtttgatatagaagactatatgcgggagtggagaaccaaaatccaggcacagatagatcgatttcctatcggagatcgagaaggagaatggcagaccatgatacaaaagtaagagtgaagaaatttcaattgatgctattcagaatctgttttttataagacatttattctgttggtatccacagaagctttttaatccactaatttatatactgacatatctattatattattgattttaatctctcaacgaaaagtaatttactccactatttaaacaaattaaaaacaattgtttgacacacgtacagaattgtatttcagtctgaattaatttgatgaaggaaataaaatgatgttaggtcacctaggctaggttaattcatttgctattcttagtaataggatttaatgatttctgtaggttatacaatttaacttttaataatgttaatggaaaagataaagttgagagataatctagatcttataatcaggatctgtggtttttggtcatgaacttggctatgtccaagctcttaatatctgaactatcagcagtagttaagtatggacttaaaatttaaataaataccattaaatttaaaaagtcctcttcactattataatccaggtcaagaaaatagcagactttcagat

SEQ ID NO: 14937 - DNA, 1151 bp, Homo sapiens
aactgataaggtaaaaatctcttaatgatgatataaacatatctgtagtgtggtaagaccacaccctgtttggcttttatatttggatcacagtcttgagaaacttgcagtgattgaataggatgtaatctcttatgttatataaaacgtgtatgtgtttctttaaatcaaaacaaaattattttggtgtattagcaaacggaatatgcacagaaaatgtgtcctcctgtggttgttgcatttatgtttgttttttctggtagggggttctctctgtttaatatttgttttagtgttctgtgtagctatttttcttaaatttgtaaactgtattttaatatagaataaattatgtagtgtaattgttgagaatttaaatgtacattgggaatttcatctttatattatcttgtactgttctgatttatcataatcttagtgaataaacctagtacagaggaaccttacttttcattgtaaatatgccggaactttctccttaggttgggataagcattcatatggttaccatggggatgatggacattcgttttgttcttctggaactggacaaccttatggaccaactttcactactggtgatgtcattggctgttgtgttaatcttatcaacaatacctgcttttacaccaagaatggacatagtttaggtactgagataatatattgcatgcaaaataaccaaatatggagattattatacttccaggatggtagttgtatttattatgtgattctcctttatagatggatgcctctggaaatggtttctttctttttcccagacagaagctgaggaaatggtgaatatttatattcaccctatttatattctgtgaaggccatctatataatacatatatgtataggagttactgtagaaataatccccacactgagatacttattctagaaatagaaatgccaagagttttctactttaaataaaacgctacacagtataatctaattctctgggtaacaggtgctaagaaaaaggggcagtcagttgttaggatagtgtggggaatagtaacaaaggaagggaaagcttgatgccacaagcatatgaagggcatcaacacactcaaaggtcagatctgctaacaaagatggctaagttggtaact

SEQ ID NO: 14938 - DNA, 1107 bp, Homo sapiens
cttctcagagaggctttctcagactgtaaagtactcacttgttcactttctttcacattagtgttttgttttgtttttaaatactcctgcatagagagcactatcactatttgatgtttttaaatcgattcttcttttgttttgtttttgagacggagttttgctctttcacccaggctggagagaagtggtgtgatcttggctcactgccacctccgccccctgggttcgagaaattctcctgcctcagcctcccaagtagctgggattataggcgcccaccactacgcccaggtaatttttgtatttttagtaaagatggggttttgccacattggccaggctggtctcaaactcctgacctcaggtgatccatccgccttggcctcccaaagtgctaggattacaggcctgagccactgtacctggccaaactgattcttctatttgcttgtctcttctgactagaatgtaagcttcatgagagcaagcatggtgcccggatgcccaggatctagagcagagcctggcacacagtaggtgctctcatgtaaatgctgagtgagtgagtgaatcatgagctctgaagctggaagcctaggagagccttgggggtcagggacagaggaaggaaagagatggggcaagaggcagggcagggacaaagaaggaattggtgaatcgtggtggcagggctgaggaagcactagtcagggcaatggattgaacacaattggccttcccagactgagaatgcagccagtgtaaggattcctggaagagctctgggtcgagtaccctctccttctcctcatacaacagggataggcttatggagctcattatccctacgatggtggagactgggaaacggaaccatcttcccttggtgtagagaaactcatggatgacaagttttcttttaataagttatctggataattgggggccaggtggaaaactcagctacaaagttgatgttgagaaggactcattcatcttttatggaacgccctttcttgtctttgcaagagccggacattgtgttagataggatgtggactctccagtgtggccaacctggctttttagggactaggagttctc

SEQ ID NO: 14939 - DNA, 1162 bp, Homo sapiens
atatggcatgggctattattgctgcaggaagggtacctgtcaagtatgtagagtgcaaaggacccttccttagatgtctagctgctgaggccccacctgtgtggggatgggcatggaggcacctgccttgttcaagaagcctgtgaacagtgaccagcagtaaaagccagagagatcttcaaatgtagtatcttaataatgggctttttttttctagttcttctttttcccttggggccacatgagcatctgtacacctattgtaaacccattgtgtcaaggaaacaaagtaggtcagaaacaggatttaggaacccaaagaaataatctttgttgatgcttaaattgaatgaggcagaaacaaatgtctctttaatatggttttttttttttgggggattattttggtatcaccccaagcctgtaattccctccttagtcatcatcttactatcccttgggactctggcctgggattcttctgctttgtggttgtgattaatcctgcaatgagtgagttggggagggatgggcctggggaagtcagctgctgctagcagcaagcaggggtagggtttatagggagagttgacatcctgctgggatctaacagaaaagtttgaagattattgtgctgaaataaactagctcacaattttgctgtttgactcagggcaagctcactgtaaatctcaaggagtactggactgtatgatggcctcttttgctgtccttatccccactggaggatgcacagattagttaatgtctccctttcatgaatgcagcttttatctttaataagcgggttaaaccgcatgcgctctgtctagtctgtgaaggtcagccagccattcggattttatcttcccatttctagactgctgacagagttcttgtgcaaagttaggaatctttgggttttaaaatgttttcttcctttgcccatccatgacatgcccttattcttgaggggaggaaaaagaaggcctgagtctctgttaggttgcaaatattgtctattttttgggagtgatctttgtagaatctgggcagtgacttttgttgttttgtagtcctgatgatttaaaaaacatatctcatatatttctttacatacagctcagagctcaacattgaaatagatgttcagcagattctt

SEQ ID NO: 14940 - DNA, 1102 bp, Homo sapiens
gactggattgtaaattccttgaatgcacagcacccatatctgctgtatcctttgagctcccaagggaggcagcaacatttttaagagctccgtacatatttctgttgcagtgtacattctggcattgctcactttataaaactcaagtaaaatgatccattatccttctggttgtgggtataacaacacctttttctgaactttgtcaggaatataaaactattactagttgatgaacgtatttgattttggggcgtataaagaagtgagatggttgtgtgttgctttcattctttttaacagcctgtggattcacttttctttgaggcctgttcagaaaggtcattgcccctttaccttatgggtgtaattctgacattgagaactgggtcgtggtcacacagtacgtgttcggaaattcctttaaaataaagtttattttgactctgaatattgccttgctttctattcagtaactcctctcttttcttatgtttcttcaggatgacagtgatgggattccgtggtcagaagaacgggtggtacgtaaagtcctttatttgtctctgaaggagttcaagaattcccagaagaggcagcatgcggaaggcattgctgggagcctgaaaactgtgaatggtgagttgactcttggaatatctcattggaatgtacaatatctctgggcgtggacttgttcctgaattggatgtattctggcagcttgtgcttcctggtctaggcacctaaaggcagtctgtaggctaggtgaatctgcactgcagacatcctgttgggtttatagggttgtttttgtgttcctttatgtaccgcgttatatagtggacaaaatacattagtctgttctgtaggtcctgtcttgctggtttttctatatgtatgtctttccacactggtatgtgagcagaactctttgatgatcttgctgaaatgtggagtctttagttcttgtccccgggttgtataggaaatagcctaaatctttctgtctactgcttttcctgctctctggctcagcggctttctcatctctccttccttccttgctgggcaggttcctgcagtgggacagctttgcata

SEQ ID NO: 14941 - DNA, 1192 bp, Homo sapiens
ggtgatttttgcatccagttaacctaatcaggacatcaaagtaacttccaaaactattggaatttggggaattcatatccaccataaggaatgaatattccttatgaatacaacacagtgattttatataatgaaatgttatattctgtttttacttctgtcttctctgtctttttttttttttttttaagtctattaatttagagtaatctctcttcctcagcagtgggtaggtgtttttattttattatttttttgttccatccttggaggtgtttgttttttttctcaagagatattcagatgagattttaaaaatccttatttgttctattttgcatcttcttcctgctgggggattttgcttgaaatacgttcaaaaggcacagatgatcttgggagcatttgaaaaataaatttaaaatggcagtagagatcagttgctttgttttttctcctcggttttgtttcattgtggtgttccttctggaaagggtgagggtcaaggcctgtgtttatgagctgtttttcttattccaccaggttctcctgcgctgcccaacagcatggtgtattttggaagctctcaggatgaggaggaagtcgaggaggaagatgatgagacagaagacgtcaaaacagccaccaacaatgcttcatcttcatgccagtcgacccccaggaaaggaaaaacccacaaacatgttcacaacgggcatggtaggtccaccgttgaacttggataagaaaaaatctaaagctttgggtgagagctggaagagagcctctgctgagaagagatgagatgaaggcaaagctcgttctgggtacttctccagggccagacacttcatgggcaaagggattattagtgtagcttagtgtagtccagggtgttctaggtgagtgcagatactctgatgatgtggagatgatggtaaattctataagagctgtagataaacaggcatcagaacaggaaaagaccagatctacatggggatggtcaagaagatttggtgaaacaacatctgtgcccccctttaattactaatgtgattttagcaggtggatatggtataggaagaaaattatcattcctcctatggaattgcacatacattctgaagtggactgattttccccttgcgtgtatagtgtggaggaggaggataaaaggcaggaacaatag

SEQ ID NO: 14942 - DNA, 1137 bp, Homo sapiens
aatttataaagaaaagaggttaagtggactcacaggtccgcatggctggggaggcctcaggaaacttacaatcattgtggaagtcgaaggggaagcaaagcacttcttatatggcagcaggaaaggtagagcgtgaggtgggaaacacttttaaaccatcagatctcatgagaacgcacttgttatcacgagaacagcataggggaaactgcctccatgatccagtcacctcccaccagttccctcgctaacacatggggattacagttggacatgagatttgggtggggacacagagccaaaccatatcagtagtttgcgtggtagtggtcaaggtagtgatttcattcttgttttctccttcctttctagttttcaatggttccagcaggtcaacacgggagaaggaacctgttcaaaaacacaaaagcaaagaggccactcccgcaaaggagaagcacagcgatcaccgggctgacagccgccgggagcaggcttcagctaaccaccccgcagcggccccctccacgggttcctcggccaaggggcttgctgccacccatcaccacccccctctgcatcggtcggctcaggacttacggaaacaggtaaagtccagcaggggtgcctacatgtgtgccagaccccagtttcccacttcacttcaccaagctaaaaattcatcttcagagggctcaagaagcaggaggtgatgcccagaagcaagacagggacagacagagcgcacctttgcatgagctgcaggcgcctgcaccttttgtcctgcgaagatccatcagttggatttgcattcatccctgggtgccactgcattcaccaagaaagtgaactcacttttttacttaagccttctcccacccacccaccctgggctccagatgagcggtagagtggcagggaacatgtttttctcagggtaggttttgaaacacacctgcaaatgggatagttctgttaatggatgatcctggtctacttttctgttctttttgatgtgacaagttaacatttcaccacctggcctttgaagcagaatatgtgcatgctgtgtgcactgccgagcagtctgtggaactgggtgtggctgggtggcacctcttccactgaaggcatttg

SEQ ID NO: 14943 - DNA, 1811 bp, Homo sapiens
caggtcatgctgctatgtggagcacagaaatagcagacatgacttttcttggaacagggatatgtgtgtgtgtctgtctccacttcccccaaggaagcaggatcttgctgtcatcaactctgagaagctcaggacaggtgattgcatggcacgtggggaggtcttcattgtgaaacaccaaatttcctggaagagcaatgggaacgtgaaaatgcacccaggaaaccccgctaggaagcgcctggggcagtttgcatacttctgtgacgaaggataggtatatagtggattctgaaagtggacatcgctgcttaattcttggatgtgtattttgcttctctttgctggtatttccacatctcttcttatcacactacaggctgctggctctgttcatccccagcatccagggtcctttctcacgggtgggccggtcattttagtggcaggtactaattctgcgtttttttccacctctgcttctgctgctccacaggtttctaaggtaaacggagtcactcgaatgtcatctctgggtgcaggtgtaaccagtgccaaaaagatgcgcgaggtcagaccttcaccatccaaaactgtgaagtacactgccacggtgacgaagggggctgtcacatacaccaaagccaagagagaactggtcaaggacaccaaacccaatcaccacaagcccagttccgctgtcaaccacacaatctcagggaaaactgaaagtagcaatgcaaaaacccgcaaacaggtgctatccctcgggggggcgtccaagtccactgggcccgccgtcaatggcctcaaggtcagtggcaggttgaacccaaagtcatgcactaaggaggtgggggggcggcagctgcgggagggcctgcagctgcgggaggggctgcggaactccaagaggagactggaagaggcacaccaggcggagaagccgcagtcgccccccaagaagatgaaaggggcggctggccccgccgaaggccctggcaagaaggccccggccgagagaggtctgctgaacggacacgtgaagaaggaagtgccggagcgcagtctggagaggaatcggccgaagcgggccacggccgggaagagcacgccaggcagacaagcacatggcaaggcggacagcgcctcctgtgaaaatcgttctacctcgcaaccggagtccgtgcacaagccgcaggactcgggcaaggccgagaagggcggcggcaaggccgggtgggcggccatggacgagatccccgtcctcaggccctccgccaaggagttccacgatccgctcatctacatcgagtcggtccgcgctcaggtggagaagttcgggatgtgcagggtgatcccccctccggactggcggcccgagtgcaagctcaacgatgagatgcggtttgtcacgcagattcagcacatccacaagctgggccggcgctggggccccaacgtgcagcggctggcctgcatcaagaagcacctcaaatctcagggcatcaccatggacgagctcccgctcataggtaggtctgggcggggggtcagggggtggtgcctgccctcctgcccccagatccctgcagttccctcacagtcttcacgttctcttcccttgcgaaagctccagttccgcttccctgtctcgggagtagtgggcttctcagctcattccccctgcagcccttcttcccaggtcctgggcgttggtggcaggataagaatggtattgagctgccgggcgcggtggctcacgcttgtaatcccagcactttgggaggctgaggcgggcagatcatgag

SEQ ID NO: 14944 - DNA, 1465 bp, Homo sapiens
gaaggggaattgggagttggtaacaagcatgtgtcaaagctattctaggtgacgctgggccgtgggtgcagccaggacccctacccactcctcaccagggagctagtcttctcatgacacccgcctccatgtgacaacacatgtaccagtacatggtacactgggatgttcctccctgtatgtctgtctggccagctcgcatccttttccagccaagccccagcttaaatgctgcctcctcagacgctccccacctaaaatggtagtccctcgttccacctgctcttcgtagcaagtggtcatgacccatcattttgtaacgcccttctctctgtggaccgggagtctgctgttcaccactctcaccccagagcctgtcagagtcctggctcatagtaggagttcaagaagtacaggttgaatgaggaacatcttgttcgtgtctctttcactaactgtcccgtttttttccccttcgctgtcccagggggctgtgagctcgacctggcctgctttttccggctgattaatgagatgggcggcatgcagcaagtgactgacctcaaaaaatggaacaaactagcagacatgctgcgcatccccagaactgcccaggaccggctggccaagctgcaggaggcctactgccagtacctactctcctacgactccctgtccccagaggagcaccggcggctggagaaggaggtgctgatggagaaggagatcctggagaagcgcaaggggccgctggaaggccacacagagaacgaccaccacaagttccaccctctgccccgcttcgagcccaagaatgggctcatccacggcgtggcccccaggaacggcttccgcagcaagctcaaggaggtgggccaggcccagttgaagactggccggcggcgactcttcgctcaggaaaaagaagtggtcaaggaagaggaggaggacaaaggcgtcctcaatgacttccacaagtgcatctataaggtaggggcctccgcagagcagccactcccagctgcaggagtgcgggaggaatgagagaggaagtggagcgtgctatgcactggacggtgtgttctctgattccctggggtgatgagggggcgggccactgtgctgggtgatagcgctgtattagtcctctcgtgttgctgaaatactacagactggggaattcataataaacagaaatgtactggctcctggttgtggagcctgggaagtccaatatcgaggaacctagtgagggccttgtgggtgcgttgatggggcagcaggagacccagtgagggaggggaagtccactccacgaagataccacgagtccattccgcctgcctagggcctcgggtttccttttcattaactggcttgcgtgtgcgtgttgcatgcacgtgcacacatctccatatgccagggataagtaactgggctgcatgcttcgtttcccctgcttctc

SEQ ID NO: 14945 - DNA, 1219 bp, Homo sapiens
agatgtgtgcacgtgcatgcaacacgcacacgcaagccagttaatgaaaaggaaacccgaggccctaggcaggcggaatggactcgtggtatcttcgtggagtggacttcccctccctcactgggtctcctgctgccccatcaacgcacccacaaggccctcactaggttcctcgatattggacttcccaggctccacaaccaggagccagtacatttctgtttattatgaattccccagtctgtagtatttcagcaacacgagaggactaatacagcgctatcacccagcacagtggcccgccccctcatcaccccagggaatcagagaacacaccgtccagtgcatagcacgctccacttcctctctcattcctcccgcactcctgcagctgggagtggctgctctgcggaggcccctaccttatagatgcacttgtggaagtcattgaggacgcctttgtcctcctcctcttccttgaccacttctttttcctgagcgaagagtcgccgccggccagtcttcaactgggcctggcccacctccttgagcttgctgcggaagccgttcctgggggccacgccgtggatgagcccattcttgggctcgaagcggggcagagggtggaacttgtggtggtcgttctctgtgtggccttccagcggccccttgcgcttctccaggatctccttctccatcagcacctccttctccagccgccggtgctcctctggggacagggagtcgtaggagagtaggtactggcagtaggcctcctgcagcttggccagccggtcctgggcagttctggggatgcgcagcatgtctgctagtttgttccattttttgaggtcagtcacttgctgcatgccgcccatctcattaatcagccggaaaaagcaggccaggtcgagctcacagccccctgggacagcgaaggggaaaaaaacgggacagttagtgaaagagacacgaacaagatgttcctcattcaacctgtacttcttgaactcctactatgagccaggactctgacaggctctggggtgagagtggtgaacagcagactcccggtccacagagagaagggcgttacaaaatgatgggtcatgaccacttgctacgaagagcaggtggaacgagggactaccattttaggtggggagcgtctgaggaggcagcatttaagctggggcttggctggaaaaggatgcgagct

SEQ ID NO: 14946 - DNA, 2178 bp, Homo sapiens
cgatttatatatatttttttgtaattattatattctagtttggagtacttgctgtaggattcaagctgtctttgcactagctctaaagaagattttcttctggttttagagaactaattttgttttagcattaaactgttgaacttttttttgtacttagaaaacctagatactgcagtcagattttggaaactgccgtatagtcactgttttaaaaaccccggaggggctgtattaatttgtattgccccatggctgacaaaagcctttttttttggttttgatttttttttttttgtaactgttggggggaaaaaggctttttaacccatttttgaagagggtgaagtttggagaacaaatttaaaaaccatcagtcatgtgagcagattttttagaagggataggagacacacgcgcacacacacacacacacgaaacttgaaatggctttgctttggctgtcgtcttctgccgtgtgccagatgagcttgtgatctgggaagccggggcacccccgttttgtttctctgggcggttgtggcagctgaaggcggacgttgtttcctaaccataggtggaacgaggagacgggagcgagtgggctctccaccagcacatcactatgcatctgttccaggaaagaagaaaagcgagcgaggaagacggaaaagactgcctgccttggaggggtcacatgagggagacctgtgcctgatttcattaggaaatccattctgttattttttggtgctgttggctactttatcaaaaaacccttcaatagcatccttaagatttaaaaaaaaaaaaaaaaaaaaggaaaaaaaagtgatggaagccgtaagtgcttctttgtcatcgacgtgcaatctttctaacattccatctccatctcaccgcttcttgtttgacaccttcacaagtcagcattaatctttcttttaaaacttgtttcatttatgatcatgtagagagccactaggaggcctgcagttatttttgaatgtgaaaatgcatttgcgttcatcttgtctattttttctcttcatgttgtaacaaaaaggaaaaaagaaaaaaaaatcccatcccttttgtacatatgcctgtaaattgttttaaatacttgagcctttttctcggtggggggtggggaggggggtgagaagacaagatgaagaaaagccttacatttcagtttcttcatcggttggattggatgcttacagggtttttcttgtaacatttataagtgctgcttacatcactgaacaacaacaaaaaaataataatggagtagctgttgcccttctccggttgtgtgtacagtatgtgtggaataaaaaagggaaactgttttcacaagctgttctttgtttcataattggattcatcaatcccgtagctacccatattgcactgagcttgccagtggtgactgccaggaacgtcctatgatccactttgttggttgttgttgcagaagactgaactgttttggaatatttaacaattacagaaacagtcaagtgttttccaatgtggttgtccggtttctatggccttgctgtgtactttccctctttttgacagtaaacttctgcctatggcttacagtttgacatttaatttattagcgctgctctgcacccctcccttgggagggagacttcatgtggtttattgcgagttttttgtttacttttcaggtttgtactacaaggtttaataataaaaacaaagttttttggacatttgtctgtcttgtggaagatgactgaatggaatgagctctttcttttctcgtccacgggcagggggcagaggattccccccagccagggagcagagccaccccccacactgcagtcctgctcccacctgccactgggtccccttcagcctaacctaatggtttccatgtggcctgcggccgtccccctcatttcccatcgagctgcgcccccctgctgagcttgctttcatgatgagacgacactgggtgcattcagggtggtatggctgcagacagacagaccccctcatcccggcggggagtctgtcccctctctctcattgggctggaggagtgatggcaggaacacatctccaggggaccagtttcttttcataaagaatggaggattgctttgggcttgtttctgttcttttgggccc

SEQ ID NO: 14947 - DNA, 1112 bp, Homo sapiens
tgctttttatgttgttgaagtcttattagaaatagcccaggtggtttgatcatgatacagtgctacttgaaaatatatcaaaggtaaaaattctctcaactataccttgaatgtctttttccctgtagacttctgtagagaagtacaattgtgttttaaatgtctattttgaacttgatgggataccattaatctatatgtggtttgatgtgtaacttacctgatatttttgttttaactttttaggtccactatccgagctttgatcaagaatttttcaattgcttcttttttccctgctttcatcacactgctgttttttcagcataatcgaacagcttatgacattgtagcaggaaccattgtggtaaaaagaaatggggtcagatgatgccccccaaaaccctgatttccacacactaagactaaattatgtatcaaggccatcagtatccctgggttacactaattgatgatttagaaattaaagcagtcactccagtgtgatgcaggtgactactctgaaagtattgattatacttgaatgccaaagaacttgtccagaagaaaaacctgttaaattcaagtattaaaatttttagatcaaaaaggcaaatgattttataaacaatggacaatatatactttcttaagatctaaggtactttcttaagatctaagaatttgctgaaagcattttcagctttgaaatctccaaatgaaactttaaaatttattttggtttatcccaaaataatggaaaatgtccagttgtgttttgtaaacacctatgtaactcatcttttagtttacacttcctggggaaattgtctttggtgtttagaggagggaatgagaacacaaattggataatccactgtctcccatcccaggaggtggtgagttggctacaagagaaagggacaagtgaggcaggcctagcagttcccttacctgaagttttcaaatccatactgcagttccctctcgtaatgatgtaactttacaactattcttaatgcttgaacatgtatttaggggcaagtttctcatgatgatgaaaaagtatcaagtcatattgctatgttaattggtttttttttttaaaaggt

SEQ ID NO: 14948 - DNA, 1266 bp, Homo sapiens
gcaagagagactagcattcccagacatcattctagggtctttaagctcattttgggtctgctaaagtttggggggaaatgttacgcaaagtgatactgtgtatgttgccattttgctttattcttctgttgaagcaaaattgtggggttttattatgtgtgtgtgcttttcctagatgtcccagttagctgtgctgagatatacctgtactatttatggtttaagttttgattcttaggtattttctccagctctgacattgttttccaaagacacactaaactgcattgcacagttcaaaatttgattacttaagggatcaatctaggtggtgttcttggtcttaaatttaacagcaaacacagcacatatctattatcactatattaattttcaaaggtttttctttgacgtttaaaactgtgacaacagatattcacatttgattatagaaacttaatgtctattaataattttagtacaaaatttcataaaccgtgtttttcaaaataagtttatgtcaaatccagcttcccagaaacactaataattaagtacatcaatgtactaaataaatcattcagttgcacccatggggaagattgtgttactgcccttcacagtgaaaaaaagaaaaatctttcatttttaaaattaggagatgttacgtaacttggcactttagtagtgtatacactagcattagtttatacaccacttttgccgctggggaattcaagttgaaatgtccctcaatcatataggtctggaatacatctttcattcataatttctgctcagataattgaatagtttgccatcgagattattttcatttatactataaaacaaaagcaaactagtccagtttaattttttgtacttagaatattgcacattttctatatatgagttattcagattagtatctatgtaggttcagtcagatccaaccatggattcgaggtattatactgtataaccctacaaaatacatagaagtattatttgccttcataatagaacccaagagtctgtttcaatttatgaattcagtatttgcaccgagattttgattcccaaagtttggaaaaaaatgacaaaacaacgagggaagaaggaaccagaccttagtgccacatatttttctcttggggttgtaaggtagtctcctgctttccagaacactttattatatttcacttatagacctgattttctgtgtcaaagtataattctcatgctgaagctgtagcctaaaaagcc

SEQ ID NO: 14949 - DNA, 2177 bp, Homo sapiens
aagttgtgtgatttgttggaggtgtcaagtatgtactatgtgtcagtggagaaaatagttttctttagattaaaagaccagaatattttaattctttgcatgtttttatatgtaaaggtcagagtctttaatttaaaaacctatcatgttgcggccgggtgcagtggcttacgcctgtaatccagcactttgggaggccgaggtggacagatcacaaggtcaggagatcgagaccatcctggccaacatggtgaaaccacgtctctactaaaatacaaaaaattagccaggcatggtggcacgcacctatatagtcccagctactggggaggctgaggcaggggaatcacttgaacccaggaggcaagggttgcagtgagccaagattgtgccactgtactccagcctgggcaagagagcgagactccgtctcaaaaaacaaacaaacaaacaaaaaaacctatcattttgccctaatgaagtatttctgctttaactattgcaggttcggctttccagtttggcagcagcactacaaatttcaacttcacaaacaacagtccatcaggagtgttcacatttggtgcaaattctagcacacctgcagcctcagcccagccttcaggctcggggggctttccatttaaccagtctccagcagcatttacagtggggtaagagaattttttattgaaatggagaagttacattggtaagggtatgtgcatgtatatgttttgtttttaaaagtcatcaagattccgtatggtttgggtaaaattaaatatgttctccaacataaatttaccatactataattctggaggattatattacagtttgagaaaaaaataacagtagcgtgtgtgttaggtgtagcagaaaatgtatataccaatgtgagtctactccccccccacccgaccccccttacccttgtgctgctcatggtaaatgttagcatttggaaattttgctcagagcatcatgtcacattatgaagtttttatttttcacaggtcaaatgggaaaaatgtgttctcttcttctggaacttcattctctggtcgcaagataaagactgctgttagacgcaggaaataaaggtcacattggtgttgtactcaattttaacaacagctggtgccctgctttcagatactggattgtactttgtgctggggttatctgaagtcagatctgcctaaggacttctttaattttggaattttcctcctttctctttcgttacagaagccccaccctgcctcacccacccttttttaaataaataaatagctagactggtgactgattcttcagcaaaaatattttatgatccagcagattattcactgatttgacatagtctggctgtacccaggaatggagcctgcacggtgaatggctttgtatagaacctctttgtctacaccattatgtgcgctgataagcgttcatggaacgcgttgaaattgtaattatatctgaggaattctgtatagattagaattctgtatagattagagagtgttgaaacggatgatttctatgctgagtttgtgctggtgtatgtgtgaagtgagtgagttgggtgtattgtgcgctaaacttttctgatagaggaagcctgattaaagaatggtccgtgctaaggacttgttagatctagttcactctccatttaataattatatgctatttctatattttcattctcctatcacctgtcttgcctttttcattattttattatgaaacttgtgtaaatacaattttgtttctgtactttttggcataacataaatctgtgaacttgaaatttgaattttgtgttagagatttttttgttgtttgtttagtcttgtctcagattttattatgtaaatcccattattcaaagttgcctaaatccatttggaaatctttaaaaaaaaaattggggattcttaaagttgaatttattggcttttctgatccagttttgtttggaccaaaaaccagtattgtacaaagtattaagcatatatttttatatttactaaaatggactgtggtgactttggataataaggaaaagtttaatattaaagccatgtttattacagtataattaacatgttaaaccatgggataaatgccatcaataaaaaattatgacatactttttgttctag

SEQ ID NO: 14950 - DNA, 1178 bp, Homo sapiens
ttggctttcacagtgtttacattttgtttgagaggatcagtacattgagtgtctatgtggtgtcttttatatttttgtaggctttgacacatcttcctcatcttcgaactcagcagcctcctcatccttcaaatttggtgtctcatcatcctcttctgggccttctcagactttaacaagcactggaaattttaaatttggagatcagggaggattcaaaataggtgtgtcatccgattctgggtctataaaccccatgagtgaaggctttaaattttctaaaccaataggagattttaaatttggagtttcatctgaatctaagcccgaagaagttaaaaaagatagtaagaatgataattttaagtttggactttcttctggtttaagcaacccagtttctttaactccatttcaatttggggtatctaatcttggacaggaagaaaagaaagaggaactgcccaaatcttcctctgcaggttttagctttggtacaggtgttattaactccacccctgctcctgctaacaccatagtgacctctgagaacaagagcagcttcaaccttggaaccatagaaaccaagagtgcttcagtggctcctttcacatgtaagacatcagaagctaaaaaagaagaaatgcctgccaccaaaggaggattctcttttggcaacgtggagcctgcctctctgccatctgcctcagtgtttgttttgggaaggacagaagagaaacagcaagagcctgtcacttctacttccctagtttttgggaagaaagctgacaatgaagagccaaagtgtcaaccagtgttttcctttgggaattcagagcaaaccaaagatgagaattcttcaaagtccacatttagttttagtatgacaaaaccatctgagaaggaatctgaacagccagcaaaagccacttttgcctttggagctcaaactagtactacagctggtaagtattaactttttattattattattattatttttttttttacaagttgtcgttttacaagttgccttgacagatgcagcaagtcaattaatggtttacactgaacatagttgagaaatacagaactctttgggaaggaacctaggattttcagtttgaactgctctttaaaaccctcatgattctggtgaagtcatctgtggatctaat

SEQ ID NO: 14951 - DNA, 1228 bp, Homo sapiens
attatgatgcttaataaatgtctgttaaatggctagcatgtaacaaatgtcaggaatgtagtaggtgtcaagttagattgtgaagtggatgtgaagtagatgcacttctgtgcaaaagctatcattcagaggcagagatctatgctttcaaatcttgaaattcatatggtctgtggctgtgtattttatatgttaggatattgcctacaatttacatcttatgtcttagaatgcttgctgctttgaagaaatttgaaaaagattcttaagaaaaatttagtctttgagcccctaatttgcgagcatgattttttttcttaaaccacagcagttcaaacatgtggttaagggggagctcaccagtgagcaaggtgattatgagctgctcatttataaggttaaaagaaatcatttataaggttaaaagagaggtctattcttttttttaaacaatgtaaatatgaacagttgtctatttctggcacattctgtgttttaataggaaatattattagaaactgaacacttaaacttagcagtgccattaagatactgacatactgtaaattaaaattttcatgaaatctccccccactccccgtttttttttttttttttaggaagttcagtacctgcttcaagtagcagcactgtacctgtctctctgccttctggaggctctctaggattggaaaagttcaagaaacccgagggaagctgggactgtgaattgtgcctagtgcagaataaggcagactctaccaaatgtttggcatgtgaaagtgcaaagccaggcacaaaatctgggtttaaaggtaaggccaaaaaaataaaaataaaggtgatggtaaagcgcctttttgtaaggccatttaaaaatgaagtatttgagaacagcttcagtgttcactcattctctcttgaaaattaatataaaatgagattatcctgagatgttttagttatatctgtttctgaatattgtaaggtcatattagttgcttgtcaacagtgaggtatcttttctccaggtgggaaaaaaaatttcttgtgtcattgagcctcagagagtttttgttttttgtttttaactgctagccccctaggtgaactgttctttgtttttttgtttgtttgtttttttgtttgtttgtttgtttgtttttgagacagttttgttcttttgcccaggctggagtacgggggcgcgatctctgctcactgcaat

SEQ ID NO: 14952 - DNA, 1110 bp, Homo sapiens
gtggcgcacgcctgtgtacacaggaggctgtggtgggaggatcacccaggtctcacctacagtgagctgtggtctgggtgacagagcaggagtccgtctcttaaaaaaaaaaaacaaaaaactgtaaaaggtttgatctgtagtgctgttttgaatatagttccattttgtatgcatgcatgtgtgtgaaaagtcattaagtctggaatgaaatatagagtatccgtgaagccattttagaattatatgtgtgtatatttatgtgcataggtatatgaatacataccttaggttccattattatcagtttttcctcttatttgtttgtatctactgtatatttctctgggaaatactcatggtctttaggtcatgttagctattgtcaaaatttagatatgaatcattgatttatatgaaaataaatgtttttgatttctctttacctgtaaggtggattctcaatatcctcctgttcagagacttatgaccccaaagccagtttccatagcaacaaatcgaagtgtttattttaaaccatctctgactccttctggtgaattcaggaagactaatcaaagaatagataacaagtgcagtgtgagtatatgtatatttctaccagtctttgaatattgattagaataagtaagactaaataatgtaaaatataactaccattgtattctagcaactgtataacacataaaggttgtgaattagtgatgattatgaattggtatgcttttaaaatagctgtcaccttgatcaaatttttttttttttgagacggagtctcactctgtctccaggggtggagtgcaatggcatggtctcagctcactgcaacctctgcctcccgggttcaagtgattctcctgcttcagccccccgagtagctgggactacaggcatgtgccacctcacccagctaatttttgtatttttagtagagacagggtttcactatgttggccaggctggtctcgaactcctgacctcaagtgacccacctgccttggcctcccaaagtgctgggattacagatgtgagccaccgcgcctggccactaccttggtcagatcttaagttagtgttgactagtaaact

SEQ ID NO: 14953 - DNA, 1404 bp, Homo sapiens
cttgggcgatctcttatacatgagcagatgaaaaatattttattgcctaagaatgagcttgcaaatccctctttgcagaaaaggttatagaatgctgttctttataaccaaagaacttacataagacaacatttttgctgtccactcttttgtgtgaacatgtatgtttgactgcaagtttggtgccataattcccttggctaccaagccacgtgctgccattctctgtcctttgtttcataagcacactgagaaatctcacagctatattctttggtcttccacctgcccctccacctgctgacttgacattgtattataactgttgacaatgactggggtcctgactccacagttgcctggaccgtggctcagcccagctgggcaggtggaatgaagagagccgtattactgtaagaaaacacaaggacagccaggagtagtggtggggtgggtggggtgggaggtgttgatttttgtgtgtttctgtgtgtgtggttttgttttggattggtaggtttcactgtggcgtggttttgctgttgttattttgcttgattctggaaaatgctgaggagatggactgagctatgaagttcaatggttcaccctttaccatgtttgcaggagatgatcgaatacagatgaccctgctgtcgtgtcttcatttgtaaaattctcctacaaatggagacattgaaggattatgtgtatggaaatttttacaaaattcctttctgtacctattctgtagatgcctgtataatcggtctggatgtacagctataaatgtgttgtgagagcaagagagagagaatgggtagagcctgctgtaccttttttcttttaaattcttcgagttggtaaatgagtaagatattggaaaccttaatgaaaagctgctgttcatgatttgtgtgtatagtgagctgactgtagtattttactattgtctgttaaaaaaagaaaaactgtaatttatatcccctttgaactttattgtgtttaattggtacacatttctgtgtgtgtgtgtgtgtatgtgttttagaatacaaactgtgtaattcagattttaaaacactaatcatttgtctttaataaccctgcctttagtttcaaatctaacttaccatatttctatgtgtgcatgtctctgcagtgttaaaaataataatatcagcatttattaggggtcaactgtgtattaggcactgttctaaacatttgatattcattatctcatttaatcctcacagcaacagacccataggtactgtggtcattaagtgtttgacaagtagaaaactgaggcagagaagttactgatggagctgtagcaaagccaggatgcaggccacacttcgcttgtcagtctctgtgttcagcctggtgacatgtcat

SEQ ID NO: 14954 - DNA, 1186 bp, Homo sapiens
atgaaatagtatccaatataccaaaggtaaaatatatgctactttaggccgggcgcagtggctcatgcctgtaatcccagcactttgagaggccgaggcgggtggatcacctgaggtcgggagttcgagaccagcctgaccaacatggagaaaccctatctctactaaacatacaaaattagctgggcatggtggcgcatgcctgtaatcccagctactcaggaaggctgaggcaggagaatcgcttgaacctgggaggcagaggttgcagtgagccgagatcgcgccattgcactccagcctgggcaacaagagcgaaactctgtctcaaaaaaaaaaaaaaaaaaaaaaaaaaaaaaatatatatatatatatatatatgctactttaaaaaatatcagtatctaaataatggagaatgtgttcattctccagacttctaaaacgttttctcaccacactttggatgaaaacgttgttcacatcaaagtattgtcacttccttcctgtcctcgtaggcaactgaggagatagaggaccgggaaacgctggctctcctggcagcaaggagtgaaaacgaaggcacatcagatggggagacgtacattgagaagtacactcgaggcgtgctgcaggtggaaaacattctgagtcttgaacggctccggcaggcaagtaactgaatatctggaccgaggatgaaagcaccagccttcacccccaatggacagatatgaatttacttaccaaacacctcactaaatctatcagagaaggagcacttgagccatctctattgaaaggactctggcaaaatagtaaccaaaataaaaataatgactaacttttattgaataacccctacttgccaagcactgagcctgagtaatttaggtatattatttcatttaatcttcaagataaccccctgaggtaagtactgttgaaatccccattttcaaatgagaaaattgaggctgatagaagttagctaactcacccatggttacacagctaggaagtggtacaaagtcggatgtaaagccaagtagcttgactccaaagcacatatgcttaaacacagacttactatctccctaatttttagacctgagttaacttttgaggtgacaacaggtcattcaagtgaaaataatccactaagtaatgcaactataagataaga

SEQ ID NO: 14955 - DNA, 1122 bp, Homo sapiens
ggtgtgtcagattggtgggtcagagaactgtttgctcagtgccagaatgttggaaaacaaaagcaagtttctaagtaaccccaaaatagattcacaggcaggatcaagaagctaatgcagatgttccttattttttagaaagaagatctaaaagccttatgcaactatgcagaatttctaaaatggatttcataaggtcgcaacgttactaaatgacttgtttattcagccagcaatgctttagtctggctgactcttggtgtttaattgcattagttctatgaagcattttgtgatgttgttcaccgatgtacaaggcattcgggcatacaatacagtatttatgcaatatttaggtgattttcaaaatataagcctggtgccaaatatggatgtaaaattttaaacagtatgtctaccataaccccatttgggaggggaaaagttatgtgtgtgtatctgtgtgtgtgtctagcatgtgtcggtggttctcaaactttgacatacatcggagtcacctggagggcttattaaaacacagattgctgtgtcttcccctagagtttcttattcagtaggtctgcagtggggctcaagcatttgcttttccagtgagtttccaggtgatgctgatgctgttagtctggggaccacagtttgggaaccattgtggggaacagaagcatagaaacaaatctagaaggaaaatttaccattattgtttaacaatagttatcttatgtctggataatgggattactggggctctttatttttcttttatactttctgcatttttttcccattatcattagaagaaatcgcatttaaaagtttttctgaggctctaatacctacgctgtcatgaacacacagttgttactgtcttctattgtccagtcttacaatgttgtcatttatgaccacagagcttcatggaaccaggtgaggtggtgcatgcctgaagtcccacttaccagggaggctgaagtaggaagatcacttgagtccaggagtttgagaccagcctaggcaacatagcaggatcctatttctaagaaaaagtttaaaaataaataagaacaaagcatcaagaatgcaatattttgtgtccctggtttt

SEQ ID NO: 14956 - DNA, 2481 bp, Homo sapiens
gtttgactttagaaatataagacaaaagtaattacataaaatactccatatttttcaaaatattcatgtcactaaatatcacatttgatcctcacatttcttcataatagggaaatttatttcttctcattcccactttaaagcttaaaattaaagtttgaacagttagtgataagacctgaactcagattatgatgtggcctcatggtgtacctgggtagctgggcatctcaacgttgctctcacaaatacttgaggaagttcctgtctacgaggcaaaggtgaggggaagatcagcaggtagctgtaattctgtattgatctcaactgatttttgaaggacaaaatagtaaaatagatgtggaaaaaatgggataaaggtttatgatttatggcaaaataatgtttctctttcattacagctaatttcttgagatagaggacagagaagatgactcgttcccatagatttgaagatctgatttataccattataccagcaaagagaatgtatttccttttctaaatccttgttaagcaacgttagtagaacttactgctgacctttttatcttgagtgttatgtgaatttgagtttgctgttttaaattgcatttctatgccatttttagtttaaaatcttgcatggcattaattgttccttgcttttatagttgtattttgtacattttggatttctttatataaggtcatagattcttgagctgttgtggtttttagtgcacttaatattagcttgcttaaggcatacttttaatcaagtagaacaaaaactattatcaccaggatttatacatacagagattgtagtatttagtatatgaaatattttgaatacacatctctgtcagtgtgaaaattcagcggcagtgtgtccatcatattaaaaatatacaagctacagttgtccagatcactgaattggaacttttctcctgcatgtgtatatatgtcaaattgtcagcatgacaaaagtgacagatgttatttttgtatttttaaaaaacaattggttgtatataaagtttttttatttcttttgtgcagatcactttttaaactcacataggtaggtatctttatagttgtagactatggaatgtcagtgttcagccaaacagtatgatggaacagtgaaagtcaattcagtgatggcaacactgaaggaacagttaccctgctttgcctcgaaagtgtcatcaatttgtaattttagtattaactctgtaaaagtgtctgtaggtacgttttatattatataaggacagaccaaaaatcaacctatcaaagcttcaaaaactttgggaaagggtgggattaagtacaagcacatttggcttacagtaaatgaactgatttttattaactgcttttgcccatataaaatgctgatatttactggaaacctagccagcttcacgattatgactaaagtaccagattataatgccagaatataatgtgcaggcaatcgtggatgtctctgacaaagtgtgtctcaaaaataatatacttttacattaaagaaatttaatgtttctctggagttggggctcttggctttcagagtttggttaatcagtgttgattctagatgatcaacataatggaccactcctgaatgagacttaattttgtctttcaaatttactgtcttaaatcagtttattaaatctgaattttaaaacatgctgtttatgacacaatgacacatttgttgcaccaattaagtgttgaaaaatatctttgcatcatagaacagaaatatataaaaatatatgttgaatgttaacaggtattttcacaggtttgtttcttgatagttactcagacactagggaaaggtaaatacaagtgaacaaaataagcaactaaatgagacctaataattggccttcgattttaaatatttgttcttataaaccttgtcaataaaaataaatctaaatcactggtgttttaagtcacttgcatttgatatcttataggtgtatatagcatttccttatggggaataattctgaaaagggatttttaaattgattcagccctataacctatacaatttggaatactcttttgtggtaatggaccattttcttggagtgacttcacaaaactgaataattaaggttaattttatgaccatttgctataaagaaggtaagtagtcatgcatagagtatttggaagtgaggaaatggagttgttctgtatgaaagttcttgatgagtacgcacacttattaaatggatgtatcaccactacagtacagagtacatgtgaaagtctagttttttattagttttacacaaccagctattcatgaactgtagttaaaacattgtaaatctgtatatttactgctactcaattacaaaatcttcagatggcattgaaaaaacatatccaaagtaactcaagaaaaaagtaccatggcttcttaaacaaaaaatcaaa

SEQ ID NO: 14957 - DNA, 1120 bp, Homo sapiens
tttcctgcttaagttaggccaaagttggtaaaatgcattttagaaccctatttttgttaaggagagcacagagccactggtttagagaagtttgtaatatccagaggatgaagaaaacggacacttgtcattctgagttcacgggaacgggagaaactgaacccttttaggttgatcatcagcttgatgtgaagggacttgagagattctctaatctattctttcctttaactggttaggaagcagagtccaagagaaatgccctgcccagggtctggcagaactgatggagagcagccttcgtggctaccaccttcccataaagtctgtgctctccagcggcgcttggtaataagatttatttaatgacacgtgtaactctaagactatttgtgatggcgaataccacagatttgactgggtaatgtgatatttgttatttgctttaagttaactttagcctttagcacagtgtgatggaaagggcaccaaacttgtgatctagaagacttgggttcaagtttcagatttgaattagctttgcttctgcaaatctgaggaccctattttcttaatccatgaaatgggaataataatactcacccaatttaccttacacagtcgtgaggattcattgtaatgggctttgtaaaaatataaagtgctatataaacataagggtgttaatctcctgtctttggtgacaggctaaaaagacatacttgtttcaaattttggatactctaatttgcataatcttacacattctctttctctatttttaactctatgttttccccatcagatttttttctgttaggagttacaatatctctcttcaactgggctttgcctcaaggtgtataaacttaaagcattatctccggtgcagtttgtcagtgtctcggcatatttgaaatttttagtactgcatttggtatatgaaagctgcatcctatgtaagaccataggatatttaaacagatgttcaaatttctattgtgaaaatcctagctcattccttgctagagatgaagcactgaggacagtacaatcaccaccttaaaacaaaccacctaagcacagctttggctgcacagattggaagggaatctggtaa

SEQ ID NO: 14958 - DNA, 1185 bp, Homo sapiens
agtgttgtcccttcctaccttcttcctccaagagagtatcatgaagtaaactacaaacttcagaagaaagctgacattttaatgaattttttaaaaaattaataaacaaattgtctaaacgcacagttgcaggctcccttgggaaagccctgctttgctccaggctccaagatctcctggctaagtcagcaagtgagaaaatgtgcaatcaggtgtctctcaccccgaattgtccttcctccttcctccccggattggcttgctgtgcctgacggatgggctgtagaatggggtctggccacctggcctgctgggaaacagcaatcttccttaatagcatttcaagccgtgccttctccgcagaatgcatgtctttgaggtctgctaatatggaatggaactgcagcaaatgcaaacttgaagtcatgcaaaagtatgaaatggatttcttcagctcttcttaggaatatttaaattactgtcataattcagtttaagctatgaactgtgtgtcccagtaggaggtcaagaaaacctccacagccttctggatgaagaacctgttttcaaatatacttgttgcagatacagaagactagtagagttctgccactctaagctgttgtggattttcctgtctccatgaaccactcccattcccccgtccccaatgtgtttgtgagtttccagttgatttgtagcaaatgcctacttagttctttgtggattgttctagacttttaatttttttagctgccatttaagcattcctgtggcacccatcaccatttcaatttaattgtttactttgaagcggtttttgcaaattcatattacttaagcagagggagagaacctctactgatcagagcatctaaacctgtgtgatctaaggtttatcagcctctgcaaggagctttgtcccatcgtgcttccattcccaggagggggagcttggagcgagtcagtcctggggcttgctgacatgggtggcccattggaaaggagaaccaggtcagatgatgtaacagccccaaggagcagcaggcatgggtccctccatccttgggcttcccgggcccctgtgacaggggaaagggctctcttacaccgcactcagggagaccacttctcaggatggggtcagatggagagacctctagggagaaagacatccccattgtg

SEQ ID NO: 14959 - DNA, 1969 bp, Homo sapiens
gttctggccagaccccgttccccttcctctatgaaggaataagttggaccaagggaagtcggggacgtaaaaaatgaagcaaaacaatgccagggtgtctcccgctttactcttcaggaatggtgtcccaagttggaggctttgtgtcagctgcaaatcctaccagttatgtccaagaatggctttccctcgggcaggtggcagcggccatctcccactgggaatatggcgtagtatctccggtccattccttggatgctaaggactgcgggaatgagggagtcagataaagaacaaacctcgaaacgaacagttaaattgaaatgctatgtgcctgacccaatggtaggcacatagtaggcactcaactcatatgtttaattgaattgaaaatatcccttaggaaaaaaaaaaaacacacaaaaaaccacaagagccccagccagtttactccaggtagatttccacaatatgcaaagtggtggtggggtcaagacagatgacaccagcactttaaactctttgtgtgggtatgcgtgggtgtatgtttgggaagaaaaacaaaggtgcagactatcttcctttttttcttcttcagcctccatccctggcctcctcccctcacacacactggacttggtacaaaatgtcggtgtggtcctagatgaagcattggggtgggggagggagagggagctttgtgttaagtgcctactggaaatgcactgtggggttttttcctgtatgggaaaccatttatgccaagcttttccccatttcccatatttatctcatctggttagctgcctctgcttccagctttgtgtaattctctttgccagctgcacaaagctgattttttccaaagtctaaagactgagctcacctggctagattgttgtgtgttttgttgaattttttcataatgtaatgccgtatttattgtttttaaaatgaaaggaatactaataagtcttaaaagttccttcatgcataagatttttttccagttactgggtttaactggtgtacattaattagatgtccatactgtattttgtttgcattaagtaattttctttttgacttagtatccggcacacaaagtgggttagtactacagtatttgcgttactttaagtactaagtatgcaggtttcctggtaccattgagttgctgctattaaagctcacacacgaaatggctaaaagttacaagtgtgcaaattatgactgcgtgagccttagaaaataaaatgtataaagggcaacacatgagctgtcaaacagtgttaggagtgtgtttatatgtacagagttgtgcatagcaatcgttttatttaagttgatatgtagtctactcacattttcattatttagcaattttgtacaaaaatagcaattaatttgtaaacactgccagaatactttctagctgctttgtaattttttaagagtgttattttgtttttgtttttctgttctttgttgtggctcttgttttcatttttgttgtacgtgtagatctgtaaataaaattgcagtatttaaagcttaagctttcaggaaaaagaaaataagaattcagtgtgtgcatgacaactcgtgtgtatgagaaggagggatatgaaggaagatggcttgcagagtaagtcgggtggcaattgtcagggtgtgggaatttcttttcctacggggtacgtgattttgtaaaaaggaagtatttctcccaaaattgggagtaggcaaactactaatcagtttagctttgtgttgtatgctagtttaaaaaagaaaatatgtaatataatgtaaaaaaaaacaaaaaaaagcttttatgatggattttgtaaatagatttgttacagggtgacctgttctctagctgtgatcttaccacttcaaatgggtgtaatttgaataaattttgtatggtaaaggatcaataaaatgattttttttaagagtt

SEQ ID NO: 14960 - DNA, 1210 bp, Homo sapiens
cgcgttctcgtcgtcggatcaaggagcgcggcggcgttttggacccgcgctcccatcccccaccttcccgggccggggacccactctgcccagccggagggacgcggaggaggaagagggtagacaggggcgacctgtgattgttgttattgatgttgttgttgatggcaaaaaaaaaaaagcgacttcgagtttgctcccctttgcttgaagagaccccctcccccttccaacgagcttccggacttgtctgcacccccagcaagaaggcgagttagttttctagagacttgaaggagtctcccccttcctgcatcaccaccttggttttgttttattttgcttcttggtcaagaaaggaggggagaacccagcgcacccctccccccctttttttaaacgcgtgatgaagacagaaggctccggggtgacgaatttggccgatggcagatgttttgggggaacgccgggactgagagactccacgcaggcgaattcccgtttggggcttttttttcctccctcttttccccttgccccctctgcagccggaggaggagatgttgaggggaggaggccagccagtgtgaccggcgctaggaaatgacccgagaaccccgttggaagcgcagcagcgggagctaggggcgggggcggaggaggacacgaactggaagggggttcacggtcaaactgaaatggatttgcacgttggggagctggcggcggcggctgctgggcctccgccttcttttctacgtgaaatcagtgaggtgagacttcccagaccccggaggcgtggaggagaggagactgtttgatgtggtacaggggcagtcagtggagggcgagtggtttcggaaaaaaaaaaagaaaaaaagaaaaaaaaagaaaaaaaaaagatttttttcttctcttaatcggaatcgtgatggtgttggattatttcaatggtggggttaatatagcatgttatcctgtctatcttttaaagatttctgtataagactgttgagcagtttttaaaatagtgtaggataatataaaaagcagatagatggcgctatgtttgattcctacaacgaaattatcaccagctttttttcattcttaactctttaaaggattcaaacgcaactcaaatctgtgctggactttaaaaaaacaattcaggaccaaattttttctcagtgtgtgtgtttattcctta

SEQ ID NO: 14961 - DNA, 1112 bp, Homo sapiens
tcctttctttttacttcctttatttctttattccttccttttcctttttttcttttttttttctttttttttttttttttttggtagttgttgttacccacgccattttacgtctccttcactgaagggctagagttttaacttttaattttttatatttaaatgtagacttttgacacttttaaaaaacaaaaaaagacaagagagatgaaaacgtttgattattttctcagtgtatttttgtaaaaaatatataaagggggtgttaatcggtgtaaatcgctgtttggatttcctgattttataacagggcggctggttaatatctcacacagtttaaaaaatcagcccctaatttctccatgtttacacttcaatctgcaggcttcttaaagtgacagtatcccttaacctgccaccagtgtccaccctccggcccccgtcttgtaaaaaggggaggagaattagccaaacactgtaagcttttaagaaaaacaaagttttaaacgaaatactgctctgtccagaggctttaaaactggtgcaattacagcaaaaagggattctgtagctttaacttgtaaaccacatcttttttgcactttttttataagcaaaaacgtgccgtttaaaccactggatctatctaaatgccgatttgagttcgcgacactatgtactgcgtttttcattcttgtatttgactatttaatcctttctacttgtcgctaaatataattgttttagtcttatggcatgatgatagcatatgtgttcaggtttatagctgttgtgtttaaaaattgaaaaaagtggaaaacatctttgtacatttaagtctgtattataataagcaaaaagattgtgtgtatgtatgtttaatataacatgacaggcactaggacgtctgcctttttaaggcagttccgttaagggtttttgtttttaaacttttttttgccatccatcctgtgcaatatgccgtgtagaatatttgtcttaaaattcaaggccacaaaaacaatgtttgggggaaaaaaaagaaaaaatcatgccagctaatcatgtcaagttcactgcctgtcagattgttgatatataccttctgtaaa

SEQ ID NO: 14962 - DNA, 1157 bp, Homo sapiens
caaatgaccaaatattaagttcttatgatatcacagtaagaaagtagggaattcatttgctgtctttattgcaggatcttgcttgttgcttttatgccatagtagatgctatgctgtgttgcctagatccattcttcaagtatgggtgggaagagaatggcctttcactttacattgtataagagggccaactctgcttgtagtgaataaggaaaacccatttgtttgagagcttccactgaaagtttgaacgtttttgttttattttgtttgtttttaaatcaaagaatggtcatatgtgagttaagcacatctttacatgagtgaaaatatctgcattaaatcgaagttggatccttttatttttctctccactcctccatcttctgttatcagttattttacattgcaagtaagcacgtactcaatgttaagttgaaaacttggctcttctttccttttcattatgaagtactcattccaaatttcaaagttcaaactcacagcatagacatatgaagcttacataggtttgcaaaggaagggtaaaaggtgatagaagaggaagagagatttttatgattaatactctggatcgtctatgcagcatacattttaaccttgaacttcttccagaattttcttttcatgggctttatggccaactgcctccagatagacacatttctttctacaaatatccttttaaatttgatacttgggccatatgctatgctgtttcactctgattttcaggcagaactctcctcaatctacatttatagtcatgtaccatataatgacattttggtcaatgatgtaccacatacaccacagtggtctcataaaattataagggagccaaaaaattcctatcacctagtgacattgtaatgttgcagttgacacattacattttctgtgtatagatatgtttagatacataaatacttactagtaaattaaaagtgcttcctgtgttcaatatagtaacatgttatacaggtttgtatcctaggaacaataggctatcccatatagcctaggtgtgtagcaggttataccatctaggtgtgtgtaaatatactttatgatgtttgcacaacaacaaaattgcctaatgatacatttctcagaatgtgtttctgtagttcagt

SEQ ID NO: 14963 - DNA, 1199 bp, Homo sapiens
ccatgcctggtctttaaatattttcagtggtggcaaatcttcatactccgaggtcggatttgatttgtggaaactgacaaaagttattctgaaccaaagctggcacatgaggtacgggtgatcaaactggctgacagtattttggtcagagcaggatatgacagtttcttatttaattttgaaaactactgatgaaatctagaaataataataatagctaaaatttgtggaggttgtatcatgggtcagacactatgcttagccctgtgcttatcttatcccttaatacccagtgtcaattaatagggaaaatctacacttaagaaaacagcatcaaatggtactttattctccctctctttcccaatttatggaattactcatttactaaatttgcctggccttcggcttcactctgttttgtcagagtctagtcatctttccagatgcagctccgggcccatgatctctgcaggcccttccctgactccaccagcagagacttctgctgcagttgctgtctgacctcgtttggctcttggtcatcatacaccaaactggatggtcttgtgggcctgctgtattttcccacctagactacaagcacctggggctgggaccatgtctcaggtttctttgtctatctcacaggtgcttgatacaacactgctcactatacactaagttactgctctgctgaggctcctgagctgatggaaggcagccccatgagaagtttctgaaatacagagacagtgagagcactacttacttaagtagacgccggatcctaattctagtttgttacgactaatttcattactgaatgctcttatgccacagaaaggaaggaatcttcagaacataacttgtacccaaatctcagaaaaaggccactctgatcatcctctgattgtcaatgcccatttttgaaacataacatctgatttatctttacacccagagcgttcaatgcccccaagctcaggtatgtgctggaaaagtgaagtaattttaacactaacccaggtaaacaataattaggaaggtacatttgcagtgttttacaaaaaggaataaaatataagttacttttagattatatataccactactctcaactgatgtaagctatagttgatatatgtatagttttatataatacatgggttcttgacaatgcctaatttttgaaacaa

SEQ ID NO: 14964 - DNA, 1350 bp, Homo sapiens
tttttttttttttaagttagtgggcaaaaggctatgtgtatcttagagagtattcttcttcttttcaggttaccagatgtggtggtttacccaacaacattgtggatgtctgggagtttttgggcaaacctaaacattgccagtatacatgggatacacaaatgaactctaatcttggaataactgctgcttgtaaacttcgttttgatcgaatatttttcagagcagcagcagaagagggacacattattccccgaagtttggaccttcttggattagaaaaactggactgtggtagatttcctagtgatcactggggtcttctgtgcaacttagatataatattgtaaaatgcttttcaagtgtgggttttgccctgattgttgcaaatacaatttccaccttctggaaaggtaggtttgctgtggaggaaataatgtactagatcattgtcacagaaaaaccaactatgatttatggttgtgttttcagaattcaacattaaagattaatgtttatttaaacgaacacattcctgcattcaggatgtgaggccatttaataaaaagggcacaaagcctgtcagagttttcaacggtgcttatagctgccagctggattccaaacaggtaccacattgtctctgagctaatgtttatatttttccattcaggcaccgaaatagttaatatttgaaataagtcttcaaaagaaaacataagagattattgagttcttgggactggatcctttatttcataagttcagatcatcttaaatgaaaatgccatgattatctgcagttaagtagatgacagctattctacatcagacttgatttttgtcagctaattacataattggtaagctataattgaaaccttatggcttaaaattccttaactcctttttgattcatgtttgtagtcatgttgtcaacagaggcaaagttaagcttgatgatggttaaaatcggtttgatagcaccatgggacatttttctaacaaaaataaatgcatgaagagacatagccttttagttttgctaattgtgaaatggaaatgctttacaggaagtaaatgcaaattacttttaagtgtgctttaaagaaaaatattttccccacaagagaaatttaaataaagaattttatttgtttatggtttgttttagtatgtttttgtgtccatgatgagattaaattttttatctgcttcctgcttctggctctactgctgcttcttcctctttgtgtagaagaaaacagatttccatttgcttctcactccaccaagaattaccaagaatatatctgcttcctttgtctgaaaaaaagccagcgagaataa

SEQ ID NO: 14965 - DNA, 1152 bp, Homo sapiens
aggcacaagggatgaggtttgtgcgctccaccgacctaggtaatggagccggaagcgaggacagcgaaagcgtacttccatctcccagtcgttctcggccaggaagcactgagccactgcggcatcgcagcttgcgaccgaggcaaactccacacacagaagtcgccgctttttcacctcaggctcgccctcttcctccgccgcctccctcccgccctccaggcaactccccaactccatcttcctgccgcctctgcaccgcccctttaagcggaacaggaggccaacgcgcggctctgcgcaggcgcctgtgtcatggcgctcccgcatcaaccgcccggcggggaaatgcgctgctctcggaaaactggtgcagctgcgccgcaagggagccgccggggcggtgggtgcgaagcgcgcatgcgcgcttcgtcacaagggtgcgaggaaagtcagtgagcaaatcgcggaccaccggggctgccagctcgcctgactcccggcctcttgcgctcctaggggcggagaagggtgcgggctcttcgccctttgtgtcctccttctttcactaacttctggactttccagctcttccgaagttcgttcttgcgcaaagcccaaaggctggaaaaccgtccacgatgaccagcatgactcagtctctgcgggaggtgataaaggccatgaccaaggctcgcaattttgagagagttttgggaaaggtatgggaaaggtaggggagaagccgtggcttctaatgaaggaaaagaaagcaccgtgcttggtgccgttgtgagctttgaataattatctcttgttaggttgtgttctagtacgcctgtaaattcaccttagtaataatgattattactttaatggagcccctaaatatgctgggtcgaacgcgtaagttctctatctaaacatagataagtatggttatgactcgtggagacagttccaaggctgggagggactttggagtttgatccttcaaccaacaaacgtctgcattgctccagagaagagtaagagaaacctctgcatttaaggcacattacagtctaattctctaggctctagaagattagaagataaataattgcaataaggtacaaaagccaagtgcttggtagagtggtgaacgaaggg

SEQ ID NO: 14966 - DNA, 1181 bp, Homo sapiens
tcaattccttatagttgttatattgtcattttagagtcaaataaattgtaaatatggataggacaatatacagacaccaagtgatatttcatctaagaagttaaggagattaaatgaaagctggaggaaatctttcaccagccccaaataaatgtgaagtgggaaatgtaaagggaaaaaaggggaggcaagaaaacctcttctcacatatttgggaaaagaaacttgtgtgggtaaggaatgggtaaaatagaacctggttaggaccagccattcacatttgatagtacagaaagcttaccaatactaccgttaaaactatttttaggagtaaaataagttacataggaacactgttgtgagatgcacacaactttccctttgaaaaattatctgctgttaactatattcattttctttcaaggtacatgtcacctgcaaaattaggagaagatatagtgattacagcacatgttctgaagcaaggaaaaacacttgcatttacctctgtggatctgaccaacaaggccacaggaaaattaatagcacaaggaagacacacaaaacacctgggaaactgagagaacagcagaatgacctaaagaaacccaacaatgaatatcaagtatagatttgactcaaacaattgtaatttttgaaataaactagcaaaaccagaagcagctagaaatattcttggaggaaaaggacctggatatcaagtagggtaaaggtgggggtgtcttttttcactttaagcatcttgttttctaatcatgtgtgataattgggtgaaaaattcttagctcaaagtgttttaaaaacaggtaaagcaaagaaactagcaggaccactctcagttaagattaaaactaaagtccagtgttaagctaaaggagaaatagaaattaatggttctaattctgtttgggctgctaggaacaacagaaatttttcatggttctagaagctggaaagtcctgggtcaaggcccagcagatcctgttaggtgagggcccgcttcctggctcatagatggtgccttctcactgtgtggtggaaggggcaagtgagccctctgggttctcgtttttgaaatggagtctcgctctgttgcccaggctggagtacagcagcacgatctcggctcactgcaatctctgccccctgggttcaagtga

SEQ ID NO: 14967 - DNA, 1868 bp, Homo sapiens
tagtctctggtttacttccctaactttttatcttctaattctgcataaatttttcctttatcttatatggcaagattttgtctgtctagaatatggatagggactacaatttgtcccttactctgtatgttaagatgtttaataaattgtgggaaatggacttcatgtgacagttacgctaaagtcttatttttaaaaaatattaaaatgttttccccttccagactccaaaaaacaaagctacaatcttcaagttatgcagcatctgcctctacctgccacaggaacagctcacccactgggcagttggcaccatagaggatcacctccgtccttatatgccagagtagagtactgaccagcaaaatggagaagatcagagaatgcagcagcagttttttttcttgttttcttaccactttattctttcagagtttaaagaaaatggactcatgcacagaacactatgcattttgaaacttgttcatcctggatttttttaaatcatttttatctcagaacttaaacaaaaattagatgtcgtgcacggactgtgtgaaagaagatgctttgcatatttgctgcactgcatcagtatcttactaaaaatgtgaaatgaaaggactattgtacactgaaatgcttaaatgtatctgaaagcacaaggtgatactcatttttatggtcttcccatttgtgctggtttttgcctctttgacatctgtcatcagtatttagagggtgagaagtgaatgtaacaggtataaataacatttttaaaaacaataactttgctataatcacagttgttccagagcactgtcagatacattctaatgaccagaactggtttaaaaaaagaaaatacaaccatgggaaagaaatcttaaatgaaaaacgcatctcattgtaggcatttttgcctcatattttactgggccatgtttgtttcctggtactcatgtattttttttttccagatctctttccccaagttgctattgtaagagtattctgctgcgtgtggatgcagttatacacattaaagcagatctggagtctgaagtagctataaagcagctataaaacagaaatacatgcatagctgcagaaaccatgataggtagaggacttttcttttggttttgttttgttttgttttgttttgtttttggttttacagagaagagatttttattacaaagaaaaaaattccagtgaattgtgcagaaatgctggtttttacaccatcctaaagaaaaactttacaagggtgttttggagtagaaaaaaggttataaagttggaatcttaaattgtaaaattaaccattgagtgtcaaagttctaaaagcagaactcattttgtgcaatgaacataaggaaagactactgtataggtttttttttttttctccttttaaatgaagaaaagctttgcttaagggttgcatacttttattggagtaaatctgaatgatcctactcctttggagtaaaactagtgcttaccagtttccaattgtatttagcttctggttggaatttgaaaaaaaaagaaaaaaagaaaaagaaaacctaaataaaataggtgaaagttccctgactattcaggtgaatacacaaagtttgaagtgttaactttttctttccatttcactgatgttactggtcaccttagagaattatttcatagtctgtggctaaatagtaaattcagaagaaaaatacctggcaattgagtgtgtaacttcaacaagaacaggaatcaagaacatactgtcagctttcaacagttagcaacctggccttatgccttgcttcatgggaaagggccattcttaaatttcaaaatgctttcatgtgtcc

SEQ ID NO: 14968 - DNA, 1170 bp, Homo sapiens
aggagcattggactgagtgtatgtgactctctgtaagataaaaattaaaattagagccaggcacagtgacttagcctgtaatcccagcacttcgggaggctgaggtgggtggatcacctgaggtcaggagttcgagaccagcctggctgacgtggtgaaaccccgtctctattaaaaatacaaaaaatattagcggggcatggtggcacacacttgtaatcccagccattcgggaggctaagtcacgagaatcgcttgaacctggtaggcggaatttgcagtaagcggagattgcaccattgcactccagtgtgggccacagagagggactctgtctccaaaaataaaaaattacatcatgagctattcagattataaactattatgtttacttcctaagatataaaatgatatatggtagatcttttgtacttataaaatgtttttataggggaaccctataatttgtgacatggcttgatgtagctgtttctttaaaagtaaacttttttttttttaatcattttataggatgtaattggctgtactcaggagatggatttcattctttggcctcggaatgatattgaaaaaatcgtctgtctcctgttttctaggtggaaagaatctgatgagccttttaggcctgttcaggtattttggtctaaagtgtgatgagtatttcaatatgtgaaaactactagaatataatagggtctaacttgagaaattctttgggaaaatggtttctgatagttttatttcacgagtctcccctatttagaatattgtgatgcaagagaagaaagcgtttggattatagaatctcttgacagtgtggtggttccacctgcccagtgtggctttgaaattatgactagagaaaatcttttaaagtggacatttactgatttatagaggggcccacagatgagcttctgagatctgtaactcttgaagccttcaccacacatccttctaaaaccgtatatttaactgctgcttcccaaaggaatgtgatctgaaatgggtgaagaaatcattttgtagaagttgatctgtatataaaattatagaagaaagaagtaaatttagtagtcattcttaaccttaaaatcttgctgacttttgactgtttgtcatggtatactagacattgctcaagtgaat

SEQ ID NO: 14969 - DNA, 1128 bp, Homo sapiens
tgagactccatctcaaaaaaaaaaaagaaaaaccagaaatattgatggttttgataatgtaatattgagaaagtaatggaaattggcccatataaggaataaaactattcatttgtctgaatagcgttgttttaaaactggtgagatttttaattttaagaagtattgtccaaaatagtgctatggataccattatgctataaaactcaagcattaaacattctaatgacagtttgtacatgtatggttggagggggaggtaggggaagaacagaaggaattacctatctgaaaatgtgttttcagtgtataagttactgcagacagttaagaattttgtggagttaatgttacatgacattgtaatatgaactgagtgttaaaaggctgtgctccctgtgggttaatacaccattttcttttcttctagaagaaaaagtcagcactttttgaagtgtctgaggttataccagtcatgacaaataattatgaagaaaatatcctgaaaggtgtgcgagattccagctattccttggaaagttccctagagcttttacagaaggatgtggtacagctccatgctcctcgatatcagtctatgagaagggtaagttctgccttaagtcttgacttgataaagtttctgtggattaaccttgcatttccccgccccccgaaccccccttaaagtggatagttatgatagtgaccagtctcttcaggtaaatttgtctttgtgccatgttgataactgggatcatgactttaaagcattgtgtttataggattagaaaaacacgtttttttacgccagaccattcttatgtggatgaagtatataaagggatttctttaatctgtgttaggtgttgatgatctcggacttttttttttttttttttttttgagacaaagtcttgctctttcgctgaggctagagtgcagtggcatgatcttggctcactgcaacctctgccctcgcgcattcaaatgattctcctgccttagcctcccgagtagctgggactacagttgtgcgccaccatgcctggctaattttttgtgtttttagtagagatggggttttgccatgttggctaggctggtctggaactcctgacctcaagt

SEQ ID NO: 14970 - DNA, 1235 bp, Homo sapiens
atatttcagtttcattcacctaccctgttttggtgtttggttttggttttggttttggtgagttttttttttttttttttttggaaagcaaggatcacacttccccctccctgttccttaatcccttttctaaaaaggggggaaaatccggatggattttagggattggtctggtgtcagctgtgttttattgcacacctaaatcctgattataggcttttcatttctccgcaaagcctttattttggcagttaagccaaatgtgttttccagaaagttagttattttctcctctttctttcctttctttcctccctttttcccgtctgaccccaaacgttattgtccaaacatgactggacagcagcttttgtttcttgaccctgtaatatgacagtctgctaatattgacagaaggtgcagtttttgggttatagtcgtgattttcgctaatcaatcatattagcaggaaaaaaaatgacttgtttctgttgtacttgagtcttaagaaaaagtgcccatagtttagtgacaatttccaaaggctttagtaccacctgtatttcaaaatgggggacccaaactcccggaagaaacaagctctgaacagactacgtgctcagcttagaaagaaaaaagaatctctagctgaccagtttgacttcaagatgtatattgcctttgtattcaaggagaaggtaatttaaagttcttaatggtgaattagcacaagtaatttttgtaagtgtatattatttgttactcttaaattattatgaatattaggttaaagagtggttgaaaaaaagtctgctttgtatgctctgttttttcacccttaggggtgattctgtgaattgagcagttgcagcatgcgaaaagacccttgagcgttctttggtttggaaataaatttgagtctgaagcttagtagtagtatacactgagttgacatggggtgggcaagattacaaaattttatatggagttaacatgggaaaccttatgatggaatttaaagattatctaatgtagagtataaataagatggttgaaagtgtgaaattgtaatcagactgtttatatgctaaagtttatcctgtttcttaaactgcgtaatgtaggtaaccttttctcttacatttaatgaagtagaatacaccttttaggagcaattaaatactgaaatggttaatttgtgtttagaagtgtgattttcttttttacttagagtt

SEQ ID NO: 14971 - DNA, 1550 bp, Homo sapiens
actagaaacagagaaaatagctttccaagtcatcaaagaaaacccatggtgagaaggatattaatggattaaaacaggcataaagaggaaactgaaggcaaagcattggcaaaatctagaaatgattatcagcttcagctaagtccgatactcaccagctccaaggacagagtagggaagcatcagttacaagttaggagaaacagcactgcagtattgtcggggagcaaggtgagggctttccttcctctttgagggtcagttgtcagtctggggccacactgcttccagaagggcacagaactggaaacctttaacaatggttaaaaaatctgactgctcttgttctgtcgcctgccactgctgcctgagcccgagtggttcactgcaccctgaagacagattccagacgctgggaactcgcgcctccaatcccagacactatgtccagcaaaggctccatgagagttctggcctatggtggcggcctggacacctcctgcatcctcgtgtgggtgaaggaacaaggctatgatgtcattgcctacctggccaacactggccagaaggaagacttcgaggaagccaggaagaaggcactgaaacttggggccaaaaaggtgttcattgaggatgtcatcagggagtttgtggaagagttcatctggccggccatccagtccagcacactgtatgaggaccgctacctcctgggcacctttctcgccaggccctgcattgccagcaaacaagtggaaatcgcccagcaggagggggtgtcccgcggcgccaccggtaaggggaatatcaggtccggtttgagctcacctggtactcgctggtcccccagataaagggcactgctccctggaggatgcccgagttctacaaccggttcaagggccgtaatgacctgatggaatacgcaaagcagcacgggattcctatcccggtcactcccaagaacccgtggaacatggacgagaacctcatgcacatcagctacgaggctggaatcctggagaaccccaagaaccaagtgcctccaggtctctacacgaagacctaggaaccggtcaaagcccccaacacccctgacatcctcgagatcgagttaaaaaaggggtccccgtgaaggtgaccaacgtcaacgatggctccacccacccgacctccttggagttcttcatgtacctgaacgaagtcgcggacaaacacggtgtgggctgtactgacatcgtggagaaccgcttcactggaatgaagtcccgaggtatctatgagaccccagcaggcaccatcctttaccacactcatttagacatcaaggccttcaccatggactgggaggtgtgcaaaatcaaacaaggcctgggcttgaaatttgctgagctggtgtacaccgctttctggcatagccctgagtgtgaatttgtccgccactgcatcgccaagtcctaggggcaagtgggagggaaagcgcaggtgtccgtcctcaagggccgggtgtacatccttggctgggagtccccactctctccctacaacga

SEQ ID NO: 14972 - DNA, 1402 bp, Homo sapiens
ccccctctcaacctactccctaaaaaagagctgctttttgagagagaagcggtaccctctgatgttactgggcggcagtctgcctacaatttccttcacaatgaggcaaccagagcggctttttctgtgtgtttgcttgcgttgaggggagcaggaccataggccctagaggcccccagctgccttctgagactgggcgaaaccctcggcagcgcgcagggggcgctagggcgcgaggggcgggcactgacgggcaccaatcacggcgcagtcccaccctataaataggctgcgttggggcctttttttcgcatcctgcttcgtcaggtttataccactttatttggtgtgctgtgttagtcaccatgtctgaaacagtgcctcccgcccccgccgcttctgctgctcctgagaaacctttagctggcaagaaggcaaagaaacctgctaaggctgcagcagcctccaagaaaaaacccgctggcccttccgtgtcagagctgatcgtgcaggctgcttcctcctctaaggagcgtggtggtgtgtcgttggcagctcttaaaaaggcgctggcggccgcaggctacgacgtggagaagaacaacagccgcattaagctgggcattaagagcctggtaagcaagggaacgttggtgcagacaaagggtaccggagcctcgggttccttcaagctcaacaagaaggcgtcctccgtggaaaccaagcccggcgcctcaaaggtggctacaaaaactaaggcaacgggtgcatctaaaaagctcaaaaaggccacgggggctagcaaaaagagcgtcaagactccgaaaaaggctaaaaagcctgcggcaacaaggaaatcctccaagaatccaaaaaaacccaaaactgtaaagcccaagaaagtagctaaaagccctgctaaagctaaggctgtaaaacccaaggcggccaaggctagggtgacgaagccaaagactgccaaacccaagaaagcggcacccaagaaaaagtaaattcagttagaagtttcttctagtaacccaacggctcttttaagagccacctacgcatttcaggaaaagagctgtagtacacagatgaaatcccccaagcaaatgcaacacgccctcaattatattagaatcacttggagagtcgatagaactttaacatagcctcatctagtaagaatttactactcaatctatcaaagatagcaaggtgaattcaaatgcaccgagttaaaatcgagttttaaagtcacctgggtttcggtagccggaagtcccgcgtctcacgactccaagctaattagtcataaccgtattgaaccaaggttgaagcccagtcccaggcttgaggctttttattatacaaggttaaagtggggatattgcgtttt

SEQ ID NO: 14973 - DNA, 1374 bp, Homo sapiens
ggcgcgacggcgagcgcttgtaatcccagctacactctgaaggctgaggcaggagaaacacttgaacctgagaggcagaggtttcagtgaatcgagatggctctaatgtactccagtctgggcgacagagagattcggttaaaaaaaaagttcgacttaaaataattctggagtcagaatgggtttacatttaattcttaacccagttcctcaaagcctgtagctctgttaagaaaataaaggccattggtcaagcctgcttggtcccaccctcatctccccaccctcccccaatcgctgctcccgccatttcctggggcttggaggaggggttaaaggagcggactgtaggcgtcacatttcccgcctgcgcgcttttcagtctcagtgtccgctggaggtgggggcaggggtaacgtagatatataaagatcggtttcctattctctcacttgctcttggttcacttcttgggaagtcatgtctggacgtggtaagggcgggaagggtttgggtaaggggggtgccaagcgccaccgcaaggtgttgcgtgacaacatccagggcatcaccaagccggccatccggcgtctggcccggcgtggcggtgtgaagcggatctctggtctgatctacgaggagactcgcggggtgctcaaggtgtttttggagaacgtgatccgtgacgctgtcacctatacggagcacgccaagcgcaagacagtcactgccatggacgtggtctacgcgcttaagcgccagggacgcaccctttatggctttggcggttaaggttgctgatttctccacagcttgcatttctgaaccaaaggcccttttcagggccgcccaactaaacaaaagaagagctgtatccattaagtcaagaagctcaatgtgtaattaagatgaatgatactgagctgacatcctaaaaaggaaagattaggggaactccaagtttgccctccactcactacatatgggtaggggagcaacgatattccaactctgaagaaagagtggaaaaaaagtagtgttaaaaatttgtattagtttccaagggacaaagaagcgctgcccaatcaatgagggccattcgtagctgtcaaccaatcagaactgatgagctaatatttcctgaggcaagccagggagccggaggggaagctaagaagcttattgagaaaaaacaaaaaccctgttttaggaaaaaaaaaaaccatcttttagcgattatgaaataaaatcacagagacatttaagtatccctcaatcatgtactgagagcaatactaaatttatcgccaccaatacagttttactctattaaaaagaccctgaaaattgaaaccctattcagactcctggaat

SEQ ID NO: 14974 - DNA, 1327 bp, Homo sapiens
gctagtgcaaggtttgtacagaattctcttggcctcagcctcctatccttgagaagaatgttgctttttttaaactacagtgagaacatctttcatatgagaatttcacctactgcttctaagaaacaggtcagctttcaagaaaacataaggccagagtgatcttttcacgcctgctcttttaagtacctttgaatagtcaatatgtcttcaagcacttgaaagacttaaaaagtttaccactccggcatattagtgaaagcccttaatataagcccttattaaaattctcagtcgagggtataaattcagattcaaatagtagtgtcgtaaacgggagggaaaaactaaagggattaaaaagtgaaactattgtgttctccctcgcagtccttaggtcactgcccctcgaggggcggagcaaaaagtgaggcagcaacgcctccttatcctcgctcccgctttcagttctcaataaggtccgatgttcgtgtataaatgctcgtggcttgctttcttttcgcgtacctggtttttgttgtcagctggttagacatgtctggtcgcggcaaaggcggtaaaggtttgggtaagggaggtgccaagcgtcaccgaaaagtgctgcgggataacatccaaggcatcaccaaaccggccattcggcgccttgctaggcgtggtggggttaagcgaatttccggtttgatttatgaggagactcgtggcgttctcaaggtgtttctggagaacgtgatccgggacgccgtgacctacacggagcacgccaagcgcaagactgtcactgccatggatgtggtttacgcgctcaagcgtcaaggacgcactctgtacggcttcggcggttaatcttttcgtcagttttcttccaatggcccttttcagggccgcccactccctctcagaaagagctgtgattgtattctttcggatggtaacatctcaatggctttactcggctattctgcctagtatgtagaactattataaaccagttgggagagaccaggttgtttggtctgagtggctgctaaagcagaaatcagctaagtaaacgaggtctccgagataagtgagctataaacttcaatgctatagttttgacatgtcaagcaacttaacgtgcagcgcgagtccgataaatgagtagctcagctttttagttttaaaaacgagttgtgcgttatttgtacgagagcctaagatgctagctgcctggaactgagtaggtggattaaaatgggtgtcaggtctgttttcccaggcgtatctgacttaacgtcagcaaaagctgtacttttagcttccc

SEQ ID NO: 14975 - DNA, 1259 bp, Homo sapiens
gaagaagtttgcacttatgaggttttaatttgcaattatttggctacctttttgccttcccaaaacatagggtctttaggagtgaaacttcatagccaaacttataccttgtccagcacagagaaggccatcaaaatgcctggtttaaataaaaatattaaaatgattgggagggtaaatcccttgacctataaatctgacctcctttaaacattatttgtatgttccccaataaactattccgtaatttattagttagcaagtggaaataaaaagaaatgtggaatggggctatgcttagcgtcattaagctgacaggaatacagcgcattcaacttgcaaacacccttccactcccacaaagagcaagctgtcactggccaatcaaaacaatgaaccataatgaaacagtttttcttgctccacccacttggtgaccaaatttgaaaaaaaaaaaaaaccgcgccaactcatgttgttttcaatcaggtccgccaagtttgtatttaaggaactgtttcagttcataccttccactgcgataggaatcatgtctggtcgcggcaaaggcggaaaaggcttggggaagggtggtgctaagcgccatcgtaaggtgctccgggataacatccagggcattacaaaaccggctattcgccgtttggctcggcgcggtggcgtcaagcgcatttccggtcttatctatgaggagactcgaggtgtgcttaaggttttcttagagaacgttattcgagacgccgtcacctatacggagcacgccaagcgcaaaactgtcacagccatggatgtagtatatgccctaaaacgtcaggggcgcactctgtatggcttcggcggctgaatctaagaatacgcggtctcctgagaacttcaaaaaacaaaaacaaaaaaacccaaaggcccttttcagggccgctcacaaagtcgtttaaagagctgaaatgcgttgcgagaatgagtttggatgacagaaataaccgtgacatcctgcataagaatgaattgtgtttgccatgaccggccacactgtgacaaaatttcaaagcataaagtaggcatagagaggtaagcgctaataaagtgattggctccacaaaaagcattttgctgggcgcagtggctcacgactgtaatcccagcactttgggaggccaaagctagtgtatcacttgagatcaagaatccgagaccagcctggccaaaatggtgaaaccccctctaccaaaaaaaatacaaaa

SEQ ID NO: 14976 - DNA, 1413 bp, Homo sapiens
aggcaggactctccgaggagcctgtgttacttccctcacttaagtgcagatttgtaataaaaatcttaatgccagtggcatgctttttggatatataagaagctaaccacttggagtatcatatttgagaggtcagaaaagtccacagttaaagatcggtttataatttacgaagaaaatagaaagttttgtttctctgagttgaaatttgccaagcacggcgggaaatattgcaagtttttggcacaaggctttgtgcttcccttataatttgagatctgcgtgaagcctgagggttcggggatcattatctgagaaaaaccgggcagttcggtgtagacaatttttatatttttggctttttttgaggtgtaacaaacacaactcgggatccgagaggacactctgcggctgccagcgaggcgggctggacagcgcaccaatcacggcgcagctccgccctatataaacgggcgggcgcagcgccgcggctcgagtcccggccagtgcctctgcttccggctcgaattgctctcgctcacgcttgccttcaacatgtccgagactgcgcctgccgcgcccgctgctccggcccctgccgagaagactcccgtgaagaagaaggcccgcaagtctgcaggtgcggccaagcgcaaagcgtctgggcccccggtgtccgagctcattactaaagctgttgccgcctccaaggagcgcagcggcgtatctttggccgctctcaagaaagcgctggcagccgctggctatgacgtggagaagaacaacagccgcatcaagctgggtctcaagagcctggtgagcaagggcaccctggtgcagaccaagggcaccggcgcgtcgggttccttcaaactcaacaagaaggcggcctctggggaagccaagcctaaggctaaaaaggcaggcgcggccaaggccaagaagccagcaggagcggcgaagaagcccaagaaggcgacgggggcggccacccccaagaagagcgccaagaagaccccaaagaaggcgaagaagccggctgcagctgctggagccaaaaaagcgaaaagcccgaaaaaggcgaaagcagccaagccaaaaaaggcgcccaagagcccagcgaaggccaaagcagttaaacccaaggcggctaaaccaaagaccgccaagcccaaggcagccaagccaaagaaggcggcagccaagaaaaagtagaaagttcctttggccaactgcttagaagcccaacacaacccaaaggctcttttcagagccacccaccgctctcagtaaaagagctgttgcactattagggggcgtggctcgggaaaacgctgctaagcaggggcgggtctcccgggaacaaagtcggggagaggagtgggattttgtgtgtctccggagctatttttg

SEQ ID NO: 14977 - DNA, 1105 bp, Homo sapiens
ttgcctaccctttattttcacgatgtgtttgtgcattctgtaaaaagtgggaaacactgttctccggattgtgtgggtgatcgccggtcgcctagcttgccgttcttcaggtatctcctgctgctccagaatctacatctgaatgtcaaggcatagcttttccaggagcttttaaaccgacctttcaattcgaagacgtaactgcgccaggagctttgtctccctggcatataaaagcatagaagagagcaacttctggtttttaaaataagtaaactaatctgaattgtttgcaatggtaggaacttgttatataaaatgttaattaggtggcccgtgctcgaaaactgctctcaggatatgaccaatgggagagtagacctaagctccttcatttgcatgcagacttcacgacaaaataacgaatcagagttggagaaactaaatcttcatttacataacattgtctacaaattccgaggatcaggagatgtagatttcattttctttcctaactgcagaacagcaaagatagcatgcctgagccagcgaaatccgctcccgccccgaagaagggctccaagaaggccgtgaccaaggcgcagaagaaggacggcaagaagcgcaagcgcagccgcaaggagagctactccgtatacgtgtacaaggtgctgaaacaggtccaccccgacaccggcatctcctctaaagccatggggatcatgaattcctttgtcaacgacatcttcgagcgcatcgccggcgaggcttcccgcctggcgcattacaacaagcgctcgaccatcacctccagggagatccagacggccgtgcgcctgctgcttcccggggagctggccaagcacgctgtgtcagagggcaccaaggccgttaccaagtacaccagctccaagtaaacttgtccctgcaactgccttagtaaacccaaaggctcttttcagagccactcaccttttcacaattggagctatatactgacatgtgaagatactagaaactcctgcagctgaaataggcatgtttttaaaacttaaaatggcactcactgtctgggctggtggctttatgaaactctggtttccgt

SEQ ID NO: 14978 - DNA, 1180 bp, Homo sapiens
ggctagctgcaggtggcgcgggatgatgcgggtcttcttattgtcgcgagccgcgttgccagctagctctaagatctcggccgtcagatattccagcaccgctgccaggtacactggagcgccggccccgactcgttcggagtagttgcctttgcggaggaggcggtgcacacggccaactggaaactgaagaccggccctggaagaacgcgttttagcttttgcccgagctttgccgccttgctttccacgtccagacatagtggcttcctaacagcagaagaactaacaatccactgaataaagaaaaagaatgggctcgatggaggaataagaagctagttatagtcatcggtagaattgtgaaaggcgcaatttgattggttaaaattgttctttgacgagccaaccaattagaaaggaaataaggtgaaggctattttacatgtatgcgtcactaacacattgcccaatcagagctggatattttgaattctttatttgcatgaaaggcctataaaaggagagactctagacacgagcttttatttaagtgcgttcattctcactgctgttattgttttctgacagcatgcctgaaccagctaagtcagctcctgctccgaagaagggttccaagaaggctgtgaccaaggcgcagaagaaggatggcaagaagcgcaagcgcagtcgtaaggagagctactccgtgtatgtgtacaaggtgctaaaacaggttcaccccgatactggcatctcatccaaggccatgggcatcatgaattccttcgttaacgacatcttcgaacgcatcgcaggcgaggcttcccgtctggcccactacaacaagcgctcgaccattacctccagggagatccagaccgccgtgcgtctgctgcttcccggagagctggccaagcacgcagtgtccgaaggtaccaaggctgtcaccaagtatacaagctccaagtaaatgtgtgcttaggtgctttaaaactcaaaggctcttttcagagccactcaagtctcacataaagagctttaatattgaatttcaccgttttctagggaataatttttccgattttgtaatcccagcactttgggaggccgaggcgtgcggatcgagaccagtttggctaacgtggttaaatctcgtttctactaaaaatacaaatat

SEQ ID NO: 14979 - DNA, 1105 bp, Homo sapiens
tgcgttcgaagatgtcgttaacgaaggaattcatgatgcccatggccttggatgagatgccagtatcggggtgaacctgttttagcaccttgtacacatacacggagtagctctccttacgactgcgcttgcgcttcttgccatccttcttctgcgccttggtcacagccttcttggaacccttcttcggagcaggagctgacttagctggttcaggcatgctgtcagaaaacaataacagcagtgagaatgaacgcacttaaataaaagctcgtgtctagagtctctccttttataggcctttcatgcaaataaagaattcaaaatatccagctctgattgggcaatgtgttagtgacgcatacatgtaaaatagccttcaccttatttcctttctaattggttggctcgtcaaagaacaattttaaccaatcaaattgcgcctttcacaattctaccgatgactataactagcttcttattcctccatcgagcccattctttttctttattcagtggattgttagttcttctgctgttaggaagccactatgtctggacgtggaaagcaaggcggcaaagctcgggcaaaagctaaaacgcgttcttccagggccggtcttcagtttccagttggccgtgtgcaccgcctcctccgcaaaggcaactactccgaacgagtcggggccggcgctccagtgtacctggcagcggtgctggaatatctgacggccgagatcttagagctagctggcaacgcggctcgcgacaataagaagacccgcatcatcccgcgccacctgcagctagccatccgcaacgacgaggagctaaataagcttctaggtcgcgtgaccatcgcgcagggcggtgtcctgcccaacatccaggccgtattgctgcctaagaagacggagagccaccataaggccaagggcaagtgaaatgattactagtcaaatccgtcagtgatcccgagtcccagaaaccaaaggctcttttcagagccacccaccttttctgtaaagtgctggaatacacatacgatgcctgaaatctcaatgttcactgtcctaatttttaacgaacgcttctgacgttactg

SEQ ID NO: 14980 - DNA, 1213 bp, Homo sapiens
tctaaactaatcacccctcttgtacatagaactttctacctcagtgccaattcctagaggttgatgcaaacagctcgccagagagcctgtgctattgttcctgcgaaaaaacccaatttccctgcacatttggataaaaatgagtttatctatataaagttgagacggtaagaattcacagaacaatgccctggaagagagatttgcaaatgaaagagggagaaatagtatttttaaggaaaacatgaaagttgtctcgatttgaccgaagtttgaaagagagttgggggaataagaaaagtttcaagatgccggttttaaaactatgcatagaaacaaaggcaggaatgaagcccgaactctctcggatcagtttcccccaagtctctaattatttcatgcccagatttcttatatttttactcttttttaaggggcaacaaacacagcagcgcggtagatacgaggagtccttttccagcagcgccgcgcatggagcaaggaaccaatcatcactcagcgtctctctatataaaccctcagcctccctcgtagaggacatgctgttctgacagtttgagattacttattgtcttttctgggaagacaaaaacatgtcggagactgctccacttgctcctaccattcctgcacccgcagaaaaaacacctgtgaagaaaaaggcgaagaaggcaggcgcaactgctgggaaacgcaaagcatccggacccccagtatctgagcttatcaccaaggcagtggcagcttctaaggagcgcagcggcgtttctctggccgcgcttaagaaagcgcttgcggctgctggctacgatgtagaaaaaaacaacagccgtatcaagcttggcctcaagagcttggtgagcaaaggtactctggtgcagaccaaaggtaccggtgcttctggctccttcaaactcaacaagaaagcggcttccggggaaggcaaacccaaggccaaaaaggctggcgcagccaagcctaggaagcctgctggggcagccaagaagcccaagaaggtggctggcgccgctaccccgaagaaaagcatcaaaaagactcctaagaaggtaaagaagccagcaaccgctgctgggaccaagaaagtggccaagagtgcgaaaaaggtgaaaacacctcagccaaaaaaagctgccaagagtccagctaaggccaaagcccctaagcccaaggc

SEQ ID NO: 14981 - DNA, 1134 bp, Homo sapiens
acccaaacaaggaaacaggaaggagtcaaatcaacttgcatttcccctaccctcaccgccccctttccttcccaaggcaatagtgtaggggacgcccagtaagttacggaaaaggcggagacagaggtttcgttcccgcccctccaattcagtctccaaaaaggtccgcataattgatatataaggggcttcagtgtgtagcaaagttgcaaaagttaagagttgttgtttgtcttcgatcatgtctggtagaggcaaaggtggtaaaggtttaggaaagggaggcgccaagcgccatcgcaaagtgctgcgtgacaacatacagggcatcacgaagcccgccatccgtcgcttggcccgacgcggcggcgtgaaacgcatttcgggcctcatttatgaggagacccgcggtgttcttaaggtgttcctggagaatgtgatacgggacgccgtaacctacacggagcacgccaagcgtaagacagtcactgcaatggatgttgtctacgcgctcaagcgccagggacgcactctgtacggctttggtggctgagcctcaccccggctttttatttaacagctcacccataaaaggcccttttcagggccacctccttcgtcacacgaagggctgtaactgatgacgacttgggtttcgttttgtaaatttgggattctaactgagttaaaccgagccgtttttagcgatcttcctaagatggcggatgtgctaaggagaaagggaaggcgaaacattagaaacttgttcaggtatttcgatcgcaaacattcacaggaaaagatggtggaaatggtttgggaataccagcagccttttatgacgtatgtgatgtgttttattcccacgtttctgaaatttactcctatgttaggtggctgggacttaactacactagcattacatgtttagtttttgagatggagttgctcttgtccaggctgtagtgcaatgacgcaatctcggctcaccgcaaccaccccctcccgggtttaagcggttctcctgactcaacctcccgagtaactggggttacaggcatgcgccaccacgcttggctaattttttatttttagtacagaaggggcttttctgtgttggtctggctggtctcg

SEQ ID NO: 14982 - DNA, 1160 bp, Homo sapiens
aaaatatttcttcaaagtaagagttttttaaaaaatataaaggagacattgagctggaccaatcactctcaaacgcggtatttttgaatcgctccggaactgcagaacgttcatttccgtctgtcaaacataatcccaaacaaactgattaaaataaaatcaatgaaggtacgtaatacaggtaggcacataaaacataataaaatgtaaggaactaggggaaaaaagcatttagataggttaagattttctaaaatgagacctagtagctgatcacaagtcctatcacactacataattcagggcgcgaaactggaagattcggaccaatcagaaggactttgcctttataaataggagtaagaacaactgtttgttcagttgtgaccattgcttgaaacccattcctatggcacgcacgaagcaaacagctcgtaagtccactggcggcaaagccccgcgcaagcagctggccactaaggcggctcgcaaaagcgcgccagccaccggtggcgtgaagaagccccaccgctacaggcctggtactgtcgccctccgtgaaatccgccgctatcagaaatcgactgagctactgattcgcaagctaccattccagcgtctggtacgtgagatcgcgcaggacttcaagaccgacctgcgcttccagagctcggctgtgatggcgctgcaggaggcctgcgaggcttacctggtggggctctttgaggacaccaacctgtgtgctatccacgccaagcgagtgactatcatgcccaaggacatccagctcgctcgccgcattcgcggagagagggcataagttgtactgagggtgtgcgccaacttaaaccaaaggctcttttcagagccaccaacaatttcagttgaaagcgccgtagcactagggagtaatgtctcctaaaacaaggagggtggagggttaggggatgggggcagggccggtggctcttctaaactaggcttttgtgtcttggccattgtcttcaaaatggccgatagtggcggctcacgccttgtaatcccagtactgtgggagcccgaggagggcgggttacttatacaaaggtcaggaattcgagactagtctgcctaacatagtgaaaacccgtcttcactaaaagtacaaaaccaaaaaacaa

SEQ ID NO: 14983 - DNA, 1186 bp, Homo sapiens
aatggtataattctggaaacacgtaaatctttagctaatttccattttagaattagttattcatagataattttaaatccggaagctgcaatttggtaggaaactagaaacataatatccgtctttgtttctgtttaaattctcacctaaggagacagaacttataggtagatgttactggcaaggcattagtttttctaatgttttgaatgaaaaactacgttttttcccccgggaggtgtagaaaaggatttagggtaggtttcgcataaatatccaatcaaaaagtagacttgaatttaacttttttattggctgatttggtccaatcagggattgagaatgattaagcacctatttgcataaaagacctacaaaaacggccagctgtgctgttgagccttcactttggggtgtattcttactcctttatcttgttgcaatgcctgatccagctaagtccgctcccgccccgaagaagggctccaagaaggcggtgaccaaggcgcagaagaaggatggcaagaagcgtaaacgcagccgcaaggagagctactccgtatacgtttacaaggtgctgaagcaagtccaccccgacaccggcatctcctccaaagccatggggatcatgaattcctttgtcaacgatatcttcgagcgcatcgccggcgaggcttcccgcctggctcattacaacaagcgttcgaccatcacctccagggagatccagacagccgtgcgcctgctgctgcctggggaactggccaagcacgccgtgtccgagggcactaaggccgtcaccaagtacaccagctccaaataaatggacgcatgttcaaacccaaaggctcttttcagagccacttaatgatttcaattaagagttttaatgctgggtgctgctgtattctatgggagaagtgtcgccaatacaggtaaaattttcctacatcacctgtttattctgtgcgtttgacaaacactaagcttttagagtttatttgtctttataaaggtggggtacaactacattgttcaggctggtcttaaactcaagcgctggtcttaaactcaagcaagttttcccacctcggccttgccttgtattactgagcagataatttgacacagcaggaaaagtgggcattcttgtttaggaaccaaaaactaagtttgcaacttaaaa

SEQ ID NO: 14984 - DNA, 1150 bp, Homo sapiens
gacaaaatagaattcagttaacatttgttgctcactgttgtatgtcggtgacttcttggctcgtgatttcccaggtacatcacccaggaatcctgccttataatggtcaaaggtttccagctagcagcagtccaggtgactcaagaaaacggcacaagataaacttctcaaaacgtggtcctccgaatctggccccacaacacatctactgaatgagaattagcgtcttccaagtcttaaagtagtcgtttacggactacagcttgagaagcgcagaattagaactttaagaagttaacgttcttggatcgcagactaaccgagaagagaggattcaaaaatgaagtgattcatccaatcagattttccagtaattcaccaatcacatcgttggactcttcagccaatggttttgttgcgcgggtcttttgaaaatcaacaaggccaattagaatgtttctgagtatatataagggcagtttccactctgccaagtggctgagtttttctttcaggtagtctgagatggcccgcaccaagcagactgcacgcaagtccaccggtggcaaagcgccgcgcaagcagctggccactaaggcggctcggaaaagcgcgccggccaccggcggcgtgaagaaacctcatcgctaccgtcccggcaccgtggctctgcgcgagattcgccgctatcagaagtcgactgagctgctgatccgcaagttgcctttccaacgcctggtgcgagaaatcgctcaggacttcaagacagatctgcgctttcagagttccgcggtgatggccctgcaggaggcctgcgaggcctacttggtggggctctttgaggataccaacctgtgtgccatccatgctaagcgagtgactatcatgcccaaggacattcagctcgctcgccgcattcgtggggagagagcgtagaggtttccgggcagtaattctatccaacttaaaaaggctcttttaagagccgcctactttcacccgaaaatagctgtgattaactaatcaaatctttgaaactaaacattggttttagtacttaagtcctcatttgattggctaaagttaatggtaagcttgctatatttgttcccgtgctttttcccgaaagtgccagattgtcagcgtcctt

SEQ ID NO: 14985 - DNA, 1157 bp, Homo sapiens
agcggaggttgctcaagccaagcgtgagaccgacttctatcttcaaagtgtggaacggggacaacgctttcttgcggccgatggggaccctgctcgcccagatggctcctggacatttgcccagcgtcctactgagcaggaactgagggcccgtaaagcagcacggccagggggacgtgaacgggctcgcctggcaactgcccaggacaaggcccgctccaacaaagggctcctggccaggatctttggagccccgccaccctcagagagcatggagggaccttcccttgtcagggactcctgagggcctgggtggccccttccatttcctggccctgctctgcttcctgtctacctcatactagaatgatcgtgactacccgggcagacattttactgtgtttctcagaccaagtgtctactgatggcccaaacatggagttttgtgggcttccactgtccccactccgaactcctgtatgtgcctggctgagtcacctaattcatactgtcatactagcataattatgactattgcatatgcttgttttgtttgactcttggctgcctacgtctgtagggtcccctgaaaatcccacttcctgcccccagaaagggcctttatttccaactaggaggataatgcctagtccaggcaatctttctctgtttagcagtcacaggtgagggtggtattagcatcttttttatgtagaaaaaattgagttaatggggtggactgggttgggaagaaatacatttcctaatgtatttatagaaaataaaaatatttttatgtgcctttttatttttgttggtggggaggtcattggacaagttccaactttcatcttgtgttcccttcaccttcatatcctgatcttagagcccccctccccctgccacccaccttactgtttaacctggatttttttttctatttaatttttgtctaatatcttagcccagtttatcaatcagttatcttaagtcagcattttctaagccattgtttgaggaaacagtgacaataggtaataacacatcttagtattaagagttttacaggccactagtataagataggcatcgtggtagatgcatataaagggtggaatgggagccatggcaggtcatagagtcctctcaatgggaac

SEQ ID NO: 14986 - DNA, 1139 bp, Homo sapiens
agtaaggctttttttattttgagtatcctaactccaaacctagtgttcttttcactccattatcctgctgtttatagcaaatcaagacccataatgatacgtctttcatttatttcagttctgccaaggaaagagaaaataccttttaatcccagggaaaggattgcaatcaccacattataaggtatatggcgtggaatgcagaattctaaatactagaagggaaaagtagttggcagattcatcagaggcttaaggataagtacttgtttccaatttaaaagtataattaggattgtctttaatgttctctagaaatactataattaatctagagatctatcaatggtcacatctcagtttttttcttccctgagattcaaagacgtgtaataccaatacttcagattcctatagtatttgggactttgtagactagtgaatagatactttgttgctagtccaaatcctctgattttggtttgatttgtcctagcagatccctgaacttcagagagtattgccatttggattcatggagttggcgaactgctacactgctaccttgtgtatggctctaagctttgatcctaatgactggttgatgatcatgataatattagggccagtgaatatagctcatagtgataataaggattctagggtatttttttttcttttagaaaaagatcctggaagtttatttgatctgacatgtttttgtaatatttagaaatagctcttgtatcataaaaagttgcccagtataagacacacaagatgtattttttttctctggtgaaaatcatgcctatcactagtatatgtttgacatttgtagtatacttaaaatagtattgggtgtgaggcatggtggtgatgaaaagtagtccttacggctacttgttagtcattagagagaacatggagaaggggtcaaagttggtatcattaacagggcaatgacttgacccttctttcaactgatcttactggtagttgtctctagtttttaagtaaattaatgatggaccatcccccaaacagagaactatgggggtatgaaacaaggctgaaggcttttaaccatgggagaaaaaggtgttggtattattcatatagcataacctgaggttgga

SEQ ID NO: 14987 - DNA, 1359 bp, Homo sapiens
aaatgaaaataagtagaaaagaacttagcaatatacctgaacgatctttaaattctatgagtctatcttgttctattgctaggaatttagcatatggagtatatttccattgtatattaaggagaaaaatgccacaaaatagcatagttccatacaaataatgttaaaggaaaacatgcatatatgcagagataacattctttttgctttatgtatcttctataatgttaacatttttgttatgaggcaggaatcatgttaaatgaaaaaaggaaaaacagcctaggtcttgaggattaaaaaggactgaaggagaacaagagggagtagagcacagcaggcctgtttcccttttaggtcccctcccccaatgcagagggacttcccgccaaagctcttccggttttcagtctggtccgcagaggttacccataaaagaaagctgccatcacaggcagcagacctttgttctctgaccacttgataatgtcaggacgcggcaaaggaggtaagggcctggggaaagggggtgccaagcgccaccgcaaggtgctgcgcgacaacatccagggtatcaccaagccagccattcggcgccttgctcgccgcggcggcgtgaagcgcatttctggcctcatctatgaggagacccgcggagtgttgaaggtgttcctggagaacgtgatccgggacgccgtgacctacacggagcacgccaagcgcaagacggtcaccgccatggacgtggtctacgcgctcaagcgccagggccgcaccctctatggcttcggcggctaaatggcattttgaagcccagtcattctctaaaaaggccctttttagggcccctaagctttcaacaaaagagttgaaatgactgcaaactgagtctcttaatagggccattgtcagtgagttctgtcatcctattttacaagattaactcgacgccgaaaatgggctgatgactacaggtgaccttgggccgagatttttccaaggccagaagagcctctgctggccagtaacttctggcggctgcctggaaattgcctgcagccggtttaccgctcggattagtttagaaagccaaggggtctgcggtccaaataggggcgggctagataattaacttccctctggaccttcaaatacgtctcaggagataatgagtttgatgggctccactaaatgctagaacctccaggaaaacttcgtggtggctggtttaagaggacttggcgggcacagagctctgcatgggggggagggggacagaccatgcttttactactgtagaacagtagggcagtcttaagagtcttagtaataatattcctttatatgtttgccttttaa

SEQ ID NO: 14988 - DNA, 1874 bp, Homo sapiens
cagtgggcacacagctccaagagcttggagggacccttctcagttgtgagattatgaactcaaagttcaagatcccaaagttttgttgtagtgtgaatggcaagaacagtctttctctgatgcttctagaagattcaaatcataaaaagctttctttgcctgttgaaaatacactgtagtaatctactgttataacatcagccctcttgcataggaaaccttttatacaaccagaaaacatgcactgaaaataacaaatgagctctcaagcttggtgtttgcttggtggggacccacgtgggttcaacatgtgtattgagaagtgttatttctgttcagggcccatctaccctggtcacggcatgatgttcgtccacaacaattgcaagttgttcagattttgtaaatctaaatgtcataaaaacttttaaaagaagtgcagtcctcgcaaagctaggtggatcaaagcattccagaatgcagctggtaaagagcttacagtggataattcatttgaatttgaaaaacgtagaaatgaacctatcaaataccagcgagagctatggaataaaactattgatgcaatgaagcaaattgaagaaatcaaacagaaatgccaagctaaatttataatgaacagactgaataaaaataaagagctacagaaagttcaggatatcaaagaagtcaagcaaaacatccatcttattcaagcccctcttgcaggcaaagagaagcagctggaagagaaaatggtacagcagttacaagagcatgtaggcatggaaaacacatcttaaaaatctctgtaaccatttcttttatgtacatttgaaaatgtcctttacagacttggaactgctaaattattagtttattttttacataaggtcacttaaatgaaaagtgattaaaacatatctttcctacattgacatctgcaaaacatcagatattacgaatgttagattgcatctcagtgttaaatcttcactgatagatgtacgtatgtaaatcatgaaaattctacttctaactatagaagtgaattgtggatgtaaaatggttatgctatttggataatggcactaggcagcatttgtataacaactaatggcaaaaattcatggctagtgatgtataaaataaaatattctttgcaataaaatattccgtttattaacgttacagaaggggggatacaacaaggaactaacaatttgtataacagtgtcaaatgttattttgattttagtatttcctgttttggtttatttgtatcttagaagagcacaatgacattgtttgatgaagcctaattattctggactgttttgacctggtttaacccttctgataggtagttgtggatattggggatgagaactgaataatctttgcctggagtgacactacactctagaatttccattttggagaatactcagttctaacttgtgactgctggtagaacaaactttatttttctagcctagcaatgttctagaagcagaggaatcccagtgccttttaaaagttattatatggttttcttttaaaaagctcctgtttttggaaagtagaatttatgagtataacatctgttcattatttgcacataaaatgaaaccatttaaaaagaaaaaataaacagaaaaagaaaataacaaatgaataaaattcctttataaaatgtttaaatgggcgaccacgtgaccaaacatatctgaagctttgttttcccaggaatatggcatcaagcattggttataaactattttaaacaatttcagtattagctggtttaacatgaaattattttcttgatatttaattaagtttttgttttacttgggttagtagctttatacaag

SEQ ID NO: 14989 - DNA, 1179 bp, Homo sapiens
gtcctttcttgtatttcccacagtattgatgtatatcttctgcgttcaaaagcaattttttaaagcctcataacgtggtaacaaaatactatgcacgttacaaaattcagaacacggaaacaagaagctcgctttttttttccccctatttcggtttggccctttagatttcccctcccccaccggggcgggacttcccgccgacttctttcaggttctcagttcggtccgccaactgtcgtataaaggcgctgcctcaggccagagtcctcacaaagcgttgggtgagactcctcttgctcgtcatgtctggccgcggcaaaggcgggaagggtcttggcaaaggcggcgctaagcgccaccgtaaagtactgcgcgacaatatccagggcatcaccaagccggccatccggcgccttgctcgccgcggcggcgtgaagcgcatctccggcctcatctacgaggagactcgcggggtgctgaaggtgttcctggagaacgtgatccgggacgccgtgacctatacagagcacgccaagcgcaagacggtcaccgccatggatgtggtctacgcgctcaagcgccagggccgcaccctctacggtttcggtggttgagcgtccctttctatcaacaaaaggccctttttagggcccccactttctcagctgaggagccgtgatgcttgtttgcccagtttctctttaccatttgttcgcgcctgctgagtttgtgctgctatcggagcatgcgtctctagtcgctgtaagtaggcatcagtcactaatcgctctccagtaaataaaatacccaacacaacttgtttcaggtgctccagagcttactgacatgggccgtcgcgcagactgtagtgcagtgtcatcatggctcactgtagcctcccgattagccggaacctcgcgcccaccaccacgcaaggctaattatttttccaaagaccgggtctccgtgtgtttcccaggctagtttcgatatcctggcctcaatcccctcgcctatgcctaatgttggtattacagtagtgagccaccacgcctggccacgatactgttgaggttttagggttagttacatttaaggggcaattttcgcagtgtagtggggaggaaagtcaagcagttataggtttctggcgctgtgaatccaactgctgaacat

SEQ ID NO: 14990 - DNA, 1074 bp, Homo sapiens
gagagggagaccctgtcttaaaaaaacaaaaaaagaagaagaagaaaaagctgtgtgttgtaacgtcctgttcacgaattcttatgcaaatgaggtgattaataaaatagtgtgtaggactggtggcgattctagatgacgtcatatacacgtttgtccaatccaaagaagcatgtttcataacagcgattccattggttgaaataaaactgtaatttgagccaatggcacagctttattttcgcgcccagtattgactataagtagtggagctctggtgaacttctctcggctgttctcagttcctccatttatcgtttcttcgtcatgtcgggacgcggcaagcagggaggcaaagctcgcgccaaagccaagacccgctcttctcgtgccggtctccagttccccgtgggccgagtgcaccgactgctccgcaagggcaactatgctgagcgggtcggggccggcgcgccggtgtacctggcggcggtgctggagtacctgactgccgagatcctggagctggcgggcaacgccgcccgcgacaacaagaagacccgcattatcccgcgccacttgcagctggccatccgcaacgacgaggagctcaacaagctgctgggcaaagtaaccatcgctcagggtggtgtcctgcccaacatccaggctgtgctactgcccaagaagaccgagagtcaccacaaggccaaaggcaaataatgtctccatagaatcactttccaatacaacggctcttttcagagccacctactatttctgcgggagagctgggccactggttaaacatttggaacgtttgttatgaaaagataaagcatttttcatctagagcttaggaatgacttttaggaaaaaccttacaggattcaggtgacatgtttaagtcagaatgtgaactagttatttaatgtagggcttacaagaatgttcgctgtgtttattcatctcgtgttatatgaactagaaccaataaaaaaaaatccagagccaggctcagtggctcacgcctgtaatcccagcacttttggaagctgaggcgggaagatcgctgga

SEQ ID NO: 14991 - DNA, 1180 bp, Homo sapiens
ggggcccgagcatagcagcaacgcaaaacctgctctttagatttcgagcttattctcttctagcagtttcttgccaccatgtcggaaaccgctcctgccgagacagccaccccagcgccggtggagaaatccccggctaagaagaaggcaactaagaaggctgccggcgccggcgctgctaagcgcaaagcgacggggcccccagtctcagagctgatcaccaaggctgtggctgcttctaaggagcgcaatggcctttctttggcagcccttaagaaggccttagcggccggtggctacgacgtggagaagaataacagccgcattaagctgggcctcaagagcttggtgagcaagggcaccctggtgcagaccaagggcactggtgcttctggctcctttaaactcaacaagaaggcggcctccggggaagccaagcccaaagccaagaaggcaggcgccgctaaagctaagaagcccgcgggggccacgcctaagaaggccaagaaggctgcaggggcgaaaaaggcagtgaagaagactccgaagaaggcgaagaagcccgcggcggctggcgtcaaaaaggtggcgaagagccctaagaaggccaaggccgctgccaaaccgaaaaaggcaaccaagagtcctgccaagcccaaggcagttaagccgaaggcggcaaagcccaaagccgctaagcccaaagcagcaaaacctaaagctgcaaaggccaagaaggcggctgccaaaaagaagtaggaagctggcgtgtgaaaaccgcaacaaagccccaaaggctcttttcagagccacccagagacctctaaaaaatggctgtgcacaacatgttagatcaggcagcaagattccttgcattcgaaaaatctcgggcagttctccctcaaccctaatcgagtaacgcaaggcaagcaagagtccagggtgttggttggactccccacgtagtttacccatgcagtctgttattagagtatgaattccagccgttggtttttgttaagttggtgtcaagctttttgtcagacgcctagctacaaagaagcttcttatattttaaaaagcccgctctataatctgattggccagtttttgttccatcatctgtatgtggtttttccgcgtttaagccatttaggcaccagctacttcggcgtcacta

SEQ ID NO: 14992 - DNA, 1144 bp, Homo sapiens
atggaatgcagcggtggtcagcctaaaacactgtagaagggcaagatgagctgagtaatttttaactgggcatcatttttagaaactggagtttaagtacccccttttccattttttcctgaagtcgtgggcagggcgcaaggtctgtgaatcggccgaccggatgcagctggtgtggagagttcccaatcaggtccgatttattactatataaagtactgctgcgaggcttgccgtgttgcattttgtttagtacaagacatgtctgggcgcggcaaaggcgggaagggtctgggcaaaggaggcgctaagcgccaccgcaaagttctgcgcgacaacattcagggcatcaccaagcccgccatccgacgcctggcacggcgtggaggcgttaagcgcatctcaggccttatatacgaggagacacgcggagttcttaaagtgtttttggagaatgtaatccgcgatgcagttacctacacggagcacgccaaacgcaagacagtcacagccatggacgtggtttacgcgctcaagcgccagggccgcaccctgtatggctttggcggctgagtgttttacttacttacacggttcctcaaaggcccttctcagggccacccatgaagtctgtgaaagagctgtagactaaagatagttaatttcttaagaacacttaaacgtatggcagttttggcaaattagcgattccacataagcagtcgctgaagtttgaggttcggtgcccctttcagcattacttagtggttaaaagtgccggcttctctgatacacggccaaatctataacgcctctctggtttttgcaaaagtcataatgaaacagccggtctcatttatcttgtatcgattactttaccgctaccaatgcgagggctgtgtaactatgacactgtggtccgcaacgcccaaaatgttttaatatcgccctttacagaaaaagtcggccaacttctaaaacattaagtacgtttaaatttgagaaatactggcataccacaacgctcgaatttcatatccccttcaatgcctccatttacaaatttactctagtttcacttttcctttacgttctttaactttttgtcaaatcagtaatgacacctcgtaattaaaatagtgca

SEQ ID NO: 14993 - DNA, 1129 bp, Homo sapiens
attagaagccgtcaggtaaaaaaaaaaaaaaaaaaaaaaaagtggcaggaaccaaatgaagatagtattaacaaccaaccaggtttttcctacaacagttctgaccaatcaggatcagatcatcgttataaattctggtagaagccactgctcattcagctgcttgctttcagagcatagctttctcaactatggcccggacgaagcagacagctcgcaagtctaccggcggcaaggcaccgcggaagcagctggccaccaaggcagcgcgcaaaagcgctccagcgactggcggtgtgaagaagccccaccgctacaggccaggcaccgtggccttgcgtgagatccgccgttatcagaagtcgactgagctgctcatccgcaaactgccatttcagcgcctggtgcgagaaatcgcgcaggatttcaaaaccgaccttcgtttccagagctcggcggtgatggcgctgcaagaggcgtgcgaggcctatctggtgggtctctttgaagacaccaacctctgtgctattcacgccaagcgtgtcactattatgcctaaggacatccagcttgcgcgtcgtatccgtggcgagcgagcataatcccctgctctatcttgggtttcttaattgcttccaagcttccaaaggctcttttcagagccacttacattctcactgaggatagctgtcacaccattggtcgactgtcttaaatcaactttaaagcagggataaactggcggaaagtcgtcaagggttgttcattctgattccttgcagtgtcctttgtcttctaagacggtccttttcacttgtcctctgtgacccatctcacaagggtctcactttctccgaggaaagtcagcaaatctatatccaaggtcaatccgcttcaaggggaaagccaaagtccttcctgcacatgctgtcctttggggatagcatctccagaaccccataactaacaattagattacaggttaaatgagatgccatttttaactgaaacgggcactgcccttgggtcccctggaagcttgctgaaaatcacggacatgaggccggttgatttagcacatagacacgggagacttcaaaatgaggacccacccaccaatgagatacag

SEQ ID NO: 14994 - DNA, 1183 bp, Homo sapiens
atcacctgagcccaggagtttggggttacaatgaactatgaccacaccactgcgctccagcctaggcaacagagcaagaccctatctcttaaaatcagttcatgatggatattgtggcttcagatgtgaaagaaaagatacggggctaaaattctgtattttcagagtattctggtaaccagctaatccaagcagtaatttttgaaatgtgaagtttagaatatattctaaataaaatacgtgcaacctccagtgggaacctcttattattggggaggtagtagaaaggcgctgggtgttctaaaataggctctcctggcccacggctgactgtcttccttgtgtctctacagtggacgtgactctggacccagacacggcctaccccagcctgatcctctctgataatctgcggcaagtgcggtacagttacctccaacaggacctgcctgacaaccccgagaggttcaatctgtttccctgtgtcttgggctctccatgcttcatcgccgggagacattattgggaggtagaggtgggagataaagccaagtggaccataggtgtctgtgaagactcagtgtgcagaaaaggtggagtaacctcagccccccagaatggattctgggcagtgtctttgtggtatgggaaagaatattgggctcttacctccccaatgactgccctacccctgcggaccccgctccagcgggtggggattttcttggactatgatgctggtgaggtctccttctacaacgtgacagagaggtgtcacaccttcactttctctcatgctaccttttgtgggcctgtccggccctacttcagtctgagttactcgggagggaaaagtgcagctcctctgatcatctgccccatgagtgggatagatgggttttctggccatgttgggaatcatggtcattccatggagacctccccttgaggaggtgaattcaggccaaaagggctgttggctgtaatcctacgccaggcacaaggcatcttgttgccttgccacgtcctgtcacagctgggtatccttaccatgttccacgcccttgcagtgggagacaggatgtccatgttctctaccatccttttccttcccatgcagattgtgaaatgtaatgagatgtatcaagatatcctagaaataaaaaccagatgtccacctcca

SEQ ID NO: 14995 - DNA, 1102 bp, Homo sapiens
aattggaggtgaaggaatagtggggatatggcaagggaggggaattaaaaatggaagtgataaaggtaggaacatgactatggaggcgaagacttaaagtagaaaaaaatataaaatatacttgatgcctataatttttcgcataaagatacctccctttactacatttcagtcgctgtctcttgcacacatacatgcacacacacagacatgtggctttcatccattcccacaatgtaatgggtgtgaagaaggcagaggggcagggaactcaaactttctgataaaagcacatagaatctcctctcttttaaagcacattaagcagctctccctcagctttgtgtgagccccatttccttccccagcaatctcctgaatgccctggttacctccttgttcctcagggtgtatatgagagggttaagtgaaggagtgcccactgcatagaagagaccaaagaacttgcccctctcttgggcatagggatttttgggctggaggtagacagcaatgactgagctgtagaagagggtgaccacagtgagatgggaggagcaggtcccaaaagctttcctccgcccttttgcagagttaatcctcagcactgcccaggtaatggctccgtaagagacaaggatgaggctgagaggcacaaccaagatgaagacactggcaacagccacctggatctcattgtaggaggtgtcttcacaggagagtcgaattagagctgggacctcacagacaaaatcatccacctgccgatcggggcagaagggcaggtgcagggtggatggtgtctggaccactgactccactagcccaatgacccaggccacagatgccagctgccagcacaggcgggggtggatgatggtggcatagtggaggggctggcagacagccacgtagcgatcaaaagccatcactgtcaagaggatgcactcagttgtccccagggacaggaagatgaagatctggacagagcagtccaggaagctgatggtcttctttgggccccagaggttgaccagcatttggggaacacaactcgtggtgaaacagaggtccaagaaggagaggttggagaggaaaaagt

SEQ ID NO: 14996 - DNA, 2226 bp, Homo sapiens
tgagcctctagtagtcaacactcacagcagctgggtgtagcatgcagccccagcataaaggacctgggcaggcgttcactgtgccccaggctgtcattaggggctggtgcaatgccaaagagagggatgttccaactgggttgacacatctctctgatttattggaagctctgtgcactgacttttctctccttccccactttttccttttgtttttaaattctctcttatttccctgatcgcattttttctatcggtatccttatgttctctggcttttcttgttctgttttgatttctccttttaatttattctgtccacttaccctacgtcctccccctacatttttctgtgcccttcctctctttccctgtgcccttcctctctttccctcctccccactccttcatcacctcctcttctcctactatcccaattgtgcttcttcctccagaaagaggagcgtgtctctgaactgcgccatcaactccagtctcggcagcagctccgctcccggcgccacccaccgacacccccagaaccctctgggggcctgcccaggggaccccctgagccccccgaccggcttagctgtgatgggagtcgagtgcatttgctttataagtgagggtagggtgagggaggacaggccagtagggggagggaaagggagaggggaagggcaggggactcaggaagcagggggtccccatccccagctgggaagaacatgctatccaatctcatctcttgtaaatacatgtccccctgtgagttctgggctgatttgggtctctcatacctctgggaaacagacctttttctctcttactgcttcatgtaattttgtatcacctcttcacaatttagttcgtacctggcttgaagctgctcactgctcacacgctgcctcctcagcagcctcactgcatctttctcttcccatgcaacaccctcttctagttaccacggcaacccctgcagctcctctgcctttgtgctctgttcctgtccagcaggggtctcccaacaagtgctctttccaccccaaaggggcctctccttttctccactgtcataatctctttccatcttacttgcccttctatactttctcacatgtggctccccctgaattttgcttcctttgggagctcattcttttcgccaaggctcacatgctccttgcctctgctctgtgcactcacgctcagcacacatgcatcctcccctctcctgcgtgtgcccactgaacatgctcatgtgtacacacgcttttcccgtatgctttcttcatgttcagtcacatgtgctctcgggtgccctgcattcacagctacgtgtgcccctctcatggtcatgggtctgcccttgagcgtgtttgggtaggcatgtgcaatttgtctagcatgctgagtcatgtctttcctatttgcacacgtccatgtttatccatgtactttccctgtgtaccctccatgtaccttgtgtactttcttcccttaaatcatggtattcttctgacagagccatatgtaccctaccctgcacattgttatgcacttttccccaattcatgtttggtggggccatccacaccctctccttgtcacagaatctccatttctgctcagattccccccatctccattgcattcatgtactaccctcagtctacactcacaatcatcttctcccaagactgctcccttttgttttgtgtttttttgaggggaattaaggaaaaataagtgggggcaggtttggagagctgcttccagtggatagttgatgagaatcctgaccaaaggaaggcacccttgactgttgggatagacagatggacctatggggtgggaggtggtgtccctttcacactgtggtgtctcttggggaaggatctccccgaatctcaataaaccagtgaacagtgtgactcggcaccttgcagtcttcctgtgaacagaatgggcttcaatccaagaagggaggttcagaggactccaagttcatgaaaaggcattaaagcggagggtgaaaagaggtgttttattgatccattgagggcttagcagaatgaagcaggacatgattaagtctgagattagtgagtgaggacactactggttaaaagtgtgggctctggagtcagactgccagggtatcagatccaaccacatgcaaacattttcttagtctctattccccatgtcctcatttatgaa

SEQ ID NO: 14997 - DNA, 1120 bp, Homo sapiens
gtttctcttctgacgttttccttgtctgcctctctgagatactgatcatgttcctggacaggatgagaataaaacctgtgtaactcccatggccatgtatcatggagtttttcattctgacttgttgagaatgaaaacagggaaaccagatataacccccactcctactccaaagtagctaacgggaggaaaaaagaaaagaagagaaaaaaacaacctttggggccaggtctcacagtcttggactctacataaatagcctgtattctagtgggggcctgtgcttgggaagccctctgcaactccatcttcagccccatgactgcattgctctgcctctcaaggctccactgtcttctccaatcctgtcttcctttagcccctggccctgaaattagggtcatgccattgcgtggtatttggagagctcagcctccctggagaagaggggtaattctctctccctctcaccctctccacctctgccctagttatatccagaactcacagcccaacctgaacaacctgactgctgtgggctgctcactggctttagctgctgtcttccccctggggctcgatggttaccacattgggaggaaccagtttcctttcgtctgccaggtgaggaggtggtgggcaaattccttacaggatgtgactctcccacccgtctcaggagcaccttccatgatttatgattctctgcccttcctcctcagctttccctgactcttgtccctgttctttccttctagcatcacccctctgttctctgtttggctctgtcccttctttctgtgtctgcaggccattttcattctgtagtttacttgtcagttccaaggttgccatggcaggccttgcagagaagaggagggagccattgaaggcaaaggaaggggatctgctcaaaggtctcctgaacaatggtggcttgtctgtggtatgggggctgagaatcagaactgtggactttttttgggagcctttgttgggtttggaaggatagaagcagagatggaaacacagcagagagttggggggaagggaccactgccacacagggaggaggggctctgggactgttggtacatggaaggttctagtgctgtgggga

SEQ ID NO: 14998 - DNA, 1171 bp, Homo sapiens
caccctgaggagacaggaggcttccaggaggcaccgctggcctatgatgccatctgggccttggcactggccctgaacaagacatctggaggaggcggccgttctggtgtgcgcctggaggacttcaactacaacaaccagaccattaccgaccaaatctaccgggcaatgaactcttcgtcctttgagggtgtctctgtgagttaaaacttccttcatactcccctgtcttcccaatcttgagagagactcccaagaggcaccttctacaaacatgcattctctgtttttctcagttacttctttgcagaatcagtctccgaccagagaagtagggaccttcaaattagaagaacccatcaaagactagaggaaaaaaaatgatgtattccatttttttaaacccctcccctcatttcttttcaaactagaccaagtattcatgagtcagatgagaactataggattttgaaagacaaaacagtctgaaaggtcatcttcttattccttttaaaatgaaaagattagtttccagagagatttgctgacttgcttaggccacacaaccagaagcctgctggtgttctgtctggggattttttcccattcaaatctcataagtgaagctccttctccaaagaataatgtttctaaaatctagggtatgggcatctggggtatgtcctatatgcaggcaaatgccataaatagcattcattcagaggctcaattacatcaaaaacagaaggatttaaagagtccctgatgttctctttcactcttgcttttgtctcctttgccttgctccacatgttccttccctcagggccatgtggtgtttgatgccagcggctctcggatggcatggacgcttatcgagcagcttcagggttagtacaggggcaggaggggaccggacatgggggctaggctggggctgggctgggatgccccctggggaagaatgccagagacatcacaagattgccctggcacctcccaacttctgcccttctcttttaactctgttcatcaagcttgtaaataataataataataagcttaactacaagaagattgatgtctttgagttgcactggttttgctcttgaaaagaggtgtgcaggctgggtgtggtggctcacccctgtaatcccagcacttttgggag

SEQ ID NO: 14999 - DNA, 1205 bp, Homo sapiens
tggagttggatctgaagagggaggggcactgggtgggagtttcccttggttttcttgtggggcctcctcttggcatctgtgcctgagttgatagcatatgatctgaggtgacgattcataggatgtctctgtctgttggctctgactgcatcccttgtctgcacacacatgatactttcttcagatctcatttttctactgctttgtgtttcctgagaagcccatgaattccatctgtcctgactggctggaaaaggccactcagaaatacaggggctggggagaaacttagaaggaagaattgtcagcctttcctactatccccaagacttgtagatttctctttttagttctactgctcttccctgattcccaagaggctaaatagtatcaagtgagataagacaaaaacaaacaaatgagcaaacaaaaactcagccattctcctctgtattcaggtgtacaaggagcgtctctttgggaagaagtacgtctggttcctcattgggtggtatgctgacaattggttcaagatctacgacccttctatcaactgcacagtggatgagatgactgaggcggtggagggccacatcacaactgagattgtcatgctgaatcctgccaatacccgcagcatttccaacatggtgagagtgtggggacttgcagtctggcacctgggagggtggagaggactgagggggccttgcaggggaaagggtggcagggagagggtgcggaatttggatataaaggagaagagggggctgtgcccaccctgaacttgtctgcattatgtttcctgtggatcctacctttgctctgacttccttgggtagagagagaaaaaaaaaaaaacgatggagttgtatgttcagtaggttcctgatgagtggaagggctgttaccatggagacgaggagcagttggtgagaagtcaggaggaaccggcattaatgataatatggatgcttgtatactcaagcacacctttacaggagcactgtgtctgggcagaattgcatttcattttcttggtgatttatgttagtgttttagagttgcttaatattcactcatgattgatatgcaattagcttggatcctgttgctttttttaatgattctttttttagaattttatgtggagaaggggcttttgaaatcatttagccccagacagctggttaatgacagacttg

SEQ ID NO: 15000 - DNA, 1274 bp, Homo sapiens
tactggtcttgttcctgttctctctttacttatcactagctctgaaaagagaagagggaggaaacaaatggaaggtggggagaaggggtttgcagaggtgaggaaggaattttcataatatggctttgagcaagctatctggggatgtggaaagagtttaccgtattcctactgacttcttccacccactggtgtttgaagcatagaaacatggggtaaagggcttggtgacagagggaagggggatgtctgagggtgagctgaaaggaggtaaggtggtatgttcattaataccaaaggaggggtgtgcaggagaggtgatgggtaaggctccagatggaagacagagaaggaagtttaatgaaagaggagaaaaaaggcacttgacaggaagagatgccagaaaggagaagaaaacggtaattaatgatgaaagtgagtaattgagaaaggaactaatttgttcgagaaagataagagcaggaattgcagacaggggaggggccccaggagagcttgccctcatctcctcttgtctttcagtgtgatccaggccaagccaccaagtacctatatgagctgctctacaacgaccctatcaagatcatccttatgcctggctgcagctctgtctccacgctggtggctgaggctgctaggatgtggaacctcattgtggtaagcagggctatgggggtcagaagatggggtcattcccttttgagctctactgaagggacgatggcgattgtgggtttgtattgaaaaggagtgtggaggacctgctactaagattcagagtcctctgcagacctgagctaggcagcctcctagcaacagtggcctgacagtgctgcagctgacctccttcttcagaaggaattgaaattagatcagtgaaagagcatcccggttgtgaggggtgtgtgggcctttgagaatctcttttccttaggcagaccagaggtggggaggtttggagagagtaaggaagagaaacccaaaggcaggaagagggttaaaggaactcttggccactcttggtgtcctcagtgaacagaccctgttgcactcactctccctgccccacagctttcctatggctccagctcaccagccctgtcaaaccggcagcgtttccccactttcttccgaacgcacccatcagccacactccacaaccctacccgcgtgaaactctttgaaaagtggggctggaagaagattgctaccatccagcagaccactgaggtcttcacttcggtgaggagggg

SEQ ID NO: 15001 - DNA, 2377 bp, Homo sapiens
tcccttttctaggcacccgaactctctgccatcttctctcctgggatgcagtcatcccatttgtatgcctcatacttcctctaccctggtagattctttcaagatccttgggctttactttcctcacataactcagttattctgcttctagtttaccattttattctggaaattgagagtcccatccaggggtggacttatgacactactgaaacttagacttcaaggttcctcacctacagggccctcttcctgtgctctaataatatagagggctcgatggatatgtgttcatatggtaacaggcttttgtaaaaattgcagaaataagattttaacagcaattgcttaaagccaattgtatgtgtaattttttttcttaaagactcccaattttgtaatattcaggcaccacagaaccaagatctgccccaaacttagctattggcattcccgtctcaaattctgttgtcctatgaaaaatcgaagaagaaaataagtcctgacccccttacccccagacccaccttgttcttatccccaggcaccctcccctcagaaacgcaggcttctgctctccccggtcttcagcatggacaggtgtgggagggggctggggatcaggccagggaagctgggcgccagtggtaactcttctctgatccccgtctttcctgctgccagtgaatcgaacgccacactcaggtgagatgagaaacccttaccgcgcgcactgcaatgccctccccttcactctgcaccctccacccccctgaaattctgcccttaggctacggggcgtcgtcctttcgcaccttccccaacccaccccagtttgcggccacccccttccctccctacctgtttcctgcctccagtcccggttttccacgaggctgcggtctctccttgtccctgcttggctacacttccctgggctccacctcctcccagactgagcctcgccggtgtcaggcagagcccagcagagggcggcagggtgctgggagaccctgagctcccaccacgttttcccctgtggggttccttgcgaccttcgctggaaccttttccagcctgctgcctcctaggatttcacctaatggactttctcagcctgtcccacccatcccaaccctggccaggcctctcgcgctcttccccacatcttttccttccgtgtaccccttccctcgtcttttctcaattccatgtcctgtctccctttcttaggcttctgtctacccagccccaggctcccttccacgaccccaccactccctcaaaccagcctcccttccgtacccaactcgttccctccaaaaccgtttcctctcccccacatcctcagtgcttcactgtatcgactcatactcccacttcagacctcaggcgccagccccgtttctctcccgtcccactcgcatccttcccttcctaccctggttcctccgtgcttcagcctcccgcggctccctccgcccaccccgccctcctggcacgccccgtccccatttctcctcccctcgggtccccttaagtgagatccctcccttcctctttcgttcctttcctcctcgaggttgcatcccccctcccctccccgcccctccgactgtcgctcccacctcggcgctcgcttccctccccgcccccttcctgcctccccagctcccgcccgcccccccaccccccgctgccgcgcgccgcccgtgacgtcagagccccctcccagccccacatctccctcctgctcctcctcctcccctccgtcggtcagtcagtccgcgaggagagtccgcggtggcggcgacggtggcgagagccgcgggggccgtaggaagccaaccttccctgcttctccggggccctcgccccctcctccccacaaaatcagggatggaggcgcctccccggcaccctcttagcagccctccccaggaaaagtgtcccccctgagctcctaacgctccccaacagctacccctgccccccacgccatggggcccggggccccttttgcccgggtggggtggccactgccgcttctggttgtgatggcggcaggggtggctccggtgtgggcctcccactccccccatctcccgcggcctcactcgcgggtccccccgcacccctcctcagaacggcgcgcagtgtacatcggggcactgtttcccatgagcgggggctggccagggggccaggcctgccagcccgcggtggagatggcgctggaggacgtgaatagccgcagggacatcctgccggactatgagctcaagctcatccaccacgacagcaaggtagccctggacatgggggtgggtgggaggtgggggcttgcggggcagggggccagccagctgcacgcgcc

SEQ ID NO: 15002 - DNA, 1141 bp, Homo sapiens
aaagccagtttaatattaatagaagccaactataataagaaaagcaaatctgattgtgcatccaaagttatatacatctacatatttcaaagccagagaaccgcccactgtagctgactttgaagagatcccattttgtgtgcttatagccccatcttgggttcctaaaatggtaattttttttttcttttgggaatgtgtggatgcttgcacaggtaagggaggattggaagataggtaggcaaatccttttcacatgtgattttctttagagcaggatgcttgtggacccaaacctgcacctgagtcccctgctctttaaagggaaagagccttcttcaactcgcctctcttcttattttcctatctctccacagtccgaatctgctccaagtcttatttgaccctggaaaatgggaaggttttcctgacgggtggggacctcccagctctggacggagcccgggtggatttccggtgtgaccccgacttccatctggtgggcagctcccggagcatctgtagtcagggccagtggagcacccccaagccccactgccagggtgaggggaacagctgcctgcatgcagctgatgaggacgcttgtgtgaggatgggagtggggtgggaatggataatgggaaagaatggagagctataaaaatgtgggggaggacactggaaaggggagatgaaagtccctttttcctccatcacctgcctcaaacttcctcttgcagtccccggtatcctctgtaggttgggggcttccttcctttaccttttaaaaaaatcttcctgctcccgattcttagacctcacgttttctcttttcctttatgaatctcacctctctcaccttcttcaggtttaaatactccaattttccctttctctaaacttagaaatttccatgcatcaccctcttctagaattcatccctcaccattccttatataattgatttattgtaaagactcagaaataaatcaaacattctactaagaaaaattgagaaggggagctctgggggtggaaacatattagggtaaaagacttaaaattggaggcagcattatcagaagatgaagaacaactcagggatggggtgggaagaagacaggtccttttctgtacttcc

SEQ ID NO: 15003 - DNA, 1112 bp, Homo sapiens
cgtgattcgcccgcctcggcctcccaaagtgctgggattacaggcgtgagccaccgcacccggccaaaactcgtatctttattaattagcacctagcttgtttgtttgtgtctgaccatcaagtagtagttgttgaataaacagtggatactctgatagatatgaagataggagaaaaggatgagaggaaggaaagattctgagacctgtggaagatgtgtaagtagaaggaaaacattctaaagcaggcatgttgcccagctttcgtttttgcttccccaggtccctagtaggctgccaagacaaggaggagctctggctagtattctgtaggtttctccccatctccaggtttgggttggggctactcatatcctcactcttcagctcactcagctctctcttcaatgttttgcactcttcctcttccttcccttcacatgcctttcagttttgcgcaatcagggctggagtcttggaagaaacaaccaccatttgcaaagttaccatactgtaattttcagtgaggagattcctggcctccagttcatggcagagaccatcctgtgttgctctccagtacaggtgtcctctgatggagagaggggcacctgcctgtccttagccagagagggcttccaggtggaagactggagagagaaatggaaagaagggtaataaaaatgggaaaatgaagagaaaaggtagatgacagaagaagggaaatcaattctacttggaattcagagtgttcctgaaagtgcaaattggaatgtccccatagcaaagatgccagtgagtgtgcaacttgatggatgagatgtccccaaggacaaatccctgggcaaccaggctctcctccacccctgccaagatgtgacatcactcagaagggatttcctagaagaaggagaaaataacttgaaaaacgtatgtcagtagtttgtatcataaaaccattgaactagggagaagaaaagcccttggggtcatcttgtctccattcctgcctcaatggttgatctgagaggtgaggcactgggcagttgctgtggaatgggcaatgagaccagctagggttggattcctgcttaggggcagtgaaggaggaa

SEQ ID NO: 15004 - DNA, 1696 bp, Homo sapiens
ctggtttcgaactcctaacctcaggtgatccgctggcctcggcctcccaaagtgctgggattacaggtgtgagccaccatgccaagcctctgttggagttcttacagtgaattttgtgttattcttcctcattcactgtagaaggcaagaagaaagagcttcgagaacaacatcccagtctgagagatgaggggactagtgatgacaaggtcttccttgcatgcagaggggccggccagtgccccctatctgccccagctgggactatggacaggacccgggtgcttcaagcatcccaggctgggccaccctttttttgctacacctgtggcaaatgtttcagcaggcgctcctacctctatagccaccagtttgttcacaatcccaagctgactaacagctgcagtcagtgtgggaagttgtttcggagccccaagtccctcagctatcacagacgcatgcatcttggggagaggcccttctgttgcacgctctgtgacaagacctactgtgatgcttctggactaagtcgtcaccgccgcgtccatctgggttaccggccccattcatgctctgtgtgtgggaagagcttccgggaccagtctgagctcaaacgccaccagaagatacaccaaaaccaggagccagtggatggaaaccaggagtgtactttgaggattccaggcacccaggctgaattccagacacccatcgccagaagccagaggtccatccaggggcttttggatgtgaaccatgcaccagtggccaggtcccaggaacccatatttagaactgagggtcctatggcccagaaccaggcatctgtacttaagaaccaagcacctgtgaccaggacccaggcacccatcactggaaccctctgtcaggatgccagatccaactctcatccagtgaagccctcaagactcaatgtcttctgttgcccccattgttctttgacttttagcaagaaatcctatctctccagacaccagaaggcccacctcacagagccgcccaactactgcttccattgcagcaagtctttcagctcattttccaggctggtcagacaccagcagacccactggaagcagaagagctacctttgccctatctgtgacctctcctttggggagaaagagggccttatggatcactggaggggctataaaggcaaggacctgtgccagagcagccaccataaatgccgggtgatcctgggccagtggcttggcttctctcatgatgtccccactatggctggggaggaatggaagcatggaggtgatcaatctccccccaggatccatacccccaggagaagaggcctaagagagaaggcctgcaaaggagacaaaacaaaggaggcagtgagcatcttgaaacataaataaatggcctttctgactgagctctttctttgtgtttagttttcctgaggactgacctctggggtaatgaggctggagtagagggagacaggtgcgtggataaggaaggaaatacataaaagacaaggggttagaagtgtgcttatgaaaacttgtattattattttttatttatttatttatttatttatttatttatttatttatttatttttgagacagagtcttactctgtcactccggctagagtgcagtggcacgatctcagctcactgcaacctctgcctcctgggttcaag

SEQ ID NO: 15005 - DNA, 1150 bp, Homo sapiens
cgaggtgatctgtgacagatcctagcctggttaccccagctacatgatttccaatggtactgagtctaacattaacattaggtttaaacattaacttttgtagatcaagaatgtccacttgtccttggaaaattatttagcatctctgcattaggtccttaagacagggccagtaattgttacctcattgctgagagcatccagtggcacactgtaggggtttagtaactgctggcattccctgaccaaataaggaagctgtttcttaccctccctcttgctgatatgttttgtttttctctgacctcaggtttctagaagcagggtagaacagacggcagacacctagcccaggctggtgttgttactaaacaatggcagctggtgagccaagggtgaccagggccctgaactcggtggcccagctttgagggaagcaaaattgttctcaattgtggaagaggagaatttggacagcagaacaaaaaaggaagacagcctcttggagcagatacatttgtcacaggaagccacatcaaaccctggggcctttgctgggcctctccatctgcccagttactgggaggtagatagccccaggaaggaatccagtcaggcctgggcaccaggccaggagtggataaagctagaaagagacaccacagaagagaagatgtttgaacagctgaagccaatcgaacctgtacagaagacgctcccatgggtgggcgaggtagctgccaccctgcaggaagccatgaagagagattgctggagggaggcacgggtgaagaaggtgaggagactaagctagagagaggtggggtccaggtcctggactccaggagctctttcatacatactcctgcctgcaggtcaaatgaaatctcagattgttccagactgaacgacatccagaaaaaggagctgcaagacctttctccatctcccgcaccatcctggcatccttcatggagtacttcctgaaatttgttagagtggcagcattttttccttcgctttgctttcctgtttatattctgcatatctgcatatcctctttcctctcccccacatcttatctttctccctttctcttcatctttcctttcctttttttttttttcttttttttttttttgagacggag

SEQ ID NO: 15006 - DNA, 1206 bp, Homo sapiens
cgccctccctctggtcttgagggagaagaatcctcctgggtttccagagagtgactctgagggtccgccctgctctctgacacaattaagggatgaaatctgtgaggaaatgaagggaagacaatccctggaatactgatgagtggttccctttgacactggcagcagccttgggccccgtgacttttcctctcaggccttgttctctgcttcacactcaatgtgcgtgggggtctgagtccagctcttctgagtccctcagcctccactcaggtcaggaccagaagtcgctgttccctcttcagggactagaattttccacggaataggagattatcccaggtgcctgtgtccaggctgttgtctgggttctgtgctcccttccccaccccaggcatcctgtccattctcaagatggccacatgcgtgctggaggagtgtcccatgacagatgcaaaatgcctgaattttctgactcttcccgtcagaccccccccaagacacatatgacccaccaccccatctctgaccatgaggccaccctgaggtgctgggccctgggcttctaccctgcggagatcacactgacctggcagcgggatggggaggaccagacccaggacacggagctcgtggagaccaggcctgcaggggatggaaccttccagaagtgggcggctgtggtggtgccttctggagaggagcagagatacacctgccatgtgcagcatgagggtctgcccgagcccctcaccctgagatggggtaaggagggagatgggggtgtcatgtctcttagggaaagccggagcctctctggagagctttagcagggtcagggtccctcaccttccccccttttcccagagccatcttcccagcccaacgtccccatcgtgggcatcgttgctggcctggttctacttgtagctgtggtcactggagctgtggtcgctgctgtaatgtggaggaagaagagctcaggtaaggaaggggtgaggagtgtggtctgagatttcttgtctcactgagagttccaagccccaggtagaagtgccctgcctggttactgggaagcaccatccacactcatgggcctacccagcctgggccgtgtgtgccagcacttactcttttgtaaagcacctgttacaatgagggacagatttatcaccttgatgactgtggtgatgggacctgatccca

SEQ ID NO: 15007 - DNA, 1183 bp, Homo sapiens
ctcacccaaccccagattcctcctctagccgcatctcctctgggctctgaccaagtcctgtttttgttctaccccaggcagcgaccatgcgcagggttctgatgtgtctctcacggcttgtaaaggtgagacactgggggacctgatgtgggggggtgttgggggcaatagtggacgcagctgtgctatggggtttctttgaattggatgtattgagcatgtgatgggctgtttaaagtgtcacccctcactgtgacggatatgaatttgttcatgaatattttattttatagtgtgagacagctgccttgtgtgggactgagaggcaagatttgttcacgccttccctttgtgacttcaaaaaccctgactctctttctgcaaaggcacctgaatgtgcctgtgttcctgtaggcataatatgaggaggtggggagaccaacccacccccatgtccaccatgaccctcttccctcatgctgacctgtgttccgtctccaataattaatcattcctgctccatagaggtgaggctgagatgtctccatctctgtctcaactttatgtgcactgagctgtaacttcttacttccctattaaaattagaatctgagtataaatttactttttcaaattcttgccatgagaggttgatgggttaattaaaggagaagattcctaaaatttgagagacaaaataaatggaagacatgagaaccttccagagtccacatgtttcttatgctgatttgttgcatgagaggagagtagatggggctgtgcccagtgggtgctcaggccaccgtgcgctttatgtggtcactgctcagctgggtcatctttgctgctctgttgtccttggctgtatgatccgtccctacggggcttagcgggttttctccccgtgtgcggagatgagagattgtaataaataaaagcacaagacaaagagataaagagaaaacagctgggcccgggggaccactgccatcaagatgcggagaccggtagtggccccgaacagctgggctcgctgatatttattgcatacaagacaaagggcagggtaaggaaggtgaatcttctaaatgattgacaaggtgaagcaagtcacgtgattacaggatagggggcccttcccttttaggtagcatatgtcaccattttcttttctgcacttaag

SEQ ID NO: 15008 - DNA, 1206 bp, Homo sapiens
cacatgggcgctgctggggtgtcccatgaggaatgcaaagtgcctgagttttccgactcttcctttcagaccccccccaagacacacgtgacccacccccctctctgaacatgaggcataacgaggtcctgggttctgggcttctaccctgcggagatcacattgacctggcagcgggatggggaggaccagacccaggacatggagctcgtggagaccaggcccacaggggatggaaccttccagaagtgggcggttgtggtagtgccttctggagaggaacagagatacacatgccatgtgcagcacaaggggctgcccaagcccctcatcctgagatggggtaaggagagagatgggggcggccatgtctcttagggaaagcaggagcccctctggagacctttagcagggtcggggctgggtcctggaggtcagaaccctcacattcccctcctttcccagagccctctccccagcccaccatccccattgtgggtatcattgctggcctggttctccttggagctgtggtcactggagctgtggtcactgctgtgatgtggaggaagaagagctcaggtggggaaggggtgaggagtcgggtttgagttttcttgtcccactgggggtttcaagctccaggtagaaatgtgttctgcctggttaccgggaagcaccatccacattcatgggcctacccagcctgggccctgtgtgccagcacttactcttttgtaagcacctgtgacaatgaaggacagatttctcaccttgatgattgtagtgatggggatctgaccccagtaatcacaggtcaggggaaggtccctgctgaggacagaccttaggagggcagttggtccaggacccacatctgctttccttgtttttcctgatcctgcccttggtttgcagtcacacatttctggaaacttctcaaggttccaagactaggaggttcctctaggacctcatggccctgctaccttcctggcctctcacaggacgttttcttcccgcagatagaaaaggagggagctactctcaggctgcaagtaagtatgaaggaggctgatccctgagatccttgggatattgtggttgggagcccatgggggagctcacccaccccacaattcctcctctagccacatctcctgtgggatctgaccaggttctgtttttgttctaccccaggcagcc

SEQ ID NO: 15009 - DNA, 1226 bp, Homo sapiens
ttccctgtctggatttctggttttacagaacttttaaccagtgtgcagattgcctttactttcttgccatctcatcaaaggattaaaaatattcatagtcagatatatcttttaaaagtatttttttcctatcactggttgtcattttaccaaaaaaaaaaaaattttttttaaataaaaagaagattttttttcccagcgtgtggcttgcctattttcttaaccctctttaaatgagcagaagttttaagtttttataaggttcagcttatccttttttttttcttttacagctagtgctttctgtgtcctaagaaatctttgctttgaggttataactcattggatatatttttaatcccagaatttttagttgtcttggaattagaattggaagtttgtttaggggagccagtcctcaatgatgtcataaataaaagtccttccttgattatttgattgcatatcttatcttatactactagaaactcatcttttggtgaatataacaagtcctttctttcctcataggttccaggagaaggaagactcttgacctttttcctgggcaactctacagtccctccctcctttcggaaggtgaaggatactgggtttttagatgccttgtccatcctgtctggttgcaatgttttgctcccagaagagaatcagatcatcatgtggggattaccattgttcctggagtactcctacccttagttgaatttccttattaaagttatatttttctataagaccctgacatatgtatgttacttataatctgtcttattccaaaaggaatttaaatgagtttccagagatatatttatatgaaaaagaaaagggggaaaaattaggacaaaaaagtagagtcaggaatgaggctaatataaacaaaaagcaattgtaagtattgccatactatttaaatctatttggttcctgagtttaggttaagaaaaactaggaatttggatagtgagacatttaacagaaattttaaccagatctctttagcatataaatttggacaacaaaaaatctgatactaagtaatgccactaagtgatcactataggtgagtattttattagtattgagataaatacaatacacagttgacccttgaacaacacaggtttgaactgcttgagtctacatatatgtggattttcttctacttctgagacccataagatagcagcacatttaagccctcc

SEQ ID NO: 15010 - DNA, 1225 bp, Homo sapiens
aatgctttccctttccattattcttttcttcctccagcctgggcagagaaacgtggttacaagacagccaaggcggctcggaatgatgtgtacagagcagccaacagtctcttgcggctggcagtggacggccgcctcagcctgtgttttcatcccccaggctacagtgaacagaaaggtcagagcccagatattcttccccagccccctgctatagcgtaggtaaaagggtgtgggctttgtggccagagagagggtcaaacctggattctgtacctgttggctagctctgttacttaacatctgtgatattttcctgatctgcaaactgagggtaataattgacccttagcatagtgattgtaaagattgaagttgatgtgcacaaaggttctgttcagcaatctgcacataggaagttgaatgaatggatgaatgaatgaatgccagcagctctaaagattattgttattcctagtctttgcctcttccccatctttccttggctttagttcttgctcaaaactctcctccatttttttcttgttttggttccccaggcacctgggagtcccatccagagaccacggagctggtggttttgcagggcagggtggggccagcaggtgacgaggaggaggaggaagaggaagagctgagcagctcctgtgaggaggagggagaggaggaccgggatgcggatgaggagggagaaggggatgaggagaccccaacctcggctccagggtccagcctggctggccgaaacccttatgccctgctgggtgaggatgagtgctgagttcctcgcccagcgccatcttccctcccagtatctttgcttttggactgacctgggggtatctcccctctgccaccccaattgtgaataaagattgtttgctttgtagccccttccccagatgaactgaggtgagagcggctgttccaggctaacagctgtgggaggcttctctcctcttctcccttcttttttcatgcattctctttgcaagggaaagttctcttaggagtttagtaggttctcagtctctgaaacctgcttcctctacccattctcccactctgcaccttaggaatcccgttatctacatggggaggggaggtctaaatccagctcccttttggagtttgtgccattctccgatttgagcagcagccctgtgtgccccctgccgccagacctgctcattccaggagcttc

SEQ ID NO: 15011 - DNA, 2417 bp, Homo sapiens
ggcccatttctggtgtttgtctctccttcagaaaagttggtgtatggacgaggtcaggagatcgagaccatcctggctaacatggtgaaatcccgtctctactaaaaatacaaaaaattagccgggtgtggtggcaggcacctgtattcccagctactggggaggctgaggcaggagaatggcgtgaacccggaaggtggaggttgcagtgagccgagatcgcgccactgcactccagcctgggggacagagcgagactccgtctcaaaaaaaaaaaaaaaaagttgatgtatggagctgcagcacctttttcccttgccctcctcttaactactttgtcttcccttgcagacccatggggaaatgagaaagaaccaccggctggtaagttggcattgggatttagggaatgataatctgatggaggaagtgtgactttaaccgaccacctccctctcttctcgggcagaaaattggcttcttcaaccagcagtatgcagagcagctgcgcatggaggagacgcccactgagtacctgcagcggggcttcaacctgccctaccaggatgcccgcaagtgcctgggccgcttcggcctggagagtcacgcccacaccatccagatctgcaaactctctggtaccacttcaggggccagggagggtgcccttcaccttatcattcatgtctacaaactgtacctagaggaaccgagaatgagggagcctcagctcacaaactggcacatcttgagggtttgccttcagaatgtgaggtgctaggtgtgacagccctccccttcctttgctacaggtggtcagaaggcgcgagttgtgtttgctgagctggcctgtcgggaacctgatgtcctcatcttggtgagtgagctgggctgtgggaaaagggataagggtaacagtaatggaagacgggagttgcagtgctcagtcatggaattcctcctatgtaggacgagccaaccaataacctggacatagagtctattgatgctctaggggaggccatcaatgaatacaagggtggtaagtcagctgagagtgtgccctcatccctgctccatggggaccaagctgtagtgtccttcactacagaagggcctaggactcccttatttcatgttctgattcccctctttctcctttcttcctgccctctgttgttgctatctttcttcaaagctgtgatcgttgtcagccatgatgcccgactcatcacagaaaccaattgccagctgtgggtggtggaggagcagagtgttagccaaatcgatggtgactttgaagactacaagcgggaggtgttggaggccctgggtgaagtcatggtcagccggccccgagagtgagctttccttcccagaagtctcccgagagacatatttgtgtggcctagaagtcctctgtggtctcccctcctctgaagactgcctctggcctgcagctgacctggcaaccattcaggcacatgaaggtggagtgtgaccttgatgtgaccgggatcccactctgattgcatccatttctctgaaagacttgtttgttctgcttctcttcatataactgagctggccttatccttggcatccccctaaacaaacaagaggtgaccaccttattgtgaggttccatccagccaagtttatgtggcctattgtctcaggactctcatcactcagaagcctgcctctgatttaccctacagcttcaggcccagctgccccccagtctttgggtggtgctgttcttttctggtggatttaatgctgactcactggtacaaacagctgttgaagctcagagctggaggtgagcttctgaggcctttgccattatccagcccaagatttggtgcctgcagcctcttgtctggttgaggacttggggcaggaaaggaatgctgctgaacttgaatttccctttacaaggggaagaaataaaggaaaggagttgctgccgacctgtcactgtttggagattgatgggagttggaactgttctcagtcttgatttgctttattcagttttctagcagcttttaatagtcccctcttccccactaaatggatcttgtttgcagtcttgctgacagtgtttgctgtttaaggatcataggattcctttcccccaacccttcacgcaaggaaaaagcaaagtgattcataccttctatcttggaacatgggtctctttcctttttttttttttttttttttttgacagaatcttgccctttcactcaggctggagtgcagtggcatgatcttggctcactgcagcctccacctcctgggttcaagcaattttcctgcctcagcctcccgagtagctgggattacaggcacacaccaccaggcccagctaattttagtgtttttaatagagacagggttttaccatg

SEQ ID NO: 15012 - DNA, 1162 bp, Homo sapiens
atttgtgagtgttttgaagcaacccgtactgattacatctttctcccttgtgttccttttatcccaggtttgaattttctcggagaaagacaggccggccacgaggaaaacagaaacaagccgcagcaacatctaagcccttgaaaggatcctgagagaggggggaaagggaaaacagcagccaccagcccaaccacttgtgtcttctgccccttcccacctatcttgcccaccccaccagcccacgctgcttgggacttgaaatctgtggccgaaggaccgtcactacataacttcaaaaataatcaaccaccctcccttcccaaaccacccaaattcactcatccagcgtttacttttttgaatccactcagaacttttttctgcgacccccctccctaaatggagttgggtgggggggaaatgaatactgagttggcctttattttttaaaagactttttgatccaatgaggccccctaaataattgagttttgggtcctggttggttgttttattttttttcctccaaaattttaccccctcccccctgagcccgaggtgctgacgtcgcaaaaaaattggatagtaagtgtcgaattttcaaaaaccagccttgcaacaagaaatcaacgtttcccgttgtgaaaccaaaaataatgagaggaagaaatgagaccatagaacaaatagagaactggagaaggaccaatctggtcacttaatctccattaaaaagggcctgtgggtctaaacagtcttgttctctctcccctaccacctatctcttccctgccttgctgcaggcaaagagagggtggagggagggccagcaagtgaggattttgatggttaacccttggtaatccagccaatttccagactgccaaagccatatgtgtttatataaggaggaatggttaccttcctctggttagcagcagtcttcaaaagggttaatgagctcacatacaagagatggtggatcttgtggcccagaagtaccacttctttgtgtgtgagacaagcagggtgcctttcaatttgccagattaataagcaatctgtacataaagattgcagggtaaggagatgggcagagagaagtaatagctcgctataactttttaaatgactgttaaatcctctcaattttaatgta

SEQ ID NO: 15013 - DNA, 1138 bp, Homo sapiens
gacgaccttccctgctccatgcccagagtatagctagatcccttcccctccctaccctctgaatgtgtgctagatcaggtgccccactgtgtttcctgaaatccttgggagccggatctccccatctcccctactcactcttcccttttcttctctcagtgttgtctgaataaagtgtgaaatcttttgtgttttctaaattgacattttcaatgaaaaaaagaatcacaaaaaaaaaagttgtcagcctcatttgtgcgtcatcccttattttcctgggatctcaggacctctgtccctctcatttctcacttctgagatctgcacatcttttacccaggagcctcagagctcctgagtctggtgtctgcctatccccatcttcactgttagtcctcctgcagattctgtgtctcctttcatgtaggtgctggatccctgtgtgtgggcttccgtatctactccctcattccctccaggaacctccagctctccccagtgacttctaccctttactctgggcgtgcctttgccaagatgtcaaagcttaccaacatctctggatccactaattacctcctgcctcctgtattcgtcttcccactctgattacctgacgtctgctccactaaaccgctggatctctctcaagacaaacccttacctccattgagagtgcaacacagtctgtcaccctatttacagaggcccccttccttttcctcctaaattcaaaattcagccttgtcacttcctatttccctctggtctaaggaatctttttttttttttttgagatggagtcttgctctgtcgccaggctggagtgcagtggcacaatctcagctcactgcaacctccgcctcctgggttcaagcgattctcctgccttagcctcccaagtagctgggattacagaagtgcaccaccgtgcccagctagtttgtgtatttttagtagagacagggtttcaccatgttggccaggttggtctcgatctcctgatcacgtgatctgcccgtcttggcctcccaaagtgctgggattacaagcctgagccaccgcgcccagcctggtctaaggaatcttatagttaaggtaaccctgttttccaaaccaaacaccagagtacccgatc

SEQ ID NO: 15014 - DNA, 1165 bp, Homo sapiens
ctgcactccagcctgggcgacagagctagactccatctcaagcctgtaatcccagctactcgggaggctgaggcaggagaatcgcttgaacctaggaggcggaggttgcagtgagctgagattgtacctctgtactccagcctgggcgacagagctagactccgtctcaaaaaaaaaaaaaaattagaaaactgaaaaataggattatcttttctttcccactgggttgatgccatcttcttccacctagcttcccaagctcttccttcagtcccacgactacagtctgtattccttggatgtggaattcatcaatgagatcctcaacatacgtaccaagtgagaattggggcacaggtagggcactggggaggaaaagcacccaaaggtatatacatgacccttttcacttcccagagaagttcctagactgcttctcacagctgttccccattccttagaagccagtttggttttctaattctgccatcatgagatttctttcccatcccttcttcacaggggccggacatggtacattctttcactgaccctctgccgtttcctggcctggaattattttgcacaccttcgtttggaggttttacagctgacccgccaccctgagaactggaccctgcaagcccggtggcggcttgtggggctgcccgtccacttgctctttttgcggttctacaagcgtgacaaagacgagcattaccggtaagagagaaatgagaaaggacccaaactataatcagttccttttttttttttttttgagacggagtctcactctgtcacccaggatggagtgcagtggcgtgatctcagctcactgcagcctctgcctcccggcttccagcaattctccagcctcagcctcctgggtagctggaattacaggcacaccatcacacccggctaatttttgtatttttagtagacagagggtttcaccatgttggccaggctggtctcgaactcctcaccttaggtgatccacctgccttagcttcccaaagtgctgagattacagatgatctagtctcccagacaacccttgacctatcctcacttgactgtttaaggacagggatcctgtttagtttatgttaatgttaaaaaaaaaatagagactgggtatattagaaaaacctctgag

SEQ ID NO: 15015 - DNA, 1207 bp, Homo sapiens
gttgttctagacttttcttgggaatagcttatttggtatcttgaataacatacagaggtgtatctgccctttgggtatataataatagagccaggcacctttacacctagccctgcagtcaaagaggaaagataacttttgaccatacacataaggatctaggttggggctgggcatagtggctcatttttgtaaaccatcccagcactttgggaggccaagatcagcccaggcaacatagtgagaccccaactatacaaaaaattaatggtgcactgtgatgtgtgcctgtagtctcagctacttgggaggctgaggcagtaggactgctttgagccatgatacgccactgcagtccagcctgggcaatagagcaagactctgtttcaatttaagaaaaaaaaataacaacaacaaaagatctatgttggaaagaagggaactccattgatcttttctctctcctaggtactggagattgagagcagttggcttctggaggtggctccccattattataaggccaaggagctagaagatccccatgctaagaaaatgcccaaaaaaataggcaaaacacgagaagagctagggtaagagaaggacgtaaacagaacctgacaccagctccttttccttctatacattatttaatacctattaaataaaattatttttggaataaagcttgtgggaacatttgggatctagagaaagtgatatgtgaaattctatctcatatagtcagttaaactttattatttacaagttaaattacacagcagctttacacagcatgagatggaaaggaaggaaggagagaaacgaggagaggaagctggctcctgagattcttggctgcctccacctccttctcttgggcgtagcagtcttcagtgctgcctccactccaaggtcaaggatcagggcttggaacacaggtttaagtcaggttctggctctgacagccccagggccaccagggctcccactagcagcttcttcacaggcgttggaggtgagtgtgaaggcatcagctgcagggagaaaggttaatgccagttgggggaggcacacaaatgttctaccctttaccccacccagccctacctaggactcactttatctagacgatggcgacaaatgaggccactggaattcaggtagaaagtggagtaggcatcataggtcctggggaatagaggga

SEQ ID NO: 15016 - DNA, 1169 bp, Homo sapiens
tgtaacttgctttccccaccctgtttctgggggcagagccaattgcccaatttctaccctaatccaaagtccctggtgtgggtggggttaaacgtgctggtgcatcctaggtcatccaagagtgagcgccaagtcctgagaaggggcacagaactccctggagggtggagatggagcacctgccccccatggcagggtacactctccccacagccttcctccccaccatcccgtggggactctcgggatttaagcactcgtctctctgggaggcccagaccccactccatttataggcacatctccttcatttcctaggtcactgcccctttgtttacagctcctgcctcctcccttgaccacagcctggtttacaaattccatcagctcccagccccacctgccaaagtcccaggtttacaagccacgcttacttgctgtgtctgcgtggaattctctcctctgtcccctccagtctcctcattggagtgacctgaaggtgtggcttcctccactttttctcagtattactttgccttagttttccccaagagggaaggctggaactcttaactctgtaccccttgatagttatttaattctgtttctcctagtggttcacaattgaactgaattgagatggtgtcgggtggctaaggagacacctcacctctccttccccattgtgccgcctttatcaattgcctgttttgttttgtttgttttttaactttccataataaaatggagttctcttcaactcgtctgcttctccttctttgggaaaaaaaaagggtatgtgaggggaggctctggtggctgggggagaggaaaatgatgggggatgaaccaggaactcggcactgacatgtcaaaaggggtctgggaagctgcacgtgggtttcacgcaggacaagcaggtgacatgagaaagggcagttgaagtgtccactagactggaagtgccatgagggctgactacatcagctggattcactgcaatatcctgtacctgtcaactagtagacacggaattatttctagaatgaatgacaacaaatgaatgaatagaagaaaagggttaaaatattacagaggacactttgagttgaagggttctagtattcagaagcctgctgccatgaaggcagctaggtagtgtatgacac

SEQ ID NO: 15017 - DNA, 1200 bp, Homo sapiens
gagtggaggcagcagagcagaggcctgtggaagatggcgagaggggcatgaagccaacagaagggtggaaatggaccctgaactccgggaaggctcgagaatggacacccagggacatagaggctcaaactcagaaaccagaacctccagagtcagcagagaagcttctggaatctcccggtgtggaggctggagaaggggaggctgagaaggaggaggcgggggctcagggcaggcctctgagagccctgcagaactgctgctctgtgccctcccccctcccaccagaggacgctgggactggaggcctgagacagcaggaagaggaagcagtggagctccagcccccaccaccagcccctctgtctcccccacccccagccccaactgccccccaacctcctggggatcccctcatgagccgcctgttctatggggtgaaggcagggccaggggtgggggccccccgccgcagtggacacaccttcaccgtcaacccccggcggtctgtgccccctgcgaccccagccaccccaacctctccagccacagttgatgctgcagtcccgggggctgggaagaagcggtacccaactgccgaggagatcttggttctggggggctacctccgtctcagccgcagctgccttgccaaggggtcccccgaaagacaccacaaacaggtagggaagcagccaagccagacttcttagaagtccacttgtcaattttctctggactctggtctctttcttttttatacccctgttttcttgtcttcctctattctttcttgttaattcctgccaccacccttcctcgctctgcacatacacccttccttctcagagccctccttttccattttgagcccaaaagatcctgccccagcaaaggctgtctctgggtgtgtctctttcagggtgtgccaggctgctcattctcccttcccttgggctctgagtttccaacccccttttctttccttcctttcctgagtgtgacctgccccagcccatccagtgggagagcctaaagtgacgagcttgaatcagtgagggcagggtcaccagggtgagagcacttgcagtttttctggggagaagggatagggagcctggggtggtggagggggtggggtgggtttgtgttctagggagaaactgcagggagaagtgaatggagaaaggtccaactgcc

SEQ ID NO: 15018 - DNA, 1100 bp, Homo sapiens
aaaaatagatcctctgtcaagacccctgaaccagttgtgcccacagcccctgagctccggccttccacctccacagaccgacctgtcacccccaagcccacatctcggaccactaggagcaggacaaatatgtcctctgtcaagacccctgaaacagttgtccccacagcccctgagctccagatttccacctccacagaccaacctgtcacccctaagcccacatctcggaccactaggagcaggacaaatatgtcctctgtgaagaaccctgaatcaactgtccctatagcccctgagctcccaccttccacctccacagagcagcctgtcacccctgagcccacatctcgggctactaggggaagaaaaaatagatcctctggcaagacccctgaaacacttgtccccacagcccctaagctcgagccttccacttccacagaccaacctgtcactcctgagcccacatctcaggccaccaggggcaggacaaataggtcctctgtgaagacccctgaaacagttgtccccacagcccctgagctccagccttccacctccacagaccagcctgttacccctgagcctacgtctcaggctactaggggaagaacagatagatcctctgtcaagactcctgaaacagttgtccccacagcccctgagctacaggcttccgcctccacagaccagcctgtcacctctgagcccacatctcggaccactaggggaagaaaaaatcggtcctctgtcaagacccctgaaacagttgtgcccgcagcccctgagctccagccttccacctccacagaccaacctgtcacccctgagcccacatctcgggccactaggggcaggacaaataggtcctctgtcaagacccctgaatcaattgtccctatagcccctgagcttcagccttccacctccagaaaccagcttgtcacccctgagcccacatctcgggccactaggtgcaggacaaataggtcctctgtcaagacccctgagccagttgtccccacagcccctgagccccatcctaccacctccacagaccagcctgtcacccccaagctcacatctagggccactag

SEQ ID NO: 15019 - DNA, 1139 bp, Homo sapiens
gtggctcacgcctgtaatcccagcactttgggaggccaaggtgggcggatcacccaaggtcaagagttcgagtccaccctggccaatatggcaaaaccccatctcttctaaaaatacaaaaattagccaggcatggtggcaggtgcctgtaatctcagctacttgggaggctgaggtgagagaattgcttgaaacccgggaggcagaggttgccgtgggcccaagatcttaccactgcatgccagcctggggagcagaacgagactccatcacaaaaaagaaaaaaatgttttaagtgcttcagaaggttaacaacagaaagattggtggaaagagaagcatcaacgttcataatgatccagtttaccccctagttttcagtctgataactctgatgctgtttgtgtgaaccaataatgaggataattgataatgtgtatccttcccagatcatggaggacacccaggctattgactgggatgttgaagaagaggaggagacagagcaatccagtgaatccttgaggtgtaacgtggagccagtagggcggctacatatctttagtggtgcccatggaccagaaaaaggtcagagggtattggatgttcaagtattgatatagatcttttatttttgtggtaaggtatttggagggttgcaagaagcttatgtatgtttcaatgagatgtgaatttttttttttcatgaatggaagagatggggccgattgagttgatagttgcagactactaccctggactcactggaagtgattttactttgataaaagaaaattaagagattgaaatgaagctgggtgcagtgactcacacctgtaattcccgtgctttgagaggccaaggcagaaggatcacttgagactaggagttagagaccagcctgggtagcatagcaaaaccctgtctctacgaaaaatttaaaaattagccaggtgtggtggttcatttcacatctgcagtcccacctacttgggaggctgagccagatgatcacttgaacccaagagttcaagattgcactgatctatgatcatgacactgcattctagcctgggtgacagaatgagaccctgtctcaaaaaaaaaaaaaaaatcaaataaaatccaattgtgtgctc

SEQ ID NO: 15020 - DNA, 1107 bp, Homo sapiens
cgccactgcactccagcctggtgacagagcgagactccgtctcaaaaaaaattaagaaaaagatgaaataaaatggtagttggggacatagttggctgggacttgacctgttgtggtctcgttgctccccctcggcagttctgggaggtgatcagtgatgaacatggcatcgaccccaccggcacctaccacggggacagcgacctgcagctggaccgcatctctgtgtactacaatgaagccacaggtaagggcaggagcccgggcagctcaggttcccttccctgtctcccacttatctgggatctctttccatttctgggcacgccttatcccctttgggtgaatctgtcattttgtccctttcgtgaaccaccgtcggggccaaagacgtctgctgccacctggtggcgggacctggaatgacaagtctctgatccctgctgtctcccatttccagtatatctataaaccttcccttctgccagatttcacagctcttaactttattctctgtaggtggcaaatatgttcctcgtgccatcctggtggatctagaacctgggaccatggactctgttcgctcaggtccttttggccagatctttagaccagacaactttgtatttggtgagttatacagatgatattagcagatgatataccatcgtgttcaacttatttgggtgcaaggacacagcaaaagttaggagatgattgttgtattggagtgctaatacagaaatgtgttctgaaatctaacggagggtagaggtagtgcctactattgctggtaaattatggggcagtagggggagaatatatcacagtgaaggagaaagaagatacatccgagggaattatttgaaaagttgaaagatggaaacatcatgtatcttccataccctgttaattgagcttttctcctgactgcattccaggtcagtctggggcaggtaacaactgggccaaaggccactacacagagggcgccgagctggttgattctgtcctggatgtggtacggaaggaggcagagagctgtgactgcctgcagggcttccagctgacccactcactgggcgggggcacaggctctggaatggg

SEQ ID NO: 15021 - DNA, 2192 bp, Homo sapiens
actgatgagacctattgcattgacaacgaggccctctatgatatctgcttccgcactctgaagctgaccacaccaacctacggggatctgaaccaccttgtctcagccaccatgagtggtgtcaccacctgcctccgtttccctggccagctcaatgctgacctccgcaagttggcagtcaacatggtccccttcccacgtctccatttctttatgcctggctttgcccctctcaccagccgtggaagccagcagtatcgagctctcacagtgccggaactcacccagcaggtcttcgatgccaagaacatgatggctgcctgtgacccccgccacggccgatacctcaccgtggctgctgtcttccgtggtcggatgtccatgaaggaggtcgatgagcagatgcttaacgtgcagaacaagaacagcagctactttgtggaatggatccccaacaatgtcaagacagccgtctgtgacatcccacctcgtggcctcaagatggcagtcaccttcattggcaatagcacagccatccaggagctcttcaagcgcatctcggagcagttcactgccatgttccgccggaaggccttcctccactggtacacaggcgagggcatggacgagatggagttcaccgaggctgagagcaacatgaacgacctcgtctctgagtatcagcagtaccaggatgccaccgcagaagaggaggaggatttcggtgaggaggccgaagaggaggcctaaggcagagcccccatcacctcaggcttctcagttcccttagccgtcttactcaactgcccctttcctctccctcagaatttgtgtttgctgcctctatcttgttttttgttttttcttctggggggggtctagaacagtgcctggcacatagtaggcgctcaataaatacttgtttgttgaatgtctcctctctctttccactctgggaaacctaggtttctgccattctgggtgaccctgtatttctttctggtgcccattccatttgtccagttaatacttcctcttaaaaatctccaagaagctgggtctccagatcccatttagaaccaaccaggtgctgaaaacacatgtagataatggccatcatcctaagcccaaagtagaaaatggtagaaggtagtgggtagaagtcactatataaggaaggggatgggattttccattctaaaagttttggagagggaaatccaggctattaaagtcactaaatttctaagtatgtccatttcccatctcagcttcaagggaggtgtcagcagtattatctccactttcaatctccctccaagctctactctggaggagtctgtcccactctgtcaagtggaatccttccctttccaactctacctccctcactcagctcctttcccctgatcagagaaagggatcaagggggttgggaggggggaaagagaccagccttggtccctaagcctccagaaacgtcttcttaatccccaccttttcttactcccaaaaaagaatgaacacccctgactctggagtggtgtatactgccacatcagtgtttgagtcagtccccagaggagaggggaaccctcctccatcttttttgcaacatctcatttcttccttttgctgttgcttcccccctcacacacttggttttgttctatcctacatttgagatttctattttatgttgaacttgctgctttttttcatattgaaaagatgacatcgccccaagagccaaaaataaatgggaattgaaaaaagctgcgagatgtgtgcttatttagggaaacacggctggctgatggaggcatggggcctgagttcagttgcactgctctccttaaattgacacttaatattgagtccctgtcctacggattcaaccaactggatattgggaaaagagttgtactggacatgtatagacttctcattattccctaaacaataatagtataaattatttacataatatttgcattagattaggtattacaagtaacgtagagatgatttgaagtacacaggttatatgcaagtactacattttatatgagggacttgggtgtctgccgatttggtatctcagggaggtactggtaaggacactgactgctttatagaccctcacatcattgtttctggtacccaaactgctctgagcaccagtcagtctt

SEQ ID NO: 15022 - DNA, 1218 bp, Homo sapiens
gaaagcgcagccgcagggttctctaccctcgagtggtgagtatcgccgaagtgggcattcgcggggtgcgctgccctggagtcactggggaacgacccgactccagaggcctcgacctgacctgtctcctgttttgtctccccttaggtccggcgccagctgccagtcgaggaaccgaacccagccaaaaggcttctctttctgctgctcaccatcgtcttctgccagatcctgatggctgaagagggtgtgccggcgcccctgcctccagaggacgcccctaacgccgcatccctggcgcccacccctgtgtccgccgtcctcgagccctttaatctgacttcggagccctcggactacgctctggacctcagcactttcctccagcaacacccggccgccttctaactgtgactccccgcactccccaaaaagaatccgaaaaaccacaaagaaacaccaggcgtacctggtgcgcgagagcgtatccccaactgggacttccgaggcaacttgaactcagaacactacagcggagacgccacccggtgcttgaggcgggaccgaggcgcacagagaccgaggcgcatagagaccgaggcacagcccagctggggctaggcccggtgggaaggagagcgtcgttaatttatttcttattgctcctaattaatatttatatgtatttatgtacgtcctcctaggtgatggagatgtgtacgtaatatttattttaacttatgcaagggtgtgagatgttccccctgctgtaaatgcaggtctcttggtatttattgagctttgtgggactggtggaagcaggacacctggaactgcggcaaagtaggagaagaaatggggaggactcgggtgggggaggacgtcccggctgggatgaagtctggtggtgggtcgtaagtttaggaggtgactgcatcctccagcatctcaactccgtctgtctactgtgtgagacttcggcggaccattaggaatgagatccgtgagatccttccatcttcttgaagtcgcctttagggtggctgcgaggtagagggttgggggttggtgggctgtcacggagcgactgtcgagatcgcctagtatgttctgtgaacacaaataaaattgatttactgtctgcagtcttgagtgtatctttgcaagcgccgactccccactcctcccggccttcagatggcaaggaccggcgggagg

SEQ ID NO: 15023 - DNA, 1200 bp, Homo sapiens
tttctgcagtgccgcttcctctttgcggggccctggttactcttcagcgaaatctccttcatctctggtaagccctggagtagcccagtctccagtccctgaaattgacaactgatttcattcctaaccctgcagtgtccctaaaatactcattccttgcattatatctacccatcacccaccgaaacttctcaattaggggtgccccaaataacttgagcccctttctgcctcttgttctctgcgtatccatctttcctttgtaagccccttgcccgtgactattattgagccagtatgacagtactggttgttaaaatattgaaatacttctgtattagttgagaaatagcctcttctctaagcctccagatacctgtcctccacctccccacaatccagcaactatagggttaacacccaccacagctgggtgttccaggaccctgctcccccagcccccactggtcagtggttgcctattgagaatcacccatgcttctgctcctttgcacaacagtccactgcctctgcctcccttgggtctcctcctcatttacctccctcctttctttttgttccttctccccagatgtggtgaacaattcctctccggcactgggaggcaccttcccgccagccccctggtggccgcctggcccacctcccaccaacttcagcagcttgggtgagcaatcttgggtgggcgtgtggaccctctgcacccttctccctgggcctccccctcggctagggtgggaccctcctgtggtgctgaccctgctgcctccaccagagctggagcccagaggccagcagcccgtggccaaggccgaggggagcccgaccgccatcctcatcggctgcctggtggccatcatcctgctcctgctgctcatcattgccctcatgctctggcggctgcactggcgcaggctcctcagcaaggtgggcacagccgtggcatgtggagtggcggggggaggccaggccccagcacgagccagcgtccagtgggacctgcagggcacagcccactagcatcccaagaggagggcttagtaaagagaccacttacaccatgtcaaagagggtatggggctcacagggagggctgctccccagctctgggtctgctcagcggagaggagcaaataccacgacccagaggagagagcctgtggagagggcaccttgaca

SEQ ID NO: 15024 - DNA, 1154 bp, Homo sapiens
ctgggaagaggtggtaagcttggatctcagggtcacaagggccctgcgtgctccctcactttgcttctcttttgactggcctcccccagggaaggtattcagccaaacgaccatctgccgctttgaggctctgcagcttagcttcaagaacatgtgtaagctgcggcccttgctgcagaagtgggtggaggaagctgacaacaatgaaaatcttcaggaggtaagggtgggagggggatacccggggaccttccctttcttggcctaatttccattgcttccatcactggctcgtagctctccgtctttggtgcagtggttctcagtgggatggagtgaaattcctcagttctgctgggataaggtccagagccaacccttccaggatcctgccttttcacaccaccacctggctctgctgacacatctagtcacagacccctgtgatgctgttactcagcaagtccaaagcttgcccttgtcacccccttcccacctgcacagatatgcaaagcagaaaccctcgtgcaggcccgaaagagaaagcgaaccagtatcgagaaccgagtgagaggcaacctggagaatttgttcctgcagtgcccgaaacccacactgcagcagatcagccacatcgcccagcagcttgggctcgagaaggatgtgagtgccatgtctctctgcgggctccatctctttcccctgtcaccacctcgctttccctagctctggctcctccaactgctctagggctgttggctttggacagaatgtccaagcagtcaggcctgtctcagctcattctctaatgtcctcctctaactgctctagggctgttggctttggatagaatgtccaagcagagtcaggcccgtctcagctcattgtctaatgtcattctcctttctgtcattcacttgcaggtggtccgagtgtggttctgtaaccggcgccagaagggcaagcgatcaagcagcgactatgcacaacgagaggattttgaggctgctgggtctcctttctcagggggaccagtgtcctttcctctggccccagggccccattttggtaccccaggctatgggagccctcacttcactgcactgtactcctcggtccctttccctgagggggaagcctttccccctgtctcc

SEQ ID NO: 15025 - DNA, 1338 bp, Homo sapiens
ttcttgaggacaggaattcaagaccagcctgggtaacatagcaaggccccatctctactaaaaataaaaaaactaacagggcacagtggtccaagcctgtagtcccagccacttaggaggctggagcagaaggattgctttggcccagtagatcgaggctacattgagccatcattgtactccactgcactccagtctgggcaacaaagtgagaccctgtcttaaaaaataaaaataaaaaaagtttctgtgggggacctgcactgaggtcctggaggggcgccagttgtgtctcccggttttccccttccacagacaccattgccaccaccattaggcaaacatccttcgcctcagtttctccccccacctccctctcctccacccatccagggggcggggccagaggtcaaggctagtgggtgggactggggagggagagaggggttgagtagtcccttcgcaagccctcatttcaccaggcccccggcttggggcgccttccttccccatggcgggacacctggcttcggatttcgccttctcgccccctccaggtggtggaggtgatgggccaggggggccggagccgggctgggttgatcctcggacctggctaagcttccaaggccctcctggagggccaggaatcgggccgggggttgggccaggctctgaggtgtgggggattcccccatgccccccgccgtatgagttctgtggggggatggcgtactgtgggccccaggttggagtggggctagtgccccaaggcggcttggagacctctcagcctgagggcgaagcaggagtcggggtggagagcaactccgatggggcctccccggagccctgcaccgtcacccctggtgccgtgaagctggagaaggagaagctggagcaaaacccggaggaggcaagtgagcttcgacggggttggggtgtggggaggtggtcatgacagggcagcctgatggggaagtggtcacctgcagctgcccagacctggcacccaggagaggagcaggcagggtcagctgccctggccagggaggggtgtgtatcaactgctggcagccctggcaggcaggggccaggtgggaagtggaagctggatttcgaagagacaactgccggtgagggcagagcagcctgggagagtcggaagctggcccaggctggcctttgctctggcccagcccttgtcagggtctctcacatctcctaggcctgcccagggtctggtcactcattactggcccagcaccagacccagcttggggttggtttgagccccttttcccacccttagtcctgcttgaaaatttgacccttatc

SEQ ID NO: 15026 - DNA, 1315 bp, Homo sapiens
ttctgaactctgtgctacctcagaggccagcttccttagggaaaaatcagtgctgaagtaaagttatatttccttttctgctctaaatatatagtgggggaataagagaaatgaagaggaattcctgagaacgtaattactagaaactcccctctcccacgtaatgtctctcacacaccatggacccctattcccccaatttgcgaccccccaccccaccccacaacaggtggtgatctttgtgaagtctgtgcagcggtgcattgccttggcccagctactagtggagcagaacttcccagccattgccatccaccgtgggatgccccaggaggagaggtgagctgaagatgggaaagatattttgtgtccttgggagaaaaagacagttgagagaagggaatctcaacatgttttaaatttcctttctcacaaaggctttctcggtatcagcagtttaaagattttcaacgacgaattcttgtggctaccaacctatttggccgaggcatggacatcgagcgggtgaacattgcttttaattatgacatgcctgaggattctgacacctacctgcatcgggtaaacctcacaggctgaaaaaatcccactctcccattcccttgttttctgtttgtacatcttcattcctgcctctgggtctctttcctcttcggtcttccagtgctaccctctgtctccctccaggtggccagagcaggccggtttggcaccaagggcttggctatcacatttgtgtccgatgagaatgatgccaagatcctcaatgatgtgcaggatcgctttgaggtcaatattagtgagctgcctgatgagatagacatctcctcctacagtgagtactgatctcatgaaaccctttaggtcctccctgttccttagtgtgtttgtccgaaatcccatcacataggtcatgggcatctgatgcataatggacacttgactggttcatgccccctggtctttgatgctgtgttgggatgtttttctgacctttatgtggggtgtcttgtcttctctcatcatattacatcccttccctcacccccacgtccgtcctctgaacccaggcagtacaccagtgtctgcatgtgtgccgtgtgttcctgcctcactttccccttttcatgccttattctgaccatgctacgttttcttctcagttgaacagacacggtagaagactcgcccattttggaatgtgaccgtctgtccttcaggagaggacaccagggtgggggtgaaggagacactactgcccccacccctgacagcccccaccccatggcttcca

SEQ ID NO: 15027 - DNA, 1315 bp, Homo sapiens; identical to SEQ ID NO: 15026

SEQ ID NO: 15028 - DNA, 1166 bp, Homo sapiens
gtaggagaatcaaatggagcagttgtcctccccccaccccatgttcttagaagcacctctgatggagttattctgaccttgagtcactgcctcccatcatttcccagatgtttggtccttgctctccctttgagaatcatctcccattttctttcctctcccacctctatttgaggtaatggcatctgtgccattgggtggtttcactgctccttgacttcatttgcagtttctttcccatgatagtttttagttgggcagtcttaaaactcatctgataggaaggaaattagatgtaatgtgagagagaccacagtaaaatgtgggtatttttgggagtggggtggggttttcaatcttctctttcctccccatccccccatggggtgtattggagatcaacttcctccacccccccaggtttaacccccccactctgccctcctcccgttccccacccccttcctcccccccagccaatggagatcttcgtggatgatgagacgaagttgacgctgcatgggttgcagcagtactacgtgaaactgaaggacaacgagaagaaccggaagctctttgaccttctggatgtccttgagttcaaccaggtcagttagacgtccagtagggggatgagcattggagcactccagctgtagcagaaacctggatattaagtacacttttattgaggaaatcacatgtgtgatgtgggagagaataatgagggtataaatatcttaggggctgagcatgagtaaggtgggagctgcttttctattctatggctggcacgggtatgtcctcaataacctcaaggaaaataaacttcaaaaattaagatccttggccaggcacggtggcttatgtgtgtaatcccagcacttggggaggctgagggaggtggatcacttgagtccaggagtttgagaccagtcggggcaacatggcgaaacttcatcactaccaaagaagaaaaaaattagccaggtgtggtggtgtatgcctgtagtcccagatactctggtggctgaggtgagaggatagcttgagcccaggaaattgaggctgcagtgaactatgattgcactactgtgctccagcttgggcaacagagtgagatcttgtctccaaaagtccttgaaggattttaggaagttgttaaa

SEQ ID NO: 15029 - DNA, 1166 bp, Homo sapiens; identical to SEQ ID NO: 15028

SEQ ID NO: 15030 - DNA, 1185 bp, Homo sapiens
tggcatttgagctatgagggagctaagtagatcatggttgcttgagaagagtgggcagtttacatagactggaggaaaagacaccagagggcctcatatctgagtccctaatgataatgcaatggagtttttaagtttctgttatggtctgtacaggggacagagactgagacacttgctgtctggcccacaggctctggcacgttttgggggaggtgcctgcaggacccaacatactcaatgagcttccagcgcaatgtccgatcgctcggggccgactgccaagggaaaggatggaaagaagtattcctcgctcaacctgtttgatacgtataagggcaagtccttagagatccagaaacccgctggtgagagtcctgcaaagatgcttctgatggttgaaagctaggcatgcatggggcatacgttttagagctctttaaagggaagtggctgtagtagaaataccaaaagactagaggagatttcccaactttacactgggtcctttaaagggggtgtgggctctgggtgaacaccagttatcctcctacaaaggcgtgtctgtggttccctgtctttggacacgtaagaattggaggaaaataaatgtggatttgggaaactttgaggccagcttgcttcttgcaggctcatgatcaaccaatctcacataaaagtattgaatgttacatatctcagccttcttgatagggatttcatagatttttttttttttttttttttttttgagaccaagtttagctcctgttgcccaggctggagtgcaatggtgtgatcttgacttaccacaacctccacctcctgggtttaagcgattatcctgcctcagcctcctgagtagctgggattacaggcatgcgccaccacacccggctaattttgtgtttttagtagagacagggtttctccattttggtcaagctggtcttgaactcctgacctcaggtgatccgcctgcctcggcctgccaaagtgctgggattgcaaagtgtgagccaccacaatcagcgcgatttcagagattattaagggcaggggaaggaatcccttctaagagaagtttggaggaagtaggtaataaaatattcaacatgtataaatgtgtcccaggataggaggccatcagatctcccacatgaggcattttcgaccctctctccg

SEQ ID NO: 15031 - DNA, 1185 bp, Homo sapiens; identical to SEQ ID NO: 15030

SEQ ID NO: 15032 - DNA, 1189 bp, Homo sapiens
accacccatattcagtttcatggaggcacatgagcaagtttaagtctcagtcttatatgatggagtgtagtggtgccagaactgacctccttggggaataagcagttattctgtaggggggtgagtttgaaggcgggaaacctgatggtctggtacctgtcagagccttccactttttttttttttgagacggagtctcattctgtcacccaggctggagtgcagtggcgcaatctcggctcactgcaacctctgcctcctgggttcaagcgattttcctgcctcagcctccagagtagcgggactacaggcacacgccaacacacccagctaattttttgtgtgtttttagtagagatggggtttcacatgttggccaggatggtctcgatctcttgacctcgtgatccgcccgcctcagcctcccagagtgctgggattacaggcgtgagccaccgcgcccagccagagtcttccacttttatagcatgtcctcaggaaatgtcttctgtctcctgttctgcatccccatcctaataggtggaagggcatcaagcctactgtcacgattctctcgagaggaatttccgaccctgcaggcggctggcgaccaggacaaggctgccaaggaaagggagtctgccgaacagtcgtctgggcccggaccaagcctccgcccccaaagtgagtggctgccttttggccaagacattacctattgcatctcagagctaggtgctggcttattcaccttcctccccatcactttcagctgtgttcacttgtcctccaatcattgatacctctctctaccttttccaaaatacagattctacaacttggagggacggaggtgggcgtggccctgatgagctggagggcccggactccaaacttcatcatggtcatgatccccggggtgggctacagccttcaggcccaccccagttccctccctaccgcggaatgatgccgcctttcgtgagtcttggtgtcttgtcttggaacgattacactggaagctggagagctaggaatcaggacttagtctttgacctatgagatagaagggagggtgggaggatgattgatagcaggcttaaggagctagaagggtatatgactgtccctctgagcagctactgttggacccttttacagatgtatcccccatatctcccgttccctc

SEQ ID NO: 15033 - DNA, 2159 bp, Homo sapiens
ccgggaattccgcagttaccgagagtttcgaggagatgatgggcgtggaggtgggacagggggaccaaaccaccctcctgctccccgaggccgcactgccagcgagacacggagcgagggttcagagtatgaggaaatccccaagcggcgccggcagcggggctcagaaacaggcagcgagacccatgagagtgatctggctccttcagacaaggaggctcccacacccaaggagggaacactcacccaggtccctctcgctcccccaccaccaggagccccaccttcaccagccccagcccgcttcactgcccggggtgggcgagtcttcactcccagaggggtgccatctcgccggggccgaggaggagggaggccccctcctcaagtttgcccaggctggagccctccagccaagtctctggctcccaagaaacctcccacaggccctttgccaccaagtaaggagcctttgaaagagaagttgatcccagggcctctgtcccctgtggcgcgcggaggcagcaatggaggtagcaatgtgggcatggaagatggggagcgaccccgaaggaggcgacatgggagggctcagcagcaggataaaccgcctcgtttccggaggctgaagcaggaacgggagaatgccgcaagggggtctgagggcaagccctccctaacccttccagcctccgctcctggacctgaggaggccctcacaacagtcacagtggccccagcacctcgccgggcagctgccaagtctcctgatctgtcaaaccagaactcagaccaagccaatgaggaatgggagactgcatcagagagcagtgacttcaccagtgagcgccgaggggacaaagaggcacccccaccagtactgctgacacccaaggctgtgggaactcctgggggaggtggaggtggagccgtaccaggtatttcagccatgtcccgcggagatctgagccagagagccaaggatttgagtaaacggagcttctcaagtcagcggccaggcatggaacggcagaatcggcgccctggcccagggggcaaggctggcagcagtggcagcagcagtggaggaggcggtgggggtcctggaggaaggaccgggccaggacgaggcgacaagaggagctggccctctcccaagaaccgaaggtgggtaggaacaaacaaatttattgtggtttaaaaattggaggagggggaaaaagcctgagggaaagataagtttgggtggagtggagattgtggcctgaggggccatgggctctagaatgtcagtaggatttccatgtctggctaaggcaactggaaagcggttggtagggtgttagagtcaagaacacccacctatgtattcattgctggttctttgctttccagtctgtgcatctgtatgcataggaatccttagaaggactcaaaaacacctggactttaatagggaagagaataggttgtaagcagaagttgggaaacataacttgtgggaaaaagtaacgatttagtggatactggagctaatgctctgttttctccagtcgtcctccagaggagcgtcccccggggcttcccctgcctcccccacctcccagcagttctgctgtcttccgcctggaccaagttatccacagcaaccctgctggcatccaacaggctctggcccagcttagtagccgtcaagggagtgtaactgcaccagggggtcatccaaggcacaagcctgggcttccccaagcccctcagggcccctctcctaggcccccaacccgatacgagccccagagggtcaacagcggcctcagttctggtaagctggaggggttatgggtgggaatatctccatccccagagaaggtcaagtgctggagggagcgggtggagaacctggcctagggaccctgctgctgggtgcgtttctgcagggagcaagggtagaagaattgggaggtggagtagagaggaaaagttagggtcagtggcagagccaggcagatgctgaccctttttctctttcccagacccccactttgaggagccggggccaatggtgagaggggtgggtgggactcctcgggactctgccggggttagtccctttccccctaaacgtcgggagcggcctcccagaaaaccagagctgctac

SEQ ID NO: 15034 - DNA, 1047 bp, Homo sapiens
aaagctgagtgaaaggactatggtagaagggttaagaatgagaggggcttctgaactgtcatctcctcacttctcttctggttggtgctcccttctccagccactagccgaaagagttaccggcccagctccatggagccttggatggagcccctgagtccttttgaggatgtggctggcacagaagtgagtgagggtgggagggtgtgtctgagctgggacttttttgagcactggtcataccccccacctgctctgggttgagtctggagctgttctctcacttggctgtcccctttctgcagtttgtatgtgtgcatcagtcaggtattggggtgctttctaccctgacttaactagctccttctccactcctctcagatgagtcagtctgacagtggggtggacctgagtggggattctcaggtgtcatcaggtccctgcagccagcgaagttcccctgatggaggactcaagggggcagcagagggaccccccaagaggcctggaggctcctcacccctgaatgctgttccttgtgagggtccacctggctctgaacctcctaggagaccaccacctgccccccacgatggggacagaaaggtaaaagaccaaaaaaggataaggggaatgtttccaggaatctgactttggccctacctttttctgctttttctctctgcgtgtgtgttctgggcattccaatttggatttccctttccctcccccaatgcactttactgtgtgcccaatccaggagctgccccgggagcagcctctgccccctggccccattggcacagaacgatcacagcgtacagaccgaggcacagagcctggccccattcggccatcccatcgacctggtcccccagtccagtttggcactagtgacaaggtctgtgtgggctggatctgggtatcctgagttgggtggagagaagggaaggactaaaggtgggacatagaggacacatgtctgtcacgggacaatgtctcctgccttcttgtgatcacaggactcagacttacgcctagtggtag

SEQ ID NO: 15035 - DNA, 2094 bp, Homo sapiens
cagtgctgggccttccagttctcaggtaggccccgcttcccattgcatgaccccttcagtgaataataatttttttctgcctggtatgtatttataatcaagcctttctacgttgcagagttgtgagataccactttgtcacatcatttttctccctactttttgcttctatgggtgggatggtgatcttttttcttgaccacagatactaaagctgtttcaaccgtgctcctctcctgcagatctctgggggagccatggactctcaattacatccaaacagtggaggcttccgccctgggacaccctcactgcacccttacaggtaagactcgatgcctgtggatcacagaagtacttggagatgtgtttcggggagagggaaggggaagacacagttctagggtactagaagctagtggacttaaggcattgctaggactctggcttcctaacagcttttctccccacaatttattttcagatcacagcccctatacctaccccccggcccagcccctccctcagcactgctctctgggttagctctcaagggccagtttctggatttctccacaatgcaagctacagagctggggaagttgccggctggaggagttctctaccctccaccttccttcctctactctccggctttctgccccagtcctttgcctgacacatcgttgcttcaggtaagaggggggcaggtattagatattgggggatagggtagggagaatgattttgtgggggttgatatatttctccctgtttcccgacaggtacgccaggatctgccatccccttcggatttttattctactcctctgcagcctggtggccaaagtggctttctcccttcaggggctcctgcccagcaggtatattgtatcttcacacttccccttcatttgatttctctgtccagttgctggctttgattttccctggttttctgacattcctccctgcccccaacatgcacacccaaatttcttgttacagatgcttctacccatggtagactcacagctgcctgtggtgaactttggctccctgccgccagcaccacctcctgccccacctcccctttctctgttacctgtgggccctgctctgcagccccccagcctggctgtgcggcccccacctgctcctgctactcgggtgctgccttcacctgccaggcccttccccgctagcttggggcgagcagaggtaaggtacaggaactgaggggctagggagcgccaagacttgggagtagggattctgtatttcaaggtaggcagctcatgatttttttcccctcagctgcatccagtggaactaaagccgttccaggattatcaaaaactgagcagcaaccttgggggacctggatcatcacggactcccccaactggaaggtgaaacggaatagggatgtggactttccaagtgcttccttactttggaaccagggtctggatcctaggcttgccttagacgcccttcttcccttaggtccttctctggcctcaattcccgtctcaaggccacgccttccacctacagtggagtcttccgcacccagcgcgtcgacctttaccagcaggtgaaggagaaacccttgtggccccaactctaaattcgagttgccacctgatttcctgtccttccgtctcatcgctgacctctcactgtgactcactgtttaacacatgcctgtcccctaggcctccccaccagatgccctgcgctggatacctaagccttgggagcggacagggccgccacctcgagaagggccctcccgacgggcagaggagcctgggtcccgaggggacaaggagcctgggttgcccccaccccgctgagggagttcctcttgccccctacccccggggcttgtatatagattataaatatataagggggaaaggggtgggcggggaggggttctggggctggggcctcacttcccctcctcccccttcccctggtcccctgtccctggggctgtttgttaaaaaagagtaataaaaggatttaaaaaaaaaaacttctacaatgatttgggggatgagttgtttgcattgtcttaaagca

SEQ ID NO: 15036 - DNA, 1128 bp, Homo sapiens
tgctgtggccgggtgtggtggctcctgcctgtaatcccagcactttgggtcgccatggcagggggataacgtgtggtcaggagttccaatccagcctggccaacatggtgaaaccctgtctctactacaagtacaaaaattagttgggtgtggtggcacgcgcctgtaggcctggctacttagaaggctgaggcaagagaatttcttgaacctgggaggcggaggttacagtgagctgagatcatgccactgcactccagcctgggcaacagagcgagactctgtctcaaaaaaaaaaaaaaaaattacagatgcttattatgcatctaatttgtgtcagtcttatgctagttgctagcgagtcggagataaaattgcagagccatgccttcagggagtctagttaggatactttctctgttcagtctcctgtagagtaatcctctgcagcagtcttaccctgcctttggtatcctgactctcccctaccttcagtgtcgaggagggccccaaccgcagcacagtcagccgcccccgcagccaccggctgtgaccccggagccagtagccttgagctctcaaacatcagaaccagttgaaagtgaagcacctccccgggagcccatggaggcagaagaagtggaggagcgtgccccagcccagaacccggagctcactcctggcccagccccagcgggcccaacacctgccccggaaacaaatgcacccaagtgagagatggagggaatctttagtgggtggggaatcctaagtgaagtatggggagaaggaaatgaaccatggcaagggagggaaaggattacttggaggtcttagttgaagggttagcattgaggggcgaggaggggctctctcggtataggtaaatgacgctaggacaggcagctgagaagaactgctgctctccctacggcaaggaaatccaaatggtatctcctgagcctgatcggaattctcctctgagttcacgaaggcctgctctctttcttagaattagtctttcaccattgtaggtgcaggattgtggtggggagggtgggagcagttcattttcttctccctatcctctcatgggtgggagtaaagaatagaagctttggctgggtg

SEQ ID NO: 15037 - DNA, 1150 bp, Homo sapiens
tcaactcttccccttttccttcccctgcccttaatgctttttcttctttctctgcaggtctcctactccctccctccagtactgcgagaactgtgacacccacttccaagattccaaccaccgcacatccactgctcacctgctgtcactgtcgcagggtcctcagcctcccaaccttccacttggggtgcccatctccagcccgggcttcaaactgctgctgagggggggctgggagccaggaatggggctgggaccccggggtgagggccgtgccaatcccatccccactgtcctcaagagggaccaggaaggactaggctacagatcagcaccccagccccgagtgacacatttcccagcttgggatacccgagctgtggctgggagggagagaccccctcgggtggccacactgagctggagggaggagagaaggagggaggagaaagacagggcttgggagcgggatctaaggacttacatgaacctcgagttctgactttggtaaagtctgaccctagtctgctgctgaagtctgaacttgggcctctgacctgggccctttgacttccccttcctgggatctgctcagatgcagatcctgaagtttttggtcaataggctctgtcttcgtgagagacgggctgagagtcagaaataaatcaaccatttgtggtttattcacttttctggaagctattttgaggaagccaaacagaagcctgggagccacatgcaagtcccacctgagtcagaaggggcagcctctccaggtggcatgataaggtcacctccctgccaatctgggttcactttcaggtcccagaccctcctgggagtcccccacctattctttcaacccccctggaccaagaattgcccagcttcgtgcaagtctcacttcccccaggaggagttccctgactacagccaattcactgatttcacaaacataagtccatatactatgtgccaagaatacaggtaaagacattcccaaccctcaaagagttcacagctggagagggaaagtgccatgttatcaatttttttcttttttttttgagatgcagtttcgctctcattgcccaggctggagtgcaatggcatgatctcggctcaccacaacctctgccccccgagttca

SEQ ID NO: 15038 - DNA, 1182 bp, Homo sapiens
ggcaccctcagggttgttttgtgtgtgtgcgtgcactatttttctcttcaaatctctattcacttgcctgaattttgaaatttcctttggttctctgatttctttaaccccaaattcatgctttattttgatcctccacctgactcttgtctagttttgtgacgtatatcacttgttctcatgttttctaaatccgcaattcagacctattccaaaatgcgtttcctcatgggtctggtttgttgtctgtttctcctgctttgcaccttccagtctagaatttcatcttctgcattgacattgttgcagttatgtattgaggagggagttgggagggagagcaaggagcagaggctgaaaaggtgtgaagggaaggcagagctgtcttcgtttgatgcaagggtcagaagcccaggtttctgggtcccatgcccagatgttggatggggtaaggcccaaaagtaggtgctaggcaaactgaatagcccgcagcccctggatatgggcagggcacctaggaaagctgaaaaacaagtagttgcatttggccgggctgtgtttcagatgaagaactggaagacaaccccaaccagagtgacctgattgagcaggcagccgagatgctttatggattgatccacgcccgctacatccttaccaaccgtggcatcgcccagatggtgaggcctctctgctcctacctgcctccttctgagcagtaagagacacaggttcctgcagcaagaagtcatgtttaagccctgtttaaggaagctagctgagaagaggggaagaaccccagaacttgggcctgggaattgaattctgattgggggtcatcctgaagggattgttttcagggagggagacagaccttgaatcagagagttgtgatagactgcctcttcctcaaggaacaaacaacaaatggctctgatggtttgtagcctgcctaattggaagaaaggcaacacagaagtttgagagcccatctagtccagagaaggggcctctggacagaggtgggaggagtgggggacagagtggtatgggttgggctgcgaagggagttgcctcttctttacatctacctgccaaccccttccattgtattcacctcagttggaaaagtaccagcaaggagactttggttactgtcctcgtgtgtactgtgagaaccag

SEQ ID NO: 15039 - DNA, 1211 bp, Homo sapiens
ttcctctttcctctaggcaatggcagtgctgacagatcacccatatgcctccctgaccctcccagatgacgcagctgctgactgtctctttcttcgtcctgggttgcctggtgtgccccctttcctcctgcaccgtggaggtggggatctgcccaacagccaggaggtgagagagggcaggaactccaacaccaagcaccatcagagaaaagagtttcaggctttcctagtgggaggaaggaagggtaccttctctagaagcctgggtggggccactctgagctggctggaagagtggcctggctcagcctgaggtctcactcccctctccccactccatgtcttccctgtgcaggcactgcagaagctctctgatgtcaccctggtacctgtgtcctgctcagaactggagaaggctggcgccgggctcagctccctctgcttggtgctcagcacacgcccccacagctgagggcctggccttggggtactgctggccaggggtaggatagtataggaagtagaaggggaaggagggttagatagagaatgctgaataggcagtagttgggagagagcctcaatattgggggaggggagagtgtagggaaaaggatccactgggtgaatcctccctctcagaaccaataaaatagaattgaccttttagactgggctgtgactggtgtcttactggggcaaagggatagggcagggctgaaacctgagtttggggtcagtgcagggaagaaggcctcttattcaaaaatcttgttaggtacttatcaactcattgcccaaccatgtcataggtacttgagcacaagatgaacaagacagaatttctatcatgggaagtgtgtccagggcagagaaaagagtgtatgggtggattgctcactgaatttatctaaatgttagatgattcagagactggtagattaccagtccacccctatttgataaagaaaaagaaatgacacttccagggacattcattttcattcattcatttaatgaggcttagcaatgatatcaaaagggtcagtctcctgacgttggggagctcacagtacatgcaaatttcttacaaattgaaatacaggttgtcatggaacaatttacagaaggctgtttctatgagggaaataaagggggtgcgccctagggcatcaaagtatatgcaaggggtggccaaggagggtcacctt

SEQ ID NO: 15040 - DNA, 1157 bp, Homo sapiens
ctcccacctgtcctcagtgtctggggaaccagaagcctgcctttgcaaaacagtttcccattgatctgccttaggtttgacccaggcccaagggcaaagagcccatagtgaggggacagtgtatgtgtcatgactaggcagaaaacagctggtctgggagtgggaatgcagggactggcctagggatgggtggggtgcatcaggcataaccttgggttggggttacttttcaggctggcagtgatggggccaagattgggaactgcccattctcccagagactgttcatggtactgtggctcaagggagtcaccttcaatgttaccaccgttgacaccaaaaggtaggcctgcttatgttccttgaaacacccctggtgtacacatgtgtgcaaacacacacccacccgagtccttctgtcatgaacatttttgccctccccctggagtccctttcttatcccacgtcctccattccccctttctggttcttcctgacccccatttccagtcctgattcctgatcctttctccaggcggaccgagacagtgcagaagctgtgcccaggggggcagctcccattcctgctgtatggcactgaagtgcacacagacaccaacaagattgaggaatttctggaggcagtgctgtgccctcccaggtataggggcactcagaaagtggagaggtggagcagggagattctgggaaacagacagtttgcagaaatggaaaacagagatggtggtggggctggggcaggagagctagctgaggttcctcccaggaagacatcttacctcatttttcccattggctttcaggtaccccaagctggcagctctgaaccctgagtccaacacagctgggctggacatatttgccaaattttctgcctacatcaagaattcaaacccagcactcaatgacagtgagtcttgtgggtcagaggcctgggtcctgggaggaatagagaggacccagcgggtaggagacattaggggcacctggacgttcagatatcagggagatgaagcagatgttcgtaaatttcccccagcttcccatttttgctttacctctatatttccctgcattttcattggccaagacttttaagcttttctcatttgttccctagcctcttctgccccact

SEQ ID NO: 15041 - DNA, 2504 bp, Homo sapiens
tctgcaggtctacctccatgccatcgtgcgagatgctcacggccggaagatgagcaagtctctaggcaatgtcatcgatcccctggacgtcatctatggaatctccctgcaggtgggctgggtgctgggccagccaggaagggccgtggggctgtggtcacagccacctgactgctcccactccaccctcagggcctccacaaccagctgctgaacagcaacctggatcccagcgaggtggagaaggccaaagaagggcaggtatggagggttgggctgggctaagcaggagcacagcgtggatggggctggctgaggacgctcctccccctgcctcttccctgtagaaagctgacttcccagcggggattcctgaatgtggcaccgatgctctccggtttggattatgtgcctacatgtcccagggtatggcccccaaagcgtccctcccagccactccttcctccttctgtgaggcccatccctcttctccaccctgagcctctggtgggcatgggctgggaagagggtgatgaggactcacatctcacccccgacccaggtcgtgacatcaacctggatgtgaaccggatactgggttaccgccacttctgcaacaagctctggaatgccaccaagtttgcccttcgtggccttgggaagggttttgtgccctcacccacctcccaggtaagggcctggtgggcagcaaagctggcagcactcacacaggctgtacccctgtccggagcagcctccatgtagctggggggacagatagacacagagacagacagttaaagggaaagcccagcgcattgggggctggggcctgtcacttcttcccagatcctggcacataggtggttgctttggactcatcagactctggatgaagatttgcccatgactcctgcccccatggggttctggcaccctcccctggcccgccggctgatacaccctctctccccaagcccggaggccatgagagcctggtggaccgctggatccgcagccgcctgacagaggctgtgaggctcagcaatcaaggcttccaggcctacgacttcccggccgtcaccactgcccagtacagcttctggctctatgagctctgtgatgtctacttggtgagaaggagcacagcggggcaggggatggtgggggcaggtgggcagcagagccctgggctcagttttgccagagttggccttgagacctaagccaacccatccccttcccagtcctcacaggcacagcgagggctcaaggctagacctccagccgtgagccctgtacctctcgtcccctaggagtgcctgaaacctgtactgaatggggtggaccaggtggcagctgagtgtgcccgccagaccctgtacacttgcctggacgttggcctgcggctgctctcacccttcatgcccttcgtgacggaggagctgttccagaggctgccccggaggatgccgcaagctccccctagcctctgtgttaccccctacccggagccctcagaggtatggcatggcctggagaggggagtctgacctgccctccaggccccctcaccccctcctccaccccacagtgctcctggaaggaccccgaggcagaagccgcccttgagctggcgctaagcatcacgcgagccgtgcgctccctgcgggccgactacaacctcacccggatccggcctgactgtgagcctcaggcccccatgtccgccccatcccactgtcccctcagcctactctgggacccagtgtccggcagtgactgcttggtttcctgtctccatggagctaggcctcacctttctccctccctggcaggtttcctggaagtggcggatgaggccacgggcgccctggcatcggcggtgtcgggctacgtgcaggccctggccagcgcaggtgtggtggctgttctggccctgggggctcccgccccccagggttgcgctgtggctctggcttctgatcgctgctccatccacctgcagcttcaggggctggtggaccctgcacgggagctgggcaagctgcaagccaagcgagttgaggcccagcggcaggcccagcgtctgcgggaacgccgtgctgcctcgggctatcctgtcaaggtgccgctcgaagtccaggaggcagatgaagccaaggtgtgtggcctgggtgggcatttcccacaccatccccttcctccatcaaaaccctggtctgggctggtccgagtgcagtggtgttgacaactaattgatcgtaaccagttacagatttctttgttccttctccactcccactagccttaaaaaacaaaacagcctggctcagtggctcacacctgtaatcccagaaatttgggaggccaaggtgggtggatcacttgagcccaggggtttgagaccagccaacatggtgaaatcccatctctacaacaaaaatacaaaaattagctggccatagtggcacacacttggggtcccagctactcggggggct

SEQ ID NO: 15042 - DNA, 1102 bp, Homo sapiens
aatagagacaaggtctcactctgttaaccatgctgatcttgaactcctggcctcaaggaagcctcctgccccagcctcccaaagtgtgggggttagagatgtgagccatggcaccaggccccttcatgcttttatttatttatttatttttgagagagggtctcactctatcgcccaggctagagtgcagtggcaccatcttggctcactgcaacctccacctcccgggttcaagcagtacttgtgcctcagcctcttgagtagctgagattacaggcacgcgtcaccacacctggctaattttttttttgtatttttagtagagactaggtttccccatgttggccaggctggtctccaactcccggcctcaagtgatctgcccacctcagcctcccaaagttctgggattacaggtgggaatcacggcgtctggccctgcttcatgcgtttttggtatctttccgcccccagcacctgaaggggaagaacgtgatccacccattcctgtctcggagccttcccattgtcttcgatgaatttgtggacatggactttggcacaggtgggcaaggggctggtcctgtggggagaggaaaagactggagctgcaccctagctgtccatcttctctcagagaaaaagaaaataagcttcagccaaatagacagagcttggggtggttctcaagggactgtattagacaagtgggggccaggagtggtctcggagctacatccttcagcaaaagaggtgagtgtaggaaggaactccgtggagtccctcatgacctgggcatcctgatgtacacccaggtgctgtgaagatcacccccgcacatgaccaaaatgactatgaagttgggcagcggcacgggctggaggccatcagcatcatggactcccggggggccctcatcaatgtgcctccgcctttcctggtgaggctgcctgaggcaagagtgcccgggtcagggagatggagggatggctgggcatcgccatgatgaggcctcattcctacccagggcctgcccaggtttgaggccaggaaagcggtgctggtggcgctgaaggagcggggactgttccgtggcattgag

SEQ ID NO: 15043 - DNA, 1099 bp, Homo sapiens
ggactacaggcgcccgccaccacgcctggctattttttttttgtatttttagtagagatgaggtttcaccatgttagccaggatggtctcgatctcctgacctcgtgatccgcccagaagtatttttattgtgactatttgagtgaagaaatgggactcagaggtggtgatttgtgagagtggggtggagggaggccacatggattgggttgtggtgggagatggaggtgggccaaaccttgtctcacacttcttccccttcctgccaggctgtgctgggggccctgggcagggccctgagccccttggaggagtggcttcggctgcacacctacttggccggggaggcccccactctggctgacctggcggctgtcacagccttgctgctgcctttccgatacgtgagtcaccaggcctggggaagaacaagactgctctcctcagacctcactgtagggtgactgagaagagtcatttatttcctgttccaggtcctagacccacctgcccgccggatctggaataatgtgactcgctggtttgtcacgtgtgtccggcagccagaattccgagccgtgctaggagaagtggttctatactcaggagccaggcctctctctcatcagccaggtgaggaagggcgaggagttggaggataggggcttccctggggccttccatgcaactcactttctttttttcctagaaatggcagaatcactggggcagggtcctgcgggagaggagggagaggggggaggtcagcatgggcaagacctcgggcatctaaaataccccatctgaaacctagtatggccgtccaagagggtccccagctggctgagtctgaatttctgcacctctctctaggccccgaggctcctgccctcccaaagacagctgctcagctcaagaaagaggcaaagaaacgggagaagctagagaaattccaacagaagcagaagatccaacagcagcagccacctccaggggaggtgaggcgagggtggagctggaaggaaagttgatgtgtgcggtgatgggttggctgatgcctgggcctatgtcttctccctcccaagcagaagaaaccaaa

SEQ ID NO: 15044 - DNA, 1143 bp, Homo sapiens
tcagttctaaaaagaattaatctacttcttcaattgtggggcctgtggcaggccttccaggcacataccctgttccgcaggcaggcccagtgcatcctccttggtagagttttgtgatgatagggttacacatctgctccaattcctttctcttatgatcaaactcatctttctctgccagttgattgacctccagccacgaaaggagctcgttgcatttatccaatattttatttttatcagactcactaatcttgcccttcaaaccttcatcactcacaacactcttcatgttaaaagcataggattctaaggcattctttgcagcaattttctccctctggacctcatcttcagctttatatttctcagcatccagaaccatgcgctcaatctcctccttgctcaggcggcccttgtcattggtgatggtgatcttgttcaccttgccggtgctcttgtccgtggctgtgacattgagaataccattggcatcaatgtcaaacgtcacctcgatctgaggaactcccctgggtgctggagggattccagtcaggtcaaaccgccccagcaggttgttgtcctttgtcatggccctctcgccctcatacacctggatcagcaccccgggttggttgtcagagtaggtggtgaaaatctgtgtctgcttggtggggatggtggagttgcgctttatcagggcagtcatcacgcccccagccgtctccagccccagggacaggggagccacgtccagcagcagcaggtcctgtaccttctcagacttgtcccccatcaggatggctgcttgtaccgcagccccatatgctacggcctcatcagggttgatgctcttgttgagatcacgtccattgaagtagtcctgaagcagccgctgcaccttggggatgcgggtggagccccctactaaaacaatgtcatggattttagccttatccatcttggcatcccgaagcgctttttctacaggctccagggtacccctaaacaggtctgcacacaactcttcaaatcgagctctggtgatggatgtatagaagtcaatgccttcataaagtgaatcaatttctaggttggcctgggtgctggacgacagggtcctcttggccctctcgcaggcgg

SEQ ID NO: 15045 - DNA, 1417 bp, Homo sapiens
cctgaaggctggcatgtacctggtgtccaggcatggagtagtgcagagcttctcagatttcagtgtacataagtatttcctggaggacttggggaaacagtcctgtgcctcccagagagattttgaatcagtaggcttgggatggggcccaggattctgcatttctaaaaagtccccaggcaatgctgatgctgaaagtccatagaacatacaaggggctcagatcccatctggagaagataggttgggtgtcgggtccctctcagggagcaggatccacagggtcttcggggtgggctcttggtggctgggtccaggtcccacaagctcctgttttcctctgacaggtttgactatggcgaccgcttctgggacatcaaaagcaaatatttcacctgccaatgtggctctgagaagtgcaagcactcagccgaagccattgccctggagcagagccgtctggcccgcctggacccacaccctgagctgctgcccgagctcggctccctgccccctgtcaacacatgagaacggaccacaccctctctccccagcatggatggccacagctcagccgcctcctctgccaccagctgctcgcagcccatgcctgggggtgctgccatcttctctccccaccaccctttcacacattcctgaccagagatcccagccaggccctggaggtctgacagcccctccctcccagagctggttcctccctgggagggcaacttcagggctggccaccccccgtgttccccatcctcagttgaagtttgatgaattgaagtcgggcctctatgccaactggttccttttgttctcaataaatgttgggtttggtaataaactgcgatttttgtgttggggtggggagaaagcatacttggctagagggaatgtgggtccaagggccagaataggatgggaagcaggctggacaggtgtggctggtgtgatggccgcccagtgcggggcagggaggtggggggccactatgaagatccagtttcacaggcacggtggctgacacctataatcccagcactttgggaggccaaggcaggcgaatcacctgagatcaggagttcaagaccagcctggccaacttggtgaaaccccatctttcaaaatagaaaaaatttgctgggcgtggtggcaggcacctgtaatcctggctactccagagactgaggcaggagaaccgcttgaagccaggaggcggaggttgcagtgagccaagattgagtcactgcacaccagcctgggcaacaagagcgaaactccatctcaaaaaggaaaaaacaggtccaatttccacactttaatctttggcgggagcgtgttgggagtgtacggcagttaaggtagttggcgagattataaagcgttttcttatcagagcatgccaggt

SEQ ID NO: 15046 - DNA, 1108 bp, Homo sapiens
gaccgatcatggggttgagctgacctctgcctcctcgccccagcactgcacgtgtgtggacgactgctctagctccaactgcctgtgcggccagctcagcatccggtgctggtatgacaaggtgcgtgccccttgccttggccacagacacccggcccctccttcagaggagccagcctccaataaaccagctccctgggaccatgtccctcacctcctaccctgtgggggaagtgactgagaggactgggcaaggcctgggaatcctgggatgtggctgggacagcgatgggcgtgtgcccaggtctatgcaaaccagggatgatgctcctgcatttcgtgctctcggatctcagagcctgtgtgacctccccaaccccaacttccctgtctctgtagagtcttggggttcctgggtgggcagctgaggtgggccccacagagaaaccactatcctcccctccgcaccctaggatgggcgattgctccaggaatttaacaagattgagcctccgctgattttcgagtgtaaccaggcgtgctcatgctggagaaactgcaagaaccgggtcgtacagagtggcatcaagtgaggccctgctccacagcccaccctctccccacctcaccctttcctccctgcccctggggcttttccagggcctccacccaacagcgccatctctcctacccccagggtgcggctacagctctaccgaacagccaagatgggctggggggtccgcgccctgcagaccatcccacaggggaccttcatctgcgagtaagtcaccgggagcaccttaacacctggtgggaaggggatacatggccactgctgactgccaggcctccctctcagccatctgccctgatgagtcacatgtctccatctggccactctccagccagcctcctctgacccctattcctgcagctgagcagccagccgcctctgacccccatccccccagctgagaatggcacctgcctccactctgcccagaccacagagcttgtcttccctcccctccacctccaccctctaccttcccctccaccccctcctcgcccttcctagctggagaaagtgccagtttgggagaca

SEQ ID NO: 15047 - DNA, 1195 bp, Homo sapiens
gagaatggtgagggccaaagctacaccctgaatgagttctggtggagctagtagcatttcttagtgtgaataatccattttccctgaaagtagattttcctgggaaaggagtgagcagaaagaagggctcagctacagtggcccttcaggcaaaagaaaggaactagaattgaccagcatgtcaaaaaagggctacagaggttttctagtttttagcttctgacatactgactgtaagtagtgggttaatatcattcacgtgtctcaacaatgacatttgggatttttctaagaacaaaacattcatcaaaatgtccacttatacttttcttggccatgggttggcacaaaggagctaaggaagacaggccatcctggccaccagagggcagcgtggaaactgggcttccaggggccagtggccaggagtgaggtggtcaggagtcagcctcagggtctgttctatgatctcctttagaccttaactgttcctctcctccctccctagctgtccagaacagccctaagggttgccaccgggacaagaggacccagattgtctacagtgatgacgtctacaaggaaaaccttgtggatggcttctagggaacagagctggattccttgtgcctcatatgccccaatgctggtctcagtaaaacactgaggtggaagcttacacatctccctcagcctctggtttttcagcacttgggattggggttaaacctttaaaaacggctgtcaggtttgatctcagtgtaacaacatggccagtgcctgttccccactcccttgccccaaaaggatctggaacacaggtgttgtcgcagctgttttaattcaatcccacgcccctgtccagcaggaaaccccttatagaaaacccaaatcctcatcttggagtttctccttcagccagggcagcacttgaaagaggttgatgtgaaagtctcgggcgtgagcaggtacctgcttttgccgcttctggtttttgcagacatccactactccccagctgattacaccaacctgcagaggcagtggggtgccatggatcattcagtagaattcctaatcctggaagcatggctgttcctgcttgtgtcttagctgacctaaaggaatcagactagggacccagctcagcctcgttcttgacacacgcaggcaagacatgcggtcctaaggtgag

SEQ ID NO: 15048 - DNA, 1327 bp, Homo sapiens
cccaggacaatgtcaggtgcgggtgctgcccccagtgcccacggaagggctgacaccagatgacgtcccagctctggctgacagagtccggcactccatgctcactgttttccgggaaatctccactgatggccggggtggtggtgactatctgaagaagcctgggggcggtgggtgaaccctggctctgagctctcctcccatctgtccccatcttcctccccacacctacccacccagtgggccctgaagcagggccaaaccctcttccttgtctcccctctccccacttattctcctctttggaatcttcaacttctgaagtgaatgtggatacagcgccactcctgccccctcttggccccatccatggactcttgcctcggtgcagtctccactcttgacccccacctcctactgtcttgtctgtgggacagttgcctccccctcatctccagtgactcagcctacacaagggaggggaacattccatccccagtggagtctcttcctatgtggtcttctctacccctctaccccacattggccagtggactcatccattctttggaacaaatcccccccactccaaagtccatggattcaatggactcatccatttgtgaggaggacttctcgccctctggctggaagctgatacctgaagcactcccaggctcatcatgggagctttcctcagcaccttcaccttccctcccagtgtagcctcctgtcagtgggggctggacccttctaattcagaggtctcatgcctgcccttgcccagatgcccagggtcgtgcactctctgggataccagttcagtctccacatttctggttttctgtccccatagtacagttcttcagtggacatgaccccacccagccccctgcagccctgctgcaccatctcaccagacacaaggggaagaagcagacatcaggtgctgcactcacttctgccccctggggagttggggaaaggaacgaaccctggctggaggggataggagggcttttaatttatttctttttctgttgaggcttccccctctctgagccagttttcatttcttcctggtggcattagccactccctgcctctcactccagacctgttcccacaactggggaggtaggctgggagcaaaaggagagggtgggacccagttttgcgtggttggtttttattaattatctggataacagcaaaaaaactgaaaataaagagagagagagatctgggtgttggtggttgcatttgttaaggaattgaagaagcagttcttgcccaggcaacctgcccccagccagaagactcaggg

SEQ ID NO: 15049 - DNA, 1122 bp, Homo sapiens
tacactcttccctctctgcccccacaaggctctggcggctctttcaatctctcaggatctggagacatgtttctggggatgcctgggctcaacggagattcctattctgcttcccaggtcagatgcccatctcctctcgaatagggctttccccaactccatttcctctactttaggatacaagacctctttcctctgaggcttctcttcactgtcataccttcctctgctgcctgcaggtggaatcactccgacactcgatggggccagggggctatggggataacctcgggggaggccagatgtacagcccacgggaaatgagggtgagtggatcctgaagctcctctctgtccagttctcacaggacagaggggcattttccctagtaatgttgtgcccacacagggttcccagggctttctctgttttctgtactctgtctctcctttcaggcaaatggcagctggcaagaggctgtgaccccctcttcagtgacatccccaacggagggaccagggagtgttcactctgatacctccaactgatcttgcccctcagggtcacaggggtgggggctctcacaaggcgacttgaagaggacgcaggcttccagaggacaaaccccaatacaggagaagcacaagacagagaagggccaatggggtcatcccctccctaacgagactctctgtgctgggggtgctaattacatggcaggaagaatggggcctctaaggggagtgtggggtctgtctctcccttttttccatctttttcctctctcgctttctttcttacacagaaacatacacataccgagaaacctatttctcagacccctttttctcctctgtctttctctctccctctcccacacctcacacacacatactcccacttgcaactattctgtttctctcctgggctcccccactttcccttccccaccccacttgtatgctctggaatctgtggagacgccagccctgcccaatcagagatgccaaaaatggggacatgacttctggacagaggacatgggccacgcccccatgcatccccacccccgcccctccggacggcttacttacctcatacgcagctcatcttaaaccaata

SEQ ID NO: 15050 - DNA, 1262 bp, Homo sapiens
cgggcctcggcccaaccctgcgataatgcgaggaagatacggagtggctgccgggcgcggaggcagggtctcaacggatgactggccctgtgattgggtggccctgggagcttgcggttctgcctccaacattccgatcccgcctccttgccttactccgtccccggagcggggatcacctcaacttgactgtggtcccccagccctccaagaaatgcccataaaccaaggaggagagggtaaaaaatagaagaatacatggtagggaggaattccaaaaatgattacccattaaaaggcaggctggaaggccttcctggttttaagatggatcccccaaaatgaagggttgtgagtttagtttctctcctaaaatgaatgtatgcccaccagagcagacatcttccacgtggagaagctgcagctctggaaagagggtttaagatgctaggatgaggcaggcccagtcctcctccagaaaataagacaggccacaggagggcagagtggagtggaaatacccctaagttggaaccaagaattgcaggcatatgggatgtaagatgttctttcctatatatggtttccaaagggtgcccctatgatccattgtccccactgcccacaaatggctgacaaatatttattgggcacctactatgtgccaggcactgtgtaggtgctgaaaagtggccaagggccacccccgctgatgactccttgcattccctcccctcacaacaaagaactccactgtggggatgaagcgcttcttctagccactgctatcgctatttaagaaccctaaatctgtcacccataataaagctgatttgaagtgttacctttttttggaggaattggggagaagaatgggaaaaaagatgggagtgactgcataatgtcagcattttgtgcttttggctcagcatttggattggatggaggatgtaagtatagtttaaaagcaagaataagtatatttaggggccctatgataatttagggtattatctgaaagcaagaatctagtagccaagggagaaaccgcacacactaggtcaggggtccccaacccttgggccacagactggtactggtccatggcctcttaggaactgggccacacagcaggaggtgagcaagcattactgcccaagctccacctcctgtcagatcagcataagcattaaattctcataggaactcgaaccctattgtgaactgtgcatgcaagggatctaagtttctcgcttcttacg

SEQ ID NO: 15051 - DNA, 1262 bp, Homo sapiens; identical to SEQ ID NO: 15050

SEQ ID NO: 15052 - DNA, 1103 bp, Homo sapiens
agagaagttgagcagatggggtgggagatagcgtgcaaaatataggtgcagcagaggggcattccctctcatcctgctgttacggcggtcaatctgagatgcggtggaagtacgggccgcgtgagtttccccccccaactcccaccctcaacaccacactggccctccgctccagcttactggggaactggcatggaacacagtgtctgtggaaaggggggggaatctcgtggggggagactgtctcccggtctcaccgaccccagaacaatgccccattgtccctcccgcgcactggtgacgtcaccagggcaacacttcctgcaggccggtggtctcctgggcaacgcttcccgcctttgagggaccagccggcccgaatagcccttcccccaaggccagaacccgtgggaaaccggaacccaggcgtctggcccccaactggggtaacaacctcccacgtcgtcccctagggaaaactgcgctgcactgggctgctgccgtgaacaacgcccgagccgcccgctcgcttctccaggccggagccgataaagatgcccaggacaacagggttagatgggacagagggcttcccacaaaacagtcaggcgcacgagagatggaaagtgcggtaacccgcaaagcctgaagggataggggccagtggtcgcgcaagtgaaggcagaaaggcccagtcctgtgggcgtggccttccctgatatcggccctggctcttctgtacaggagcagacgccgctattcctggcggcgcgggaaggagcggtggaagtagcccagctactgctggggctgggggcagcccgagagctgcgggaccaggctgggctagcgccggcggacgtcgctcaccaacgtaaccactgggatctgctgacgctgctggaaggggctgggccaccagaggcccgtcacaaagccacgccgggccgcgaggctgggcccttcccgcgcgcacggacggtgtcagtaagcgtgcccccgcatgggggcggggctctgccgcgctgccggacgctgtcagccggagcaggccctcgtgggggcggagcttgtctgcaggctcggacttggtccgtagactt

SEQ ID NO: 15053 - DNA, 1326 bp, Homo sapiens
atttgacttgcacaagtcactaacctttcagagactcagcttccttacgtgcaaagtaaaaatcgaatgagataacccaaataaaatgtcattagggggatttttaggttatgtatataaatcatgcaataaatgctagtcatttctttcctctggttgactgagagcttccaggaaataggaatgggttctaactttctttgtattcctagtgcctaaaacggtgcctgacacaaagtaggcactcaatagatgcttatgaattaataaagtatgagagagcctggtaggtatttagcaggggaggaaggttttaccaaaaatggtgctgtgtttggtggcagtgtgtcatagagattgtttgggactggggaagtttgagttgtgtgtcgccaacaattgtgtctcatggggagttgagatagaaggattgtgacacatggccatgatggatggtgagttgagtgatgctgttgagctggaaggtgggggactggacagactatcttgagctgggtcccttgtagtgctgggttgggctcatccactggttccctgtctaatcctctttgtctgcagtgtgccccaggctacgatggacagaactgctcaaaggaactcgatgcttgtcagtcccaaccctgtcacaaccatggaacctgtactcccaaacctggaggattccactgtgcctgccctccaggctttgtggggctacgctgtgagggagacgtggacgagtgtctggaccagccctgccaccccacaggcactgcagcctgccactctctggccaatgccttctactgccagtgtctgcctggacacacaggtgaggccccaagacaaggggcacaagtgtgtctggagcacagccaagcagaccatggagagccagatagtctccacccatgcggcagccgtcacctggtccatcccctgcctccacgcccacccccgcccagaaaagatgccccaggatcccttcacctgcacatctagcactgggccaacatccaggaatgagctaggatggaggcagtgactgatgcagtgtgtgacatctaatctcccccataattacaggccagtggtgtgaggtggagatagacccctgccacagccaaccctgctttcatggagggacctgtgaggccacagcaggatcacccctgggtttcatctgccactgccccaaggcaagtgaccacaaatctgccttctctgttgccccctatgctgacaaggcaagaatacctcagttggaatcccagaagggactgtgggtgagcactgatgtggaaattattggaaaaagccatgcca

SEQ ID NO: 15054 - DNA, 1209 bp, Homo sapiens
cgagaccacaaacccaccggaaggaacaaactcaggacacaccagaatgatggtagaggtgataaggcatgagacagaaataataggaaagactttggatccaaatttctgatcaggcaatttacaccaaaattcctcctctccacttagaaaaggtgtgctctgcgggactattggctcaggggagactcaggaacttctttttcttcttcctgcagtgctctcatctgagcccttgaaagaggggaaaagaaactgttagtagagccaggttgaaaacaacactctcctctgtcttttgcaggattcctgagctgaaatgcagatgaccacattcaaggaagaactttctgccccggctttgcaggatgaaaagctttcctgcttggcagttattcttccacaagagagggctttctcaggacctggttgctactggttcggcaactgcagaaaatgtcctcccttgtggcttcctcagctcctgcccttggcctgaagtcccagcattgatggcagcgcctcatcttcaacttttgtgctcccctttgcctaaaccgtatggcctcccgtgcatctgtattcaccctgtatgacaaacacattacattattaaatgtttctcaaagatggagttaaatatcatctggtccatttggctccaaagacagaaaatgaaaagaaaaagggaagattattttccaatagaataatgattttcatgtatatgtcatgagtgtgtgaggtaatgcgtatgttaaatagctggatttagacattccacactatagccatatatcaaaacttcatgctgtacaacataaatatactatacaatttttacttgtcaattaaaaaagtaatcctaacatttaaaaaggcaatgcataaaaactgagaacagactataacaactgaaacaaactgggcaaacatgagatgagaaaccagccagcaagtcaatcagaactctttcttcatctcgtctacaatattttgtatttataactgtaaattagtgtatagtgtttcactccagagacttcaataatacagtgttatcaaaggacttgtacagatttcagagaaagacacatttagaagatggagagttctccgttatgttctatctgagagtcagtatgaaatgtcaaatctaaaagtacataattcagaggtctatttcaaattaataatcatttgagcata

SEQ ID NO: 15055 - DNA, 1129 bp, Homo sapiens
ttccttccccttcgactcagcttcttcacccgcgtgagcgagcgcgcgcgcgcggagggggtggggaaaagctcaagcagggtggcgcgcatgagcggcgaagctcctcctccccgcctatatataaagggctggcgcggggctcggcggcgccatttcgtgctggagtggagcagcctctagaacgagctggaggattctgcctaccgatacagagccttcgagtcgtccggggccgccattacaatccacctccatccgcttggaaatggccttcgtcccggcctatgactggtcccagcgggcagtacagaccccctagaagcccctggagctcccctttttcgggccccgcccaatcctcggagtctgtccaccccctctactccgccctcaagaggatttcaaagatggaggcggcggctccctaaaccacttttcgtgttcatccgcctccatccgagatcgaaacgggacctcgtcggccccgtaggggcccgacaagaagagggaatccctgcagaccaacagcgggctatattgacgacggtgtctgagatcggggaccgtcttttgaagagtcagtccctccttagttgcccgcctcagctgaggccgccgccattttcttgctgtccgccgtctgcagagcgcgccaagctgcccggagctctccgagaggccccaaagagactgctttcgtgccggccaggcagggggtttgtcgcctggaggcccaagaggaacggcctccccccaacttagcgggttatgctggaccgggcggtgaggggaaccgaggccacccggactttccgcggctgagggcagcgccggttccttgcggtcaagatgctgcaaaacgtgactccccacaataagtacgtttccgcgagccgcgtgtgggaaggggatgttgcagggcggcggcacaggggtgtggggcgccgtgttgggagtactgagcggccccggcgcgctgctgttgcggcgcagctgtcgactcggtcgcgcggagggaattgagcgacggttttggaacggtggtggcggctcggctactgctcgtggaggggaatacaggttgtcaatttatacgctattaatgccgccgtggcccagtcttaac

SEQ ID NO: 15056 - DNA, 1173 bp, Homo sapiens
agcttggggtttgagtttcttaactccacccattttgcttaagccccatccccatagggctgtagttctgagatgtcgtgccttgtcagaaacaatttgggagttttttaaaatatgaaaaagaacagatagagcctatcagacttaagaaggtgggatctagatagtatactaaaaatattaataaaaggaaggcggggccagcaataaaagctccacagattgtttggatattgtttctgcttaagaagcacttggcataagcttaaccacctcactagggccagcacctggattcatcagactattgtgcagatgcactttttcctcatttggacgatattgccctaattttgttcccatctttacaggctccctggggaagggaatgcagggttgctggggctgggcccagaagcagcagcaccagggaagaggattcgaaaaccctctctcttgtatgagggctttgagagccccacaatggcttcggtgcctgctttgcaacttacccctgccaacccaccacccccggaggtgtccaatcccaaaaagccaggacgagttaccaaccagctgcaatacctacacaaggtagtgatgaaggctctgtggaaacatcagttcgcatggccattccggcagcctgtggatgctgtcaaactgggtctaccggtgagtagagacattggagccggggaggtgtgggatgagcaagaatgcgtgtgaatgggggtggtctgcctagtgtagatgctgcggcccctagggagttcccatttctcccctgtagggcagttagctaccagatttctgggtatcttggtcctttgtgattgatccgaccgcttgctgtaactatcttggcatctttccttgtgccctccatgtgtccttccttaacttttgtgccctggctccattttacagattcccacctcgggttgggagaggaccacggtggccaaaattcttagcttcttcctttccctcatgcagcccatggatagccagccccagaggtaatgtcacaggatgggaagtttccagagtgggtgggaggtgggtggttagagaaaggcagcaggggcctccctgtggatgtcaagaatcttttttatttatttatttattttgtcccacagtttaattggggccgcagtttaagtaact

SEQ ID NO: 15057 - DNA, 1927 bp, Homo sapiens
agctggtagtgaccatccctaagaacagccacaagaagggggccaagttggcaggtaggaagagtgggagttttgcaaatggacaactaaagatggggaagagaatcaaactacacttttttccttttttctagcgctccagggcagtgttaccagtgcccatcaggtgcctgccgtctcttctgtgtcacacacagccctgtatactcctccacctgagatacctaccactgtcctcaacattccccacccatcagtcatttcctctccacttctcaagtccttgcactctgctggacccccgctccttgctgttactgcagctcctccagcccagccccttgccaaggtatgatctgtggatttcctctgggcagcagggaggcaagggtcttaagtaaagtgggcttggagtgacaggttccctatcttgtttctttctgcagaaaaaaggcgtaaagcggaaagcagatactaccacccctacacctacagccatcttggctcctggttctccagctagccctcctgggagtcttgagcctaaggcagcacggcttccccctatgcgtagagagagtggtcgccccatcaagcccccacgcaaagacttgcctgactctcagcaacaacaccagagctctaagaaaggaaagctttcagaacagttaaaacattgcaatggcattttgaaggagttactctctaagaagcatgctgcctatgcttggcctttctataaaccagtggatgcttctgcacttggcctgcatgactaccatgacatcattaagcaccccatggacctcagcactgtcaaggtacccactgcatggggcagatgggatgctcaggcagtgatgggagcctaggtgcaaaacaataagtctccttatgtgggcacacagcagtctttggttcttggcattttacttttataaaataatagtggaacagaaggtctggtgttttgagaatttgtatttcttggagtttgaaacagtagggtggggtttctttgtcttgagaaaaatactgtctataattaagtactaatgtggcagtgttgggttaaggaagttatagggtggaaaaacaggcataggccacctctctgtcacttagaaatgatttctttttctagacataaatatttcttcaacccacccaaattcctttgacttcaaacttgaaccccagggcacagatccttaaggtcatccccactgtgctctcaagagagggctcttcttgtggtgtctggggttggcagggaaaggtgagtcttcctgcctgtgcagcttctgatgctgcctccttctgcagcggaagatggagaaccgtgattaccgggatgcacaggagtttgctgctgatgtacggcttatgttctccaactgctataagtacaatcccccagatcacgatgttgtggcaatggcacgaaagctacaggtgagtggaaaggttggagtttgaaaaataaatggtatggggagttattttgtcatgtgtgctgcatagcctcaacgtgagggtctcactgttctgtacagttgtaaattggagctatatcacttggtggctgggtatgtagggcactgtttatcagcatagttttgagtttgtgcctctttgtaggatgtatttgagttccgttatgccaagatgccagatgaaccactagaaccagggcctttaccagtctctactgccatgccccctggcttggccaaatcgtcttcagagtcctccagtgaggaaagtagcagtgagagctcctctgaggaagaggaggaggaagatgaggaggacgaggaggaagaagagagtgaaagctcagactcagaggaagaaagggctcatcgcttagcagaactacaggaacaggtattttgtcactcttgaaagtttttattgggtaaga

SEQ ID NO: 15058 - DNA, 1342 bp, Homo sapiens
agcttgagcgctatgtcctttcctgcctacgtaagaaaccccggaagccctacagtacgtatgaaatgaggttcatctcatggttctgaggacagttgaggaaagatggtggggtctgtttgcattcaggattgtcagctcccaggataatgggatgtgttggttggcagctgacgttcaagaagggaacttgggaaccttaggggcccataataagatgcttggggcaatcttaatgtatcctgataaatttctttcattagccattaagaagcctgtgggaaagacaaaggaggaactggctttggagaaaaagcgggaattagaaaagcggttacaagatgtcagcggacagctcaattctactaaaaagccccccaagaaaggtgagtatatactttcatgccactacagattgactccatcctgccttcttgactgtcttttattgacaaatgaagattcagacttgaacgtctttaactttcgaatttgttctgcagcgaatgagaaaacagagtcatcctctgcacagcaagtagcagtgtcacgccttagcgcttccagctccagctcagattccagctcctcctcttcctcgtcgtcgtcttcagacaccagtgattcagactcaggctaaggggtcaggccagatggggcaggaaggctccgcaggaccggacccctagaccaccctgccccacctgccccttccccctttgctgtgacacttcttcatctcacccccccccgcccccctctaggagagctggctctgcagtgggggagggatgcagggacatttactgaaggagggacatggacaaaacaacattgaattcccagccccattggggagtgatctcttggacacagagcccccattcaaaatggggcagggcaagggtgggagtgtgcaaagccctgatctggagttacctgaggccacagctgccctattcacttctaagggccctgttttgagattgtttgttctaatttattttaagctaggtaaggctggggggagggtggggccgtggtcccctcagcctccatggggagggaagaagggggagctctttttttacgttgatttttttttttctactctgttttccctttttccttccgctccatttggggccctgggggtttcagtcatctccccatttggtcccctggactgtctttgttgattctaacttgtaaataaagaaaatattattcaagttttgagttaccttaatatttgcttttgtagtgtttcaaaaggaacatcataagaattgtcttgataattttgagggaaatattactgcagtgagaaaaggcaatagct

SEQ ID NO: 15059 - DNA, 1661 bp, Homo sapiens
gctggggggcactgaggctcccttgggggtggggagtgctatgaggatgtgttcagggcccgtgtgcttccagctctcaatccccttctcccacctccaccccaggtttgccaagctgctgctacgtcttcctgccctccggtccattggccttaagtgtctagagcatctgtttttcttcaagctcattggtgacacccccatcgacaccttcctcatggagatgcttgaggctccccatcaactggcctgagctcagacccagacgtggtgcttctcacactggaggagcacacatccaagagggactccaagccctggggcagggtggggggccatgttcccagaaccttgatggggtgagaagtacagggcagaaccaagaacataaaccctccaagggatctgcttgatatcccaagttggaagggaccccagatacctgtgaggactggttgtctctcttcggtggccttgagtctctgaatttgtcgggttctcccatgatttggggtgatttctcaccctctgtccttcccccagcacaaagcactggccttgcctccaggaccttgcttccttctcatcttgcctcattttgcttcccatctgaagagtggaaatggggaactcccccagaggtggatactggggggcaggcctcccaagctgatggacatgagagtagggccctgacaggccttcctcctctcaaacctggcagatgggggcctctctggaagagggaggggccctgtcactgtccagagtctctttttacacttcacctccttctgcagtcagactgaaatataaaaaaggtggtggtggtggtgaaggggctggtggagatgtaggaaccgatctgctatttttaatttcctgtgaggatagagacttgcagttagactcaaagaagtactgtactttcccaggttgactaagaaatgccagtggtggaggtgggtgtttgggaaaggcagggccctgaaatggcctgtccctagggctctccaagcactagccttcccagcttcccgccgccccccctatctcttcctgtctaacttggggaaggggcctgggctgtgaggacagggcccccacaggggatggtttcacgagtgtagtcccggaggccttccctttacagctctcctccagccctgggcacatagcataggctggggacacaggatcctggcctgagaattgaggggaggtggccagcccgcagaggtggggtgctggggctgcatgatttttgccctgcgtcccttctctttggggctcctttcccctctcatacataaaatcgctttcaaattaaaatcgctgttttctggactgaggtgactgtatgaggatgggcagcgccgtttcgggcttggggggggtatccggttgggagctccggacgcgatccctggacgccgccgccgaggttccgtggggcccaagaggtgcacgcagggtgggggacacaaggcaagctttgtcggggagggggggagagggtgtgccaggctgggggcggggccggccggaggaggaagggggggcggtggattctcaaaggcgccttgttcgctcgtgccctctccgcgccagcgggcggcggcgcctcggctcgctgcggccttccctccgggcgcgctgcg

SEQ ID NO: 15060 - DNA, 1285 bp, Homo sapiens
gaacttaagggaatgggagagcggcccatagaggtggacggagggcgcgattggagtaaagcggaccctgtgtaggtatagagttgagtcaagtggagtcactgcctctgtccctctggtcagcgtgatggccagaggcctgggggccccccactgggtggccgtgggactgctgacctgggcgaccttggggcttctggtggctggactcgggggtcatgacgacctgcacgacgatctgcaagaggacttccatggccacagccacaggcactcacatgaagatttccaccatggccacagccatgcccatggccatggccacactcacgagagcatctggcatggacatacccacgatcacgaccatggacattcacatgaggatttacaccatggccatagccatggctactcccatgagagcctctaccacagaggacatggacatgaccatgagcatagccatggaggctatggggagtctggggctccaggcatcaagcaggacctggatgctgtcactctctgggcttatgtgagtctccaggggatgggagagagaagggctggttctggattgttgggaaactccacagtacttgaccttgactctccctcaccaggcactgggggccacagtgctgatctcagcagctccattttttgtcctcttccttatccccgtggagtcgaactctccccggcatcgctctctacttcagatcttgctcagttttgcttccggtgggctcctgggagatgctttcctgcacctcattcctcatgctcttggtaagtaacctctgacttctacctcaaatctaacctatttcgttctttggaggaaaagggttctttctcctttatgatccctgacctttcgatattcccccaaatacacactcattgtgtcagatattccctcatctggttttccccccttcttccagaacctcattctcaccacactctggagcaacccggacatggacactcccacagtggtgaggaagagacagatggggatgggagttggggtgctggggaaggtccgtctctccctattcctcacctcccgcacttgaggaggaggagtctggaatgcacatctcccttaatgtctcaatgcctccattcccaggccagggccccattctgtctgtgggactgtgggttctcagtggaattgttgcctttcttgtcgtggagaaatttgtgagacatgtgaaaggaggacatggtcacagtcatggacatggacacgctcacagtcatacacgtg

SEQ ID NO: 15061 - DNA, 2468 bp, Homo sapiens
cccaggaacaactttcctgaaagctgacttgcctgcctcagaatctcctcatcttatggccctcaggagggagaggacatgttggaagatctgttctccactctgaccaactcttttcttccctcagagcgttctaccaaggagaagcagagctcagaggaagaagaaaaggaaacaagaggggttcagaagaggcgaggagggagcacagtacccaaagatgggccagtgagacctcagaacgctgaagaagaaaaaagaggcttaggtaagggccagagttggtgataaatttgggcaagggacatcatcacaaatcacatggaatatgtgctgtgggtaatggcaggtatctgagaaacactaaaggactgggtgtaaagtggtctctgaggggaggtgtgagaatagctgaccaagactggaacaagtggtgatggaagcctctgatcattttctcttcttgtcctgtacaagacctgcgtgtgtcggggtacctgaatctggctgctgacttggcacacaacttcactgatggtctggccattggggcttcctttcgagggggccggggactagggatcctgaccacaatgactgtcctgctacatgaagtgccccacgaggtcggagactttgccatcttggtccagtctggctgcagcaaaaagcaggttggtgatgtctgccaaacacagctgcctcaaaccctttatctctcctcactcaccctaaacccaaacagcctcttattagttccaaacaattcatactgtcattgacaagtcctctagaaatgagggggaagaagttctggttactttgtcctttagctcagtatttcttaaactggtctataaaccatctgaatggtttagtggagtcttacacacacacgcctactcaatcagaaagtctgtggaaaggacctctgatctcttaagatttttcagaaattgtctattctagactgctccctcttctctttttattttgatgtttagtttccaaatccatgtcccctatacctataccccaccagccacttctaaaccactgataatctttagctattggtgagtgcctttttctcttttctgcccatcaggcgatgcgtctgcaactactgacagcagtaggggcactggcaggcacagcctgtgcccttctcactgaaggaggagcagtgggcagtgaaattgcaggtggtgcaggtcctggctgggtcctgccatttactgcaggtggctttatctacgtagcaacagtgtctgtgttgcccgagctgctgagggaggcatcaccattgcaatcacttctggaggtgctggggctgctggggggagttatcatgatggtgctgattgcccaccttgagtgaggggtggataaactacccctgccccaaacctctacccctaactccaggtcaggggtgcgtagaggttgggggccctggccagggacatctgccaaaggaaggaactgtagcctgggagaatggttactttggcattagggccttcaagggctggcagtcttacagaggctggagcggtgagaatgagaggccagagggaccatagtgttgggcactgtctgaccatgttgcatttggaaggctaaatggggccatgaagaaggctggaagggacagggggtgatggcagcctacctggtgtcccctaccccacctgttctcggagaaccaagttgctacacaggaagttctccaaggtccagtttcctttctcccaccagttggtggaggcttcagggaagaccagagtcctggacagagagggtaacaggaggagtcggggataaacatcaaacatcaatcgtgtgtcctgatttgggagtgattggggggatggggtgggagagggttagttggtattctcatggcctgattttttttgtttctattccttttatatcactgtgtttgaatcgagggggaggggtggtaaccggaaataaagacctccgatcttccgccccacatgcagtctttgtctttttggggggaatggggccccttgtcttctccacacccggggcccctaagcagcagtgtcgggccacgccccctcggtgggaggtcggcctgcgctggtggccgcagatggcctaaggctggcgggcctttgattggccccggctttgcccttgccacgcccctctgcgctgggattggcttagtgctgggattcccacccacccacagcccgccatggcgtctcagctccagaaccgactccgctccgcactggccttggtcacaggttgagggggttctttccccgggcggtttggggtattggagtgaggtcaggggcgtgcccttggagtgcgcggccgctgtgacctctggccccttacccacattttactttctgccctgtgacctctgatccctgccctctcctccccgtgcccggtccggcgtgttctgtcctacctca

SEQ ID NO: 15062 - DNA, 2468 bp, Homo sapiens; identical to SEQ ID NO: 15061

SEQ ID NO: 15063 - DNA, 1102 bp, Homo sapiens
ggaagcagccttcccaagatcttcactatggatttccttggcagagctcactgtagcctgtctccagggacttcaccctgccttttctgggcagccccattcttgtctctctgggtttccctgaaaatcttgagaaataccaaagagatattcaccacccttctgcctatgtttaccatttgttgcttcccccagttcctctcatacagcaaaagggttgcagcttcatgccctgtgtttggttccccacatctaggcagtgacgaagatccgagagtttatcctccagaagatttattccttcaggaaacccatgaccaactatcagatcccccagacggccctgctgaagtacaggtcacaaccccaaggaagtgcatgggatggcctttgagtttttgagcggcctagtgtgggcatctggtttcttgggagacaggtagactgacatgttcctgaccccctaggttcttctatcagtttctgctgggcaatgaacgagcaacagcaaaggagatcagggatgaatatgtggagacgctgagcaagatttacctgtcttactaccgctcttacctggggcggctcatgaaggtgcaggtaaggtcaggagggagaggtattcctgggcacatggactgggaggaggggacatccctgggcaaggaatattttattgtgttgtgggaagagacggttatcagttctcttttctctttccttagtatgaggaagtcgctgagaaagatgatctaatgggtgtggaagatacagcaaagaaagatatcctagtactggggaaccctcatgccaggccttgagagtgggaggactttcgactccagccaccaatgcactgctccttaccttttcctatgggactgaaaccttttagaatgtgatgaaagctatagcctccctccccagaaagatgcacacattattttgacacatagttttgcatatgattgcaagggagggagagacaccctgaagcccattcacagatgtcagcacgtggggccctagtactgggaaagagggctggctaggccacgtctgcctgtctggggtccccacagatagtgagtctttgggccca

SEQ ID NO: 15064 - DNA, 1616 bp, Homo sapiens
tgcgtgatcttggcttgctgcaacctccacctcctaggttcaagctattctgctgcagcctcccaagtagctgggattacaggcacctgccaccatgctcagcaacttttcttgtatttttagtagagacagggtttcaccatgttggccaggctggttttgaactcctgccctcaatgtcatctgcccacttgggcctcccaaagtgctgggattacaggcgtgagccactgcgaccggcccaaagttaaccttctgtcgaacggtttatatctggaaaggtgggtgaggaaagggtgacctaggggattgcaaaatagattattgcagatcctacctttgtgagctttttgaatgaggctataaaggaatttaaaaatcagattcaacactaattccgaaacccctcacttcattcagggtgtgggccgaagatatgctcatgtggtgttgaggaaagcagacattgacctcaccaagagggcgggagaactcactgaggatgaggtgaggacaaggaagggggctgggggtggggtcagcctcagaaaggggtccatctagatctgaccttggtctgcctgccaggtggaacgtgtgatcaccattatgcagaatccacgccagtacaagatcccagactggttcttgaacagacagaaggatgtaaaggatggaaaatacagccaggtgtgtactgaaatgagggcaggattagaggaagggtggagggtcctaacagaattgggcataggaggtcaggggataaaacatcccttgccccctcctctgaatccaggtcctagccaatggtctggacaacaagctccgtgaagacctggagcgactgaagaagattcgggcccatagagggctgcgtcacttctgggggtgagtggggggtctcatctccctgcctacctcgactcagcattcctcctactcgctcttctttttccccaaccttttgtttctgctgtgcatgacctgtgactcttctctttttacctgcagccttcgtgtccgaggccagcacaccaagaccactggccgccgtggccgcaccgtgggtgtgtccaagaagaaataagtctgtaggccttgtctgttaataaatagtttatatacctatggcttcctgtcctttctgtccattctaatagggaatgttaaagtgctgggtcctttttccatttagagctgccctactcagttgcccacacagtgctattagttttagcagtggtgatgctgcagaccccccagtctccctatatgtagctagtgatgtccctctctgtaaagagaaatgtgagggtaaaacagttcagccttgaggggctgacccagaccagtttagagaccaacaccctggggttggtgtgcagcatcattgtggagtgggttagctgagcctagccagttgcagttaaggtgagtttgcaggtcttggtcactctgggtttttttgtttttgtttttgttttcttttaaggggtcatctagtcataagggaaaatccttcgggctgtgaccgaagcaacaaaggcaaaaacgcggacgttggttatgaagggtgtggtctccctggtggagtacgtcggtgggttgggatg

SEQ ID NO: 15065 - DNA, 1114 bp, Homo sapiens
agctggtcttgcgagggggccgttgggggcaatgggagagaagcacggaaccccagagagaggctgagcaggaaggaggccaggttttgcacagcgaggaagtgcctcttctgtacttgggccgggtgcactggcgcgtgaacccctctcggacaccggggggcaggcaccgcgtatcagaggagcagtggcctcacacctggggcccctttccaccctatgcctcaggcacggggtatgtgctgtcagcgtctgctgtgcagctcattctcaaggtggccagccgggcaccccttctcccattagaggatgtctttgtgggggtaagtgcccgacgaggaggcctcgccccaacacagtgtgtcaagctggctggtgccacccactacccgctagaccggtgctgctatgggaaattcctgctgacgtcccacaggctggacccctggaagatgcaggaagcctggaagctggtgggtggctctgacggggaaaggactgcgcccttttgctcctggttccagggagtcctgggcatcctgcggtgtcgagcaatagcctggcttcagagctgagagtgcctggggccacaggaaaggcaggaacaggaccttctctctcccaggcccaacgcaggggccctcactggctgcagctgatctgtttccttataccagatcctcagtctcactaaagacagcgatatgggagacacccaggggcctggcccgccagcccaaaagatggtcatcgggaagagaaaaagaaaaaaatgctgcagttgttctctcaagctagggcagaagaggggtgtcaagctcctcaataaacttgtctccacttcttcgagtgcagtgtggtcttcaccaggacccccagaacaccacaaacctggagagcccagaggctgccagaccctgctgcatgggaaggacatctccagggacatgggagagaggacagcctctctgaggaggaaggcccctaaaaggcaaagctaaggccacagcagccacaaggtatggggtgggggtagaggcaggacactgacccctccgatcctagaatggcctcatgcttggcaagggggaggggaacaggtccacaagatgat

SEQ ID NO: 15066 - DNA, 1100 bp, Homo sapiens
tggtgcttggagatagagtggttcaggttgtgtcagaagtggcctcggattctgcagtcccccgagctagagtgtgctatgtgttcagagtaggcttcaaaggccataccccctcattgcccctactcaccacccctagacctctctgctcaccctcagccacactaggtgccacccagtcgcagagcaaaaggagtttgcagggagggctaggaaatggtgagtatcagaaaaggtgtcctctgaggggtgggtaaactgcagtttagccctccccaataactgcatttctctatttttttctccttctttctctccctcatgcccctcccaacccctcatctccctgtcttcctcagtggtactgactgtcctcacccacacccctgcccctcgagtgagactgggacaagatgctctgctggacttgagctttgcctacatgccccccacctccgaggccgcctcatctctggctccgggtccccctccctttgggctagagtggcgacgccagcacctgggtaagggacatctgctcctggctgcaactcctgggctgaatggccagatgccagcagcccaagaaggggccgtggcatttgctgcttgggatgatgatgagccatggggcccatggaccggaaatgggaccttctggctgcctacagttcaaccctttcaggagggcacctatctggccaccatacacctgccatacctgcaaggacaggtcaccctggagcttgctgtgtacagtgagttgggggacagaggtctccaggggtagagggtgggcactggattgtggggaccgtaatagggggagggatgatggataagagggtgcctgggcaagtaagtagagatagaaagaggttcctgggagttagaggggtaatgggaggctagaagtttcctggaaatttgaggggctttgacatgggtatttctgtgacgcaccaatggagagacagtgggttccctatttcaggagaagaaacctaaccttctttagttctgaggaagccagcaggcaaactgagggtctcttagggaggacagtatggactgatttccctatgctcatttcgtcctct

SEQ ID NO: 15067 - DNA, 1197 bp, Homo sapiens
ttctgagctttagtttcctcatctgtcaaatggggttgagaggaatacctacctcactgttgtggggagttacacagataatgagcgtgaacatatttttgagttgtaacgggctgtgtcgttatgagatgttatcattattcttttctctttttcttcccagagacccccccggccgccctcctcctttctttgttcctgtggctgggggggtatcccctccctccacaacatggagccatctcctctgtctcccagtggggcagcacttcccctgccgctgtcgctggctccgcccccactacccctgccagcagctgcagtggtacatgtgtccttccctgaggtgaccagtgccctcttggagtccctcaatcagcagcgtctgcagggccagctctgcgatgtatctatcagagtgcagggccgggagttccgggctcatcgggctgtcctggctgcctcctccccttacttccatgatcaggtcctactcaaaggcatgacctccatctcgctgcccagtgtcatggacccaggcgcctttgagactgtcctagcctccgcttacactggccgcctcagcatggctgctgctgacattgtcaacttccttacagtggggtctgtgctccaaatgtggcacattgtggacaagtgcactgaactactccgagaaggccgggcctcagctaccaccaccatcactactgctgcagccacctctgtcactgtccctggtgctggggtgccatccgggagtgggggcactgtggcccctgctaccatgggctctgcgcgctcccatgcctccagccgggccagtgagaatcaatctcccagcagcagcaactacttcagccccagggagtccactgatttctcatcttcctcccaagaggcatttgcagcttctgcagtgggcagtggggagcgtcgaggaggtggccctgtattcccagcccctgtcgttggcagtggaggggccacatctggaaagctgctgctggaggcagatgagctgtgcgatgatggtggggatgggaggggggcagtggttcctggggctgggctccggagacccacctacacaccccctagcatcatgccacagaaacactgggtatacgtgaagcgaggtggtaattgcccagcgccaacacccctggttccccaagacccagatctggaggagga

SEQ ID NO: 15068 - DNA, 1099 bp, Homo sapiens
aagaggaagaagcagcagcaggtatgtcaagggaacattctcctcacctgtcatttctgttttgttaggcatgagccacctgtttgaaacctttcccttcctcctcctagtgtcctctcagcagtattttttccccctcattctcaggctaccctctccccttttcttcttttccaggtaaagatggagacaagagccccatgtcctcactacagatctccaatgaaaagaacctggaacctggcaaacagatcagcagatcttcaggggagcagcaaaacaaaggacgcatagtgtcaccatcgttactgtcagaagaacccctggccccctccagcatagatgctgaaagcaatggagaacagcctgaggagctgaccctggaggaagaaagccctgtgtctcagctctttgagctagagattgaagctttgcccctggataccccttcctctgtggagacggacatttcctcttccaggaagcaatcagaggagcccttcaccactgtcttagagaatggagcaggcatggtctcttctacttccttcaatggaggcgtctctcctcacaactggggagattctggtcccccctgcaaaaaatctcggaaggagaagaagcaaacaggatcagggccattaggaaacaggtaataacaagaggaggaggaagagggaagccaaggagggattgcaggggactttcggagagcaatactggggaactgagtctgctgggagagactggactgcccccctccagcctcagtcttcccgtacccctccacatatttatgtttctgtttctagctatgtggaaaggcaaaggtcagtgcatgagaagaatgggaaaaagatatgtaccctgcccagcccaccttcccccttggcttccttggccccagttgctgattcctccacgagggtggactctcccagccatggcctggtgaccagctccctctgcatcccttctccagcccggctgtcccaaaccccccattcacagcctcctcggcctggtacttgcaaggtaagaaggggagggcgtgtttcctctgacaatttgttctctttcattggctgtttcagctgct

SEQ ID NO: 15069 - DNA, 1198 bp, Homo sapiens
gggtcgggattggctggctctggaggcgcaggtggtccttcttctactgtcacatggtgcgcgctgttttctaatcacgtggctgccacccaggtaagaagaggccgctcttcctggggttgtttctccgtgtgacgtgtggcctttgagatcaactctcctgtaccagcgtaggccgcatgagtggggggcgggctcccgcggtcctgctcggcggagtggtgagtgaccggccccgccccgccccttccggtcctcgaagcctcgaccgctacccgcaccctaaatcccagaggttggccccctgaggtgtgagtgaaatgagcttttgctttattttccaagtttctctctcaccttcaggggcattcttcgggggtgcatcagagggagggcagagcctgaggatctaagcgaaggcttccccgggtgtaatttcctgggctgtttgtgaggagagatcgaattcgcctcctgctctcaggcctctctgctcctgtcttttgtttggatgccggcgctgctgcctgtggcctcccgccttttgttgctaccccgagtcttgctgaccatggcctctggaagccctccgacccagccctcgccggcctcggattccggctctggctacgttccgggctcggtctctgcagcctttgttacttgccccaacgagaaggtcgccaaggagatcgccaggtagggacctcgatgtgcagcgagaaaggatgatcatgaagggacagttgggggtggggcagaagagtgctgctttctcctttctccagctctggaagcctgtctctgggctgccagtacaaaaactggggttatggggtactctgaatgggactgtctcttcactccagggccgtggtggagaagcgcctagcagcctgcgtcaacctcatccctcagattacatccatgtgagtcataggagttggggggttaacctaactgtaggagctgactgggaacctctttcctgggggaaattctttgctccccacaactctccccctctgacctttcagctatgagtggaaagggaagatcgaggaagacagtgaggtgctgatggtgagaaacatttcccccacccaacaaaatatccccaatccctgacccctttagcccttacccctcttctgagaaactgaactcaatcccactccttgattcaaccatgtttatc

SEQ ID NO: 15070 - DNA, 1271 bp, Homo sapiens
accagtttttataaggtgggttaagggtccactctaattcagtatggcctcttttttttgagatggaatatcgctcttgtttcccaggcttggagtgcaatggcatgagctcagctcactgcaacctccgccttccaggttcaagtgattctcctgcctcagcctcctgagtagctgggattacaggcacgtgccactatgcccagctaatttgtttttgtatttttattagagacggggtttcactatgttggccaggctggctcgaactcctgacctcaggcaatccacccacctcggcctcccaaagtgctgggattacaggaatgagataccatggctggcctcttcttagtttgattacatttgcagggatcctgtttccaaataagatcacattcacaggttcagggtagacatgagttttggtgggatactattcaacccagtacaccgtctcaccttatgattgctgtctgtatcccactttcttactgtctctcctcttttggtgtctctctgtcccttccccctttaacatcatgcccaccccaccatgccaggacaacagccgccgggtagacaatgtgctaaagctgtggatcatagaggcccgggagctgccccccaagaagcggtactactgtgagctctgcctggatgacatgctgtatgcacgcaccacctccaagccccgctctgcctctggggacaccgtcttctggggcgagcacttcgagtttaacaacctgccggctgtccgtgccctgcggctgcatctgtaccgtgactcagacaaaaagcgcaagaaggacaaggcaggctatgtcggcctggtgactgtgccagtggccaccctggctgggcgccacttcacagagcagtggtaccctgtaaccctgccaacaggcagtgggggatctgggggcatgggttcgggagggggagggggctcggggggtggctcagggggcaagggcaaaggaggttgcccggctgtgcggctgaaagcacgttaccagacaatgagcatcttgcccatggagctatataaagagtttgcagagtatgtcaccaaccattatcggatgctgtgtgcagtcttggagcccgccctgaatgtcaaaggcaaggaggaggttgccagtgcactagttcacatcctgcagagtacaggcaaggccaaggtgagtgttgtgccctcagggaaaggtgacttgggaatgggcacttgcttgggggttagtgaggacagggcaaattcacgagat

SEQ ID NO: 15071 - DNA, 1485 bp, Homo sapiens
gtctgtttttcttctcctcctctccttgtctctctcccacacccctccatctctctcccacgtgtctctcccctcaccttctctccccctccatttctctctccctaatctgtctgttccctctgccatggcccccttcttcaagcagcctcccatcttgctcctgcggtccctccttccctgtctctctcacccctgtttccacaccctcacctcctaccacccccctcagcatgttccctggaagctgagggtctctggggctcagtcccggtctctctctttctctctctctctctctgtctccccgacccttccccccagcgtgttcccgagggagctgaaggaggtgtttgcttcgtggcggctgcgctgcgcagagcgaggccgggaggacatcgcagacaggcttatcagcgcctcactcttcctgcgcttcctctgcccagcgattatgtcgcccagtctctttgggcttatgcaggagtacccagatgagcagacctcacgaaccctcaccctcattgccaaggtcatccagaacctggccaacttttccaagtgagggaagcttcaggagtgggcagggcagggagtggcagggcagggagtggcagggctgggggtcggcaagaagggtctcctgagtccccagagatcctgagatggggaggctatgataccttgtgtgtgtgtgtatgtgtgtgtatgtgtgtgtgtgtgtgtgtgtgtgtgtatgtgacctttatcttctgcattcttggctaggtttacctcaaaggaggactttctgggcttcatgaatgagtttctggagctggaatggggttccatgcagcagtttttgtatgagatctccaatctggacacgctaaccaacagcagtagctttgagggttacatcgacttgggccgagagctctccacactgcatgccctactctgggaggtgctgccccagctcagcaaggtcagcagatcccctctttgccctatccccagatggctccagaggttcctggagcctgagaaactaccctttgaagattttttttctccccttgtttctcgaggtgtcaccactactatcccaactcaggccccctccacctgcaccctcagaggccctcttagagctgggcactgagcccccaggtaacagcctcacccttccaggaagccctcctgaagctgggtccactgccccggctcctcaacgacatcagcacagctctgaggaaccccaacatccaaaggcagccaagccgccagagtgagcggccccggcctcagcctgtggtactgcgggggccatcggctgagatgcagggctacatgatgcgggacctcaacaggtgagcaccctgggacagccaggcctgtgccctaggagcccttctcctattctagatactcctcactgggccccacatgcatctctctagggcttgaaagaagggaggaaaaagcaccaagttctcaggg

SEQ ID NO: 15072 - DNA, 1135 bp, Homo sapiens
gcgtgaccggcacatcatgctgaccttcagccttcggccttttggctgtggcatctgcaacaagcgcttcaagctgaagcaccatctgacagagcacatgaagacccatgctggagccctgcatgcctgtccccactgtggccgtcggttccgagtccatgcctgttttctccgccaccgggacctatgcaagggccagggctgggccactgcccactggacttacaagtgactgctgaggctatacactagcttctagaacaagataaccactgctgctgatggatacttttccctcactgccatggcacaccagtcatggatcttgtaatcatgccaagagaatagatacattatggacctcttgttcttagatatgggcctctcagcctggcagatgtggaaactcaaatttctcgtcccactccaggttttggctagccaaccctgcaggaaagtggtttataggccattcatacttaagttgatcacttgcccatggtggacatttttgtggtggtgatgtccattaaggaaaccagattttcaattatttagtgagagaagagttagagcaaaagacagtggtaaatgttttattccgtctccatgaggaattgaaggagttggtctccacctagagatacatttgatttacagcttaagtaattcagaggctaagctctaagcttttttctctcattgctggaatgatttaagcagaagtccttttgtgtacttttaaaattgtatctttccaggagcccctcagattgtaccttgctttctcaccaatagacaccttcccgacacttttttaatgttgtagctgagcactttaacaagttgagcattccatgtttcattcttagaaccttctttaatagagggtcttccctcaacagcctgtgcctctggtctacctttgaccaccactgataactaatatattggtcacaatgactggaatgtgactagtgatctcaggagatggcactgtcctaaagtgctgtcagggtggcaccactgctctctgaacaacttaccttggtcagagggactcaggtttgggacagcacaagctgaaggctggagagtaacttgcatagtaggaccatacctcttcctttcccat

SEQ ID NO: 15073 - DNA, 1309 bp, Homo sapiens
cttagccctgtctgctaggcgctggggagactgataacttggggaggcaagagactgggagccacttctccccagaaagtgtttaacggttttagctttttataatacccttgtgagagcccattcccaccattctacctgaggccaggacgtctggggtgtggggattggtgggtctatgttccccaggattcagctattctggaagatcagcaccctaagagatgggactaggacctgagcctggtcctggccgtccctaagcatgtgtcccaggagcaggacctactaggagaggggggccaaggtcctgctcaactctacccctgctcccattcctccctccggccatactgcctttgcagttggactctcagggattctgggcttggggtgtggggtggggtggagtcgcagaccagagctgtctgaactcacgtgtcagaagcctccaagcctgcctcccaaggtcctctcagttctctcccttcctctctccttatagacacttgctcccaacccattcactacaggtgaaggctctcacccccatccctgggggccttgggtgagtggcctgctaaggctcctccttgcccagactacagggcttaggacttggtttgttatatcagggaaaaggagtagggagttcatctggagggttctaagtgggagaaggactatcaacaccactaggaatcccagaggtgggatcctccctcatggctctggcacagtgtaatccaggggtgtagatgggggaactgtgaatacttgaactctgttcccccaccctccatgctcctcacctgtctaggtctcctcagggtggggggtgacagtgccttctctattgggcacagcctagggtcttgggggtcaggggggagaagttcttgattcagccaaatgcagggaggggaggcagatggagcccataggccaccccctatcctctgagtgtttggaaataaactgtgcaatcccctcaccctgacttagtttttgtattctctgctacccctctttccatcaggccagactgtgggaacctgggcacgcctggcatacatctggcttattactgaataaaacctcacactaggcctctagaatcccatagaggcctgagtatggttctgcagcccccactccgatggaaggcgttcgcccctccccatgaacttctctcatctcgttgggtttcatgcagtttccaccctttaggaagtctgggaggtcctttagctacagagctggtggagcagctgcacatatctgaggacccccacaggctacctctgac

SEQ ID NO: 15074 - DNA, 1203 bp, Homo sapiens
aagtttgtttttttttttttagaaacgaggatccaattaaggttttttcattccattctgttgctctgtcactttggtctctgtttcagaacaatttttcacctctccacccagccccagcctttaaaacatttttgtaattatgtaacattttactttgacaaggcaggcctgtgtctcatctcttaagctctggccacagcggtccggcctgccttttctcttagccttagaccctgagctgccgagaccctctgctcctcccccaggccccagatctgagctgggattagaatccgcatcagggagggataggctggggtcagcttcgggattccaacaaggagtagggagagctggggctgaggatggctgggctggggttgtggtccagcttagaatcagctcgaagctgatgtccgggctggctttagggcagagtcagttgggactcagggatgactcctgggatgacttaggggtacagacaggtgttggggaatcagtcctcaccctctgtattcccccaggtctttggcattctgaaggccccgttccgtgagaaggggggtgaaggtcccctggtgcggctggaggagctgtcagaccagaagaacgccccctaccagcacatgttccgcctgtgctaccgcgtgttgcggcattcccaggaggactaccgcaagaaccaggtgcgccgctgccctgctggcccactcgctggctgcacgttccttcctcagcaagcgatttcctcaggcacatgtgctgtgccaggcactgttttggggcctagggtccagtagggcaccagacagcagggccgggttcatgggaatgggacctggcccggtgctcacaagggccttgcactgggttagatgctctgctgctgagcaagggtcctgctctttcattctgcactgggccctacaagttatgtagccaatccttccacacaaacaaggtccctgccctcgtggaggtttcgctctggtgggaaacagcccacaagctaaataactatgtaatgtaagccactcttctgcccagcgatgcttcctttcctggacctctgcctttctagggtattgggtccttacctcggggtttgggggcagcgttccagagcagagctgggcccttggcccacctgtgactctctgtgacccccagcctgtctgcccccccaggagcacattg

SEQ ID NO: 15075 - DNA, 1191 bp, Homo sapiens
accccctccccggccggcgcctgctcctccctcctcccttgcctgggtagaaactctgctggttgtgtgaactattcctgcacctgttggtaactgccaccctgaatagcactgggtggctcagcactgggaggccctagcctccctagcccttctctgggatcccctaaaatttggcccactctggcaacaatgggaatgactccttgtaccactagaggcccccaagaccttctccagtgacaaagtcagaacctgtattgaaccagttgttaaatattttgaatatcacctcggcccttgcgcttcctcaccctgtccgtctgaacccccatctagccttcccggaccccagggtgatgccctggggctttccctccttggggagctgggagtccatcccacccatctctaagccttgggagggagctagttccagggtggcggtgctgccagctggggaaggggaagggtgggctctgtccttagagggaccagcctctgagaccctcttcccaccgctggctgtcaccaccccaggttcctggactacctctctgacctgtgtgtgtccaaccacatcgccatccccgtcacccaagagctcatctgcaagtgtgtgctggaccccaagaacagtgacattctcatccggaccgagtgagccctgtgccccctgcccgcacttgggctccacgctgctgacccccagctgtcttagagcttaggccctgtctgggttcaggctggaactggcacccttgctctctgcagctgtgaactctgtgcctgttatgtgccccgctgtgtgcctggcactgtgggggagtggggaaggggcacagaaaagaatgagccacggaccctgcccttgagatgcatatggtctctctgggtccccgtggtggctggcactgtgtggccgggtgtgctcagggaggggtccaggcgtagtgccctggacctggctccctgtgacaggttgctggtggtctgcaggcttcggcccgtgaaggagatggcccaatcccacgagtacctgagcatcgagtactcagaagaggaagtgtggctcacgtggactgacaagaataacgagcatcatgagaagagtgtgaggcagctggcccaggaggcgcgggccggcaacgcccacgacgagaatgtgctcagctactacaggtgccccgc

SEQ ID NO: 15076 - DNA, 1279 bp, Homo sapiens
ctccagagcccccaggaagtcatgtctgtgaggaggaggcagagggcctggtattgccagggcagcacagagcttcccacgttcctcattttggtatcccctctatcaaggttgcacccctttcaccacctccccacctccccctcctccctctcccatcttgccctcaccctccctggccaaggctggctcttctcatctcactgccctcccctgtctcccaccctttccctcatctttcagacgtccctcttcccatgaagacctgtcctggctgagccttagccaggagggggagaattgcaagtactggttatcacagacaggttttccgttcacctttctaactcagaattgcagctggcgcatctttaacctaatccctttgccactttactgagtcctcaccaagtctagtgcccagtgccagcagcctcccggctgccatctgccgtgtcctcacagtcctccctgtcctgcaggtaccagctgaagctctttgcccgcatgtgcttggaccgccagtacttggccatcgacgagatctcccagcagctgggcgtggacctgattttcctgtgcatggcagacgagatgctgccctttgacctgcgcgcctccttctgccacctgatgctgcacgtgcacgtggaccgtgacccccaggagctggtcacgccggtcaagtttgcccgtctctggactgagatccccacagccatcaccatcaaggagtgagaggggtggaggcagggtgggcggggcaggggcagaggctggagtgggtgtatctcggggaccttcatgcctcatggcctccaccctcagctatgattccaacctcaacgcgtcccgagatgacaagaagaacaagtttgccaacaccatggagttcgtggaggactacctcaacaatgtagtcagcgaggccgtgccctttgccaacgaggagaagaacaagctcacttttgaggtggctgggggagtgcccaggggctgggggtccgtggagctcttgttggccccacactggcctcggtcttcacccaggagtcggctgtgggatccatgaccccacttccttctgtgtccccagccagtgcagggggaccgcatagaaggctgggattctccaagaggcaggctcctgttccaatgcctgggaaagggctgcctctccctgctccgctctccctcctgggaaccccgtcctcatgacgcccctttcgccctagtttccccagtcctggcctgccctccacgaagccccgcccctacg

SEQ ID NO: 15077 - DNA, 1105 bp, Homo sapiens
gcagcgcttacctcaccaggctcccgtctgcttctcctcttggcttctggggacgtctagctaacaccagtctgcctcgctcttttctggaacacactgagtgggtgggagagccttgggtctctggcccctaaggaaccccttgcttgagggctggagtcccttgaactgtcattcatgttaaacccagtatttgcagaaactgcccgtgtgccaggcctaggggtacagagacccctccctgcccttagtgtgcaacccagtcgggggcagaagcgtgatgacccttcactgtggctggacagtggagggctggcgatccaggaccagggaaggtttcctggaggatgtgacactggggacagagccaggggataaggccaggcactggacctcctgatgatctcatccatatcccctccagccagccccctggggatgccacatggagctgctgcatttgtggacacctgcagtggggacaagatggactgtgtctcagggctctcggtgcctgaggtcctggaaggtgagggtggtgtgtgtgcaggagtctgtgtggggtaggaggagcaggcagcccgggcctcagcacactctccgcttgcagaggacagggagctggacagcacagagcgggcctgtgacactctgttgatgtgcatcgtcactgtcatgaaccatgggctacgcaacggtggtggcgtgggcgacattctccgcaagccctccaaagatgtgagcactcctgcccactcccaaacctgtggggcccaagccactgtccagatcagcaactgtggagagtcctgtccttggcctcgcgtcagatattcagggttgaaccccctcccccgaacttgtatccacttttccctgctttccacacctggccaattccatgatattactgcttagctgccccctcaccctcccattccataaggaaagactttggcaaccaaactttgccccagggctagggatggtgaccactggctttcctagcccacagcaggtgggcagagggcggagctgagtcagctttatcaggaggcctcatgatttggcttgggcagccacattcccgaatgtcaggccttcc

SEQ ID NO: 15078 - DNA, 1245 bp, Homo sapiens
ggcaacgcctaggctttgtggatgtccagaactgcattagccgctgaggagagccaccgaaggccccaacaggggatgctcatcactggagactgcgactgggaagaacactgccccctccctcgggttgggtggcccagccagctggccagcctccactcccactctgccagacaccctgacacccacccaggctttgaagagcatggagggggagcctcagagctgacagtcctgcttagagcccttaaaaagacttgaaagttcactgggactcagtttaccttaatgccttagcagaagataaatcctacctagagacctttgttccttaaagcaataactgacaactctttgtagtcctccttgtgggtagttaagagtggggtcacccctttaactccaagcactacattttggcggctgccggcctctgggggaggtggcagttatgctgttactagtgattttagggctttgttatttaacttatttcaagggtgctgtgctcagccctgcccatggctgtgcagctccctccgtgcctcagatctgctgtagccagtgcagacctcactgtcgtgtccatgccacccccggcatggctccaggtggcctggtgactccatgatggacgatcttgctcccaggacctgcctcttcccaggcttcctggggaagagttgtacgcccaggcaacaagggctgagctgcgcttgcgtggctgtttcatgaccgcttgtttttctccttttggtgtaatgttttacaaatcctttggcctgagaactaatatgttaattgccttaaataaattaatagaaatctagtccgttaaaaagggatgtgtttcctgcactcccccgggggctgtggggattaacaggacacactggcagaagacaggaacaagagcccctccctgctggcctggcctctcaggctctcaggagatacgctgagtgacatcctgtctcaagggtcctcccctgagatttgcctacccagaactgcatttcggcataactggtttctacggcagtcctgtcgattttattttatgcatttcagaacatcctgaggagtctagacacagacgaggttaagaacccacttccactttgtacccaccagggccgctgtgggcccagccctgtccctcacggttccagagagaaggatgctcaatatcagtaagagccaaggttccatggaataatgaggtgaccctgtgtgtgtcctcag

SEQ ID NO: 15079 - DNA, 1221 bp, Homo sapiens
tctctgactcagagcgataagccccgggcggggacttgttcccggtcagcctgtcccaggacagcccactccagaggcacaggagggtcaccaggcctgcggtgctgaattcacacttgccttgactttcagtctcgtcctgacacgattccaaaggtctgccatactcttcagaggagttcggctcgcaggaaaatgtgggcttcctttaaagggagggggagaagccagggtgatagcccagactctgccctgttgtgctggcagaaacggggagaagggttgagttttcatgaatagaaaacaagagcagcagctgtcaggcccagctgacaagcgtggggctggtgggctggggcatggccacgccagggagtctgtcacctgggaggtggggcagggatggtgtttcgggtggcgggatggggagcagcttggtccatgtgccttcagggggttgttacttgagagctccagggtgaagggagaaagcctgtgctctggctggctgggcctctatcctgaagagggaaggtgctagaaattagaacaagtgactgtaggggggaccgtctagaaacaccaggcccagacacacggtccctcaggtcaggaggagtgagcagccggcacagcctcctgggaggatcccgaagtagggactggggctgagagcagagaggagggtcgggcagccccagggcgggcgggcccgcctcagtgttgcttctcacagaagctgcgactctagaccaggcctgcagccagaacgccgattccgggagcttgggagccctgcgtcagggcccagagcctcgcacttgctgtgtgcgaagatcgccttgctttactgtgaccacagccccgacgcggggctgtttaacaagaacttcagcgcagccggcgtttctgttaccccggccgcggctcttggcggcgggagaggcgcagtggctgcaggctgccccctgccggccacaagggagcagcgtccgcgccgccgcccaccggccctcccgccagctcctcagcctgctccctgggaggcaggctccagaagcaccccgacggggggccttattaagtgcgagaagcctctccagcgagtcttccccgtgtgtcctcatctgcggcaggcaggagagggggagcaaacaggaaattccacagctgcctccagaaacattaaccacccctctctagtcttactggtattttttg

SEQ ID NO: 15080 - DNA, 1257 bp, Homo sapiens
gtgtgggccccagtgctagatctctccctcccttcgtctctgtctgtgctgttggcgacccctctgtctgtctccagccctgtctttctgttctcttatctctttgtttcaccttttccctctctggcgtccccggctgcttgtactcttggccttttctgtgtctcctttctggctcttgcctccgcctctctctctcatcctctttgtcctcagctcctcctgctttcttgggtcccaccagtgtcacttttctgccgttttctttcctgttctcctctgcttcattctcgtccagccattgctcccctctccctgccacccttccccagttcaccaaaccttacatgttgcaaaagagaaaaaaggaaaaaaaatcaaaacacaaaaaagccaaaacgaaaacaaatctcgagtgtgttgccaagtgctgcgtcctcctggtggcctctgtgtgtgtccctgtggcccgcagcctgcccgcctgccccgcccatctgccgtgtgtcttgcccgcctgccccgcccgtctgccgtctgtcttgcccgcctgcccgcctgcccctcctgccgaccacacggagttcagtgcctgggtgtttggtgatggttattgacgacaatgtgtagcgcatgattgtttttataccaagaacatttctaataaaaataaacacatggttttgcacccgggctccacatccactgagggtcctgccatgggaccacaggctcagcctgcagctggagggcttagacctagagggaagcgggaactgggctctggagacccagggcttgggggctgtggagactgctccctaggctgggatctagtgtggtgtggtgaggccttgggcatggaggggccagattcccaggtaaggggcagggacattgcaggaaattccaggaatcagcacctagtagtcccctaattagggggtatgctctgtcccctgccctgcagccctgggagggtaacatttctgccttgcctgtcctctgtctcacacccctcacacctgggactgcccttccacccctgcccccataacctgtgcctctctccttccagccaggaagtcctcttcttgagaagttagcttcccgggctgccagcactcatagccgtcccctcctgcttgtgttggctccaggctcgggtgctaagaagatgtgtgtctgtcctggagatcagtgtgttgttatgtgtccacgtgggcccacaagtgcacggcacaggcatggccgtgt

SEQ ID NO: 15081 - DNA, 1166 bp, Homo sapiens
tcatatgagtcttgagagtttcgggttcagtcaggattccctgtaggtcaattatgtctgagttatgccggagaccttttttaactccagctgttagattcagtaagtccctgtggggtccgggcagctggacttttagccaactagctgggtgatttgagtgtggggctacaaggtgccaccacccagtaggatggtccggggcaccgggtggcatgttctgaggcctgctttacggtgctgtcattgccagatagagcggatgcactggccggggagcgggcagcagctgccccgctccatctgcagcctgccctgccaaccgggtgagcggaagaagacagtgaagggcatgccttgctgctggcactgcgagccttgcacagggtaccagtaccaggtggaccgctacacctgtaagacgtgtccctatgacatgcggcccacagagaaccgcacgggctgccggcccatccccatcatcaagcttgagtggggctcgccctgggccgtgctgcccctcttcctggccgtggtgggcatcgctgccacgttgttcgtggtgatcacctttgtgcgctacaacgacacgcccatcgtcaaggcctcgggccgtgaactgagctacgtgctgctggcaggcatcttcctgtgctatgccaccaccttcctcatgatcgctgagcccgaccttggcacctgctcgctgcgccgaatcttcctgggactagggatgagcatcagctatgcagccctgctcaccaagaccaaccgcatctaccgcatcttcgagcagggcaagcgctcggtcagtgccccacgcttcatcagccccgcctcacagctggccatcaccttcagcctcatctcgctgcagctgctgggcatctgtgtgtggtttgtggtggacccctcccactcggtggtggacttccaggaccagcggacactcgacccccgcttcgccaggggtgtgctcaagtgtgacatctcggacctgtcgctcatctgcctgctgggctacagcatgctgctcatggtcacgtgcaccgtgtatgccatcaagacacgcggcgtgcccgagaccttcaatgaggccaagcccattggcttcaccatgtacaccacttgcatcgtctggctggccttcatccccatcttctttg

SEQ ID NO: 15082 - DNA, 1267 bp, Homo sapiens
tggacagctgctctccccgggctgggccaccagcatgggaaccaggaggtctgggttccacccagtccttcacacttggctctcccagccacccctctgttccttagggtgacacaagctagcccctggatctatttcctggttaggggcatgacttctagtaaaaactctgtcattgctacagggttatttttaggtttaaatatagaaataaagattggagactcgacctgattcctaagcttgtggagggtgattgcttctcaggtatcactcactgcctcttttcagtgcctgacctcggtgcagccgagggatggaagtctccccaccaaccacagttatattcatgcggtgcagtttggatgttgattgggctaagccagtggcccctgctttccagggcagtgctgggttgttgaggggacaggaagagggaggagagaggaagaagcagtattagtggcgaaggccaaaatagtaacagctgcaaacaaagacacttgcccacttgggtcttgtgctggaaaactagagatggcggcatgtagggatggggaggagaggcctgggggtctgcatggttggggcttgctggatggaggagatccaggcaagcgtgagcctggtggctggtcccctggctctgggagaggaggaaggtcagggtggggtattttctaggctgagcagggaggcccaagggctgatgagatgtgcttgccttgtcgatgggacttgctgctgtgagctgctgtggcctttgcacgtggctgtccttctaagtctcaggtttctctggtgatgagtccctgcctgtgctgtgctcaaacccttctgtggcccctcatttccctgtccacaccgtggtcgataaggtcctgttgatcttgtgttccaggccctctctgacttcatcgcatcaaccctctccccactgccccctggtcacgttggcctccttgctcattctcgaacatcaagtgccaagcctgtgcccacctcagggcctttgcacttgctgttctttctctttggaatcctcttctcccagatgttcacatggctcatgccttcactgcttttactctaggatcaaatgccacttccccagagaagccttccctgattattcttttctgaaaaagcccttctgggtcattccctgtccccttatctgccttattttttttcatatcgcctgatcccctgaagtcccagccatctatatgttcaggtatttgttgttcgtcctgtgcccacccgc

SEQ ID NO: 15083 - DNA, 1168 bp, Homo sapiens
gccagatcgcaaggtctcattctttccattttcccactgaactgcgtaggctggattttctcttaaagagaaagggcagcagttgactacagaaggaggggatgctggcaatacgtcagatctcacctccccacacctttgtcccagggtggcctcacccatgtagctaggtctgggctggctgtacctcctgggaccccccccaccacgctgcactggggcggtgttaaggcaggacaacaaagagcccttctgaacaggagatagataagaagctgattagggccaacggcccttccccgcccttggcagcatctgggggtgggcagacccctccatcctgggcagagtaggaggcctgggggcccatgggagcacagttttctgcagtgtgccttgaaggtgtgggtgatgagggggtagaaagtggctgaagcgagatgtttgtctaaaagcacttttctgtctcccagcatcccagccatcactcttccacctgctccttagagaagggaagatgagtgagtcgagctcgaagtccagccagcccttggcctccaagcaggaaaaggacggcactgagaagcggggccggggcaggccgcgcaagcagcctccggtgagtcccgggacagcgctggtagggagtcaggtgggtgtccaaacctttgcttcacttggtttaccctttggggctagggaggtgcctggagtttcattcagcaggcgagaccatgcatggagggtgcagaatgattctgcgcagtaagcgtgtgggtgtgtcctcccacctgtgtgtactcctgccccacttgcaaccctggtcagatctctatagagaccccaggagagaaccgggggccgaggaattcaagataaattctgaagccaatggcaaacagtccaaacctaaagcaccccagaggtcacatggccagtgcttaaaacactcgcctttttcttaatttccaatccactgtggaccagtaattttaaaatgcagtaaagacgaatgaacaaaaatgaacatagaagcccagggtttttaatcattagattcagtgcacgtaaaatgatttttgtcaatttgctgtaaagttgctgaatacttatggtcgattcttgtacttcctcatcccaggtgagaaacgggtgcctgcgtgggcca

SEQ ID NO: 15084 - DNA, 1205 bp, Homo sapiens
gctccttcactgttccctctggcttcccatagtggggcctgggagggttcccctggccttaaaaggggcccaagccccatctcatcctggcacgccctactccactgccctggcagcagcaggtgtggccaatggaggggggtgctggcccccaggattcccccagccaaactgtctttgtcaccacgtggggctcacttttcatccttccccaacttccctagtccccgtactaggttggacagcccccttcggttacaggaaggcaggaggggtgagtcccctactccctcttcactgtggccacagcccccttgccctccgcctgggatctgagtacatattgtggtgatggagatgcagtcacttattgtccaggtgaggcccaagagccctgtggccgccacctgaggtgggctggggctgctcccctaaccctactttgcttccgccactcagccatttccccctcctcagatggggcaccaataacaaggagctcaccctgcccgctcccaacccccctcctgctcctccctgccccccaaggttctggttccatttttcctctgttcacaaactacctctggacagttgtgttgttttttgttcaatgttccattcttcgacatccgtcattgctgctgctaccagcgccaaatgttcatcctcattgcctcctgttctgcccacgatcccctcccccaagatactctttgtggggaagaggggctggggcatggcaggctgggtgaccgactaccccagtcccagggaaggtggggccctgcccctaggatgctgcagcagagtgagcaagggggcccaaatcgaccataaagggtgtaggggccacctcctccccctgttctgttggggaggggtagccatgatttgtcccagcctggggctccctctctggtttcctatttgcagttacttgaataaaaaaaatatccttttctggactggagtctcctgtggtgtgtgcccctaaagcctggggcaggtaggatgggtgacacttgtgttctggcccccatccttcaggctgcaggaagggaggggaaatagcactggaatcacctccggggaaggtcattttaagcctcttgatgaaatcaaaacccctagccacaaaacattttatttacaaaatatatactgaatactatacatctggccccatcaccatggaaacaact

SEQ ID NO: 15085 - DNA, 1438 bp, Homo sapiens
taatttgtcaaaaattaaaaattttaaatagtaactaaataaaataatgctgctacaggccaggcgccatggtgcacgcctgtaatcccagcactttgggagtccaaggtgggaggatcacttgaatccaagagttctagactggcttaggcaatatagtgagacttcacctctacaattttttttttttaattagccaagcatggtggcacacacctgtaatcccacctactcaaggaagtgaagatgggaggatcacatgagcccaggccgcgaaggctgcagtgagccaagacagcgccactgcattccagcctgagtgacagagtgagaccctgtctcaaaaaataataatctgctataaatatttttgtacacatttgttgaagacatatattttcatttttttctgggcatgtacttgccgtatcattaggtaagtttatatttgaatctacgctctttccctcggagcgggcggcgcggcggcgtcggcggcctgtgcagcaatggccaagatcaaggctcgagatcttcgcgggaagaaggaggagctgctgaaacagctggacgacctgaaggtggagctgtcccagctgcgcgtcgccaaagtgacaggcggtgcggcctccaagctctctaagatccgagtcgtccgcaaatccattgcctgtgttctcactgttattaactagactcagaaagaaaacctcaggaaattctacaagggcaggaactacaagcccctggacctgcggcctaagaagacacgcgccatgcgccgccggctcaacaagcatgaggagaacccgaagaccaagaagcagcagcggaaggagcggctgtacccgctggggaagtacgcggtcaaggcctgaggagcgcattgtccataaagcacgcctggctgagaaaaaaaaaaaaaatctataagaaaattctaaacagttttccaaagtggttgtaccatgccacaccactaccagtgatgcatgagaatttcagttgtgccatattctcttaaaaattaaatatctttcttttttaaaaactatttctgcccccaactctgccaatacttgcttcatatattatgggactctgttgttcaacatgtatgttattatacttgccgtatcttcttgatgaattgactcctttatcattataaaatgtcttcctttatcttgtgtaacacttttttacttaaaatcgattttgtctaatattagtatagccatttttgctctctttacactcttcatgggatacctttcccatccttccactttcaatttatttgtgtctttgagtctaaagtaagtttcttttttttttttttttttgaggcagagtcttgctctgtcacccaggctggagtgcagtggcgctatctcggctcactgcaagctccacctcccgggttcacgccattctc

SEQ ID NO: 15086 - DNA, 1857 bp, Homo sapiens
tctttcaaataaggcatggtgggcagcaaagaaagggtgtattgataatgttgctgtttggtgttaagtgatggggctttttcttctgtttttattgagggtgggggttgggtgtgtaatttgtaagtacttttgtgcatgatctgtccctccctcttcccacccctgcagtcctctgaagagaggccaacagccttcccctgccttggattctgaagtgttcctgtttgtcttatcctggccctggccagacgttttctttgatttttaattttttttttttattaaaagataccagtatgagatgaaaacttccaataatttgtcctataatgtgctgtacagttcagtagagtggtcactttcactgcagtatacatttatctacacattatatatcggacatataatatgtaaataaatgacttctagaaagagaaatttgtttaatttttcaaggtttttttctcttttaatttgggcatttctagaattgagagcctcacaattaacatacctttttgttttcgatgctagtggctgggcaggttgccctgtcctttctctatttcccagtcattgactgtagatatgggaagagtttagctaccttcatagtgctcccaggactcatggcctttccttctttaagctgtatttccctgcccagaaagaaacaggaagaaacctttttttatttttttatttttttttaaccaagcaaggagcaaatggcctcagcccagatctgtaaaaacaatgatagaaattgaattctgccccacatgttgacagtagagttggaactggattcttgggattacttatctaaaaaactggagcatcaggtccatttctgttctgctggtttggaatcttttccgtaatgctatttattgccaacaatggcctctctttgtgtccatatatgccttacaccgtgctgacctgggtatcatccatgtgctctgaagcatccaactttactttgcaggtgcatcaatgtagtcctgtccctgaactgagtaaccgtgttcctgaaaagtacactagggaaattcacctgcttgcttgtctttgtattggcatggcacttgtgattgcaccatggagcatgctcagagctattaaattggtctcccatctcccaccaggatatgaaaggtccatatgggaggccacgtaatcacttattacagtggttacataatacactggctcactgcagactctcttgttttttgatacagtttcgtgctggcttcatttgccaattgtgttgtttagttcggaagtaagagggtcttgagattgaggggtagggagggctacactgactgatccgtggcttaagacaggagattatctctgtactccagtggcatctccttagccaagatgtgaaattaaaatcatagttcgcctcatttaaaaattctaataaagcactcaaactttgaaaagcttttacttttccctcctactaaaagaaatgtatgtacctcatagccctgtgtcatttagtgttcagcacttttgggaacatcagttggtgaactttaaattttgctgtctactcactgggcacggtggctcacacctgtaatcccagcactttgggaggctgaggcaggtggatcacctgaggtcaggagtttgagaccagcctgaccaacatggtgaaaccccgtctctactaaaaatgcagaaattaggtgggcgcctgtaatcccagctacttgggaggctgaggcgagataatcgcttgaacctgggaggcagaggttgcagtgagccgagattgcaccactgtcgtccagcctgggtgataagagtgaaactccatctcaaaaaaaa

SEQ ID NO: 15087 - DNA, 1857 bp, Homo sapiens; identical to SEQ ID NO: 15086

SEQ ID NO: 15088 - DNA, 2596 bp, Homo sapiens
ggaaagctttgtgacctgggtggaggaaggttggcattgactgatctaccatctgaaagatgggggagttatctctaccctcccctctctttggatgatgtgagaaatctttggattcagtgagaaacttagcaacttgaaatgtactgatctttggcctgccgaggttttgtatggcaaagaccctcaggccttgtctgtggattggggcttccttgtgactcactgggaaccatagatcttgcacttggtttggttgtcaagttgcactgctatgtgtaccatcactgactatcttcactctcttccaggggctccatgggccttaccccttcggccagtcttaaacgggtgtcagcaagaagaaaaattaacaaaagacagaaggcctgactttggggggttagggcaaggggttcctctggattgcagaccacatcgcacagacccctggctctgaccccctctcatcccggaagaagaggaagaagcagaacagactagttttgagtaaactcagtatgcatgtgtgaatgctgaatcacaggaatggtgttgaggctaccaagaagaaatccatgcagccactttgggttttgttataggcatcagtctaacaagtcattaggtcactcgggaagggggaaaaagtttaaaatgggggaaaaaaagccatctttttaaacaaaaattattttgcctacagaaaggttgtagttttgagcacatgttaatttttttccctctttccccacttttatttttttaaataagggataacatattctttatagaatagtgcttgttctggaagagattcaggtgaaaagttggcgtggcatgtttgaggactctgcggatcagtgctacaggagtacatctgccctgccacatgactccagaagtctctgaccccatttgtttttaatggcatcagccaatgagttatcacccttttcctcctcttttctctttaatcttctgttgatttacacctttgacatttgtattcgtcaaccctgtggcttgttagcatcagaacctctctgaagaccaaacttccctgtgtggccagcagaggaagccttgaggatagatctcgggtgacgtgggattttctaagcctgagaggtgtccttctgcacacccttgtaacaattaaaattgcttttcttccatgtttctcttggcagagagaaatgccatcatgcttactgctcttttggattcttcatgcagtggcttcccatttgctctgggaacagtgcctctgtgctggttatatgtatgcaccacatgtgcacacacgggtgttggtgcaactcaccagcaggtgtgcagtaggcaagcttgaaggtggcccatgcttctctgttgtcacacaacacctttccctgtttctcttcagttgtcctctgatattttcacagcctgttagtggcggctgatctgtagaggtatgaaaatacagccccaaagggggaatttgtcatggggaagggccagccactgactacttgatcttggagaccacatttagatggaaatgagaggacctccacagccccgcctccctgccaggatgctagattattggctgggaggtgggcaagtggcagcccagctgaagcaagaggctgattgactggctgctcactcaggcaggtggcctgccctggcatcctgtagattctgagcaggttgagatgtggatatctccatgggaagcttgaaccaggctagaacagctgtctgccaaagatacaagaatatgcaaagtccctcttacccccctccttccctcaagtcttagttggtttgagagccagggatatggatccagggtgctgttgcagggtcacctgcctgttaccacacccccatccagctgggtggtgggtgagggtgtgagacaggcagggagaccaggtaatgagtggctgcaaggagtcatatagcctgggtgtgggtgagggtctgcctgcctgtttctgtctgggtgtctgagttccaaaaaatgtgtgttgtttgttcctcctcatcctcttctgagactgttgtttttttagagcttgattgtgggagaaaagcttgtgtgaaattccctcttcacctccccaccccccaaaaaataaaagggggcataaactttattccactggagaagccctgggggtggctggagccagcctgctgagaagcgtggtgcagctgggtctgggacttcactagagcttactctggagcacctattttctgtgcacatgggagtgctccactccctagcagagcagagggaagtctctgccaggtacccacgccacaggcctcaggatggctttttgtctgagggcctcattaggcccagactgctgctgctggtaccagtctcctgagacactgcctccctggagcccatgcatgcccagctgttcttactgcttagtagccttgaagcagcacatctccactgtccctggcaggattgtgggaggcttcacaacccctgctttcctgacttcctcttctgcccaacactgggtgccccttcccagtttcccagcaggggcttcatgggccaccgtcagtgggtctg

SEQ ID NO: 15089 - DNA, 1561 bp, Homo sapiens
tgagctcaggagttcaagacaagcctggacaacacagtgagacctcttggctacaaataataaaaaaaactagctgggcatggtgacacatgtctgtggtcccaggtacccaggaggctgagggtaggggaattccttgagcccaggcagttgaggctgcagtgagctgtgatcccgccactgcactccagcttgggcaacagagtgagatcatgtctcaaaaaaagagaaaaaaatcctaaaaacaaaaaacaaaaacaaatgtggtggtgtgactgtagttccagctgctgctcttagggaggctgaggcaggacgattgcttgagcccaggagttcaaggttacagtgaaccatgatcatgccactacaccccagcctgggcaagagaatgagaccctgcctctaaatcagtacatgaataaaaataaaaagtcaggtttagcttttccagccccggccccggcccctgcagccgcagagatgttgatgcctaagaagaaccggattgccatttatgaactcctttttaagaagggagtcatggtggccaagaaggatgtccacatgcctaagcacccggagctggcagacaagaatgtgcccaaccttcatgtcatgaaagccatgcagtctctctagtcccgaggctacgtgaaggaacagtttgcctggagacatttctactggtaccttaccaatgagggtatccagtatctccatgattaccttcatctgcccccggagattgtgcctgccaccctacgccgtaggcatccagagactggcaggcctcggcctaaaggtctggagggtgagcaacctgcgagactcacaagatgggaagctgacagagatacctacagacagagtgctgtgccacctggtgccgacaagaaagccgagtctggggctgggtcagcaactgaattccagtttagaggcggatttggttgtggacatagtcagctacctcagtaaaattggagaggattcttttgcgttgaataaacttacaaccaaaaagaaaaaaaaaagtcaggtttaatgagggtataatttacatacaataagatacacctgccaggtgtggtggctcactcctataatcctagcactttgggaggctgaggcaggaggatcacttgaggctaggagttcaagatcagcctgggcaacataaaaatcccatcttaaaaaaaaaaagttaaaaaaaaagacataaaatatataccttttaggggagctatcccttttatgtggaaggcgttccagctgggggctacatgttggtgatttgaagtctctatgtgaaaaaaatgagcttcagccattgcagcaaaggagttacttggggcaggttgcactcgggtctggactgtggcggtctcaggtgtacaggcagtgtattcaatggaaagtgggtaagcgctggactctatttgggctcaaattctctttttcccacatattaactatgcaatcttgttcagattatatcatctccttcagtctcagtttccttatcagtaaaaaaagcttcaaaatcaaatcccatcag

SEQ ID NO: 15090 - DNA, 1037 bp, Homo sapiens
atttaatctttcccctctataatacaacttacttgaaatttaaatcaagaaaaaatttctgacgctgagctaggttggtggcatgatatgccaggggtcagtgggggagcttgcttctgagccccctgttgtccgcctggagtcctgcttgtctttcccagctgtgctgagtggctcttctgtctccctggggtccctggcacatctgctttcccagctctgtgaccttaccagttctctcctcagcccttggtggtttgggagctgaatatatgttttaaacttttacataaacaactcaacctgttgcctctcacttccctccatcactgtggcttttaaaactcatgtattttgactcaagtgaaaaaaacacaaaaatccctcatcccagctaggttttgccccctgccctataagagagctatttccccctttctttcctttgaattcttctccaacaccatcccttcattcatactgccctgtgatacacttgaagctgtgttgattggacagacgttcatcagctaacttacctttacttggcaagatggtaaaatagtaacttagtgatgttactaaagtctcgaccattcacctttccatactgaaggaaaggtaaaaaggtttcttctatgggaaattatgcttgacttgcatactctagtttgatgaggataaaaagaaacatgtaattgcagtggtgtttacaactaattgatcacaaccaatcatagatttctttgttccttctccactctcaacacttcatttgactagaaaaaaaaaatgtattcaccaaggaacaggacccaatttgttcagacttttgttaagtttctttactaaggcaatttttgaaacaccagttactatgggatggtgggaatttttcatgcttaagaaatagagacttaggaacaaagaaacatctttctggagaagatgctaatgggaagttacctaaggcttgatgcttggttcaaccttatttaaaatttttataaatgacctgaaagtaggattttacagtg

SEQ ID NO: 15091 - DNA, 1281 bp, Homo sapiens
ggagatcacgagttcaggagatcgagaccatcctggccaacatggtgaaactttgtttccactaaaaatacaaaaattagctgggtgtggtggtgggtgcctgtagttccagccactcgggaggctgaagcaggagaatcgcttgaacccgggaggcagaggttgcagtgagccgagatagcgccattgcactccagcctgtcaacagagtgagactccgtctcacaacaaacaaacaaacacaaaaccacagaagggttactaataagcagggctgagaatactcagaaaactgacaggtgaggttcaacataatataaggaaatgtatttatggaagaattatcaactgatatgcctgaacactgttagaactcaggaaagaaacaagcattgctgagggggaggagagatcaatgtgctgctgtggccaaaagcctaattgccctgtgggcatcatcaggaagggcttttggagataacagagaacagcactttatacaaaaccatggatatgtcttgatcggattatctgtgtttctagtgaccttatttacaagatatatgataaagggaggaaaggtccagagaacagccaaaattatcaggggatggaggtatatccatatgaggacacatttttaaaatatagactctatcctgcaaagatgaaagcagaggggagttagatcaaatatccaatcaagagcaaggacccggtcctgtactactagctctagggctctatctcatagccttagtaaagaaagcacttctcatagcaaatcagaaatgtaaggagctcattgtctaagaagggatgccaccagaaactatacatgggtgcaggtttatgaggaatccttgcatgacggccttctacaaggaattatagaaaagtagggctacttggtaatatacaactgagagggtaactgtgtccctcaacaaactactccttagtgcctctttcaaaggcagaatgttgatctgaatggatcactggtcaagtatggcatctctaatgttcttgaagggggaggaaggagatctggtagctggaaaatataattattccacgttaggctcacctgaattggtttaaaatcatattctgattctcttctcatcccttcctcccctcacccaccatatacctctggcatccctccatgcaaagaaatgtcgaataggcatttcttggtataatttacctacacttgtgcttgtggggtgggagtaaaaacatatccagtaagtaccaaggctaacctcctaatgg

SEQ ID NO: 15092 - DNA, 1221 bp, Homo sapiens
gggctctctaaaggagtccagagctcttgtccatgtcacaaatggagccttagaatttctgtctttccttatgtggcagctttggccattgtgtcttgaaattctccctcaggaaatgtgataggggatattatcccatgggattttagtaaaaatcagcttgcctaatttcatattcgtgttcataatgaagaaatgcgaagtggtggtagtcctcaggattaagtgtaaaggaaaatatgcaaggaaaaagtagcagtgtcagcccttttggactgcttatgatttctgccttagagctacaagacttggaacaagaaataacaatacctcaagaaaatgtctggagagatagcaccactgtccctcaaagacttcagccactgcacattaccaattcagctgtgaagcatttacaactgtattatctgtgattgtctgcatttcctgtttacatgcatgtgctggggatatgctttagtgtgtatggactagagtttaaatcctgtctttaactgggctgcaaggatggctatcaatcccaaattctgttttcaactcactggaataattaatctggtgttcctgatataaaacaggtgggttctattcacatgatggctgctctttaccatatatttcacctgaccctcattttgccatgggcctcaacctttatgtgtgctttttatggctctgaaaggactggctcccgtgtgtggaatatacaaggtataaacaccacccctcacatacccctgtaacttaaatgcttccatttaactcacttagattactttccccttagtggtaaacgggttgggggatgggtggtagtgcaaagaaggtagtttgaaatattgccatagtaatatgggaactttttattccaaccctttaccctggcttttttttctctcaatatttgcctaaaattctaaaatgagttatagtaaaatcataaaactatggaaacaactgaactttggtacacaagttagttcgatgacatcttgttatttgagaacagtaaaaggtgtgtcattgcctcatgatttatcatagtcattactaagggtttcagagagaatctggtgtgaagcactatcctttcagacactaaggcctttacctagttgctcccctaccttctgtcggaataggattattcccatgcacctctgggtaggtataggtagtagctattgaacggggattatt

SEQ ID NO: 15093 - DNA, 1206 bp, Homo sapiens
accatattggtcagggtggtctcgaactcttggccgcaggtgatccatctgcctcggcctcctaaagtgctgggattacaggcatgagccactgcgcccagcccatgtctgcatcttacttgttaacacgctgaggaaagtctggacatggagatttatggaggatgagaccaagtctcaaccacagtatacttttcaacaaatattgctaattggagttaaagtgttcgttaatgtgaaaataaaattactttggattgagactgctgctggagactgctgtagaagaaaaattagacaaaatgctctctataaagcctctattttaagaagaatgattcagagaggaacataggtccaagaaattttcatcaacaaatgaaaactgaactgccaggtttgccagatgtcttattttaaggaaatttttcctcatttggtctcttgtaaaagtcttccttttgcctctgaaatataccctgtccctatgtaacttaaaaataaaattttcagagtgttcaaagttccttctgtgtaggatttgtaattctgtgtaattcagctgggaattgtattgcataaaaataaaggcaaaaaataaccacattgttggattacagagttttgggaaatttccttaatttatttagtatagtccatcgtggtctgtcactcagcatttgttgagtgcctgctgtgaacagacaccgctacttgttctttaaggcggcagcaatgtgccttaatgtggttgtcctcattaatgttctaccctatggtcgtcctaccttacatggtataatagagtagaatggctgatatttaagggagggcctctcccctttatttagacacacaagtcctgggcatctctcttttggggacaacataaaacacccctgcctagtcctttatttggtccaccactaatcctatcccagcatcctgtgtaggcctccatggggcctacatactctgtcaggggaagagccaggagagaaggaagaaggctttgaagagccagccccagcagcctgctgacagttttccttctctccccactgtggaaggactgactaccagtggagaggtggcagcaggcttttggctaagtggagaggctctctcttcctgtgtagtttgtggagaggcagcgttgactcaaggtacagttagaagtcagcgatgctttcttttgggactttc

SEQ ID NO: 15094 - DNA, 1285 bp, Homo sapiens
ccttcacgatggagcatggctaagagctgcttggcaagtattagcctcagaaaagagattatgcagaacactgtaggcatgggagacgcaagaaaggaaggatcctggattttatttagcattttttgaagactaaaatcaaagaaaagggagttttttgtttttttgtttttgtttttccttagagacaggatcttgttctgtcacccaggctggagttctgtggcacaatcctggttcactgcagcctcaaacttctgggctcaagtgatcctcagaaaggggtgtattctaatcaaaggcctttcagattggaggtatggatatatatccagaaatgcagttgtgattctatgtgacacttgaattattcaccttctcttttccacctttcttctttgatgaaaaaagagccaataatctcgaatttgttccagactgcctgtcttggtattagccacatgcacaagatacactggatgtttctctcccttaggttctgtccatgagacctaggattcatgggagtgcagcccgggaagaagacgaacacccttatgaactgttgttaacagcagagacaaagaaagtggtgttggtggatggaaaaacaaaaggtacgttccccacaactcctggcagaaccaactccaaagggatttttaaagtttgtgatcctgagtggaaggggaagatgtcgtaactatgatattccttgggttgtggtggttgggtttcacgatgatctgggatggtgggtccattatggcttttcatttccaatacctgacctatatgctctaggttggagttggctgccaccttcagtatgcgaagcaaggaaaaggttaggtcagactaggtgctaactgtgggaggagagaccaccagccccacggcagagattgatttggggtctcaaatcataaaccctcaagttaatgctgtggaaaaacaagctcaacaagtcagtccctttgggttcaggctgacggcacagactctgcttttgagtcctgacctcagagtgagacactcctggggaggggcccgtgattggctgccaccctgtaactagagtgctctgtcgccttggcctactttcattgcctctgcaaaattcagtttcctctgtaagggagtgagtgctgcagtactgagatccagcccgtcgatataagtgcagtcacgacagaggtgagtgtgcactgctggagaatttgtgtcaacccctgttctaaggaagaatgataagggacaatgcagttcccactgcagtttgaag

SEQ ID NO: 15095 - DNA, 1191 bp, Homo sapiens
gttttgtttctgttaaggaattccagaagttgcaggttgtggatcatgacctcttttttttttttttttttttttctgttgctgcttgccagaggaagggagggcgggtggcctttaaataacactttggcctttatggaaatgtatcagatgttccaggagtgggtctccctgctcgcgcttgctcactggtgctcttacttttgcttcatgttcactcactctgtcctgacttgtgtcctttctctaggttatacttaacactcttctcgccttatatagcaaggtctggtcgttaatgttaacagaaatctaacaacagggaaggctgccagatagcattaatcaggccagtgtttggaatttcataaatgctctgactttgggtacaaattgaacattaagaacaatatgaaaactgtcttccttcctctctcttcttctctcctctccccctccccagcctatccagtttctctctctgtttctctgtgaattcctctgctttgccatatgcttgctgcattggaactttgttgatttttgccacgtttaattttttatttctctgtctctccgtccactccaagaccacaggcggagcagcagcagccggagccaggactctgcggaggggcaggacgggcaggtcccagagcagttctcaggcctcctccacggctcctccccggtgtgcgaggtggggcaggaccctttccagctgctctgtaccgctggccagagccatccagacgggtccccccagcagggcgcctgccacaaggccagcatgcagctggaggagacgggtgtgcatgctcctggagcctcccagcccagtgccctggaccagagcaagagagtgggctacctcacaggcctgcccaccaccaacagccgctcgcaccctgaaactttgactcacacagcatctccgcaccctggtggtgctgaggaaggagaccggagtggggccaggagccgagcgcctcccactagcaaacccaaagctgaactcaaactcagccgcagcttgtccaagtctgactctgatctcctgacctgctcacccacagaggacgctaccatggggagtcggagtgagtccttatccaactgcagcattgggaagaaaaggctagagaagtcaccctccttcgcctcggagtgggatgaggtaaggccgacatg

SEQ ID NO: 15096 - DNA, 2766 bp, Homo sapiens
aaccccgacgggcagggcagtctccagcaggatcccaacggcactgatagctccccagggttgggctgggctctgtgtggctccctcctcctgtctgctgtactgagccacagctgggcaccgttgccaagagctagctgactgttctcacctctcctgaaccaaccaaccactgtgaccacccagtgccagagtccccagcactctgctcacagccggcctgcagccccaccccactgtcctccgctactccgaggtgctggcctcactctcatggctaggcccttgtgagaccttgagctcagtgatgtggctggaccagggacagactgctttctgtgagggcccaagatatgcgccaggcccttgggtccgtgctgactgccccacttggggctctgggtatctgaacactcacaggctggctcacacagcaggtgtctcagtcctgatgggccttcccctccaaggaggtgggtggcatgtgtgtggacagcccctctatcttcgccatggagtctcaaggcctggcagccttgggcctggctctggagtctagctcactgaggaggaaggccttccgtagaaccaacgaggaggcggcctgtgccctgcacacacggcgcaccttcttccctcacagaacagagctgctggaggacagggacctggaccaagtggcctccattgtcctctgggagctttctgacactctccacggtgggggatcacagatagacagcgccgtccagcatgcccctgaccacctccctcagcctcctgactcctccgaaaggagaggccgtcccatcgcagcagctcagaagctgggatggtggagctgagtctttgaagaggcaccccattctccagtgtgggcaaatcagtttggatggcaggagacaggaaggaagcggcgcccataggcagccgtgcacacatagcagagtccactaggaaagccagtcggccagggcagtcaaaacccaagtcgataaactgggtgggtcctgcgtacccacccatccttgtgccttcctgagcagagtcactgagccagaggcagtgggggctgcaggctgtgggtgctcaaagcaggcatggagggtgccccggggaggctgtgagggatcgtctgtcctgctctgtgtttcctttccatttcctccaccgtccgcaggccccattggttaaccctttcctccccccattgtttgcttctgccaagctgagccactgaggaaccacactgtgctgcggaaacatagacgtgggggcataggctcccactgccaccaccgccatcgcctcacctgcagctctgaagacccaggcctcacctccgcctgcaggacctcctcttggccacttggcctgggcctgccaccaccacgtcctgcagaacgagccctgccttggctgtggagaagcactccaggccgctagcagatgggactggcattccagagggtcaagaagtgacttgttcagaacacattgtttttaacagaaaaaaaatctttttataaaatgaacttttaacacttggctcaaacctctaggtcatactgccaatctttagacaaatggccatggggcagaggacaggggagctgaggttggttcagaggccagcctgcatagcctctgtcctcaggacggaacttgggtgcagctcagtgggtcggaagagaaggcggtggcctgtgggtgaggggaacggagcaggctcaggcagaattgagtacggtgcgtctgcttttcaaacccaaccatatcagctgctgctctttatgaactgcccaacttcctgtccctttcaggggctagacacaggcttctcgtaagaacacagccttagaggcacctgagcaactcaaaggtttccggtccatttctggggttcccgatgggaaggttcagtggccaaatgaagataagtgtgcagtttctagtgctgggaagtcttagccagcaccagagcgccaggcctctccctggcctcttacctgtcagtgatcggagcactgccctgggctggccggcgccgtactgcctgcgttgtgtcagagaataggaaaagcagctttgtttggggcattaatgcttggagtggggtcagctaaggttgctacttgccaatttgtgatttgtctaatcagcctgtgtgattggggctcattttgattctctgaattatcggtttgacggttacacttggctgctgggcccatccctggcccccggtgtggaaaaggctaaataaggtgacagtgcatcgatgctcccccgcgtggcctttggggcaggctggcatcccggtgcgcctctgcttcttaagctttcctgctgctcgctttgtttttaaaagtaacttgggttgcattcttccctctggactagagtagaaatgcaggggaaactgctgtggatttgagaggcaaagttggctcagctgtgtgcccagttcctcctgtgggcactttagcaggctccgagctttcctggcataggtcaatcaggtcccaggatgaataatccaggcttcagcaacactcctctttcccagccagcaaaggctgtgaatttgaattctttgttggtatgtatgtgcagggagtactgttaggcacattcttaacccatgtggttggccagaaatcagaagtggggctgtgtctctgactggctagaggccaggccttgtgggtttctatctgctaagcacccagcaggttggggcctgggactcagctctctctgcgg

SEQ ID NO: 15097 - DNA, 1342 bp, Homo sapiens
gatttgctatacttgtaagcaagaaagaggattcaaggatggctccaaggattggggcctaagcaacagaaggatggagctgccactgattcagttgtggaattccagaataagggcagatggtgggaatgggaatccagagttgccctctggatatattcagtataggatgcctagtagacatcaagaagggctgctgagtcatggtgtttctctttcccacccccgacggtgaggctgacattgctccctgccatcctttgcaggacaagaagctcatcaaggccttctttgaggtgctagcccacccccagaactacttcaagtacacagagaaacacaaggagatgctgccaaaatccttcatcaagctgctccgctccaaagtttccagcttcctgaggccctacaaatagtaaccctaggctcagagacccaattttttaagcccccagactccttagccctcagagccggcagccccctaccctcagacaaggaactctctcctctctttttggagggaaaaaaaaaatatcactacacaaaccaggcactctccctttctgtctttctagtttcctttccttgtctctctctgcctgcctctctactgttcccccttttctaacacactacctagaaaagccattcagtactggctctagtccccgtgagatgtaaagaaacagtacagccccttccactgcccattttaccagctcacattcccgaccccatcagcttggaagggtgctagaggcccatcaaggaagtgggtctggtgggaaacggggaggggaaagaagggcttctgccattatagggttgtgccttgctagtcaggggccaaaatgtcccctggctctgctccctagggtgattctaacagcccagggtcctgccaaagaagcctttgatttacaggcttaatgccagcaccagtcctctggggcacatggtttgagctctggacttcccacatggccagctttcttgtctatacagatcctctctttctttccctacgtctgcctggggtctactccataagggtttacaaatggcccacaacactgagttagtggacaccggctaaatgaggaagagcagcaggcattgtcatggtgaatgccccgctgtagctccctgagagaaagactgtaactctgcaggacagaaacaaggttttaaagcattgccaaaaaaaagaaaacagaaagaaaaaatgtatcatctaaaggactagacacagaacaattggaagtcaacttcaaacactaatcccttttcttgtcttccctggcccagccacctcctcagccccatgtgatgctccctg

SEQ ID NO: 15098 - DNA, 1726 bp, Homo sapiens
tttttttttgagatggagtctcgctctgtcacccaggctggagtgtaatggtgctatctcggcctactgcaacctccgcctcccaggctcaagcaattctgcctcggcctcccaagtagctgggattacaggcatgcgccaccgcgcccagctaatttttgtatttttagtagagatggggtttcaccatgttgcccgggctggtcttgaactcttgacctcaggtgatccacccgcctcagtctcccaaagtgctgggattacaggcatgagccaccgcgcccagcctaggataactttctgattcctctctgccagccgttttgcgtctcttggaaagccaaacggtgaccatgcttcttaatttatgccttcagggtctggcttctcctttctcccttcctttcctgtcacaccatgcatacatacatacaaatacacatccttcaaccatttattccatggcttatgagacctgcaaatgagttccacagtacggaaggcatagaccactaggcttcttaattgatgtcaaggcagatcttggtgagcaggtaaaaacctgctattgtccaccaagtttaatttaggtcctccaagttggagggttaagaacccaggcaaagctgctgctgaatctatggaggaggctggccctgggacatcaaactaggggttaactggattgaatgaggagtcaacgctcagggacattctaggtctttacaggtcagacagaagagaggtttttaccattggagggaaatggaaagatggtataaataggatcccttcatgaagcaacccagaggcctctctgcagcgtgtagggtgtggggcgacagtattgtggggcttccattcatcttagtacaaaacctcacctgctctgagcctggaaatgggagggcttcacgcaccaagtaatgcacaccagaaaggcacttatatcctcagcaacatggcagttcctctttacttctctgcctccctctttctatattatcaggccatgcctattcctacaacctgagacaactcttggagtcagaagaaaactgaccagatcctggatctgagctgcctgctccaggcctagaaatccccaaaggctggcactgagctgtgactgctttaacagcccccaagatttggtcagtttgaggtggtggagactcagatttgttgctgaaagttcagtaacacagtcctggtctttggccctagagaaactttttatatgagaagtgttctctatatacatgtttgaggtgactctggaatggattatgaggtcatatctcaaaatgtcagaaaacgttatagagcactcgaacttttgtatttgctgcttaacctcaatattacagccacaaacaaggggtaccaagacaaagtataactgagcataagcagaaaatgttaaccctccaggtttctttcttaagcacaataaaagtgggagcgaacaacacaaggatatttttacatttgacccgtctcaaaagtagcacaccctatccttgtgccattatttgtacaaggaaatatatgattagaaggaatagaacccccagttgtcatcagcttttttagacaccacaggttgtagcagtttgaacaaactgaaaactttatacttctgtgtgagctgaactcaagtttcagaataatcatcgccatgtgggaggctttttgttaaatgcagaagaaatttcaaaatatt

SEQ ID NO: 15099 - DNA, 1206 bp, Homo sapiens
gagatgaccatatttttatatcttatttaattatataatgttgtttaattacatgttatataattatgattaaggttggtactaggaaggaaataacttgagcccgtttcccccacgtggcatctgttcaccgaccattatctgttccagtcaggctctcagaaaggggtcagatcaggaaaccccaacatgaaggagttccccagaccctcacccctaggcagcttagcaacatgcccaccccctcctcctccgcccccacgtgccccttttgacctggctcttggtccaccacctcccccctccacaggcccgggcctccatgcaggctgagatggagctgaaggaggaggaggctgcccggcagcggcagcgcatcaaggagctggaggagatgcagcagcggttgcaggaggccctgcaactagaggtgaaagctcggcgagatgaagaatctgtgcgaatcgctcagaccaggtaggcctgaggaacctcttctggttctctcaccacccctcctggaacacaccccagttttcctgcttgctgtgcacctgcaaggtgccttggcactagaggctacacagtacacactcacccggcagactgctggaagaggaggaagagaagctgaagcagttgatgcagctgaaggaggagcaggagcgctacatcgaacgggcgcagcaggagaaggaagagctgcagcaggagatggcacagcagagccgctccctgcagcaggcccagcagcagctggaggaggtgcggcagaaccggcagagggctgacgaggatgtggaggtgaggcctggggtgggatggggtggaggctggcagggtgagctcattagggcacaggctctggagccaggctgccttccctcaaaccctggccctagcagctgctggctgtgtgactttggacaaatgcccaaacttcttggagttagtctctcacctgggaaactggtaatagcgttgttatgaagattaaatgagatgatacatgatacttagtacgtagtaagtgctgaagaaacatttgctgctatctttgttcacatcattattaatctggggaaaaatttttccttctacccttccaagcccctgtcttgctatccttgtactttggctctactccttggagctttaatctccataaattcaaacacagaaatatggaacatagaaagggaaaat

SEQ ID NO: 15100 - DNA, 1180 bp, Homo sapiens
tatgcaagaatagaacttcctgtgggggatggtggggaggctagctctgcagaggtctacagtcctgcagtttctgcaaaacacgttgcacacatctccatatgggccacacggtggcaacctctgaaccaggagagctgcttcctaagggctaagaccctctgtctgctttctctctcttgctttcctcccaaaacacagccatcctcctccccactgctaccccatggtgagttcagcccaggaagcctctgacccagccctgatggtaatagctgctgtgtactggacatcttctgtatgttaggctctgggagaaatgctgtggagactttttgcccatcctcccagagaagctgtcagtaccccctgttctaggtgaagaaactggtcctcagaaaggttgactccctgaggccacacagctgttaagtggctgaggcgagggctgtggggctgttcccacgccctggcttccaggcctggcagcatgtggagctgcccctccatcgtgtgtccgcagacctctcccggagctcctcgccaccctcactgctggaccaactgcagatgggctgtgacggggcctcatgcggcagcctcaacatggagtgccgggtgtgcggggacaaggcatcgggcttccactacggtgttcatgcatgtgaggggtgcaaggtacggactggggggagcggtggctggccactgaggctgtggtcacatggtgaattgaccctccacaaagctttccttgccttggggtggggccctgactgtacctattgcagaattcctgcccaggaggcagccaggcccttgtgctccagacctcagctctgggcactgcaggagaagagggggttcccttgtcaagcctaccctgctgggcacctgtgttgacccagctctgtgggtgattgtgtccccctggggaccaggcagctagggcagaatgagggtcttgggctgagccatcgtcttacctgaggtctgggtttcttgtttctcaaggctcaaagcgggctctgagaaaaaaggacagacatttgtttttccagtgatatttgtgggtccttcctaacttcacacccatcaaaatctcacagattattttattgaatcaccacctcacaaatacacagaaccagatacatttatgaagaaatcaagttagccg

SEQ ID NO: 15101 - DNA, 1335 bp, Homo sapiens
cacccacatgacttttccattgaccagcccttgagcacccggcctggagcagcagagtcccacgatcgccctcagacacatgacacccacggcctctggctccctgtgccctctctcccgcttcctccagccagctctcttcctgtctttgttgtctccctctttctcagttcctctttcttttctaattcctgttgctctgtttcttcctttctgtaggtttctctcttcccttctcccttgccctccctttctctctccaccccccacgtctgtcctcctttcttattctgtgagatgttttgtattatttcaccagcagcatagaacaggacctctgcttttgcacaccttttccccaggagcagaagagagtggggcctgccctctgccccatcattgcacctgcaggcttaggtcctcacttctgtctcctgtcttcagagcaaaagacttgagccatccaaagaaacactaagctctctgggcctgggttccagggaaggctaagcatggcctggactgactgcagccccctatagtcatggggtccctgctgcaaaggacagtgggcaggaggccccaggctgagagccagatgcctccccaagactgtcattgcccctccgatgctgaggccacccactgacccaactgatcctgctccagcagcacacctcagccccactgacacccagtgtccttccatcttcacactggtttgccaggccaatgttgctgatggccccctgcactggccgctggacggcactctcccagcttggaagtaggcagggttccctccaggtgggcccccacctcactgaagaggagcaagtctcaagagaaggaggggggattggtggttggaggaagcagcacacccaattctgcccctaggactcggggtctgagtcctggggtcaggccagggagagctcggggcaggccttccgccagcactcccactgcccccctgcccagtagcagccgcccacattgtgtcagcatccagggccagggcctggcctcacatccccctgctcctttctctagctggctccacgggagttcaggccccactccccctgaagctgcccctccagcacacacacataagcactgaaatcactttacctgcaggctccatgcacctcccttccctccctgaggcaggtgagaacccagagagaggggcctgcaggtgagcaggcagggctgggccaggtctccggggaggcaggggtcctgcaggtcctggtgggtcagcccagcacctgctcccagtgggagcttcccgggataaactgagcctgttcattctgatgtccattt

SEQ ID NO: 15102 - DNA, 1157 bp, Homo sapiens
cctgccacatttgaggtgtgccttggtgaccaggttctaagcaatgccaatggcttcctctctctatcagccaagaagtatgatgcgtttttggcctcagagtctctgatcaagcagattccacgaatcctcggcccaggtttaaataaggcaggaaagttcccttccctgctcacacacaacgaaaacatggtggccaaagtggatgaggtgaagtccacaatcaagttccaaatgaagaaggtgagtgggtctggcgggttgctatgggtgaaggtgttggcagggtctaaatcttatccaagtctctaaatatgccagtaagagcacccaccaggattgaaacttttggagtaaccctggtcttggcccgggtccaagtacctgctcaccaggccactgggggaggaaggacaggccatctgctattcgtccaccaacctgacttgatcctctcttccctcctcccaggtgttatgtctggctgtagctgttggtcacgtgaagatgacagacgatgagcttgtgtataacattcacctggctgtcaacttcttggtgtcattgctcaagaaaaactggcagaatgtccgggccttatatatcaagagcaccatgggcaagccccagcgcctatattaaggcacatttgaataaattctattaccagttccctctgtctgcctgtgattgagggtggggggtggtttgtcagctgacaagtgagggccttggcactgctgatggctagttgtgtagtttgtcactttgatgatggatagttgggtactatagggaagaggatgtttttctgccatcaaaatcaggcagtcttgcatatgtgatagggttgctaacggcattgaagctttttgacaggattggtccatgtaaatttaaaataaggattttagtcagcatttctgtgttaagaagaccacatgtggagtatcctatgctttgggttagtaatgagtaaatgttaaggaaaacaaggcacagcaaaccagtacaaaagtataattaatggaccttgttttttttttttaaatggagtttgtagcccaggctggagcgcaatggtgcgatctcaatctgtgggtcccagttcaagcaattctgcctcggcctctcaaagtgctgggattacaggtgtg

SEQ ID NO: 15103 - DNA, 1838 bp, Homo sapiens
tctaccacacacagcctgtccctgggggagtaattctgtcattcctaaaacacccttcagcaatgataatgagcagatgagagtttctggattagcttttcctattttcgatgaagttctgagatactgaaatgtgaaaagagcaatcagaattgtgctttttctcccctcctctattccttttagggaataatattcaatacacagtacttcctcccagcattgctactgctcagcttcttctttcattctaatccttgctattaagaatttaagacttgtgcttacaatatttttgacctggagtggatctatttacatagtcatttaggatccatgcagctttttttgtctttttaagattattggctcataagcatatgtatactggtttatggaactttatttacactcctctatcatgcaaaaaaattttgactttttagtactaagcttaatttttaaaaacaaaatctgtagggttgacaaataaatagttgctcttctacactaggggtttcacctgcaggtttgacacgcagttgctcgcttttcctgccctgtcaagcttctctgttctggcgtgagttgtgaaagagttgaagacagcttcccatgccggtacacagccagtagcctaaatctccagtacttgagctgaccattgaactagggcaagtcttaaatgtgtacatgtagttgaatttcagtccttacgggtaaacagattgagcatggctctctattccctcagcctaagaaacactcatgggaatgcatttggcaacccaaggaaccatttgcttaaacctggaacatctcacctttttaaatcctaaaaaacactggcagttatattttaaattagtttttatttttatgatggttttatcaaaagacttttattattagattgggacccccttcaaacctaaaaatcaagttatttccttttataatacttttcttccccatggaacaaatgggatcaatttgtgagttttttcctttaatgataactaaaatccctctaatttctcatttatgcttttgtcttttttatgaaatatttcttttaaaagccccagtctcacctacgaaatatgaagagcaaaagctgattttgcttacttgctaaactgttgggaaagctctgtagagcatggttccagtgaggccaagattgaaatttgatactaaaaaggccacctagctttttgcagataacaaacaagaaagctattccaagactcagatgatgccagctgtctcccacgtgtgtattatggttcaccagggggaactggcaaaagtgtgtgtggggaggggaagggtgtgtgagtggttctgagcaaataactacagggtgcccattaccactcaagaagacacttcacgtattcttgtatcaaattcaataatcttaaacaatttgtgtagaagtccacagacatctttcaaccaccttttaggctgcatatggattgccaagtcagcatatgaggaattaaagacattgtttttaaaaaaaaaaaatcatttagatgcacttttttgtgtgttctttaaataaatccaaaaaaaatgtgacttcccattgtttttggttttgcttaagtgattttcagggaaagctatattggttaaaaaaccatggtgggggccaacttgaagaaattagacatcagagaggtcaggcgtagtggctcatgcctgtaatcccagcactttgggaggccaaggcaggtgcatcacctgaggtcaggagtttgagaccagcctggccaatgtggtaaaaccctgtctctactaaaaatacaaaaattagccaggtgtgg

SEQ ID NO: 15104 - DNA, 1171 bp, Homo sapiens
ccctcagccggcaccgctgcgggcgggagccaaacttcgctttcgggtccgggcgccgggacaaccggaccccagggcgagccgagcgccgggacgccgcgggcgcggggcggattcgcccacctggcggggctgtgaaggggatggtggcggggtggccgcgctccgggtgtggacgggcggtccccgccttcacctgccgcctcgggacaagcgttggggaaccgcatcgccgctgtcggccgcttgtggaggagtccgcgcagcgccgtctaacaggtgatccgcgtcactcccaggccataccgaagcggctgaacgctgtgccagggctccttatgctcttctgttctgggacgtgaaaacgtcttccgccttattggtcgtccaaaaaggtgcaccggtcacagtataagagtcaaaaaccagtattaccaaaaagacactacgagcgtcagggtgcagagtggctttcttcgattaacgaaccggcaggaccatcgtagtctctaaaatcgggttctgcagtggtggcgaaagcgtagtaagtttcaagttgtaagcggagatgcagaattgtagatacccttcagtgtggttcaggacagtgtgttcagcgtttggccgccgttcagtaaattctgcatgaagcagtttgagctcgtggttttggatttacttttcaggagtatgttttccagtggaataaggcttactactgaatgggagctttctttgcctctctgagtgtagacaggagtgtttattttcattgtcttcccattttgttagattgtggacaagggaaaagttaaagcatattttggttaagtatttttaatagtctgggattctatccacctcctccataagggtttttactttagagaattataaagtaattctctaaagggagctgcttctcttggtgtttgaatcaaaagccaagaatcgacttgaaaaaaattcttattctggtgggaaatttttattgtcatactttcacttcaccattttctgtttgtctctcccccagctgacctctgcctgacagtctgcaattatggccctgaccaatttagagattctatacaaatgacatttttaaaacgagggttattaatactcattatttgtgagaaacactttatttagttacccagtttttttc

SEQ ID NO: 15105 - DNA, 2381 bp, Homo sapiens
ggacatcctttaaattataagcatcctttttgaaaagagctatgaaggtgtatgagcccatccttttattcattgactctaagagtcaaattttctagtgcatatcctattgccagcataaggatgaggagggggaaagggtcttaattctatgtacagcagagacattaaacttgctgtgtccgggctgcatcatcttcctggactgtttctgttgttctctgtgttcacattttttcctgcaacttttaagctactgtcttttttaaatagctatatgaacaccaaatttgggtaccattttatcactgttcaaagcactgtcaaattcctttcatcctttaatagttaagatctttgaatcttcagtctgatttttaatgtaagcaaaaacagaaccattgaatagtaatttcttgagaacctcaggtgttctataaacagtcctttcctgtatgtcttctattaccctaagaccagagttattttggttggttgttttgttttattttttgtttttgtatccatggctggcactttactcattgcacttgagtttattgccccataactaaaggatcaggatgatggtagaacggagatctgggtttcagagctttcccatttaagaaaaatagatcttgagattctgattcttttccaaacagtcccctgctttcatgtacagctttttctttaccttacccaaaattctggccttgaagcagttttcctctatggctttgcctttctgattttctcagaggctcgagtctttaatataaccccaaatgaaagaaccaaggggaggggtgggatggcacttttttttgttggtcttgttttgttttgttttttggttggttggttcgttattttttaagattagccattctctgctgctatttccctacataatgtcaatttttaaccataattttgacatgattgagatgtacttgaggcttttttgttttaattgagaaaagactttgcaattttttttttaggatgagcctctcctagacttgacctagaatattacatattcctccagtaagtaatactgaagagcaaaagagaggcaggattggggtcacagccgcttcttcagcatggaccaagtgggccttggggattgcagcgttctcgaagtggctgtaggactcgaatttacagaaagccacagaggtgcaacttgaggctctgctagcaagccaccagtgaggctattgggtaaccacctttctatacaggagattggaatctactttgtcatttatccaccacagtgacaaaggaaaagtggtgccgttatgcaatccatttaactcataaacatattactctgagtaactggccagccattcatcggatccttcattgggtactcctgaaatcagacatgttcctgtagaaagaattttaagttaggctttctatgcacctatcaagaatcaagagaatagattgtatcaaacaacggcagggaaatccttcagcaattctaatccactttgggttttcagctgtttttacatctaaagcaatagactagaactgaattatcttctacatagtaaaatcacaattgtggaattacaggaattctggtgatattaaggtgaaataacaaaacacaaaaggccctattttaacagttgatgtgacagtaagttttaatagaacctgtaacttcattttggaaatgcttctccaccaaataagggctttttcccctatttaaggagccagatggattgaaagatgtggaaataggcagctgtagatcttgatcttccaggtaccccatgtacctttattgagcttaattataatactgtcaaattgccacgatctcactaaaggatttctatttgctgtcagttaaaaataaagccctaaatacatttttattctttctactgagggcattgtctgttttctttgtaaatgccgtacaataaacaaattatttaataacctacatgtttccaaaaatctctgttcatttgttgtccaaattgctctgccctgagtaaaaggaggaaaagattggttgagtatgcttttttaatttaaatatgcaatgaaagtgtacaaattgcacacttgccattttgtggggttcatagttttgcttctagttttaaattgggagtggggtagaattaacagccaaattaacatttttggaatactgtttttcagcattttttttttaattgtttttccctacatccaatagcactttcttccagaagatttgtcaggggtggttgtttttctcaaattataaatgcacggtacgtgcaaaattcagaagacttagaaatataagctcttattaaggcaatggcatgatgtattacacaggcttt

SEQ ID NO: 15106 - DNA, 1214 bp, Homo sapiens
ccattttaagggaagggtagccttcccttaaaaacttagaagtcgggccaggtgcggtggctcacgcttgtaatcccagcactttgggaggctgaggcggggggatcatgaggtcaggagatcaagaccatcttggccaacacggtgaaacctcgtctccactaaaaatacaaagattagccgggcatggtggtgggcacctggagtcccagcaactcgggaggctgaggcaggagaatggcgtgaacctgggaggcagaggttgtagtgagctgagattgcgccactgcactccagcctggcagtagagcgagactccatttcaaaaacaaaaacaaaaaccaaaaaaaccaaaaaacttataaaagtcttctgaagataagaactttcttaggggttctagattgttatgtaacttttcactaatttctaggtatctggtgacccatctcatgggggcagatctgaacaacattgtgaaatgtcagaagcttacagatgaccatgttcagttccttatctaccaaattctccgaggtctaaaggtacagataatacaagtaataattttttaaaatgaattctccctttctcccctccttttagggcttaaacaaacaagtaaacaacttttctaatggaaaattcaaacacataaaatcacaggtaaaggtcatatagtacagtaaactgccatgttcactcagtgacaacagttaccgacatatggccaatcatgtttcttttgtatttcccaagccctggattattttaaagcaagtctagacattatataataccatccatagatacttcagtttgcatatctgaaagataaggactcttcattcttacatctaaacaataatttattgatgtaatctaatatctggtcagcgtaatgttgagattttcaaaaaatcctcaagaaagactaatttatttgttggaggggcagataaacagtgttttaaaattaaacccatctttgatatttagctgctttgagtccttattgagctccagagtgccaaccagaaaatagattaaaagctcaactgagtggagtcaatggctgtggaaattatagtaatggtaaatgtacacaatactgatagttacttatgctgatttctaatcttactattaacactagcagttcttactgattcatgaaaatgtgcagcaaatatgttatataatatgacaataga

SEQ ID NO: 15107 - DNA, 1391 bp, Homo sapiens
caatccctacccctccacccctaactctggctccaggcaactatggatctgcttctaacactatagattaggtttatcttttctggagtttcatgtaaatggaatcatatagtgtgtatttttgtgtgtctggcctttgcttggtgtaatgattcggtattgttgtgtgtgtcagtggtttcttcctttttattggtaatagtattttgttttatgaacataacagaatttttaaatctatccacctgctgatggacatttgcttgagtttgaggctgtgtaaagcaactgtgaatgtttatgtgcaaacctttgtatggacgtaagttctcattgcacttgattaaatacctgggagtgacatttttgttttgctttttgtaatttcattttaagttcttgctgtatatttaccatacattctaagtatggaccaggaaatctctttatgaaagtgctattttgttctcctttttaataaggcaacagaggtttgtttgttgttgttgttttgtttttttttccctgcctgtttctaagtcttagcagtttgtctgttcctcttctgccctttagattctggattttggactggctcggcacacagatgatgaaatgacaggctacgtggccactaggtggtacagggctcctgagatcatgctgaactggatgcattacaaccagacaggtattactcgccttggttatttagggccttatttaattccatgttggatgcatttgggattctcagaaatagagatggtgggagtgggaagaaatgtcttttcttccctcagtgatccttttaaagcctgcaagtaaaaatatttcacttcctcagatggggaagtggggttttatacacagcttttaaaccttgtgatttagcaattgggtttttatttatttagattttgaatatattctctgagtacttatacctaaagacaattagtccataattttaacccctcaatgttacttggaagaatctaccattctactaataagaaacttgcccctttttaaacagcttatttctcttaagtgtgttttgacttaccccacctttgaacagccctttagtcaggtgaagatcttagtaagctatttatttctgtaaaaatgagtatgattgttgagcctcagatgtcttaaatagtaatttgaatatttcacccctagttacggtttcatttgttgccaagaattgtaacagtgacattgcatatacttttacttctttttaattttgccagttgatatttggtcagtgggatgcataatggccgagctgttgactggaagaacattgtttcctggtacagaccgtatcctttaaaaagttttggattcttgtttcttatctgtattccagtgtccat

SEQ ID NO: 15108 - DNA, 1886 bp, Homo sapiens
tgttgccatttctctgcttacccttcacctttggtgcagaggtttcttgaatatctgccccagtagtcagaagcaggttcttgatgtcatgtacttcctgtgtactctttatttctagcagagtgaggatgtgttttgcacgtcttgctatttgagcatgcacagctgcttgtcctgctctcttcaggaggccctggtgtcaggcaggtttgccagtgaagacttcttgggtagtttagatcccatgtcacctcagctgatattatggcaagtgatatcacctctcttcagcccctagtgctattctgtgttgaacacaattgatacttcaggtgcttttgatgtgaaaatcatgaaaagaggaacaggtggatgtatagcatttttattcatgccatctgttttcaaccaactatttttgaggaattatcatgggaaaagaccagggcttttcccaggaatatcccaaacttcggaaacaagttattctcttcactcccaataactaatgctaagaaatgctgaaaatcaaagtaaaaaattaaagcccataaggccagaaactccttttgctgtctttctctaaatatgattactttaaaataaaaaagtaacaaggtgtcttttccactcctatggaaaagggtcttcttggcagcttaacattgacttcttggtttggggagaaataaattttgtttcagaattttgtatattgtaggaatcctttgagaatgtgattccttttgatggggagaaagggcaaattattttaatattttgtattttcaactttataaagataaaatatcctcaggggtggagaagtgtcgttttcataacttgctgaatttcaggcattttgttctacatgaggactcatatatttaagccttttgtgtaataagaaagtataaagtcacttccagtgttggctgtgtgacagaatcttgtatttgggccaaggtgtttccatttctcaatcagtgcagtgatacatgtactccagagggacagggtggaccccctgagtcaactggagcaagaaggaaggaggcagactgatggcgattccctctcacccgggactctccccctttcaaggaaagtgaacctttaaagtaaaggcctcatctcctttattgcagttcaaatcctcaccatccacagcaagatgaattttatcagccatgtttggttgtaaatgctcgtgtgatttcctacagaaatactgctctgaatattttgtaataaaggtctttgcacatgtgaccacatacgtgttaggaggctgcatgctctggaagcctggactctaagctggagctcttggaagagctcttcggtttctgagcataatgctcccatctcctgatttctctgaacagaaaacaaaagagagaatgagggaaattgctattttatttgtattcatgaacttggctgtaatcagttatgccgtataggatgtcagacaataccactggttaaaataaagcctatttttcaaatttagtgagtttctcaagtttattatatttttctcttgtttttatttaatgcacaatatggcattatatcaatatcctttaaactgtgacctggcatacttgtctgacagatcttaatactactcctaacatttagaaaatgttgataaagcttcttagttgtacattttttggtgaagagtatccaggtctttgctgtggatgggtaaagcaaagagcaaatgaacgaagtattaagcattggggcctgtcttatctacactcgagtgtaagagtggccgaaatgacagggctcagcagactgtggcctgagggccaaatctggcccaccacctgtttggtgtagcctgctaagaatggcttttacatttttaa

SEQ ID NO: 15109 - DNA, 1125 bp, Homo sapiens
ttccaccctcctggaaactgttgtattgtttccttcttggaaaggtagacatattgtttgtttgtggagccatctcagctgggcatgaccctctgagggatcaaatatttggacagaagccgaaggaaatactggcagatgtttctaactcctagctgtggctttccctggggtgtggaggagggcaaggagagagtacctttgaagagcgggaacacagttccatgtggctttcctgagcgcgctccaactgcagcgcttactccgagctctgccagctgggcggcccgccacagggagactgggagccaggagcccagaggcccgtgtggtgatctggctggctgaggtggagttgagtttttgcacactggagggtgtctctatgacccctgttctgccctgaggtccctcctctgagctctgacctggggctgggtgggacccggcactgttccaagaacccctcatgccttccagctacctggtgatgcccttcatgcagacggatctgcagaagatcatggggatggagttcagtgaggagaagatccagtacctggtgtatcagatgctcaaaggccttaaggtgggtggggacttggaggctggcagaggggacgccttgctgtctagacctgaggtttggggaggctggagggagcgcactgttacaggtcggccagcctgaagtgcctggtgtggaagctgggccatggactcacccttctctctctcccacatagtacatccactctgctggggtcgtgcacagggtgagtgctttctctgccatggtcctcagaggcccctgtcccatccctgggtatggggttctctggcaatcaaggagtgggaaagttggagggaggggacactgcccaggagcacagaatgtggagttttcacacccagccacggcccaggaaggcctgctcaaaagagtcactgtgtcccaggggacttcatggggaattgctgcagacaaagtgagccctgagctgagtgtttcaggcttcaagaatcaggaacattttagagctgggtgggccctgagagaacacctagtccaaccctcattttacacatgaagaaactgaggcccagaaggggaaggggcctggc

SEQ ID NO: 15110 - DNA, 1883 bp, Homo sapiens
ttagataaagtggtcagagaaggtctcactgagaagtgttgttcacttgaagaaatgaaagactcaaaggaagtgaaggagcaagccatgtggatgcctgaggggcaagttgttcagacagagggaaaagccagtcctcttggtggatgcttgatcatatgggaggatgaatgggtgcataagggcatccaactcatagtctcctggccttctctccttaggcctgtcccctcagttcccaggtgccatgaggaagcctcgtcggaagtcccggcagaatgccgagggccggcgttccccgtccccctacagtctcaagtgctcacccacccgggagaccctgacatatgcccaggcccagcggattgtcgaggtagacattgatggacgcctgcatcgtatcagcatctatgacccactcaaaatcattactgaagatgagctaactgcccaggatatcaccgaatgcaatagtaacaaggaaaacagtgaacagcctcagttccctggcaagtccaagaaaccctcatccaagggcaaaaagaaggaatcctgctccaagcatgcatctggtacttccttccacctcccacagcccagcttccgtatggtggactcaggcatccagccagaagcacccccgctgcctgctgcctactaccgctacattgagaagccacctgaagacctggatgcagaggtagagtatgacatggatgaggaggaccttgcctggctggacatggtgaatgaaaaacggcgagtagatgggcacagtttggtgtctgcagatacctttgagctgctggtagaccggcttgagaaagagtcatacttggagagtcgcagcagtggggcccaacagtcactcatcgatgaagacgctttctgctgtgtgtgcctggatgatgaatgtcacaatagcaatgttattctcttctgtgacatctgcaacctggctgtacaccaggagtgctatggcgtcccatacatccctgagggccagtggctatgccgctgctgcctgcagtctccctcccggcctgtggattgcatcctttgccccaataagggtggcgccttcaaacagaccagtgatgggcactgggcccatgtggtgtgtgccatctggatccctgaagtctgctttgctaacaccgtgttcttggaacctattgagggcattgacaatatcccgcctgcccgctggaaactaacctgctatatctgcaagcagaaagggctaggtgcagccatccagtgccataaggtgaactgctacacagcattccatgtgacatgtgcacagcgggctgggctcttcatgaagattgagcccatgcgcgaaaccagcctcaatggcaccatctttacagtgcgcaagactgcctactgtgaggcccactcgccaccaggtgcggccactgctaggaggaagggcgactcccctagaagcatcagtgagactggcgatgaggaagggctgaaggagggtgatggagaggaggaagaagaggaagaggtggaggaagaagagcaggaagctcaaggcggggtgagtggctccctcaagggagtgcccaagaaaagcaagatgagtttgaagcagaagatcaagaaggagccagaggaagcaggccaagacacaccctccactctccccatgcttgctgtcccacagataccctcttacaggtaagcatgcccagaagggctccttagggactcatggtttcttcttgggttggtgttggccctgtgccaggccttcgctaaacacagttggacactatatcctcctccccgaatttaaactcttccttttgaccccaggctcacctggcctggtttgtggttttgattttgccctcagagtaatgtat

SEQ ID NO: 15111 - DNA, 1401 bp, Homo sapiens
aatcatactctttttttttttttaattgcatcttaaatttgaataggttgtacatgcccatagtaataaaaatcaaaaaggtacaaaagagtgtataatgaaagctagcactcccctccctggaacatcaactgctagcattttcttttatatctttccagaggtaatccatatgtatacaagccaaaacttgcatgaataattaagagagtgagtggagaagcctaatatgcacatgttcctctaaaccattcctttttttccagctaataatatatcttggagatccttctgtgctttttattggcttcccagtgtcccattatataggaatgctatcatttgcttagccagtcctctaaaagatggacgtttagattgttttcatttattatcgtaaccagtgttgcagtgagcaaccttatgcatagataattttatatccatagggagcctatctatagaagtggaattactgaattgaaggaagtgtgtgtttgtagttttcatggatactgcctgtccccattcacaaacgttatcagtgatagcctgtatcactgaatctcgcacatacataaccctgtagttttatgggccttgtctccttggataaaaggaataaagggcagggcaggacctgggggagaggcctggggtggtgcttaggtgggacaggtgcagagcaggctgttctctgagctcatctctgtccagccctgctatacaggggtgtgtgctccctggatgccctgtctttgaagtgtccatctaacacacaggctgcagggcttctcttccttcgttcctttacccaactgctttattttcccttagcatcagtttctttctcgtatgtgtgttgatgaatgcatgcctgtgtgtttcattgctttctgtaactgtcagttcccaaaaggtcaggctcatgtctaaatgaatttgtacagcatctcacacaaagccaggagtggattggcacactttgtgcttctggtggtgacatcttattcttacttttaaaaccacatgcttactaaaattacgccaaaggatattgacctcccatagttccatcactgtaacatgattgtcttcatttttctgtgttgccttctgtttatttcaggcacatttttaacaaaatgctgacccaaacacatgcacttttgtattctacttttttcaatttttttttgtactttcttcatgttgacacataatctttatatatctcatattattggaacagtgtatctaacaatgcattataatttacttaaccattctattgttaggcatttgggttgtttccggcttttagcattatatgtaatgtagtgaacccatatttttgtttaaaatccttttattcatctttaaagttatttttctcagaat

SEQ ID NO: 15112 - DNA, 1180 bp, Homo sapiens
ggctcagctggccccagagggcagcaggtgggcctttcttagcctatggacccttacaactctccaaacagagtaagggcccagagaaggacctagctgcaaaattgattccatgccattcccccacccgactcctgcatatcctgcttgctgtcctcacctgctaggttcttggtggcctcctgcatggagtcccccaatttgcttccctctgccctgtaccctctccctggctttgctggtcctggccaagtggggccacaggagcccgagccccctgtgagacccactactgcccagcctcttactgtgcttgcatttcaggcagtggcttccaagggacaaagtcctgcccttgggtgtggaagacaccgtggacaagctcaagatgctggaaggccgcaagaccagcatccgcaagtcagtgcaggtggcctatgaccgtgcgatgatccacctgagcagagtccgggggccccactccttcgtcacttccagctacctgtaagggcagggctgggcctgcatccgcttgccctgcctccatcccgcagggcacagagaagcctcttctgcccctgccagatgtatggccggcagcttccccctctcatggtaggccagggactgggctttctccccactaagggcaaggccccagttttgaccaatcgcatggttctcctggcaggcctgctgtgtgccaaaaactcccacccaaggtccctcaggggatatttcactgaagaaccagttagaagtagaaacagctgtggggcttgggcccagcttaggagattgcccagatggcaagaggtcctgggctccttcttgaggggctgcctggcccgctccatcctactcccactaactacacctcagggcgggtgaggttccgacactgatcccagagatgccgtggatacgccagggtcccagggggaatctccccaagctcacactctctcccgcttatcgcctattctcacacctcttctcggtcccatcttctgcacccattgcccagtcttgctttctctttcccatattccttttctttttctcttgtgccaaactgacagaaaccgtcaccacactggtctttttctttaatgtctcattccccttgaggccagctgctatgccaggtggtgtctctgccaggctcctcaggcccaga

SEQ ID NO: 15113 - DNA, 1879 bp, Homo sapiens
ccacctcccacccacagaccttccctttagctgttgacacaacttcccagctctgcaagtgtgccccctggatcaaggcgggtcccctcttgtttttttctttgctgccacgaggtggtccaagccttcagggtgggctcctatcaggctgggtgtgcgagtgtccatctgtccacatggatgtcgagggtggtttgtgtggagctgtgctcgtcagctgggtctgccctcttcccccttttctccttcttctctcctcatggactttttctgcaattgcagtcttaagcttcactctccaccacctggatggcatggcgcctgccaccaaacatcttcctggcctgcgctctgccctgccctgcctagcctctgctactcccacttcccaactccagggaatgcattacttttatttcaaaccctctgcctccttccttctttctcttcaaccccctccccaccttcaccttctcaaaaatggaaggaaaaaaaaactgtgaatggggaatgctgactgacaaaccaacacaactttcagaggcttcagtgtctgttctctggacatttcttttcacctcctgagcaccaaagtcgcagggccagttgcaggccgctgattgccatgttgatttttaacctgatattctttttaattgttttaaatttttcataggggagttttggacaaaacagtcactggggagatcactgccatttttacacacttgactttttaaaaatacaaccaaccaaccaccacaacttcttatacatttgggacatgagccagagtttaaaagggaaccaacaaaacactataacttaaaaggatggggttttggattttgtataataataaaaacaatacagcatatggctagggaaggacatggtgtatataattgtaaaatactgttctaaattattcaggcctatagtttccattactggagtcctccattgtgtggccacacagtgtcgttgatttaaaggagccagtgcttcccctctccccaggtagttggtcagctgtggactctgtgacctttgtctaaacctgtgttgtaagatcttgggacttcctctctttctatgtctatctcttccccccaacactttctcttcttagtctctctctttatttttcaatctctgaatattttagtctctctctgagtctcattttttaaaatgctcttttagaacgggaaacggctcagatcctgctgtggcacggggcctatgtgtctctgtcgcgtctgctgtgaagcacatgatgctctatttattgtagagagtgactttatttgctttctagaattgtttataacagatggtataagagaggtaataaacagagaaaaatctatgcttgtaaagaatacaaaagttaattttacctactataatatgactgtctgaaacttattttctctctgagaaataaatgttctaatgggcagtagttgctgtgttgtgtttaatcagtaggggcctacccctgtcttcccattccctacagcctcctcctcaacaggccaggaccattaagaaagtttcctagctagcgagggctgtatctttctttttttttttttcttttgagacagcgtctctgttgcccaggctggagtgtagtggcatgatcatagctcactgcagcctcgatttcctgggctcaagagatcctcctacctcatcctccccagtagctgggactacaggcacgtgccaccatggccagctgtttttttgttgttgttgcccaggctggcctcaaactcctggactcaagcaatcctcccgccttggcctcccaaagtgctaggattacaagtgggagccaccatgcccagcttctgtctatctcttggac

SEQ ID NO: 15114 - DNA, 1381 bp, Homo sapiens
agtcccttctagggacaagacctactaatctgaccaggaaggaaatgaacatgtaggtgactggggctgggaaagcatgggacagggactggtcacttcgcacatattttccatgctgtgattttgggagaaaactgatgtggttaggaaggagaaagtatggacaccagagtgagcacaatttgttagtcatgagaatggcctttttccattgcaggttaccctacctgtaaagaaaaaattaagagaaggcctggcggccggtctgaagtcatctataattatgtacaacgccccttcatccagatgtcatgggaaaaggaagaagggaagagtcgccatgtggatttccagtgtgttcgaagcaaatccctcacgaatctggtagctgctggagatgatgtcttggaggaccaggagatattaatgcatcacccaccccaagtggatgaacttgaccggctaaatgccccactttctcagatggcttctaacgactttcaggattagggccagctgtgggtctactccttgttggagcccatctcacctgggatgcctgcagccagccctccctcgtgatttgtctcaccttgagtaggagacatgcttctcccctaaccttttcctttctgccataattaacatatgtccttttcagtaagtccatgcctctggcaggggatgaagaagtactcactggtaattagctaccatctttgcagcagccctggtaacttgaaaaatttgggtctggtgctgttcattgagtctttgtgtaactgcaaaagcaggaaaggaagtcaagactcctgttgcctcgtgcttagcaaagcagtccttatcctttatactctgttcttgggttttgtttttgtcttgttttataccaggcaaattgcttagtagcaaagggaccaaactgaaaaggtgacaatctctaacttctaaaagcagacaccaatcggatgctcattagaggttaatgaagatgccattcttggtggcctctgcacccaaattgcatctggaaagaactagggtctcattcagaatgtccaaaaggaaattcttaagagcttaaattcagatttgtgtctcattaatgcagtgaacaattcaaaaccacacagattccttggcaggaaggataatggaataacagtgttgatgagacctttttagcttcaaggtttcggagtctaaacaaatggatgattcatttggaatgaaactcacaatgcaagtagaaggacctctccaaatcaggccagttgggttatcctggcttggaatctggtgtgaaaccataggtcttaacactctggagcagcacattgctgtggatatgtccaggagaccttagatatggcttaaaggc

SEQ ID NO: 15115 - DNA, 2097 bp, Homo sapiens
acaaagacaaccatttctactacgtcggccataaacagctatcctgctttggaagagaagcatcatgagccaatttgataggtgttttaaaaataacttgagttttcctaagttcatcagaatgaaggggaaaaacagccatcatccaacattattgagattgtcgtgtatagtcatcgaatatcagccagttcctgtaattttgtgacacgctctctgccaagcccaccaagtatttcctttatagctaaaagttccatagtactaaggaaataaagcaataaagacagtctcagcagccaggattctggctgaaggaaatgatccgccaccctgagggtggtgatggtagtttctacccatacctcagcctcaggcgagtggcttatagcctccattcatggtgcactttatttatggtactaagataaagactgtcaatccattgatttatctcctcctgtcccccatctaaaatacccatgctgcttttctgagtgttgatgggggttaccagcttgatccactgttgctcttagaaggcccagaaagtctttgggcattgccaagaaatcccggattatgtggaaaaccctcactttctcttcacggctgtaccagaaaatccctaagacagatcttgccgtggactagcaatacctgcaagtgctgccaatgggaactcaatttattcctgggaacctaacgaggagagcccaggcctaggcaggaggcctggaaccctcttggctaaggtgctgttcctgttcctgcaaggtctccagaacccctttggaaatggtgaaggaaccagcccaatagaagtacagagccagctgacaagtccttgtaaagctcactcctcagtccttggcacagccatgttttgtcttctctcttggtatttcttctctcccaactttagccattttgccttggaatcatgattacaattttttcctttgcagatgccttcctgggggatactcctccccaccctaaagggtcgcctgcaacttaggcggattgggtctctctgctgtggcgttctctcttgagagaccctctgaattttagcacaaagtgccttctgtttcacagctgccaccacctttagaggaatttcgtcagaaaaatgtggaggctccatattaatgcattattttttaaaaagttttgataactcttaaagcatcatttgcacctatgtgggaactttgcctgttgcaaagtattgtggccgagctgcagctgggagcctgctttctgccagtcttgaggttctgaagatcagctttgaaaggaaagtatgtcctagcttagccattcagaagagaaaaatggaatatcagagttacagttgtcagtgaaactactttggattttaacctcttagaggaagaaaaaaggttagggaagtgtcaactctggatgaaggtgatgtgtttgcctctcagtctttcattcatagcctgctagtgaaaaggaagtaaatgagattcttttgtgtgactttgtagtctctttgtattaccaaatagttggggtgttgactcctgtgtgttttgcaagaatgtgtggtaagcctgggtaaagagaaggaactgcggtgttgggagagtctttgtgttggggagtggcaggggatgatttgtttcaggggaaaatgcccacattttaacttttaaacttctgaataaactgtgtaaaaacagtagtggaaatacgtggtgtgatttattaaactgataagaacagatactgcatttgatcttagcaaaaaggctgagaggggattgtgatgtgatttaaagcagatagtggcatataacttagaggcagagtgctgatggctgcttttaacccctttgtccacaaaccattacaacgcctaatttcgagtgttaatttcaaaactgtatcaccatcttcatgcaaagtgcttttccatctcagggaagctgggactgacttttgttcttagggagctagtctcctgaatcactgtccatatgaagagacttctcttgccccgactgcatgtgcttcttccacccacctcagtgttgcagggcagtgggccctcccctcacagta

SEQ ID NO: 15116 - DNA, 1175 bp, Homo sapiens
aaattagtcggacgtggtggcacacaactgaggtcccagctactcaggaagctgagttgggaggattgcttgaacctgggaggtcgaggctgcagtgagccatgatcacgccattgtactccagtttgggtgacacagcaagaccatgtctcaaaaaaaaaaaaaaaaaaaaattctgaataccatatagaaacagaggaatatttgagtacaagaagtagtaaaattgtctctagatgctatggaggggtcagctatgtttaaaaatcagtatttggataaaaccaaagatgatatgcagaaatgaaaatagttttattagtataataggatttgggattaaaaaatttatctgcaattacatgatttttcctatcataaaagaaggagcagtgtactttggctgtagagctataatggatgctggaaggagcagaacgtaatgttctgttctacctccaagaatactcatccatctatcaccttgtttcttccccatagggccatgtgaaactttctgactttggtctttgcacaggactgaaaaaagcacataggacagaattttataggaatctgaaccacagcctccccagtgatttcagtaagtggtaacaattacgttagccttttcgttctaactgggcctagaagagctgtttcccttgtaaccaaattagaacagataggagattctcacactttgagtatgtagagaataaaaataccttcccaggtttgcctgtgatttgtgttgtctggtgaggcaagatgaatgagtgggtaccaagtgtgtgaaggcagaggttgaaaggggtctttagaggtctactgggaaggtcactggggatgagtatgggacaagcaagcagaagtagtagaggaaaaactcctgggaacagttctgggctagatttgtcctgggctagatttgtccttcatgacagaaagaagtttatctttatgacagtcacttccatttgagcactatgaaatcgttgacaactatgtagtaaaatttcagttcatcctagaaaagcatatgtcaaatcatgtatcataaattcagatgtccctgatcatataagttactactacttggaaaattgatggtaattttgagaaattgtgactgttttaggtccacgttaggacctcaattctagttgagactg

SEQ ID NO: 15117 - DNA, 1480 bp, Homo sapiens
gatccttctctaggtctcgtaggtaagatctttgataacttgtatttaagactttgcatacatagtatgctaaggcctgtcttctaagccataaattttttaccttaaagttctatttcgatatgtcactaaagtgtcaccaagttacagatgtaatgttttgttttctttttttttttttttttttagtcgatctaggtcaaatgaaaggaaatagaagacagtttgcaagagaagtggtgtacaggaaattacttcatttgacaggagtatgtacagaaaattcaagttttgtttgagacttcataagcttggtgcatttttaagatgttttagctgttcaaatctgtttgtctcttgaaacagtgacacaaaggtgtaattctctatggtttgaaatggatcatacgaggcatgtaataccaagaattgttactttacaatgttcccttaagcaaaattgaatttgctttgaacttttagttatgcacagactgataataaacctctaaacctgcccagcggaagtgtgtttttttttaaatttaaatacagaaacaactggcaaaaattgaactaagatttacttttttttccatagctgggatataggctgcagctatagttgaacaagcagtctttaaaaactgctgtgaaacacaggccatcagggaaaacgaaatgctgcactattaaattagaggtttttgaaaaatccaactctcatcctgggcagaggttgcctagttggtatagaatgttaagtttcaagaaagtttacctttgctttaggtcataagttccttatttgattgctgtatatggatacatggctgttcgtgacattctttatgtgcaaatttgtgatttcaaaaatgtcctgccagtttaagggtacattgtagagccgaactttgagttactgtgcaagatttttttttcatgctgtcatttgtaatatgttttgtgagaatccttgggattaaagttttggttacaaattgttctttaacttgaaagcctgtttttccttgcaaactcaaatctgtgagcttggtaccaagtccaggtataacattcctattggaagccatacttatattttcttgtaaagtgcttttgaattaataaaatattagcataattgtgtatagtcagttgaacccactgttaccattgttcttatcccatgggaagcagttggttacacgattcttattttataagaaacagctgagaggcactatggattagtcttctgaagtgaaggaaatatagatgtcacctaagtgatagttaacccattttttttttttttaggcatagaagccagttcagggtccataatatttagtgaccaacattttaaagtatagcagcaacctggttcttaaacacaaagtaagttgcccattaacaaatggcttttatctttagcatgaaaactttccacaggtctaaaaattgcttccattttata

SEQ ID NO: 15118 - DNA, 1111 bp, Homo sapiens
tggggggaaaacaaattgattttagctgataatacctggtggcaaacaggaccctggtccttgctcttgcaatagacttgcctttgttgacattagcttgcccttcagttgcctgctctcccagtgaccttggtgtgccaggctggctgagctctgctggtgggggtcaggcctcctgtgggaaggaagcaggaagaccagctggaaggagtgagagagaccctctggtaggaagacgtcacctgaggtgacacagcaaagcccggccaggtaacatagtgtctaatctccgccgtgaccagggccttccttgtatctctgctgcaggcgccatgtcagaaccggctggggatgtccgtcagaacccatgcggcagcaaggcctgccgccgcctcttcggcccagtggacagcgagcagctgagccgcgactgtgatgcgctaatggcgggctgcatccaggaggcccgtgagcgatggaacttcgactttgtcaccgagacaccactggagggtgacttcgcctgggagcgtgtgcggggccttggcctgcccaagctctaccttcccacggggccccggcgaggccgggatgagttgggaggaggcaggcggcctggcacctcacctgctctgctgcaggggacagcagaggaagaccatgtggacctgtcactgtcttgtacccttgtgcctcgctcaggggagcaggctgaagggtccccaggtggacctggagactctcagggtcgaaaacggcggcagaccagcatgacaggtgcggacatgtgcacggaaggactttgtaagggaccaggattctcagaatccatggtccaagggctgacctgtctggtcctggtccagcatgctccaggtagaaggaaacaggcccagagaggggaagcaacctccctgaggtcacacagcaagtaggcagcaaagaccaactagctaacatttattgggaatgttcattatgccaggccctttgccaagcttctaaggtagatttatttagtccttatagcaatgttataacataagacattcttgtcaccctgcccgcctttctttttgagacaggtgtcttaactctgttggccagactg

SEQ ID NO: 15119 - DNA, 1449 bp, Homo sapiens
aacgccggctgatcttctccaagaggaagccctaatccgcccacaggaagcctgcagtcctggaagcgcgagggcctcaaaggcccgctctacatcttctgccttagtctcagtttgtgtgtcttaattattatttgtgttttaatttaaacacctcctcatgtacataccctggccgccccctgccccccagcctctggcattagaattatttaaacaaaaactaggcggttgaatgagaggttcctaagagtgctgggcatttttattttatgaaatactatttaaagcctcctcatcccgtgttctccttttcctctctcccggaggttgggtgggccggcttcatgccagctacttcctcctccccacttgtccgctgggtggtaccctctggaggggtgtggctccttcccatcgctgtcacaggcggttatgaaattcaccccctttcctggacactcagacctgaattctttttcatttgagaagtaaacagatggcactttgaaggggcctcaccgagtgggggcatcatcaaaaactttggagtcccctcacctcctctaaggttgggcagggtgaccctgaagtgagcacagcctagggctgagctggggacctggtaccctcctggctcttgatacccccctctgtcttgtgaaggcagggggaaggtggggtcctggagcagaccaccccgcctgccctcatggcccctctgacctgcactggggagcccgtctcagtgttgagccttttccctctttggctcccctgtaccttttgaggagccccagctaccctttttctccagctgggctctgcaattcccctctgctgctgtccctcccccttgtcctttcccttcagtaccctctcagctccaggtggctctgaggtgcctgtcccacccccacccccagctcaatggactggaaggggaagggacacacaagaagaagggcaccctagttctacctcaggcagctcaagcagcgaccgccccctcctctagctgtgggggtgagggtcccatgtggtggcacaggcccccttgagtggggttatctctgtgttaggggtatatgatgggggagtagatctttctaggagggagacactggcccctcaaatcgtccagcgaccttcctcatccaccccatccctccccagttcattgcactttgattagcagcggaacaaggagtcagacattttaagatggtggcagtagaggctatggacagggcatgccacgtgggctcatatggggctgggagtagttgtctttcctggcactaacgttgagcccctggaggcactgaagtgcttagtgtacttggagtattggggtctgaccccaaacaccttccagctcctgtaacatactggcctggactgttttctctcggctccccatgtgtcctggttcccgtttctccacct

SEQ ID NO: 15120 - DNA, 1821 bp, Homo sapiens
ttagtgaggagcatcaggggtcaaggctggggaataggtgaggacaaggaagatgaagtcgccagaatagtgtagtgatggcctttgtacagggcagagagactgccctgaggggttgtctgggtctggacagaggccagaacaaagtcctggctgctttttcatccctaggatggggcagcagctctacactggacctgtggggttatttatactctttcctttcttcctttttcccaccaggggctggaattctcgcaatggccaatgcggggccagataccaatggcagccagttctttgtgaccctcgcccccacccagtggcttgacggcaaacacaccatttttggccgagtgtgtcagggcataggaatggtgaatcgcgtgggaatggtagaaacaaactcccaggaccgccctgtggacgacgtgaagatcattaaggcatacccttctgggtagacttgctaccctcttgagcagctcttctgagatggccccagtgaaccagcttctagatgacatagaatgacatgtaatgctaaattcattttggctttgcaagtcatgaagcttaggaggcctggcatcttgggtgagttagagatggaagtacattttaataggatgcttcttttctcttcccccagtgcctaggttgccagagcatttgcacaaatgcccctgtttatcaataggtgactacttactacacatgaaccataatgctgcttcttgtgcatgtctgctctgatatacgtcgaacaatgtagcagccactgtcatttctcagtggttttgcctaaccaaacttcttcctaaggagatttatattctggcctacacagcagtccttgatggctgacagccacagaattccaaaccaagtagtgtctgtcagccctcttaactctgtgcacgccctatttcagtcttttacatttgttcttctagggaatgtatgcatctctatatatattttccctctcaaaaccagaacatcaacagtgctgtttctgacacttcagacatcccacgcaaagccacattgaatttttgccaaatgaaaaacacatccaacaatcaagtttctaagaaggtgtcaagtggggaataataataatgtataataatcaagaaattagtttattaaaaggaagcagaagcattgaccattttttcccagagaagaggagaaatctgtagtgagcaaaggacagaccatgaatcctccttgagaagtagtactctcagaaaggagaagcgccactcaagttcttttaacccaagactttagagaaattaggtccaagatttttatatgttcagttgtttatgtataaaaataactttctggattttgtggggaggagcaggagaggaaggaagttaatacctatgtaatacatagaaacttccacaataaaatgccattgatggttgaaattgctgctgtggtctgattctaaatattgtatgaggttccaatggtcattttaatcccagtcatcttaagtagtagtacagagattgaatgttcaagatttcacatcattttaggcttgtggatctccagtagacttctccctctttaagagcaattctaactttaaaagggcagaaccagagaaagaattaagtgacagaaattgacatttctgaataagaggtgtattcatctgttttcacattgctataaagacactacctgagactaggtaatttataaacaagagaggtttaattgactcacagttccacatggctagggagacctcaggaaacttacaataatggtggaaggcaaaggagaagcaag

SEQ ID NO: 15121 - DNA, 1188 bp, Homo sapiens
tttttcaggctttttgttaatttcttaatgcttctatctttctttaaatgtgctgtttgtttgcgtgctagagtgcccagttgaacaagctgagcaggcttccccctgcgtctccctgtgcctcagaagaagggtcatgctttttgtcccttcctccttctctcttctccccttcccccgcctggcctgctgttacttcagtcttttccaagatagaatgaatagattatttctttccttccaatatatattgttttagctgcaatttagaaacactccacccacatactcaaatcatggctgtagagtttatgcctgtgtgtgtacacattatagttcattgactctgtgcaactattcttcagggacctagtacttaagatactgtactcatatttttccctctttacccaccgcccacagttttcccacccttacttggctctctcttagtcatgggctggcttgaccagtttaattactttttttctgtttcatacttctacaggaggagacctctgaacagatcacaaatgttacgtgagctttttcctgttttcactcacctgccatttccaaaagatgcctctttaaacaagtgctcctttcttcacccagaacctgttgtggggagtaaggtaggaaattttgagaggacttggatctagaattttctttatttgggacctggactgatgtcataaccaaggccttccctgcatattggcttagagggttacagggtgaattgaggggacacccacacagtctagttctcccctcctgctgctagccaggagacttgcaggggcccaccttgtcatgaaggcaggtttccagaaaatctagttaccttgcaaatctgcctcctgcccttaacacctgaggcaaactacttttctatattaaaagaagtgaaatcttaaaatttgaaggacttgagggtgcaattagtctggctttcctaccttaaattagaaagtaggcaagcagccatgatcggtggtcgctcacgcctgtaatccagcacttggggaggctgaggcaagaggattgcttgagcctaggagtttcagaccagcctgggcaatatagggagaccctatctctattttttcaaaaaaagaaaagaaagctataaggtaatagtatgtggatgaatagaataactgctccattttgtggata

SEQ ID NO: 15122 - DNA, 1157 bp, Homo sapiens
cgcttgcccacctgcgcgccgcgccctgcaacgacctgcacgccaccaagctggcgcccggtgagagcaccccccgcctccggcccggggatgcggggcggcggcgggatctcctgggtggggagctggcggctcgcgggccggcactgagtccccgtgcttccccctttcctaggcaaggagaaggagcccctggagtcgcagtaccaggtgggcccgctactgggcagcggcggcttcggctcggtctactcaggcatccgcgtctccgacaacttgccggtgagtgggcgccccgcggtggggagggcgcgccgggcggggggcgcacgggcgtgctttagcccggacgagggaacctgacggagaccctgggcttccaggtggccatcaaacacgtggagaaggaccggatttccgactggggagagctggtgagtgccctgcaggagcgacccccaggatgagtgggtggggtgaggggcgcccccgactcccgccctaacgcggccccctcgcccctgcagcctaatggcactcgagtgcccatggaagtggtcctgctgaagaaggtgagctcgggtttctccggcgtcattaggctcctggactggttcgagaggcccgacagtttcgtcctgatcctggagaggcccgagccggtgcaagatctcttcgacttcatcacggaaaggggagccctgcaagaggagctggcccgcagcttcttctggcaggtgctggaggccgtgcggcactgccacaactgcggggtgctccaccgcgacatcaaggacgaaaacatccttatcgacctcaatcgcggcgagctcaagctcatcgacttcgggtcgggggcgctgctcaaggacaccgtctacacggacttcgatggtgagccaggcccgggagggagctgcccaggtgactcggcccggcccggcccagtccggaggcctcggccagtctcccgcgccagccttttgtaaaggtcattgggccgcctggctcgatgctagccggggtgggacgcaggagagcctcccagcgtagtaaagccggggattttcagccagctgaacctgtaatgtttctggcatgattttattcttcaagtggaattcagttagttccaggctttcccgatgaataagagg

SEQ ID NO: 15123 - DNA, 1746 bp, Homo sapiens
tggctgttttgccagggagtaaaaagttaaaagctcttttagcatcttctttaaggcagcagctccaaatattttggtaccagtgacctcactgtgggtggtgttcgtgtttgtaagttggtaggtgaattgaatcatttcatcatgctcagtggtgtctcatcaaaatctcttgtcatcatccttcctatttctggtgagtgggtgttgtgggaaaggcccccactattgaagtttgaaaaccacaggtttaagaggggagtcagtttttagctgaaagcagactggaggacccagatattagtcaataccttcctattgaagggtacccagcacagtgttctagaaaatgcttggcctccctgggaccccagacttgtgggcctctgagaagcaaatggggaagacctttgcagtgtaaaaacaagttgagtcattcataacctcgtctatcctcctttctgcagaatgtcagcatctcattagatggtgcttggccctgagaccatcagataggccaaccttcgaagaaatccagaaccatccatggatgcaagatgttctcctgccccaggaaactgctgagatccacctccacagcctgtcgccggggcccagcaaatagcagcctttctggcaggtcctcccctctcttgtcagatgcccgagggaggggaagcttctgtctccagcttcccgagtaccagtgacacgtctcgccaagcaggacagtgcttgatacaggaacaacatttacaactcattccagatcccaggcccctggaggctgcctcccaacagtggggaagagtgactctccaggggtcctaggcctcaactcctcccatagatactctcttcttctcataggtgtccagcattgctggactctgaaatatcccgggggtggggggtgggggtgggtcagaaccctgccatggaactgtttccttcatcatgagttctgctgaatgccgcgatgggtcaggtaggggggaaacaggttgggatgggataggactagcaccattttaagtccctgtcacctcttccgactctttctgagtgccttctgtggggactccggctgtgctgggagaaatacttgaacttgcctcttttacctgctgcttctccaaaaatctgcctgggttttgttccctatttttctctcctgtcctccctcaccccctccttcatatgaaaggtgccatggaagaggctacagggccaaacgctgagccacctgcccttttttctgcctcctttagtaaaactccgagtgaactggtcttcctttttggtttttacttaactgtttcaaagccaagacctcacacacacaaaaaatgcacaaacaatgcaatcaacagaaaagctgtaaatgtgtgtacagttggcatggtagtatacaaaaagattgtagtggatctaatttttaagaaattttgcctttaagttattttacctgtttttgtttcttgttttgaaagatgcgcattctaacctggaggtcaatgttatgtatttatttatttatttatttggttcccttcctattccaagcttccatagctgctgccctagttttctttcctcctttcctcctctgacttggggaccttttgggggagggctgcgacgcttgctctgtttgtggggtgacgggactcaggcgggacagtgctgcagctccctggcttctgtggggcccctcacctacttacccaggtgggtcccggctct

SEQ ID NO: 15124 - DNA, 1544 bp, Homo sapiens
tgcccatcagcatttagtcacatgtctgaatttctgtgtccagacgagccccatcaaactagttgggaagggccccagtgaccaagtgtataagcatcccttgaagagggattggggcaggggaggcagaaggggctctccagaccccttttccatgatgacccactccaagatattatgtgtaaattgtgttattatgtatatgggtaaagatgtacaaatatatgtcctctttgtagcagatatgattttatatttataatgtgcatcaacatgtgaaagcaatctaggtcactagcacagaggaagttgccaggaaggtggcttcagcacctccaggttggttctgggtgtcctgctgtgaggggtagaacgggaggctgctgaagtgagtagctgagcagctggagccatcccaagcatcagtgtctcagagtcctcctcgcccctttcttcaccccgccccccaacccccagactttcctggagcatctgccctttgctcctagcagcctccccaggaagggactgcagaggcgggcaagccctctctatgtgtttttatccccaccttccccggaatctggggagggcttttgtttttacgttttcaagttcagcattgtattcggacagaagctgtgactgaagactcagtgccaaggaaaggggcttcttgtgtgtccctcgggtttggggctcttctcagagagcagcactccatatcccttactgtcaccttcactccccacacagctcatgagatgtgtgacccctgtttgagttttggtatttggtagtggagggtggggggatgggggccagcagctgtcatcctcctgggaagccgagcagtgtccctggtgggtaacaccctcaagtctctttgccagtgaggccccaccacatcggtgtgagttaggtttctcatctggagctgtttctcaggcattcttcccaaccctcttccttttccccttcggtgtgcctcagtggtctccttcatagagtgagagggcttgagaccctccctcaaccggactaattaaagaaagacacttgtgttcccaagtggtggttttatttttttagtttttatgtttgtatgggaaattgtggataaagtgaaaagaattgtaaataaatggtgtatttcctcctccatctgctggtttttctcctgtatgtgtccatggaacctaaagagtctcctctttttgagtttttcttgctgatactagtaggtgtgtggtcaggccttctgtgaggtgagcagggcatcagcagaggatcaaccagcaaacacttacccgacatccatctatgaaaggtactgtggaaactacaaaaatgagtaacttggtaaatgaaactactaaaaagagttaacttgccaaccactttgagaagcactttacatggattatttcattcatctaaaagaagtatgttatctgatagagggtagaaaacagactagaatttcagtgctggatgaaaacttggagatatctagtttaaccccctcattcgcagaggaaaat

SEQ ID NO: 15125 - DNA, 1104 bp, Homo sapiens
ccgatggtgcccagggcaaagccagggccaatggatggaatttacaaggagaaaaatgccaagtcagagacattttaaaaattggagggcctgccttatgtaaagttactgacagtatttatgcgttgatgggatgtgtagaaagaattcctctatctcatagtcattgaaccagatgacctttcaagatcttggcaaccctgagatacatggataactctttttcagctttctcttgttgtcacaaccgtttgcctttttctacttggtggttctcaagacagctgaagaggagatagctgatgcactgttttggttccacaggtgtctggtttcttaagtcaggacctgcatatgctgctggttgatgagatttgtaaaggacctcccttttcagcacaatgactgatggtatttcttgcattgttgttgtctcccaggtgactgtaggacgaggatttggtgtcacataccaactggtatcaaaaatctgccccctgatgatttctcgaaaccactgtgttttgaagcagaatcctgagggccaatggacaattatggacaacaaggtacaggaattcacagaagcctaatgacttttatttgtttttaaattacttttttttttttttgcataggtaattcatggtataaaattcaaaagtataacttcttctttcctagccatccagttcccttttccagaggcagccacttccatatgctgccagagattcgattatgctaaaataatttctcttgatttgggttaaagtttgttaacttgaagagaatacctgaattggggtagtaggtcctattccagaaactagactaagttactgggcaaataagcctgtttgaggtgaagctcccagagaccctgggaatctgcagaatctgctgacgcttctggagtacacttatggctcagtggacaaggggaggagggagaaactgatctgattgcgcttagctcctttccttcctcactcctttcaatctgagcaacctcccctggcctttaaaacatgttttaaatattggtgttccgaagatttcctttgaataatgggtttttctcctttaaacaaatttgaaaac

SEQ ID NO: 15126 - DNA, 1300 bp, Homo sapiens
aaaaatcaagcaagaaggggagaaggggtgatggtgaaagccttggcaattcttgatagggtaatcaaggaaggcacctctgagcaggaactatttgagggaagctctgaaggaggtggccatgctgccatgtagggaaagagggaatggtaagggggagcatgctggtatgtgggaggggcagcaaggaggctagtgctggggagtggagtgagcgctggggagtgggtaggagaggaagcttgagcaagacgcagattttgtagggccttgtaggcctttgaaaggactttgactttaactcactgtgagaggaatgaggagtgggctttgagcagagagtgacatgatctgacttctgttttctcagttcgctatggctgctgtgtgaggaagagacagggtggcgaggctggaagcagggagtccacggaagggaaatacaggctcctcatttatttatttctcttctttttctccaaagcaaagagattgttctgaagaccgtgctctaagggcatttgaaagactgccaggtagtgcgagcctgagatggtctggaggattctctctagccgtgactccgctgctctgaaggtcaactgagaagtcttgtgggacagagacttgagttaggaagccctcagtcacttgccttccacggtggccagccctgctgccatcattggctgaagcaccaccaggattcacggcacccaactgcttcagggtacttcgtagactctgcctcactacatgtcgaaagagttatttgagttctcttctgtttttttttaatttgttgttgttgttactgttttgatacctcggaaacacctccgttgacagttgttttggataggttgggtgtaccccatggctgcctctgaaggcagtgtctattttgagaggatggcttacctcttctttgtgaaaatactatctcatttcctggaaataaaatgtaaaacctgtcagttgctcagctgggctttggtgtatttaccttccttcccttcctgctcccagacagtctcacaagtaaacaccagcagctcatagattacaaccaagaaagtgactgtatcagatgatagacttcaagtgaatgtcagcctaagaggccaagctgcagatcgtggcaacagatgagctctgttaacctcctgactgtcgtgtttcctttttattacagaggtgggtcactgtttaccttgtttcaggggtgggagaaactcctttccttcagctggcatttgaatgtttccaaatctattttatctgacgtcatgaacacaca

SEQ ID NO: 15127 - DNA, 2075 bp, Homo sapiens
gcaattctcatgcctcagcctcccgagtagctgggtttacaggtgtgcgccaccacacctggctaattttttgtatttttagtagagacagggttttaccacgttggccaggctggtctcaaacccctgacctcaggctatctgcctctctggcctcccaaagtgctgggattacaggcttgagccaccgcgcctggctccatgaagatgtttttatgaggagtctgagctaggcctggtgatgtgataggcattgtgggtattttgagggtgggtgaggcaacactaaagggtgttaatcaccagaagatacatttcctgggtgctgtagctctggtgggagctctggattgtacttgccgaaaggcttattttactctccctgcattctccttcctgttgcccattgagctgtcttgttttccttcctctcctgtcctccacttgcctttgcagaagccactggtgaaggaccgggaagctgagcttctgtactttgctgatgtctgcgcaggcccaggtggcttctcagagtatgtgctgtggaggaagaagtggcatgcaaagggctttggaatgactttgaagggccctaatgacttcaagctggaggacttctactctgcttccagtgaactcttcgaaccctactatggtagggacattgaggagggtactaggaggtatgagggacagcccctctatggggacttcaggtcagaagcagttgttatccacatgccatattttctttcctaggtctcttaccctgggcttcacagttcatgtcagaatcttggttccctctggactatccctttttaccctgggcctgcagaatacaggtcaaacactccctcagcagattctcatcaaggccctattaattcctcctttcaggaacactctgcttttgtggtggcaggagataatgaaactgcctgatctctggctgagaactggcagggtttttaacaaatataaacccaatgcccatctctcgccctctgtgccaggtgcagaatgcactgggttgcagacagctcagcaacccacagcagtccctctgttctatgttgattgtaatttgacagcaaatcctaagtcctttctgaacagtccttattacaaaattgatgcctaaatgtaggtgccttaaacacaacttgggtcttaaagagaaagttccacgagttgatgacttttgactggtcaactcctttgggactgtgtttcattatagcagagtactgttgttcctcctggtccatcactgtaagggagccttgcaggatgggccctagttcttgagacacctgatgcccgtcttcactgacccagagcactcgtgtcccagctcctgacatgtatagggcagatgaactcactatgactcttgtattctgacaggtgagggtgggattgatggagatggagatatcacccgcccagagaacatctctgcttttcggaattttgtcctggataacacagatcgcaagggtgtccattttctgatggctgatggggtaggttaccttttttccatagactgatgcattaaggatttgttattttagaggtttgagaattgtttgttttatctggttctttagctgctcccaaagatggtatttcacagttcagattgtagagaatgcatttttattctttttatacattttttaaatgataattgtgtagagactgatgttgtggatacctttgcctggagcagggtgatcttggtgttgctcctggtggaggctgtctatacatggtcacctgtaagcctctcataggctgacagatggccacctaaccaaagacggcagcacagaggaatccacaggaggctcttgtcagggctgggttaaagtgaatgttcaagaggccttgtctatgggcagctgcttgaggcacagagggaagcccattgcagctttgttcagcagaagctctcacccagtaatctgacaatgcaggcattcctttctggagtgagccaccacttactctagaggaaggacagacaatttggcagctgctccaggatcatatagctagagttgaga

SEQ ID NO: 15128 - DNA, 1922 bp, Homo sapiens
cagcagggtgggaaggagggagtttgggcaaactctcatccctgataccacattgagatcctgggagccctcttttcgtactgagtatggagttgtagagccatcctaggtgccatccccttttggtccaaacattgggcagcgctagatggcaggaagcagccttgaagacccgtctttcccccacagcagcaggggccccagcagtaacaaagggtacctccaggggtttgggtagcgctgccctctggcagtcatgcaccgctgtctgccatagccgctctagggtcttggcagaattctgagcttgaagtgcagctcccttactaccctttcccttcctttttcttccctaataggaggtacaatctgcttttgtttgtcgttaagtggtcactcccatttcctttatcttggccgacaacacagagaggagggggagctgggcagtagcttggggtgggggtgggcacctgtggttgtttttaatgggaaatacctctcagagatgttcatgcaggctccctagggccccatcccagtgccaggctggtttccatggagatagggcactgaggctcccgtgaggttggaatcgacttcaccatgggggtccttcagccagcatccagctccccacccccaggctggcagtagcactgctgagatgctgtatttccacccaattctgggtatatcagtgtgtcttgcagaatcttggatcattaaagataaacatatttttaatgcctgtgtggctctgtgttggggctgctgctgtttgtcctcagtgctttgtgatctgagactggcttggatgaaacagcttgagccagaggtgaaggggaagcagctctactcaaagcagaggagagaaaagagggtttgtttaatcggagcctgttcaagctcttgggcacctgcagggctcccagggctgctgcttgctgctcaagagggggctcaaagaagagttgggggaaattgtgcagctcctgttacaagcagggactgcagaatgaatgaacccacagccccggaagggcagagaggcaccttccccccttacataaatcacacagctcactccatggtggcactgtgacaatccaggatcagtctgtgtgactaaaataacagaggcgtcagaccaattagtgtcactagacttgggcgaaagagggagggagagatagatggtttcactgaccctagcctgcctcccctccaaggagggctggttctgcctgcacgggactgtgcttgggggtgggggatgcagatgctgcaggcacctccctctctgttcccggctggtttctccaccagttagtcatcgccctggtgctggttgccccccaaagtccgccttcactttgctggacttcctcactttggccccaagagtcctttgtgtatggccttagttccctgggcaaccccatcccttgtttttcctacttaactggtttcatctcggccatccacgcccttcctctgttctgccttgctgtagcctcccacctgctcccctccttattccaaagctaggagttttagagttggggggtggaagggtaagggagatgtctgagtttgctgctcctgccacaactccccctctgatcagccccacccctacttctcactacaaaccctacctgatttactggccactgtcaccgtaagtctgtctggtcattaccatgactcttcctgcccactcacagcctccccagccttgcctgcctgtcgaagatggattaactccgcactcccctgggatcgccacatgaccacttcaagtccccaagccgcccttcgctgcacagactgcatttttttctgccataattacaagcaatggcactgactggagggcatgacagtgtgtggtggggggatggacaggtggcacaatg

SEQ ID NO: 15129 - DNA, 1383 bp, Homo sapiens
aagagatgttcaagggaaagctctggattacaattcagaatagaggagaaggcccccagctcgagtgggaaggagacagtgggaagcactttccaagccaaatagtgggagttacttccagggctcgggcactgctggggttgagcagcagacattgtgccacctgtccatccccccaccacacactgtcatgccctccagtcagtgccattgcttgtaattatggcagaaaaaaatgcagtctgtgcagcgaagggcggcttggggacttgaagtggtcatgtggcgatcccaggggagtgcggagttaatccatcttcgacaggcaggcaaggctggggaggctgtgagtgggcaggaagagtcatggtaatgaccagacagacttacggtgacagtggccagtaaatcaggtagggtttgtagtgagaagtaggggtggggctgatcagagggggagttgtggcaggagcagcaaactcagacatctcccttacccttccaccccccaactctaaaactcctagctttggaataaggaggggagcaggtgggaggctacagcaaggcagaacagaggaagggcgtggatggccgagatgaaaccagttaagtaggaaaaacaagggatggggttgcccagggaactaaggccatacacaaaggactcttggggccaaagtgaggaagtccagcaaagtgaaggcggactttggggggcaaccagcaccagggcgatgactaactggtggagaaaccagccgggaacagagagggaggtgcctgcagcatctgcatcccccacccccaagcacagtcccgtgcaggcagaaccagccctccttggaggggaggcaggctagggtcagtgaaaccatctatctctccctccctctttcgcccaagtctagtgacactaattggtctgacgcctctgttattttagtcacacagactgatcctggattgtcacagtgccaccatggagtgagctgtgtgatttatgtaaggggggaaggtgcctctctgcccttccggggctgtgggttcattcattctgcagtccctgcttgtaacaggagctgcacaatttcccccaactcttctttgagccccctcttgagcagcaagcagcagccctgggagccctgcaggtgcccaagagcttgaacaggctccgattaaacaaaccctcttttctctcctctgctttgagtagagctgcttccccttcacctctggctcaagctgtttcatccaagccagtctcagatcacaaagcactgaggacaaacagcagcagccccaacacagagccacacaggcattaaaaatatgtttatctttaatgatccaagattctgcaagacacactgatatacc

SEQ ID NO: 15130 - DNA, 1110 bp, Homo sapiens
gaagtattggtgaagaatgaaagagctaagtccttggggtatagaagtggaatagtgagtaagctgaggtgtggtattctcggcagcccccatttcaccttctgaatttgcttaaatgcaagactttgcttttgtgctggttttaaccaatgtgatgcagcatagcctaacacaacacagtggtttgtaaatcaggctccagtctagttctgtgacattaatgtgcaacagcagaacgtgtttcaacattatcagtgcagtttctctccacggtagtgatggtttcctgcagatgcacttagtctgacttcatcaaaatggaaatgttaacattggaattacatagatggctccaaatccagaaattctgtccactattgttatgtaaatgaacagtgtcaagaatggattttcacttaattttttttagagcctaaagtattaatagttagcctattctctgttggttgtggtagtattccatttttgttgctttactgaatgtcagtttgaataatatggattcatattatgtatagaaatggtaatgatttcacataaattgtcaaatatgtaaatatttgaatatacaagaatttgatgtagacattattggaacttactataaaagaccttacacttgtgatccttgcttcatatggacaagcattttctggagctgtttcctggttgtatctgtattttgaaagtctttccattaactttcatcttctagatccagaattaaattaagactaaatagaggctagttcctcaggcttacaatttaaactgctttcttcttgagaacacttatcacctaacctgggcccatgaaacttgagaaggcgaaatctgtatggaaataagttgtatttgttcaaaagattttcttgaatatctgctttgtttactgccttacattaagcactttagggagaagtaaatatatactacttgctctcaaaatccttaaagtctaattggggagggtaggcataagcattgaaatagcaacacagtatttcaagcaagaccactgaaatgtgttctgaaatcttcaagataccgcagtgtagcatctatctgtcttagctataaaatggggat

SEQ ID NO: 15131 - DNA, 1102 bp, Homo sapiens
attatttatttcatgattgcatcatccttcactgtaggtgattccatcatttttcttttttgggttatagtctttttgaaagcacagttggatataattgatgagtagtggtaaactatctggatgatgaaatgttaacatgtttcaagatataggaaaaataagatcgctaaacttccataatgtgtcttatatttataaagtgagtctattggaccaatatggtaattgcaagatagagcatgaaatttcttgcagtgactcaaaagtataaaggtcatgaaatgccaattcttacaattagttagaactgctgagaaagaaactaaaacaaaaattgagtcagatgaactaagtgttaagagctttaaaggtaaaactgtccaggtttcccgttgtacatatgagaagagggagtatattatcagtggcagagccatgggttggaatgggggctcagatgtgcagtcttagctttcacattccctcaggtggtactagaaagcaaactaaaaatttgaacaacagtcactcccttgtgagttcctctatagttgatggtaggatgtgaagatggtactttctgaaaacatttaaattgtatatgattacataatttgaacaaagcagtgtatcagtgctaaaagctagttggcagaaacttttgtcttaaaagtgatttatttaaaacttctactgaagcccagtggacttctacattccagcatccaggtgtccagtactctcatctataagagtgagctactcgtctagaggctaaggcaagtttcagctagatccagctaagctggtctgaactagtggaatgagccagttgtagctgttgtcattgcatctcccttttgagactatggaagcctaggacttagtctgttaattatcagagaggtcattgctgtatgtgttacgtgttcatggggctactgcagcagttatacttttttcagcagtctcaaaaagttgaatgtgaaaaatgtctgaaaaaattaaaaagggatgttttatttctaattgttcaatgatataagacttccagtactttagttttagtttctctcagtctttagtttattaaataaag

SEQ ID NO: 15132 - DNA, 1236 bp, Homo sapiens
atgcaatgaaagtaatctgtaagtggtaaaactctatacaaacatcagatgtcattaggtcgttctgactagattgtaagcaccttgaagtcctgggttgcccctgatgcttctttttcctctcataggtagtccctcgtacccctgcccttgcctggctggttaagtgaccctttccagccaagctagagttggcctcccctgttattccttcatagcacctgtcacaatttataattttaagttatttataacttaagtttttccattaggcattaagttccttaaaagtggagaccatgtctgctttgttcatatctacattcttagcacctataaaatgcctggcacatattaacagttttttattaatagttactaaaggaatggttccacaggaggacattagtaagtttagggccagggaatgccccttctctcctatatcttaccactggggaagcttttggtcttcaccttcagggtctatggggctagctttctaatgtctcctgagcattttgcatcttcccattaactgtgaatttcactgctggtgacttcattcaagtgaatctcagagcctctaggacacatcattgggcaagatgtggcagctacctttgctgatttgtttctattccatttgtccatggcattgtgggaaaagagatagatggccttggttccctagctggagtgaggtaggtaagagaacttctgactgaacatttccgtcctttgaattttggtacaaatgcaaaggctgccttgaggggcactcacagagccagcatgctttttcatatcttcctgtccatggtaagtgcccctttcataggagagctcattaagacccacattcaccatctaccagcaagaattccatcagaagttagttaccttaaactaagtgtgactttctgactcacatttatgaatatacccagttagattatagaactgcaacatcatacttattaccttgaaattacatttttgttctgaatgaccaagccttgtaaacaatgtaagtactacctaacacacatattctgaaacaagctccacgttaagcgttggtttgtaatgggtgatatttggatagctctgattaaatatgtaaattatgaaaattagaagtggaaaaaaagttacctttgtacttgaaccagctacatattgatctttgactcaataatggatcattctctctcttatagatcttggtcttac

SEQ ID NO: 15133 - DNA, 1232 bp, Homo sapiens
aacaattgcatcaaaaagacccaatgacttttataaaagtagaaggttatttttctctcacttaatagtccagggctgataggcaggctctttcttatgacctcatggtactcaggctggcaagggggctctgccatccttcaggggtgatttacatggttcctttggtggacttggtgatagcagagtacagtatgcccaatgtattaggaccaaggcttgaaagtgttatacatcactaccactcacgttcctttggtgagaacttagctattcgctacacctactggcaaaggaaaatggaaagtgtagtcttaagttcggtagccatgtgccagctaaaatttgctgtagaagaagggaggacaagttttgaaggtcttccacccaatcttttatctaatgttttctttgtacatagcataaaattccatgtcatattgtcaataccttggagccaaaatgaagcactttctctaactccccattctcacctctcgaaaataagtaaaaaattaaagagatatgcttgcccttgtgttaaaatggaagattaaccagatacattagttctgaaaaatctgcagaaattgatagaattgtttcctgccctgcaggagtctttgataatttgtgtatatttacatatccacaaaaatacgtccatcagaaggcctgctggccatttgtggaagataataaaaagaaattcaaactgagataaattctggtagagtatatctaagcacttcataggggagtggttgtttccaaggttaagagtatggctattgtagtctgatgcctttgttcatttggatcgtttaactctgttttttggagtagagacttgtcaagcacccccataattcctgtataattctctatacacaaaacagtgcaacaattctacagtctacaagtatttccaattttttaaaaaaattatttttaatttttgtgggtcatagtagatgtttatatttctgagttacataagatatttgatacaggcatacaatgtgtaataatcacctcagggtaaatgggatattcatcatctcaagtatttgttcttttttctgtgttacaaacaatccagtgatactcttttagccattttaaaatgtgtaatacattattgttgactgtagtcaccctattgtgctgtcaaatactagatcttattcattctatctaactagatttttgtacccattaagcatccccac

SEQ ID NO: 15134 - DNA, 1149 bp, Homo sapiens
ttacaggcatgagccactgcaccccgcctgtttagtagatattaaagttactagtagaatgaactcagcagagctgatttgtttgtcctagtacatgccttttctagttttattaacttttgaaaaataacattagtctcaagcactttgtggttgtgatactaatattacatttaaactctgaacattttttttgtttgtttttaatagggacagggtcttcccatgttgcccatgctggtctcaaactcctgggctcaagtgatccacctgcctcggcctcccaaagtgctgggattacaggcatgagccactgcacccggcctctgaatggtgtcttaatcctcatagatgttctgtattttctatccaataaacttgtctatgctgttcttaaatgcagatactagaataaactggaatgctagaattgtatttttttcaaaaaatacagaataaataagtaatcattaaccttgctttttctatttttaactgtagtaccagaagaaaacattgcaactatgaagtatggagcccaagttgtaaagggggagctgaaatcagccttattagatggtgatactcaaaattatgatttggatcatggattttcaaggcacccaattgatgatgactgccgttccggcatcgagattaagctaggtcagccatccattatcaatcacatacggatactcttgtgggaccgagatagccggtaagtgattagcatgacttagaaactgacattatgtttgagatgacttagctttgtggtcatctacttttgttttacagatatgatggtttatttctttgtgatcattctgctatctcttgaaggttggttttggggaaggagttaaaggatatatttctttaaaagaaatacacttttttgtttgtttcttcttataaaaatatgtgtttattgtagaaaccatagaaaatatagaagagcacatagaagaaaataaaaattgctagtaatctcattacccattattaatcttcatatgtatctagcatttttttcaattatgcatggacacatacacacacaaaacagaaacctgcacaaacatagttttataaaatgaagattagatatacaaaaagctaattttacttttaaattaatacatt

SEQ ID NO: 15135 - DNA, 1104 bp, Homo sapiens
gttttaaaaaagatgaatgcagatgtgtttggaaagattaaatgtttgatgtagtggtacaagatacctgaacataaaagaatggtgctaccgtcttggttgtttacacagccataatgagtaggagaatatgtggcacaaagcataagggaaggagagggtcaaaaagagttaattggctaagttatacttgtcctgtaagcttttactgattggtcatgcagtggttgaacttcatataactggaattttacctttttatccttttcagacagcacttttaaacatcgtgttaagagactcatttgcagctcccgaaaaagatattttcctagccttattaaactggtgtaagcacaattcaaaggagaatcatgctgaaatcatgcaggctgtgcgtttacctctcatgagcctcacagagcttctgaatgttgtgaggccttcaggactgctgtctcctgatgccatcctggatgccattaaagtgcgatctgagagccgggatatggacctcaattatagaggcatgctcagtaagtacctgtctatcctaaactcaaccaagaagcttggtatgcctctcatgccattaaaaccgcaaagctactacagaaccgtgtagtgcaggtgtacatgaaatatgtacgtttataaacagctagcctatggaatgtctttccctttcattttcctgttaattcctcctgagattgattagcttttgtagacccccaaataggtatttcttgccattcctggacagatttctcaactcctccccagaatgtcagaaatggacactttcctaaaaagctgctgctcatgttaagaccttttcttccttcctccatcaaataaatactgagtacattctatgtacttattattttgggtaccatgaacatggagattcttttttttttttttgagatggagtttcactcttgttgcccaggctagaatggaagttgcaatctcggctcactgcaacctcgcctcccaggttcaagcggttctcctgcctcagcctcctgagtagctgggattacagccacccgccaccacactcggctaatttttatttttagtagagacggggtt

SEQ ID NO: 15136 - DNA, 1143 bp, Homo sapiens
tatcttttcctatagagttttactttttaaattgccttattgacctttaacatctttatatcaacttcattgtgcctctcaaaagatcactctcatctttctatttaatatctgtcacatatcttgagctttcagagtatctcattagttcagtggcttacagaattaattcaaatagttttaaaatcattcctcttgtgtcctgtaaagaaccattttaaatgattactttgcattttttcacttggatctttgtgtcattaaaaaaatttatatttgcataatgttgataactgttatttccaatattttgtagcaaatcctatttgagggtttcttcatgtgtttcttccctgatgtgcagagcattattatatggtggaatgcgagagtctcagcctgaagcagaaattcctctccaagacaccactgcagaagcattcacaatgctactcaaatatatctacactgggcgggcaacgctgacagatgagaaggaggaggtgctgctggactttttgagcctggctcataaatatggatttccagagctagaggattctacctctgagtatctctgcaccatacttaacattcagaatgtctgcatgacttttgatgttgccagtctctactcacttcccaagttaacttgtatgtgctgcatgtttatggataggaatgctcaggaagtcctctcaagtgaaggtttcctctccctttctaaggtgtgtcatttgtctacaagtaatttataggcatgcattgttttatttatacctatactgtagaagtatagcaatggactaagaataataaaaaaaatcattggtatcaaagcgttatcattggttatctggtctagccacttgcatctagctaccaggactctagatcataaaagagaggggctggttggttgtgttttcttttaaggttcttcaggtaagttttatgtgcaaaagagactgtgctgctgtgtggttgttttcaaggtagtgacaatcaaatagggtcctttttggtattgcatactaccttttggttttgtttttctctgacagagagtgtgactaataattccttagagcaagcaggcaaattcatagaggagatctgatgcaacatttgatgtctttaagt

SEQ ID NO: 15137 - DNA, 9402 bp, Homo sapiens
tttatatatgtgtttgtatgtgtgtatatatatgaaatagcaacaaggttctttatatttttcagtacaaataaacacagttctcttttggagatagccgtttctatttattaacaagtaccataatttcagctaaatgttactatatttacagaattgatgaattacagaagttttcatttttgtatttcaaatatttacagatgcatttttcatgatattttttcactgatttttcctcctgcttattccattaaaataggcttactacatatagctcttctttttagtaaaacttgaatattaagttatgttgattatagtatgaattagcctttcctgttgttaatgattcaggcttgttgttttttcattgcaggctaatccaaaaatgtgattttcccattatgaagttttcactctacttcttggcttatgaggataaaaatgacatccctaaagaaaaagatgaaaaaatagcctgggcgctctccagaaaagctacacttgagctgacacagtgagtatgagtttctatatttatatatattatagattttttaaggtagtttttaaaaatcttttttgttttgtttactgaccagtataattcaaaccagatctgcctatgacttcacatttttaataatatattgaagtgtttttcatgcatcttttgatctttgtattgttcttgggcaaatgagatgtgttttttttagagacaggctctctgaagcctctaacttctaggtagtcttcctgcctcagcctcctgagcaccttggactacacatgtgtgccaccacacccagctagtttttgtttgtttgtttttggtagaggcatagaggcaaggtctcactatgttgcccaggctggtctcaaactcctggcctcaagtgatccgcccgcctcggcctcccagactgctgggattataagcatgagccaccacgcctggcccatttgtcttttatttttatttatttatttatttattttttgagacagagtcttgctctgttgcccaggctggagtgcagtggcgcgatctcggctcactgcaagctctgcctcccggattcactccattctcctgcctcagcctcccaagtagctgggactacaggcgcccgccactacgcccagctaattttttgtattttttgtagagacggggtttcaccatgttagccaggatggtctcgatctcctgacctcgtgatctgtctgcctcggccgcccaaagtgctgggattacaggcgtgacccaccacgcccggcctccatttgtcttttagataagagaatataagaccctgaaattgtaagatatttgcctgtttgtctctaactaatttttaggtactataattagtctttcagcatccaaaattttgttcttttattattttgctacattttggatccagaaatgtgatatcatgtgttcctttaaaaattcttcaaaccattttgtaataattaacattcaaatttggtatttttataacttgagcacttaaaaatgtaggcaatttctttacattgtttatctgcatactttaaaagagattgatttcagagtgtgtgatttcgtgtgtcccttgattcaaaataaagctttggaatcaggcaggcttagatatgagtctgtgactctaaacaagtaagtggcagtttcatcaatagaatggagatgttcacacctagcccatggagctgttttaagggtttaaatgaaatataaagtacttagcacaataaatgagcattattattattcttattattgttcttgtccagtacctgtatttactgtctctttagtctcgttaaaatcatactttggccatttgtcctttctatagttgaaaacttaatatttttgtagcaggggttaggccaattatgtaaagtagcatataaacgtggtaagatttcaaagatgttacttgcttttcagaatatctattccctaggacattgtagctatgttttccttccttttgtagcaattggggcactgaagatgatgagacccagagttaccacaatggcaattcagaccctcgaggattcggtaagtttgcctgtttttatgtgatatatgtagatttgtgtgattttgtattatgtatataattatgattttaataaacctaaaacattaatgtcctaattaagtatgatcaatttattagagatatgattatttttattttccacaaataatcttatttaggagttgtttaatttcagagtctcgatctaaaattacacttaccatctcaccatgatttacttttaagtctcagaattaatttccagtagacttttttttttaaaaaagctgtagttaatactaatcccagtttctgctagcacatacacttctgccttgatctccagtctctcaatcaagatgacagtattgcaggcttcagctggctgctatagtcaatgccaaccacaaacctattaagtattagtaaatgattactgttttttggtgtcgattattcttaactgattagactgtatatgagctgatattgattaattttaaataatttataattcaaggcaactaattaactacttatacccagcccattagatctatatttgttctttaatgtattatagattttgaacctacctaagtctgttcccaagtgccttatgttttgaaataaacaagttttggaatctacttgtggtacttggacaccctgttataattatttcttccttctctctgcttttttcggggggtatcacgtaaggtcatattggaattgctgttcctgatgtatacagtgcttgtaaaaggtttgaagaactgggagtcaaatttgtgaagaaacctgatgatggtgagtctactacttactgtgttcaggcctgtctttagttgatatttactaaccacctacagaggccactgttgtagtaaaacccttttggctacaagtaacagaagtctccacttcaaccagagttttaaaaaagagaaatgattggaagaatatctgggtattttagggaactgaaagacagcaactagggtggctttccaaggcactagacacaggacctggacagccatcaaaaccctacgcttcctctcccactgcccgaccccaccactttctttcattggccaccagctttcactatttcagtgtatatctttccgcccaaaaataagttccttaaagtccattttatctgatgctcatataatgacaccagctctctttagtttataatcacatggtatttctttttcatcttttataacctttgtatgtccttaagttttaggtaggttttttgaaatagcctacgtatggattttgctgggtttacatgtattgttattattttacttagatctctttctgaactatttcaaattaaaattgaaatattaaatatttcagagtctcaatctaaacatttgaaatatttcactgtttaatttcaatccttttttaaaaaaattaaaatacttaatatccagtgctgggcgtggtggctcacacctgtcatcccaacactttgggaggccaaggcgggcggatcacgaggtcaggagatccagaccatctgggctaacatggtgaaaccctgtctctaccaaaaatagaaaaaattagccaggcatggtggtgggcgcctatagtccgcctactcaggaggctgaggcaggagaattgcttgaacctgggaggtggaggttgcagtgagccaagatcgcaccactgcactccagcctgggcgacagagtgagactccgtcacaaaaatatatatatatttaatatccaaatcttctccccaataagaaaggaatttgcttcactctgtcctcattgtgtcactattacctagagtgggatagtattgattttattttttaaagataataataaatatatcacggtgtttgatcactttttcttcatatatctcttgtagtgtctcctttgagacaggatctcactctcatccaggctggggtgctgcaatggcactgtcatagctcactatagccttgaaactcctgggctcaaacaatcctctgcctcagcctcctcctaagtagctaggaccacaggcacatgccaccacacccagctaattgttttatttttttgtagagatgagttcctgctatgttgcccaggtttgtctcaaactcctgagctcaagcgattctttcaccttggcctcccaaagcactgggattacaggcgtgagccactatgcccagcctttttagcatcttttggatttttctgttcttttatttaaatacctcaaccaaaatggtctttaaaggggttttgtttttgttttttgagacggagtttcgctcttgttgcccaggttggagtgcaatggcacggtcttggctcaccgcaacctctgcctcctgggttcaagtgattctcttgcctcagcctcccgagtagctgggattacaggcatgcaccaccgtgcctggctaattttgtatttttagtagagacggggtttctccatgttggtcaggctggtctcaaaatcccaacctcaggtgatccgcctgcctcagcctcccaaagtgctgggattacagctatgagccaccgcacccagccctttaaagggtttttaaggcaaaacttttgagattctgtgtaactgaggatgatgcctttatgtctgaaggacagttttatggaaaagcctaggtttaatttccttcagtcttgaaaatactcttctattttctttttgcatatgatgttgctgttgaaaaatctgtcaattcatgttcctttgtatattcttctgttttattctagaagctttttatattatttctttgtcactgcctgcattctgggagatttcctcaaactggaataccaattagctaattttctcccaaatgtatctgttctgatatttaattcatctattttgttcttaaacacctgttataattttgatctctaattttcgcttagtttgcttaatatgttcttgttctttttttcatattggtaatatttcatattgtttattacttttttttttttttgagacagagtcttgctctgttgcccaggctagagtgcagtggtgtgatcatagctcactgcaacctcaaactcctgggatcaaacaataatccacctcagcctcctgagtagctgggactacaggcaaatgccaccatgtatggctaattttttattttttgtagagacagggtcttactatgtatctcaggctggtctcaaactcctggcctcaagtgatccttctgcctcagcctcccaaagtattgggattacagatgtgaaccaccacacccggccggtcattacttttacatgtctaaatagtccttgggtctgggcatggtggctcatgcctgtaattgcagcactttgggaggccgaggcagaggattgggaggttcgggaggatcacttgaggccagcagttcaaggctgcagtgagctatgattgtgccattgcattccagcctgggtgacataggaagaccttgtttctacaaaaaggtttttttttaaattatctgggcatggtggcacatgcctgtagtctgtatgcctagctactcgggaggctgaggtgggaggattgcttgggcccaggagttggaggctgcagtgagctatgatccactgtacttcatttcagtataaacgacagagcaagaccctgtctccagaaaaaaaacaaaaatagctcttggtccattattctaatatttcttctgtttgaatctacagtccattgctttgggggtgttttatggttatgtttctcaaattattattttttgcctctgagcttttttcccctgcaactgttcgctattctaacacatcaagcagtgtgaataggagaatggccagatccctgtccttaacaacccacatgatctcaggacaatgggctggataagcctaggccagagattcctaggcacctagaaatgagacttaaatttatttcaccttccacaaaacacctcttcaggttggatcttcccacttcatccctcagggaagagtattagtaggagacacttccgatagtgttattccctagccctgggcgtggagagagggctggggagatcattcggccctaccagtttttctcagtttctcacaagcacaaggctcctgcactgcccttgtttactggtaaggacatctgaacaagcgagagggcaggtgccgatgcacacagcagtgagggaggagcaagagcaaaactctgttctctcgcagccattatgcactgccttctggtccaggccagaactaccacctcccacacagcccaagttaaaacagtcacccggccccatcctcacccattctccccagctgtcaccagccgggtttctttctttctttccttttcttttcttttcttttcttttccttttcttttccttccttccttccttcctctctctccctccctccttccttccttctctctttctctctttctctttctctttctctttctctctttctttctttttcctgcattttccatctatgttcctctaggattgatcttggagaaaggaggcagagataagagtcaaaccaattcaacataatggtccccaaataaatttctgaggtcatatttttccatttaagcaaacagctctgacatactagactctcaatctcagttttgaattcctgggagaaagactctcgcagagcttgggttgcctaggatagtatttaaaagggtttgtatgacccaagcatctgggtcttttggttgtgggggtaagccatgctaccagctcccttcagcacctccctattttctttttcttctttaaaataagacaatttctgtaactactgaactggtagtgtggtatcatgaaggtgaggcaaatgcctgatacctaaaagatgcagccagtcccacagtttatttcaggagggctggtatttgcaatgtgtgcaagataacattttagtcattatgaaaagtatgacttttcatacttttctgacaataagaatttttaaaatttaaaactgtaaacaaaataatgtacttcattaaaatgcaaagtaaatctttaattaataaaagtttttaaggccaggtgcagtggtttgtgcttgtaatcccaccactttgggaggcaaggcaggaggattgcttgaggccaggagtttgatagcagcctgggcagtacattgagatcccgcctctacaaaatcaaaaaattagccaggcaaggtggtgcgtgcctgtcgccccagctacttggcaggctgagctcaggaggtcaagcctgccttgggccatgatcatcccatgcactccagcctgacattcagagcaagaccttgtctcaaagaaagaaaaacatttttatggtgttttcttttttagtcttttcaataatgaaaattttcattttacaggtaaaatgaaaggcctggcatttattcaagatcctgatggctactggattgaaattttgaatcctaacaaaatggcaaccttaatgtagtgctgtgagaattctcctttgagatttcagaagaaaggaaacaatgtgattcaagatatttacataccagaagcatctaggactgatggatcactgtcccgattcaaattattcttcagtccatttccccttcctatttcagctgttccttttcacctaactgttcagtcattctggttttcaagcagtgctttatctcatgtccttgaatatagttgtgtaactttattttttaggtaataattagaacagttcccttcagaggctgcatttgccttcttctgccacctaaatattacttcccttcaaatctgcctttgaatcatcatttttaaaaaaaaattaacatgtttttgttgtagttatcttctggggtttcaattcctcagaaacaacttttttcacaacggaaaggaaagaacactagtgttctttcagtaaagtacaaagtgtttattttacaaaagagtaggtactcttgagagcaattcaaatcatgctgacaaggatactgatagaaaaagtgatttcttcttattataaagtacatttaaagttcaaggactaaccttatttatttgggaaaggggaggaggaaggaaatgatatggtacccagacactgggctaggctgcaactttatctcatttaatactcccagctgtcatgtgagaaagaaagcaggctaggcatgtgaaatcactttcatggattattaatggatttaagagggcatcaatcagctcaactcaagatttcataatcatttttagtatttagattgtgcctcaaagttgtagtacctcacaatacctccactggtttcctgttgtaaaaaccttcagtgagtttgaccattgtgctcttggctcttgggctggagtaccgtggtgagggagtaaacactagaagtctttagtacaaaactgctctagggacacctggtgattcctacacaagtgatgtttatatttctcataaagagtcttccctatcccaaggtcttcatgatgccagtagccatatatgataaattatgttcagtgataacttagttatcagaaatcagctcagtggtcttccccgccatgattcacatttgatgagtttttaaaaatcaaagtgattttgaaaatctctaatggctcagaaaataaaaacatccagtttgtggatgactatatttagatttctctagactctagtggaagacctttggaaaggccatgccaaccgtgcttgtactgctagaagcactttatgtttcctttttgggtgaaatggatttatgtgagtgctttaaacaaatagcaatacttatagactgaaataaaatgaaacttcaaataagactatgtttaatttgtaaacctttgtccatcatgttctttctttaaaaaaaaaaaaaaacaactccccttagtgagtactgaaaggatttgaaaaggcttgtaggctcattctgaagagagaacaattgtgattctgtacagcccgtaaagcaggtagtgtctatggataagggagtgtgggaaaggtgggaagaagaaagtgaatacggaataaaggattgtggtagataaagtgcaaacagaagaatatcaaaaggtaaggaacttatgaagaccaatttcacatgttgagtgctagaactgacaaacgggagggctaatacattcacaaattcagtaatttaagctttatttccaaggaaagaagccttctccacttgctgagtaaaacttgccaaaagatagcccttgctcattctttaaattcattcctatatgcattttttttaaa

SEQ ID NO: 15138 - DNA, 1201 bp, Homo sapiens
aagatatttcataaacagagaaaaagtttctatcttaaaagatgttaatccaagtaattatgagacttagaggcaagaaatgaaatcattagaactcatttttgaggatctttggtggagtaagatatattttctttttaattttacgttatagcaggaggaatctctttctataatattaatgaaaattttcaccatattaaaatatatactttattatgaactcttaaaaatctatacttttattttttcatattgttaaaatgtacaattttatcagtaaattatgaagtcataatctaatgattaattagaattatatttctgtaaagtattagatctttaacatttcagtaattagagcttaaaagtacacattgacttttaacacattgacattaaatacttcttactattaaatattatttaatatttttattaatatatttaaaatatttaatatataaattagtattaaatgtcttttttttcctttttaggtgctagaataagtattgagggaacagtgaagttaaagacaatagacaatgttaatttttccaaactgcacacctttgaagaagtaactgctgcagccagcaactcagaaactgttcatcagctggaggaagtgctgatggtatggtacaaacagatcgaacaggtgaattgactcaaacaattgcatctggactagtagttttcatgtgcatcctagccattgtattttgtctctaacagcaaagggaagaggtgtctcctttgactttcttccagaatctagtttgaaactcagccaatttttgggtctagagcaaaatcattcttctttgtggaccatttgaaatcaattttaagatatttctcacttcaaggaagaaaccataacaatatgggttgagaatgaaagaatgaagaatcaggaatagccaacatttatccccaataatgtttaaattgttgatactctccataaaagagagagggagaggacacagtgaagagccagagtgctagacactaaataagtacctcttgttcgatcagtggagttgtctgtgctgtcaaagaagttcagactaggctgtttcacatcagcatcacagtggcaagcctgcagctctatggtcaaattttttctggcagtaaggaaagtagtgataggaatacaacatatgtcaaaattatgagaggctccaac

SEQ ID NO: 15139 - DNA, 1215 bp, Homo sapiens
ggcattgtggggaaaatatgttacttttattttctttcgtgagtctttcttattaagtattctcaaaaaaaaaatatagaaaaacccataagaaaaaaacaactgatgcttaagcaaatgagatattcatattaggaccagaacaggcagaaatatagtaatatctatatgttacttgaaagagttcaaaagactcttatgtatattctcatttgaatctcatagctaatctctgggataaacagggcagctgtgattatccccattttagccaaaagttcgaattgaaaacataatctgaaaaatgatgatttaagttccattgtttcatgtatgtggtacagaaaaataattagtagtcggcgattagtaaataattagtaaggctctagtgtcaagttgcaacacaatgatctgaagccttttcttggctgtaaaatgactaaatgaactgggtgacttacaggtccctttcaagcaaaaaaaaaattctatgatttgatgatgcacttaatttgtagttgaaaacatcatgacatatactttgcttttccttcaaaggatatttgcatatctgccattaaggagaaggatatcgaagccaagctgactcaggtgattgagaattggaccaaccaaaatctgagttttgcagcatttaagggaaaaggagagctcctgctcaaaggaaccgaatcgggagaaattatcactttgatggaggatagtttaatggtcttagggtctttactcagcaacaggtaattttataatttgagagagagatttaaatgggatatttagggttataaaattctaagtaaaagctcagttttaaagctctttcattggatggattctgcactaaatttggtattatcttgtctgttcctatacaaactgcccgttttccctaataatcatggcctccatctcttctttaatggtactcatctccccttccctatttttcctggtgggccccatcctaattattcctccccagactggcatcttgtcctctgaaggtcttggctccccactgagatgacctcttcatttcatcttttctctcctttgttcctctgacatcattgacctcttggctaatcctgttcaaacattcacccaatggcccgggaaaagcctgctggccacccgtgagagcaatctaccactacagcaatctacccattaggggcttggcacttactt

SEQ ID NO: 15140 - DNA, 1146 bp, Homo sapiens
ggcaatcccctctaaatttggagaaggaaatattcacaaaagtgtcattgatgagctccggccaatataataactcatctaatttatctccagctatgcaatcacccatacaccatgtgggcagaaccaaagggccggaaggggaagctatcaggggctaattgcctgggacttaccttgttctctgacatttcattatattcactatctccattaaccccaaatcaggtttaatatgcaatcaacttgctatgattcccctaagtatgaaaatacaatgcaaaaggataaaccttgtcttgggtaattaaagaagggattcattagataataaatttgtttttttttaatgtgaatgttatttggttcacatttacaagtttgctttttttcgaagtacaagttgcatagtctcaaaggaaaataatgtccacattttaaattattttactttacagtacttttaattactaatgagggcattcctgttctcctttgaatggtgatatccatttcctgttgttcagattggtgagtgggggctacagggattaccaggagatgatctctcaattcagaatggcattattgtgacaaaggccaccagatacccactcctcatagacccacaaactcaaggcaaaacttggattaaatcaaaggaaaaagaaaatgatttacaggtatgtagcatttggtgcaggggaaagtaatcttgaaatcatgaaactctttcaaaattttgattgaatctgcagtcataaagttgtcatctccatgacaaatgtttgctaattcacactcttgagttttgtaacagcaatttggggcaacagctctgattcttttctctcttttgtactctctttggatcctccctccccctctctttgtacatttccctgactccattgcttttgctaatgtcgaatgtggcttttgttccgggccttgggtttgggcctataggaaagtggcaaatagaacattgtgatccctcagttcaagaccattcatgccaaccttgctcaggctcttggtactacgtagcttactgagtccagctttggtgcttgcatctaataaggtgttaattttaaggtgagagtagacaagggcaggattccaacattcctgactccctta

SEQ ID NO: 15141 - DNA, 1148 bp, Homo sapiens
cctccctcctcccctgtgaggtgctggggcctggagagaagccctcagggagtttagaagggtctgctgtagacaccaggaaggctgggggttgccgtcccccttctcaagcatccaagctgaaactggactgtgcgctgtaaagacagagtctctcttctctctcccatctcctgtctccctgtgtttcaccctccctctcattctcttccgttaaataatactgtgatggattgtaaaaggtacttagctgaatcacagagtttagagatggaaaagaccaattaggtcatcaagctgatctctctcctgaggagctgcagaaaataggagacaacaataaacaattttattgggatattaatttaggagcccgaaggccttgacttgtgtctcttaatataatgcagtggatttcttcccttccccactaatgtaatagtggggccattttgttagccattggtttgcatgatggctttcgtttccctccttttcccatggaaggtccagctggaatttcggaagagctgggagcgctggcggcttgagcacttgcacatccagagggacagcagcatgaagcccctcaagtgtcccaccagcagcctgagcagtggagccacggcgggcagcagcatgtacacagccacttgccaggcctcctgcagctgagactccagcgcctgccctccctggggtccttgctgcaggccgggtggccaatccaggtgggagagacactcccagggacaagggaaggaagggacacacacacacacacacacacacacacacacacacacatacatcctgctttccctccccaaacccatcagacaggtaaatgggcagtgcctcctgggaccatggacacattttctcctaggagaagcagcctcctaatttgatcacagtggcgagaggagaggaaaaacgatcgctgtgaaaatgaggaggattgcttcttgtgaaaccacaggcccttggggttcccccagacagagccgcaaatcaaccccagactcaaactcaaggtcaacggcttattagtgaaactggggcttgcaagaggaggtggttctgaaagtggctcttctaacctcagccaaacacagagcgggagtgacgggagcctcctctgcttg

SEQ ID NO: 15142 - DNA, 1231 bp, Homo sapiens
gtcctgactcacagggcctggaaacaagtcctatgtgggcctggggcctggggtcctcatcctccttgttggtctactcaggcccagcccagagctgtgttccctgtctcaggtcaagcagtggcagacgcaaggctttctgtgggcccccaagtggtaggagggagagtagcagagcatgggttactggaagccgggactgctagggctggtggccagggagctgcaagagtgaggctcagctctggctggttctgcccttacccctcctgcccgcctgagaactgcacaccctgcccgctggccccaggacctgcactcccaatcctgctgtcttctccttccctgtgccctgaacaaggacctcactgcccgccttcccctcccaccagcccccttgggccaggcagggtgaggccaaattgctcttggcccacaaatgggtgatggtcagatatgtgaatcaagctcctttctctagctagtgtttgatgtgcacgtgtgtgtgcacagtgcgtgtgtgcacacgcacacctgtgcactcgtgtgtgtttaagaaaggaaaggatttgggctggggagcaaaagataatgtgaaactgttggtggactctctggtgaggggtgggcagaacttgctgctactagagttcttgggttctccatgatgttcaccctggggctggcccactgtgtcctgaatgtttttgttattttttgttttattttttaaacaaactgctgtttttatatacctggaatctgttgttggcttcagagccagtggttaaagagcagggtcccaaggattgggagatctagtgtctgccctcctgccctgcaactcaattgggcctttttcggtgacctcatccaaggccatgatgtcaagggccatgtccccaagcagaggtggagaaggggacactgaggtgagcaaaagcaggaaggggcatccactgcgggtgactggaggccgggcaggaagcaagtcatcagagccgctcagctccgttcactctctgccttctgccccactactgtggggcagtggggccagagcccacctccccaacatgtgaagacagtgatgggcacgtgcccacacccccacttctctagccgtttgcagaggccgccacccagcaggggcctgaaaaggagcagcctcgtatttttctgtgaaatgttttaatgaaccatgttgttgctggttgtcctggcatcgcgc

SEQ ID NO: 15143 - DNA, 1144 bp, Homo sapiens
caaggacctggtctctgcaggtagaacaccctccatggagggctgggtgaggcacaggggacctccttgtgtgtgtctgcctcacatgtgctttttttgagaggcagaattaatctagtgcagtggttctcaaagtgtggtccctgtccacagcatcacctgggaacatgtttagaaatgttccttctagacctcctaaatcagaaactcggagtagtaggggccagcagtctgttgaacaagatttccaggtgatcctggtgcatgctagtaagttggagaagcattgactcagtgaaagaatgaactttggagccagattgcctgggttcatatctttaccttgggtaaatcaggtaacctctctgatcctctatacaatgtttcatctgtaacatggagacactgccaccttcttcttgtgatgactaaatgaaaatgcttacaaggagtttagtgcagttctgtcaatcagcatctgttaagtgtggcctcagctctgacctttactgtttctcattttaggtggtatctgatgctgcaggacagggtgtggccatcacagggaaccagaccttcaacaactggaactggcccaatgcaatgatttttgcagcgaccgtcattaccaccattggtaagtcttctgggacctgtaggacacccacatccatgccctagctcctcagaacctttctagaaacccagctctggtcactcagccctgttgggggtacaatcagatcagttgcaggctattcttttgatactttcttagggatttgttaagtccttggtagctgatcatgcctgggaaggtttccttgagtcttgacctgggctctttgagcagaaacaatgacacagcctcatggccagagccatgcaagagattaaccagactgctcattgcagaaacccagatcatgactacttaccaagctgggtgtctgtttcagttctcaggctgcatagccaaccagtccagaagtttggctcagaacgcagcttcttctctttcaccattctgtcagcttgactgggctcagctggctggttcttgcttgggctcccaatgcagtggcagtcgaacaatggctgggctggagtcttctgaaagccaaactcatctgatggcccagat

SEQ ID NO: 15144 - DNA, 1193 bp, Homo sapiens
tttaaaagcccagctcagtagtgttaagtatatttaccattatgaaacagatctccagagctttttcattttgcaaaactgaaattatacccccttcaacaacaattcttctccctctctacccagcccctgggaaccaccattctcctttctgtttctgtgaacttaactactttagatgtctcctaagtggagtcatatagtatttcttttgctttgtacagtggtacaaccactgtgaaaaatagtatggagtttcctcaattaaaaatagaactactgagtgatgcagtgctcctacttctgggtgtgtatcaaccaaacttctaaagaactagaaaagggatggggatggtggctgtctcttgcccatagcccttggggaggtgttctgcaggatggacccaacaggctgtagccacaggccagggaggtgagagtcacatgactaagctcttctgggttgccaaggaatttgaactccatcaaatttttgcaattttcaagtaggggagggaacaacatttcagaaagtttcctccacagccatttacagcttaaaagaagtggaacattctactctaaaataacgacatttctgtgggctgatcccttcactctgtgggtgttctgataaggacaccccctccttcctttctcctgctgatgtgatgtagtgtgggttttcccagaaagctcatattgcctacagcccccagaaaaacccactgaccttcacactctagttcttttcctactacgagccccttaggtccaggtctgggtccctggcccagccaaagacattccgtctcccgtttggtgaccttcccagattgcatcttcgctatccctttatgtagaagtgggggtggtgtgctccagttgtagctctgttcagctgcctaaggcctctaggcttctggtgagcagttatcccaatctctgaacctcagagacctggatacagtggagttggaaacacagaacgggccctccctactggctatcctttctgtgcttgatgaaacctcagatattggagagtctttaaccctctggagatcagtgcagctgaggaaagataattgggccgcagtggtgaaatgagaggaaatacagtccaaagtgctcagtggtgggttgtagatggaagaggctggagagatgggcaaatgttgaaggggctgggg

SEQ ID NO: 15145 - DNA, 1329 bp, Homo sapiens
gtctttcgggaatagatgtaccttagtacccctgccattttcagtcattagtggggagcagcccggaagagatgtgaccctggcacacatgctatgatggattccaaactgtagcaactgggacccttggctagttatgtgctctgcactagaaggtctgccaggtgcattttcatgccaccacacccactctgtgcatgagtaaacaaacacaaagaggttgaccagcatgctcaagaacacacagctggcacgtagtggaaacaggattccaacttgggtactttgactctgggacacaacttcttaacaactatgtcatgcttttttgttgttaaataagattttattgcattgaaaattcacattctttgtacagaaagaatattaagttaaacaattgtgcatattgtttgtattcttccagggtgaaagttataaattaattggattcatgggcctgtacaagagggaaaaacacacttaaaaaggccttaagtgcttttttcttctttccggctttcaagatgttgaagcgaggacgtggtgggtcctctggtgtgaaattccagatttccttgggtcttctggtaggagtgtgatcagttgtgctgacaacacaggagccaaaaacctgtatgtcatctccgtgaaaggggatcaagggatggctgaacagacttcccactgctggtgtgggtgacacggtgatggccacagtcaagaaaggcaaaccagagctcagaaaaaaggtacatccagcagtggttattcgacaacgaaagtcataccgcagaaaagatggcgtgtttctttattttgaagataatgcaggggtcacagtgaacaataaaggcgagatgaaaggttctgccattacaggaccagtagcaaaggagtgtgcagacttgtggccctggattgcgtccagtgctggcagcattgcatgattctccagtatatttgtaaaaaataaaaaaaaaaaaactttaagcccattaaaaagtcttaaggtggggcacttcaaaggcaggggcctatggatttgccagtgacctttaaaatgtgactgtgttgctgagagttcaatgattattgatgtatattccctttctcctcagtctacttaactacacattaatattgtttcttcccttgtaggctctctttatctttacctctgtgacacagacatctaactgcctatccagtatccaatattccttcataactacaattcccagtcccccaaaaagccaacaacaataatataccacctacctatccccacctctcttattcaggatggccatctgactaacttctaac

SEQ ID NO: 15146 - DNA, 1349 bp, Homo sapiens
tttcgttaacattctgttaccataagtgcatttttaaaataccaacctttcaccatccatccacagccaattttagtcagtagtcatagagggataatgagtctctaatgtcatgacagttacacatttctaaatgtagcatgaaatagttggaaagtagtatcttattaggcaaacagaagtgatagtttttggatgttagagctgtctaggaatggtcttcggtgactcacaacaagaattgacttccaaactcctaccatggttgcccataagggtgtcagactagattatttgtttttatgctttgagtggatatagcttaaaagagaggagcagtttcctagatactttcgttaccatcaatggagatattttgtctttttcaggattggatgtggtcttgatcgtctgcaatgggaaaatgtatctgcgatgatcgaggaggtatttgaggcaacagacatcaaaattactgtgtacacactctgaaccagtgaacattttggatgtttccgtgttctcctgtgtcatctctactgggccataggaccgggcaaacctaccttaaaataggcagaggaaagtttcatgagaagtagtgtgtttaacaagacagactttggttgctgtattcaagtatttggattatgactgtggaggagggcttgcttaagatatgtggttgtgtttttttgtggaaaagtaaggagttaggtggcttgataataggcagggaaaccagattgtcgggactatgacctttttctccagtatgctacctgatttgtttggctggccactaggtggcagcattggttctacttctctgctttttaagagaaatttcaggaaggatgatcattccagttagtttggcattttttgtcgtttgtgcacataacttggtgttatccttatgtcatcagattcctcctaggggagagtttttgttttaattacaaaattaaattctacattgttaccaagaaatttgtggtgataaaaatggaaaaataaaaatttggggagttagtgaggttctgtgcttatgtctatttgttctggacatgggtaatggagggttcacctgcaacttaatttcaaacagtcagacaaagggtccaagcgggaggagaagcaaagtgagaaataagagataaaaatagacaagtcaaaaggcaggtttttagaatctcctcatggtgaactttttctctcttttgtccactgcatggtttctgtgattgaacctgcctgaatttaatcatgaaaacaagtgaaataatgtatgttaaatgcctggcagagtacttagcacagactagtgacccaataaatcagtgatt

SEQ ID NO: 15147 - DNA, 1137 bp, Homo sapiens
tcatcactttatcctttcaatcccacccctacccctgccaccaatagtgtttggtaatgatgtacagccaactttgaacataaattaagccgaaagaaactgagcttgtaggcattccaaaattgtgttcaaatctcacagtccaacagcttgttaatgtttttcatgcttgcttcatcttactcatatataaaacagtattttggattgtcattaaccccttgtggaataggaatgtaacatgctcttaactgtatggcttcttgtttgatgcatgtgtctttgtaacatttttctgttgtaaatacagtgagctctttggagtctcaaatcatttatcatgtgcacgaatagcacatcaattggggaggaaattaagatgatgaatagatagaaaattattaatagctgtatcttaaaacttgtgtttcctacttacatagattttatttaaaagaagtggaaacactttatggaaataatagaaacctttcctctagggatctgattattttgggagaattttaaatagttattttggttattcttgctatatgtattctgagaaatctttcttgatacagaatatgcaagcatttggtgtagcaaaggggatttgatttggaatggggaaataagggaaagagatagcatgagagagtcaggctgtaaagtccttaaaaaagtaaagtaaaggttctcaatggacagtttaacaaaacttaggatttcaatgttcctggtgattctaatacattagtggtggtggcagtggcggcggtggtggtggtgattgtaggaggaccttactatctaacctactcatctaggacagaatgatctgttaactaattgctgttacttgcacatactttcattaagtgtgaatatttcagtcatgaatattctgttctaagtaatttctgtcaaagatagagtctgaaaatgaaaattttggactattccatggatcattacagtttacttctaaagcacttttaaagtgcttccagaaagcattctattaggtatttttgtattgggacttaagatgtgacagagcacttgtagtgacctggctcctacagtagtctgtttactcataggagcttgaaatttgtacacttgactgctctg

SEQ ID NO: 15148 - DNA, 1335 bp, Homo sapiens
agcagcccactccttcccatggaatctagacagcatttatccctctggtgggggaatctcacactgactaactgaatggacgctttgtattcagagatggcttccaggcaaggaagttctatcttgtgatacggaaacaataaattcctgagatacattcttccaatctgtggtaataataagaattcctctctgcccagatggtaggttgatatttctggactctagccaagaaaaagctaattctggggatagaatgataaaagactcaagcactaaaaatatacattgccgaatctctttttctagctttgaaaagttgtggcctgcttgtccctctgttgactggtcatctggaccatcgtacttgctgtggctacttctaagacaatgtagagggttattaaaccttgaaactgcctttcctaagtagagaacaagactattcaacaacttctttgctgaagcactgaggagatttgtaatactcctaaaggaagggccaaactagagattttcaatcatagactttgtgacagcatttggggaactaaaagattcatgtgtttcagcctagtgggagagagtgggggagaggaagagagagagagagcatgtatacccgtatgttatcatagagcacgattctccagtggatggatacctggaatggatcattaagatgaagagagtaattcacatttactctagaacctttaacaagcactgaaaggaagaagcctgagatttgatccttgacaatttctggaaagcactggtcagtcacactgtcctggacagagtccaagttacccactaaagcttgaggtggatgttggcttcactcctgcagcacaatgctggccctagaaagcgagcattttcattcttcccatggcagctgattctttggtgccagttttcatgttttctccataggccttgtgcagaaaggttttctcattgcatccatactgtgagaataaactgcagactgaaagaaacatgcctgcagggtcaggaactgggccactgttcccagaacgggttgtgcctcagaaatctatttctcttttagatgttgaaccctgagagaactaagatgatatttcagaagagttggctgccttctctggaaacaaggaaaacccaataattccgaggaacattgggggttaaataccaagaataaaaattggttcttctttgacttcagcttaactgtattaagacagaaattaagccctctaaaaacaccacaaagagagatgattgtaatgatagaaatagaggtacagagctatgcaaaggaaacaggaagtgaaatattcctag

SEQ ID NO: 15149 - DNA, 1231 bp, Homo sapiens
gtgctctcaaaatataagctgcctgttctgagccacagccaaagcatggctcccagactcctgtgggtcagtggaggtggcagtgagggtttatgagctctttcccaaacttttaaaagctttgtggaaattctgcatgcagctgagatgaagcatcctgggctcgcagagatgccggggcccgaatgtgatctgctgctgatccaaagccctgagtaacaattacatgtgtctttgattaacgaagatgatgaaacagattattactaactggatagcatttagttagtagacagaactttccaagatgtggcagggagagaggaggcagctaataaaatgggtcatccatggtgaagaggctgggaacccctggctctatggaaagggtaggggcccgccttccctttggctgggtctcctcccagcccacccccctcccctgctcatccctgagctggggaaggtgggccgctgctgcgtgggacatgggatgggatgaggactatcatgtttgtgcttggccaagcaagccgcctctgagctcctcttcactgcacccacagaacgccgtgcgccacaacctcagcctgcacaagtgcttcgtccgcgtggagaacgtcaagggtgccgtgtggactgtggacgagcgggagtatcagaagcggagaccgccaaagatgacagggtatgtgggtccagagctggatgggctgtacctgcccagggggcaggagccaactcacccccaccccctacctctccagggtacacatgtgcaccagatccttcctggctgggggaaggggtgtggggagaaaggagcagaggagactagtgcttggggacagggggctggaatccggaagtgatggataatcagaaggcagacatttatgtcctcttctgtcctcactctgactgagggaaggggccaagaaggaggcctggtagcaaagagagacaggggccccaagtagccctggccagagctggcacacaggcagatgccagccaacgggccatgggtgaggggctgccacccccagggcacccgctctctcagctcatcaggatgactagacctctgaggtcccgcgaccccaccaattcatcttacggcagaggagagccagtgagggccaggggctggcaggaggccccagagcagatttgtggcagagctggttccaggaccaggtctctgccctcctggtcttttgtgctcagc

SEQ ID NO: 15150 - DNA, 1272 bp, Homo sapiens
tggacttcagccacagcctgagctttgggggcagggaggacgagggtcccccgggctaccccgaacccctggcgccggggcatggctccccattccccagcctgtccaagaaggatctggacctcatgctcctggacgactcactgctaccgctggcctctgatccacttctgtccaccatgtcccccgaggcctccaaggccagcagccgccggagcagcttcagcatggaggagggcgatgtgctgtgaccctggctgcccctgtgccagggaacaggggccggcctgggggctgggagggccaggggcacctccctcccacccttcaggctgcactgtgtgtgaagtagccacctgccctgcctccctcctccccgttggcccctgtttggacttagtgcctgtctggcagcctgtggggtcaggagaagcacccccagggcagccctcttgactggcgcagtgggaagaggccttcagcccctctcccggagatggaatcgcggggcagggaggggcagggtgttctagaggtgagaagagggcctggtggagattccctgtcttctgagcccgagcccctcattaccagtgaaggacatgcttgaggggttcgggaagctcctcatctgaggcaactggtcctgggggtgctcaggcctgcctttttgggactcagatggcaggaggtccaccccgcagcctggtcctcggctctcccacaggtgggcaccccccactttggtgctaatagctctccaccaggtggtgtgagcgcgggggctgccagaagcgggaggggtcactgccggaagagcagctgccctccgacccctcactttgtgcctttagtaaacactgtgctttgtacttgctggtcctgtctctttggagtgggtctagggctgacagcgaacgggaggattcaacccagcgggccccctccagagtgcggatgctgcctgaagggagtcggggtggggggtacagggaagagggaacacgcttgtcacacgcctcagccctgcccggggaagacgaggggtttgggtgctgaggggggcacggtccctcctcacggccacgaggtggcgctgcggccacgccggttccacacctccagcggcggccggagcgagactagttgatgtggcgagagggttgctcacaaaccaagtgcgccgcccttagctgcttatttggggcaccctgggcccggggtggggggcatgcttcttctgtcccacccctgttctgggggtgacctccc

SEQ ID NO: 15151 - DNA, 1172 bp, Homo sapiens
caccactgtctccattatagcctcacccgaaacgcataaagcacatcttgctgtcactggaccgtccctttgcttcattctaggtctgccagtaaggtccagggaagctcctcaaaaaaagggactgcgcttctatttctcctgtcccccatgggccagtccaaggagcgctgaataccaaacaggtacctgatctgaattcaatgactgaataagcagaaattgtaggaccctctccagaatacggtcatggccagagatgcctgcaccagcagcaaggaaggtatatggggatgacccaatagacagaggaagaaagcaaaaaaactccagactgccaattctacggaaacccaaagtcttcctgtctgctccccaaccatcagtcaatacaaggcccagaactcaacaacctcagtttgagtcacctagcccagcccaggacttaccgatcctcaagaatggttctgatcatggacaactgtcctggaaggttggctcacccagccttctcccaaccagccagcttaactagtccctcagatttgtgcttcctgggcgtgtgtgtgtgtgtgtgtgtgtgtgtgtgtgtgtacactggggtctcctcaccattgggtggctggggggctcgagggaggtcaagctcagcggggtggctattgcgggtgatgatgacaggctcttccatcacattgatgctgttgcactgcatcagatcctgaaggaggttgaagatttcctcagcccgggaacacttaaatgcaaatattcctggagaaggagaggaagaaatgaccctaggcaatagggaaggaccagaggagctcaacagatgcacaatgtgcaggaaatgtccctcaactccagtcccaggcctgtaggggcaggagagcctctcctcatcttgagcattctttttcttttcttttttgagatggagttttgctcttgttgcccaggctggagtgcaatggtgcgatctcagctcactgcaacctctgcctcccaggttcaagcaattctcctgcctcagcctcccaagtagctgggattacaggcgcccgccattacacctggctaattttttgtatttttagttgagacggggtttcaccatgttggtcaggctggtctcaaactcctgacctcaggtaatcggcctgctgcgg

SEQ ID NO: 15152 - DNA, 1372 bp, Homo sapiens
tcacttcccttgtcatgttccatacattgacttgggcctttttaaatcaggctggggggctaccccttcttaaatgaatactatatccctatctgaggttacctcttgtgagtggaagggttgctttcccaggtggttgggagagcacaaatgttgagaaaaggccttttagtctttatcaaaacaatgactaatgctgggcaacatatagcagaagtcaaacaaaaatgattcctcctgaaatggtaccttcattggttctgatgttcttttgcaaaaaatgtccggaagcagtatagaaaaccccctgtatgtgaaccttagattgtaaggcaagccagtgcactgtgtaatatgcaaagggagtggtgcaaaagagaaggcacccgtcccagctctccatgccctttccctggcaggcgctgactgagatggcgctgagtgaatgtggaaggtgctaagacccagtctcttcactgcagggctgtttacagccagtttcttttactctgaccttaaggtttccactgagctcatgaaacttcaacatatggtgtttaaaagtttcccactcaaatgcacacttgaaaattgggtccctcagcctcattactgaactaaataagtgaagaagttgtatctttggggtaaaactttccagggccacttaattttttaaccagttaagtacgcatcttcctggtggttcagactttttaagtcagtgctaaagctgaaaagcgccttctaaatatgactgtgagtttagtttgtatcttacatttagtaactgttctgttgggccaggactatgactttaattactatgtacttattcatcccacactctgcactaaatacaccatagctactatagcattgtggcaggcactcatttttgtggactcattccatacttctgctggcatatttcgtttaaaatctagctaaagattttcatagtactgtgttaactagccagggctgaaaagtgtgacaggatatcaaattgactttccttggggaaaatgttgctttggcaatagtgaagtccaactccttcatttacagaattagtgattactcatcaatttttgaaagttgtagattaagtagttttatttactaaattcttaaccactttgaagatttaagccagttgaaatgaaacattggctggatgcagttggctagcacctgtaatcccaacactttgggaggccaaggtgggaggattgcttgaggccaggagctcaagaccagcctgggaaacatagatttgaaatcttttcaaaaatgtataaaaatttaataaataaataaatgaatccttactcaaccataattatggctttaaaacccaaccaacagt

SEQ ID NO: 15153 - DNA, 2740 bp, Homo sapiens
tcctcccaaatctgataatccctactgttgctttaccccccatactcagtccatcagagaaaaaaacaagagtgccccgtcctttcccccagtgctagtaaaatacatcttcctttttaaattgggtcagtttctaaacagaatgaaattgcccagataaaaacccttgtccccatcaggcaccacttcattcttagttcttcacttagatttgctggtgaaagtgaatgcaaaccctaacttttgttgctgtggtcactgcagtgagcctcactcaacctgtcactatgaatgctcatcttttgactgagtatatcatattaatgtttgaattcaggtagaagtacagttgtcacttgaagggagtagatgtggaagggcgttcggggaggagtgggaagtggggaaagccaggctaaagaatgagggttatagctttagcaatgttgatgagccacatttcccacacagatctgtagcatttgctgttgacctcttttgagatgaactctcccataggccctgccaggcagcactgagacatggaggaaattcagacaaaaaatggctcaccctgatagggaaggagtgactatattttaaattaaacttgctttttccaacactgtgaggtttctgtaatatttagcttttatttggaagcgatagcgtatggcattttttatgctgtttggtttatattgtctactgcaggcttctttgtataagctttgcctgggctcaccctctcctggacactgttttaaagtgtcaccgctgtccatgctgccagaggctctgatgtgaagctgtactctcaagatccacgtttttaagtcggcatgattagtaatgactttttgtggcaatagaaaagcccattaactcaaaaaaaccaaggagagtaaaaaggaaaggaaactatgaatcgtgcctcatctttcattgaatcctatatttattattctagaaaaaaagaacttacaagatagagaagaactaatagagcatctactttacccctcaggctgtccagtggggataattattaataaacatttaatggaaaattcaaagatcttccaatttaatttttaaaaatagttttataccaaatattataaggatttattaagcagattaaggactttgtgaaataagtgcttaacttagctgagcacgcatatatcaaagtaataaaagaaactaacatcagagtctccactgagctacacatttgtgaaaggtgcccactgcagttacagacacctcaggtacccagaggcggcagcactggacacttaggacgttagtatttaaggagatttttattaaagaagagttccctgctgcataagccaatggctattgtgagggaaatgtccctttgcctttaatttatttacgtactgggtatagatgaatgtctcagttgcatctgaaattgaatcattctaaagagaagaaaataagaaccaggtaaaaactgactagatgctgccaaatcaaacccaaggtctcctaaccgaaccttaatgggcctgcttctctcccagggcaagtagttaagagtctcattccaggaaccctttgtagttagttggctggcatgtttacttgctgctgtagccagccaagatgagtgcacctaggccctcaaaaaggatttttttttacctcaatctagcctgaccctcatatctgtggttgcctctgagacgaacatccatgctagtataaaaatagttaggaatgcccttggcagaactgaagctcttattaaatggtggacagagctcttgccagctttgatccagcccctcagtctcggagttatggggcagggttggggggcagtgctacactgtaaagaatttccaggctgggcgcggtggctcatgcctgtaatcccagcactttgggaggccgaggagggcggatcacaaggtcaagagattgagatcatcctggccaacatggtgaaactccgtctctactaaaaatacaaaaattagctgggcatggtggcacgtgcctgtagtcccagctacttgggaggctgaggcaggagaatcgctggaacccaggaggcagaaggggcagtgagccgagatcgtgccactgcactccagcctggcgacagagcgagactctgtcttaaaaaaaaaacaaaaacaaaaacaaaaaaaaaaaaagaatttccagatgtctcttaaaatgtcatgaataaaattggaaactgtagaagtgttaatgtgtcctatggactcaatagcagagtttatttttgtttttaatggcaaggcttctagagtcaatgattgtatgagtttgctactctggctgtgcttacagcttcatccaagtacaagggaagaaccaatgaggtggattggctgacagtggggcatgccccagcataagccctagagaggtcgacagtagtgcagaatgaaaacttggtcggggatggcgggtggtgggtgggaggagggtgggctggccgggagggagaaatggagtttgttctacttactgataaagctttgtgaactaattttatacaattcataaaatttggtgccttgtactcaattacggtttgcatggaattgaaaagattaagggaaaggatttcttcttgtcatttcaagtggcaaatgggtctgtgtagtgtttaaaggacatctggtatcacagacttttaaaaagcatttcatgtctcttgtgtgtgaatgca

SEQ ID NO: 15154 - DNA, 1215 bp, Homo sapiens
tctatgctagagatagagatttgggtggatccctgtagagatggtgactgaggtcaagggagtataatatgattgtgtaggtgagaaggtccctggggaataccatagtgtaagggccagcagaggggaagaaaaaaaggggaaagcatagagggagaagtaggatccttcttccaatgttttccctgcttactctaccccacctccctttcccactagtgcggccatgctgaaaattgctgagatggaatacagcggtgccaacagcatcttcctgcgactgctgctggataagaagtatgcactgccttaccgggtgctggatgccctagtcttccacttcctggggttccggacagagaagcgtgaactgcctgtgctgtggcaccagtgcctcctgactttggtccagcgctacaaggccgacttggccacagaccagaaagaggccctcttagaactgctccggctgcagccccatccacagctatcgcccgaaatcaggcgtgagcttcagagtgcagtcccccgcgatgtggaagatgttcccatcaccgtggagtgaggaaaacagtcagctgtcctggccaaaggggtttggaaggacaccaagacccccgttggtgactgaagatgacactgagctttaatggctgaagacccagatcagggcagtgacagatcacagggacatctgtggctcccagtccaggacaggaaggactgagggtctggctggttccctcttccattctaggcccttatccctgtttagttctgagagccaacttgagataccatatgctagcattcccagtccccagctggggcttggtgtgagtactttttctatggctattgtgtcaggtcactgtggataaaggcaaagacagatatttattgaacctctgtgtttggtgtagtcaatggaggtaggcattactcctgttagtatttggaggacggaggacattcttgtcctgtttatataggacccacctcccttgatctccaagcttgtttctccaggctgcactcaccttgttagcccccaggggacacatcctctgccttcccccatcacaggctacagcagccaggagcaggttgtccaaagatggtcgtgtctcagcagtggatgaaaggactacaagagaaaactccttggggaaagcagagataagagtcaagaaaggccagagaggctgggcttgg

SEQ ID NO: 15155 - DNA, 1535 bp, Homo sapiens
tctcagaccagctccagcccagcgcccaaagccccccggggctccagcagccaagggcccagccagaccagcactcctacagatgtcacagccatacacctgtagccctggagaggccctctggagtggccactaagcagaggaggggccgctgccacccacctccctgcctccaggaaccacaccacatctaagcctgaaggggcgtctgttcccccttcacaaagcccaagggatctggtcctacccatccccgcagtgtgcactaaggggcccggccagccatgtctgcatttcggtggctagtcaagctcctcctccctgcatctgaccagcagcgcctttcccaactctagctgggggtgggccaggctgatgggacagaattggatacatacaccagcattccttttgaacgcccccccccacccctgggggctctcatgttttcaactgccaaaatgctctagtgccttctaaaggtgttgtcccttctagggttattgcatttggattggggtccctctaaaatttaatgcatgatagacacatatgagggggaatagtctagatggctcctctcagtactttggaggcccctatgtagtccgtgctgacagctgctcctagagggaggggcctaggcctcagccagagaagctataaattcctctttgctttgctttctgctcagcttctcctgtgtgattgacagctttgctgctgaaggctcattttaatttattaattgctttgagcacaactttaagaggacataatggggtcctggccatcccacaagtggtggtaaccctggtggttgctgttttcctcccttctgctactggcaaaaggatctttgtggccaaggagctgctatagcctggggtggggtcatgccctcctctcccattgtccctctgccccatcctccagcagggaaaatgcagcagggatgccctggaggtggctgagcccctgtctagagagggaggcaagccctgttgacacaggtctttcctaaggctgcaaggtttaggctggtggcccaggaccatcatcctactgtaataaagatgattgtgaaataaaactggctttggcttcttggattggtgtgtgggtaagtctatttctgcactgtatgaggtaaggaggtggaagtcaatggtctaaagcagggatcattgagccttttctgtaaagggctggatatttaggctttgtggggtacatggtctctgacccaaatatagtcagttctgctttataatgtgacctatgcgttcctaaaaatcactatgccatgcaaaattgcacaataaagaccacaggtctcatgggaaaaatggggcttgaagcacaacactcaaatgagtgacacatttaaaaaaaaaggatagcttggtttttacatatgtcaaatggttgagaaattatatcacaataaatatggccttttatcttgaagacatgcactttgcttttggaagtggacgtcggaagggttgctcaacacaggtggggagatgagt

SEQ ID NO: 15156 - DNA, 1159 bp, Homo sapiens
cagggagctcttgcccagagaagctagatgcagtgagctcagaagagccaggagagcttggtaagctgggttggtgccacccagcagactgcaggagagggctggagctgggtggccagagggcagagctgcaggggaggaatgtgctgggtgttaggaccttgacggggtgcatggactgggcaggggattacagatggggtgagcagaggtacgcatgggaaacaagattgaagaaggagatgtgcaccatttatgaaggatcccaagggatggctgtggagcttggaatgttcctgtattgaggagcctccaaagccaaagcatggagccgggattagtaaatgcaatgctgtaagaagatccgtctcgatttgtgaactgtaaatgggcagtgctgggaggtaacttaggagacatttatcatgtcaagagttaggaatgaaatgttgaggacttggactagggtggtggtagtgtatgtagaaaagacgagagggaagtggaaggtttcaaatcttagctctgccacttgctacctgtgtgcccttgagcaaattacttcatctctttcaacctgttttgtcatctatagatagaggctaaaaacacttcacaggactcttgtttgaggattttaacttgtaacacacccagcacttagtaggtgctcaaggaataatgaatcttctcatgcgggaagaggcatggttttgtgactgggagggattaggggagtggagtatgaggttctgagtctgggagcccgggagaatgatgaagccttcacagaaagagatggaactgcttggggcctttgaattcagctttaggaacttctcctcctaaaccctggctactgagggctgtcacagaaaaccccacatccatgcagattgtgcctctacgaaaccacggcctctggctagagcagggccctctgggatactggccagcagctggctgtctccagtcagggtgtggactagggtgagagagtaagccacctagggcagaaacgtcaggaggtgctgggtttcagggccacgcccgcacttgatacccacagtgggacgtgcaccccagcctcctctcctgtctgcccttcaccactcaggagacaacctggcttctgtgttcactgaaaatattactccac

SEQ ID NO: 15157 - DNA, 2113 bp, Homo sapiens
tgttttgttgttattgttgaggggaagaccacatggttcttccccctcagccatctttgagcagtaaattgctggctgtgctgccagggacccgcagccctggtggaaaagccagtagcacatacgcagggcattgcagggcttccctattgatggttcaagtgcttttctgatgcttccggagcaaaacctcatgcttttaggcatatctatgttgaatttcacctagggaatgttctgttcttagttacagcagcaaaatttgaaataatttcaccaggctaaataaaggaaaatggaaaccagttaagaggcacagtgtacagaggaggccgggatagagccatgagggttataatattaatatgtatatatgtaaaagcatatatatgttaactattgagaaaaaacaagttttgcattttataattggatatagtcaacatataatgtatgtttttgtttgttgctggattttgtttcatttaacctctctttgcaccctctcccacaacaaataccaagcatcaaaagcactttcatttgaaaattattatgttgtaatttttcagtttaaactttaaggagactctggccttgtttatgcttcttgtctgagaacagtagtgacccctggcagcaattcattaccaaaacacagacaaaccaaaggtaaccagctagcccaccactgaaaggaaagatctgagacatgggattcccatttgagagccaaaggatatgccctgtcatggtttctgtttggcctgtgttcatattagtgagcatggcttactgctttatttatttttatttcttgtcagggagtattctccgttttcctttctcgtatacctgccccaggttatcccatttctgttgttacctttattcttaatgtcattgtaaccatcacttatctcctctcattgggaaagctacatgatagtatttttatgcactcttctcccacacatacacacacgtgcatgtatctgagctgctcggatccagaggtcatttttgttacagtgtgtgcacactcactctccttcttagtgtgcatactctctcatttattctgtttatctccctggctctggaggtgcagccactggtcttcactttaatgtgttgccagaatctgcttctggctgtcgccaacatggggatgacccccattgtcatcatgttgggcatttcttttccagattggcctgtgatggaaaggaaggcttctaattagaaaacacagcaacagaagacctataccccggtgcccctgtgtcccactacacacagaaaaccctgtgagatggccagtcttcataatagcaacgtaccttcaccccagccacatgccccagccaatacaaattggaaaatctggcccattttagggttaccattttttccttatttgtgccaatgtccaagttgcagatttcccctttttcctgtattgtaacatattagataagttggtgtcgccagttggtactttctgtttgggtagtcctagggtaacaccctgccctaaactccatgatttcataggcttttcttcccttggggctcatgctcccctaattcctagcaagatgatccttcctaatcaaattcttctcattgcagaactttatccctggaagccttcatgtgggctgctagtgagttacattaattactgcaaatcagtggaattctcaagagacaagataagcttcatgtacatttgtcacctctctttcttccctatcctgccctgctgtcccaatcctagcttttctatataccatcctaaagggtttttaagccctaacacttgtctagcaaatggagagcctaatttaccaaaatgaaacttgtaaatttttgtgtcattgtatgtaagtttactttttatggaggaaggattctagataatgacaaatgaagattatgacatgtatttcactcctgtgattaggttctacgcacatgggtcataactcgcatgtcgagccccctctagtgaagggtaggagagctcagcctcggatggccaacattcagttgttcaggttcattcgtcaaagttaagttttagaactatttgtactcagtaacaaaa

SEQ ID NO: 15158 - DNA, 1242 bp, Homo sapiens
ctgactgagccggtaattccccttccgggccccaaggcccacctcttactgtcagcatcacttgccagtctgtacctactgggggtgccataagggggaactcaggagggctgtgacctgaccggtaacatggtttcctctctgaaggggaagcaaaacctatatacacctaggaaacagatccaaggcaaagaaacgggtagctggctgagatcacccaaactgtgcccaccagggtgggggagagagcaggtaggaaaacttcctggtgacctaggcaggtgcaaagaattttcatccccatgccctccttgtctcccaggtaattgtgggacttctcaagttttggcccaagacccacagccccaaggaggtgatgttcttgaatgagctggaggagattctggacgtcattgaaccttctgagttcagcaaagtgatggaacccctcttccgccagctggccaagtgtgtctctagcccccatttccaggtgagactccaacctagcatatcctagcccctgccagaaactgaggtcttgagtgaaatgagcagcacccaccgagtctgcctctccccaccaggtggcagagcgtgctctctattactggaacaatgagtacatcatgagcctgataagtgacaatgctgcccgagtcctccccatcatgttccctgcactctacaggaactccaagagccactggaacaagtaaggcgctggggtggggctgggtggtggggatccagtttgggaaactttgagggtatggaagaactaaagagccaggggtctcacctagtcacccagcaagtggggctgatgtcccctgcatgttgataggaccttgaggggctgactggagcgaaaagatgcctgtgtgcaagatctctgtgataccaaacagcagggcagcggcctgttacaccgctccttgggttcagctattctacaggtcctatcacagctttggagatgtaattctatgcagtgagaagctgatgtgaccttctttgagagtatgtgtaaagaatcccagggttttaggccgggcacggtgtctcacgcctgtaatcctagcactttgggaggctggcaaggcgggtggatcacgaggtcaggagtttgagaccagcctgcccaacatagtgaaacccccatctctactaaaaatacaaaaattagctgggtgtagtggtggatgcctgtagtcccagctacttgggaggctgaggcag

SEQ ID NO: 15159 - DNA, 1476 bp, Homo sapiens
catcaaggcactggaggcgcacaagcgggcggaagagttcctaactgccagccaggaggctctctgacccctcacgttcctaccacagggccacagcccacacagccctgggacactgccctggccctccatactctgctccctactggctgtcttgggggaaggcagcgcctctctagctactcaagggagggggatgtgggcacttgaagcagggacacccacagaatggtccctcttctccccaaaaggtgttcatgcctccctgtggctagtacaggctgagcactaagatgcttagtgctcagacaacctggggatgcctgtcccctacctgctcctcacccacagctacctgaggctgctctgagaagtacacacaggaatacatacgctcctctattcttcccttcatcctcatttgaacgccaggtatctcccctcctctctctcccctgcagaggcatgtagggaacagcaggagattattctcaccaaagttatgtcaagccccattggtcccagagtagctgaagggaagccaacccccctgcagcacaaataggccccccagtcccagccgtgtgctggcagatagggttgtattatttcttcttaccccatgcctgaccaagggaggtcaaaaggagaaaagtataggctgtggacaataactgatgaatatagggcccagatggaccaagtggggccggggagggatgaataaacaccctaccccgtgccctgtctttggtgagcagcagccctggggtcacagacatggaagggaccaccctggggctgactgcttttctgtgctgttggttcccaaaactagaaagaaggaagcagggagcggtgccccaagcatggctcctgccaacacctatttatttccttgtttgtgctatgctgggcaggccttctcttgtcccttataggtaccttggaggggccaggggctgaggaaggccggacccaggttccaggggcgcaggcagtgcggcttttggctgtgtacatagggtgctttattctccacagagtgatacatgctaaggtgggttgggcttggaccgatgtccccatatgtacagaactgaataaagtgggtctctgagaagtctgatgtgccttgatgtggaaagggagacggggaagatggaaatggacattacaaccagggatgtgttcagtcctgtgctggttctggcctggaatgtaggaatataaggcagctctcactgtggtcacttccaggcaggggatgcctgccgggcttggagggctttctgtaccacatcttcccactgggcatccgatatctcccgagcccaggcaggaacccctggcgcaggcaggcttactccagccattgtccttttcaccagctctacatgttctgaaatcagagccagaggccattcaggcatagaaataatgggaccagctcccctccccaatccccgaatcaac

SEQ ID NO: 15160 - DNA, 1524 bp, Homo sapiens
tacattaagggaatagaagaagtttgaaaatgcttggtggtgatggaggactggggagacccagggataagaggagcccctgagcgcctgggggcttgttctccttgaatttgagttgtttatatggcagagaaactaaaattttttttctccacctttggctggaattgcttatctcctctcctgtgcatattttactttaccttgacatatctgaagggaagaatagagaatataagggaggatggaagacttccattcttaagcccatcgacctcctaacagtctccacaagcccagacccaagatattttggagagcgggagtaatgaagtgagagtagcttcctgctggggctatttcaggatgggtcccatggctatttaaagcttagggtgtggagttgggggaggttgggtgggtgggactagcaagccagctgaaagccatgtctctttcctgcaaggggcctcccttatttgagctgttttagtgcctgaggttttgcctggccctttcctctgccagggcttcttaaacagggagcagatgatgatacacccaaactcaggagatgcttgccagcaaaagcattgtcagttgcaaggatttgcctgaaaaaacctcagatgtacccaggtgtacgtgccactaggttgacaggttgtgtttaagagaccatgaccagctgggcatggtggctcacgcctgtaatcccagcacttcaggagaccgaggacggtggatcacctgaggtcaggagtttgagaccagcctggccaacatagtgagaccccatctctactaaaaatacaaaaattagctgggcatggtggcaggcgcctgtaatcccagctacttgggaggctgaggcaggagaatcgcttgaacccgggagggaggcagagtttgcagtgagctgagattgcaccattgcgctccagcctgggggcaagagcgagacttcatctaaaaaaaaaaaaaaaaaaaaagaccatgacttctcatgctggatctttctcttgtcctgcccaagggcattttttgcctcccttcccctttttttttgttttgagacagagtctcgctctgtcgccagactggagtgcagtggtgtgatctcggctcactccaacctccgccacccgagtgcaagcaattctcctgcctcagcctcctgagtagctgggactacaggtgcgcgccaccgtgcccagctaatttttgtatttttagtagagacgggtttcaccatgttggccaggatggtctccgtctcttgatctcgtgatccacctgcctcggcctctcagggtgctgggattacaggtgtgagccactgtgcccagccccttcccctttgcattgcacactcccacctctatccgcctttcaggaacccaagttgtggaagagcttgttctctcttttctactggaaatggcttgttctctaccacagtagcagggatggggaagtggcaggaggagaaaacccctccctctatcaccatcccccaagcct

SEQ ID NO: 15161 - DNA, 1408 bp, Homo sapiens
attcctggtggggtgaggcattcctggtgagggtaaggtggaggggctgcctggttggctctaagcaaagcaggaaaggcaggttgggatgttgactgacatgtatacacagatctcaggtgcctggacactgcaatatacatacatacataaacataaaccggaaatccatatgagcttggaggtagaggagtgggtggtgttggatttggtggtgggtgggttctgattgttcaacctagtaggtctcttaagtaagaggtggctgtgggtggttgacctttaggaagttggagagactggtgtgtttttagcttggttcaaacatcccttagcttgggctgagggccccctcttctttctgtctcttattgttggccttccaggtgggagctgaatgccatgaccaccaacagcaatatcagtcgccccatcgtctcctcccatgggtaggaggaagtttctgccacctcccctcctgagcctgctgtcatcttcactgcccctgcccatctgtcacccacctgctcctttgacccctggacttggtatacctccatgtggagttgttgggcgagaggtgttctctgtgctgtgaattcagtggggagctgtagcggggtgggggctaggttcctccccccttgggccgagggccccttccccttggtgctctgtccccatccacctcctttcagctgctcctgggcctcagctctgcccagggccagccaggttctgctgggaagggaagggaatggggagaagggagaagcaagcagtgtctgagcctcaggagcttccccctccccctttgcctatcccctcccctctgcttgagccttgagccttgactgggagctgaaaggagttgcagctgttggcatgagacctccttctccccgtcttggggaggtggggaccagcagataaatcccacccttccttgagctgtcgctgtactctgaagttcagccagctcagattttataaaaattaattaaaatctccaaacgtgttgtgtgtttttgtggaatatggtggagaaggctggagtttgcagtgggggcagggtgccgaggacaagcaccctgaggttctggcttctcagccaagggtattaggaaaccaaatgccaccaaggcctggtccaagcttctcgggcgtggaacccagcaccctgcgactcgggcagaaggttgcgacaatgtctccagagcgggttatcctttgggcccggctccctggccctcgaccgcgcagttttctgcccattcgtcaccacgttgagaccgggaacgccggaagaggcggggcaggggctgccgtgagcggaagcggcgccattcgtcttccgagcgctactgccagctgatgccgggagctaactaccgcgccggggccgggg

SEQ ID NO: 15162 - DNA, 1408 bp, Homo sapiens; identical to SEQ ID NO: 15161

SEQ ID NO: 15163 - DNA, 1128 bp, Homo sapiens
ttttttctaactcccacctgtcttgagccccacagaaagtagtgtcctttatccctgtgcttgtgccaccaggccctgaacaatgagggtggcatgaggacagctttgtcaggaccctacacatcccagggctggggaagggagggaaacagtgaggggactggagcctagagccaacttggctctgcatgtgtggaggtgacagctttctctgccccctgccaggtgaatgtgatgccctctgccagccgggtgatcctcctggagaacctgacccgcttctggcccatcatccagatccgcataaagcgctgccagcaggtggggccagggatgtggggtgtggccctgggtagggggctctgagccccataaacaggcagatcttaagccagaggaccagcctgggtctcgagcagctccaggggtgaggttcgagggcgtagctgaccccagcccatcccaaggtgtggagcgagtgaagatagtcctgtgtgtgtttcagggtggcattgatacgcgcattcgggggttagagatcctaggccccaagcccacgttctggccagtgttccgggagcagctctgtcgtcacacacgcctcttctacatggttcgggcacaggcctggagccaggacatggcagaggaccgcaggagcctcctgcacctgagttctaggtgtgtgagagtgtgcgtgtatgcttgtgtctgtgggaaaggtaaggctattgcaaatagctggcaggcaggggtccatagaagctgtgagatggaggtttaatatgcgtggggagggggctggagttttctgagctgtgggaggggaagaaaggataaagagaaaagatttctccagtgggctgggaatgggatataccagttagcacagagcagttctgaagtaccagggggccttcggtttgggtgctggggttagctggcagtcttaggaagggtggacactgagataacatatgcttcaagcccctgacaccttcctcctccattctcacccccagactcaacggtgctctgcgccaggagcagaattttgctgaccgcttcctccctgatgacgaggctgcccaagctctgggcaagacctgctgggaggccctggtcagc

SEQ ID NO: 15164 - DNA, 1176 bp, Homo sapiens
gcccccttggtgggagccactggggtgtgtgtggcagttgggggatcctgcatggtctcccttcattcccctaatgcctcttgaggcccctcagtgtgggccattaaaaggcccctagaccagcagatcccttctacagatctgcttattgaaaaacctgctctgtgccaggcagtgcctggaattctaaacctgaagctcccaaatgctgctctccggggcctggctcacattatcaagtcacttgggaagcttaacaaataacgtgggtttgtggtagctccttgacaggtgtgcttatccgtgtcgcctgtcttggcttccgatgcaaagccagcttgggaacccctggcctcatctccttcagagtcttcgtttgaccttggtggggcatgaggacctgctggcccttgttaaagccagtgaaggtggtgaccctcccgggccatctgttaagttgccctgttgatggggttgggaggagttagtagagaagcagggcttcttttgcttagcagcccctgcccagacccatctgtgtgtctctcagacaagcctgtgccggaggagtcggagggccctggcagccctcccccctacaagatgatccagaccattgggttgtcggtgggtgccgctgtggcctacatcattgccgtgctgggcctcatgttctactgcaagaagcgctgcaaagccaagcggctgcagaagcagcccgagggcgaggagccagagatggaatgcctcaacggtgaggggccctggacggggaggtggtgcccgtgtgcgggagctgagcgccctcccgcggccacggaggggagagcgccagcactctggaaaccgagcggctgttgctgggtcctggagctgggactgccccacccctagcgggaagcctggagttggattcccagggcctcgtcttctgagcaacctggcttgagacttcttcattggagccccttggaccagcttcctatgattccctgctgtttcctcctcccagcacaaaaccacagatatcattagtatatgtacacacgttgctgttgcatgtcttgtctccctctatgagtctaagagctcccccaggggcagtctttctgtttacttcccttctcctatccccacttcctggactgggagctccttgaggtcattgctgggtct

SEQ ID NO: 15165 - DNA, 1226 bp, Homo sapiens
gtcattcctgtgtactacctgtagtattatttacttgatgttttatttaaattgactctttaaaaaaaaaaactaagttaccattgttctaggaaaaaatatgagaaatcatgggtttgtcatagttacgttttttcctagcatacgttaagacatgtttaccatgagccaccaaaaattctcatgcgagtcaccctttggaaaatgctgaatattagtcccacccttttattttgttgctgcagacactgaagcctaaggagggagggggtcacagcagaaccgggtctcgtgcccagcccaggtgggtgggtccccactgtgggagaggctaggcccctcccccaggtcaggagctgcctcggcctgggtgaaggtggctggctgactcagactgtacccacagggaagagtgagtttggggaggtgttcctggcaaaggctcagggcttggaggagggagtggcagagaccctggtacttgtgaagagcctgcagagcaaggatgagcagcagcagctggacttccggagggagttggagatgtttgggaagctgaaccacgccaacgtggtgcggctcctggggctgtgccgggaggctgagccccactacatggtgctggaatatgtggatctggtatgctgttggcaggggacgtgggggtctcgggtagggagggcagtgtcctacaaaggtgggagtcagtggttggagcaccgtgaaaaccttgtctcgtgcagtctcagccgagacctcacctgcctgctgttacactttgcccaccttatgatgctcagcttctgccttccctgctcttggatgcctgctttccctttatcagcacccagtctttccatctgtatctcaggggcgttggtcctaagtttttctgggacttctcactgtcacactgcagggatgccttccaggtcatcttctctgactcttgttttctttggtttgttattttttcctccccaaaagcttgtccccacttgagaataaatatatcagaacccactttgcctccctccttcctagcaccacttgtgacatgagtgttaccccagccaccagccttctcctctccactcagggtgtcattcccagagctgcgccttcctcttcattccccagctggtccttgccctcaccccatggtcctcaaactgctgcttctcaaatccctagttctggggcaagagcgggcaggagtcctatca

SEQ ID NO: 15166 - DNA, 1513 bp, Homo sapiens
acctccactccctggctaatttttgtatttttagtagagatgggggggcttcaccatgttggtcaggctggtctcaaactcctgaccttgtgatccacccgcctcggcctcccaaagtgctgggattgcaggcgtgagccaccacacctggccgaaaatactgcaatacttctatattggttggtaaatagcctttgcccccagtgcccactccagccactctgacgcctgtccgccagcccacttcagctcctatgcatggaccccgtcctaccagccagagtgagtggggccaggggagtcatctttttccgttgcgggtacccacctgccgctggccagcattgccccagaggcatccttgggtggctgcttgtataaactgcaaggtccacaaagtgttgaacaagttgttgaatgttttggccaacactgcacctgctgtcttccctacagatttgcaggctgggaaggctagacttcctcagcccgagggctgcccttccaaactctatcggctgatgcagcgctgctgggccctcagccccaaggaccggccctccttcagtgagattgccagcgccctgggagacagcaccgtggacagcaagccgtgaggagggagcccgctcaggatggcctgggcaggggaggacatctctagagggaagctcacagcatgatgggcaagatccctgtcctcctgggccctgaggcccctgccctagtgcaacaggcattgctgaggtctgagcagggcctggcctttcctcctcttcctcaccctcatcctttgggaggctgacttggacccaaactgggcgactagggctttgagctgggcagttttccctgccacctcttcctctatcagggacagtgtgggtgccacaggtaaccccaatttctggccttcaacttctccccttgaccgggtccaactctgccactcatctgccaactttgcctggggagggctaggcttgggatgagctgggtttgtggggagttccttaatattctcaagttctgggcacacagggttaatgagtctcttggcccactggtcccacttgggggtctagaccaggattatagaggacacagcaagtgagtcctccccactctgggcttgtgcacactgacccagacccacgtcttccccacccttctctcctttcctcatcctaagtgcctggcagatgaaggagttttcaggagcttttgacactatataaaccgccctttttgtatgcaccacgggcggcttttatatgtaattgcagcgtggggtgggtgggcatgggaggtaggggtgggccctggagatgaggagggtgggccatccttaccccacacttttattgttgtcgttttttgtttgttttgtttttttgtttttgtttttgtttttacactcgctgctctcaataaataagccttttttacaacctgtttctgagattcattccctgctcttgctcgtggaagatgttcctttttcccccgctga

SEQ ID NO: 15167 - DNA, 2655 bp, Homo sapiens
ccctggacagatggcccaagggatggcaccacttatttattgttgccttttcacgttttctttacacacacgttgacgggccgcaggagggaggcggggaggaggaacgggcagccacaggactgagccctctcactccagccaaagaaatgggcctgcctgcctccacccgtcctccctcagcctccccttcttcccgccccacctcccatttctgttgctggaggggctgtcctccttcctgggaccccctcgccagcttggctcgatgtttgccatgagtattagcttacccaatgggaccgtgccccacctccccacacacaggccttctgtggggctgggcaccgtgtcctcctctgaggaagcagttggggccctcttgccagcctccttgctgaccccaggtcagccctgtgtctgtcacaggctgggtcaaaagagccctggctctgcccctcagggggccagctggggagatgggggcttcttcctcacactgctgtcctctcccccttcagctcctgagtagctgggcctgtgcactgggcaggttcctggggccgcctgccctgccttgccgctccccttggacctccaggggctcctgggttggagggaaccaccagcgttcccttctcccccttgtcttcccccctctcctcccagctgctttacttaaagttgattttgaactttttatttgaggagacgaagtgaaaacaaatctataaatatatatttttaaaatatttaacttttttttatggcgtttttctcgtccccctccctgcccaaactccccttccctggggagccctcaggctccccagaactggctgggcccctggggacagagccaccccatgagctcggggtccaccagtgtgtgggggagattctgggtttgcccagtcctgggttgtttccaggagaaagccgggggaggggccctcaggccattccccaacggggtggggagggtgacccacagctctgggcctctttttgccctttagggctgttgctagggagagggaagagggagaccaaatgtcggggttggggtgggagggcgtcaggcagaggcaactgacttcatttgtgccacacgcatgggcattgcagccttgcgctgtcccaggcatgcagctgcctggggcccaagttgcagtgagcagggtggggtctgggagggggtgagaggcaggaatgggggtcagaagaagtgggagcagcttcttgggctgagtgcagccaaaggggagccagaaatgggcagttctcccagggagtgagcagctactgtaacttttttaaattaagacaaaaagccttgaagaaaatgactttatttttctaagtgtaacctcagtatttatgtaatttgtacaggggccatgccccacccccctcctccccctttggggtagaccttgagggtgggccagcataggggggagggtcttttaccctgtgtcagagcctaccttcaccacctatatccagaaggggagctttttcagaaacagggcagcagtggggtgaaattttcttaacccctaagactgccttcagtaggaacaagctggcttctgtgattaggtgaagggatgggggaagattttatgcacagcctagttatcaaggggatgatttgccgacatgtttgagaaccccctaacctctaaccctcattgctgtcttgccccagtttggggtgccaagatggaagtcacctttctgggctttctcctggagatagctggggcttatgggtggctttcaaggctggggcatggcaaatcaggggccagagagcaggggagcttgggactcaggtctgtaactgcccagccccttttctctgctcttgtttcactccaccatcactcactcactccccactcccccacccatggggaggagacctttgatgaattcttcctctccttcccacaaaagacagacccagtgagtgaatcaggcaaagtgcttataatgtgtgttgtgtgagcgtggccttgggaggacatgcgtgtgtcagggatgagttgaggtgatatttttatgtgcagcgacccttggtgtttcccttcctcggtggctctggggtatgtgtgtgtgggtgtgtgcgcctgagtgagtgtgtgtgcttgaatgtgagtgtgtatgtcagtggtttctacttcccctgggatgctgacccaggaatagtggacatggtcacagtcctatgtacagagctttcttttgtattaaaaaaaaatactctttcaataaatgtatcatttttgtgcacagactgtggggtctttggttctgtttttctacttagggagggatgggggtatgaacgcgaggcaaactcctaaaattgctgctctgagtagcgatccgggctgcttgatgagaacggtaatgctaaggtgtgctttgggctgtttaattctatacgatttaatttaaggaaagttttgcggggccgaggaccttctccctgtgcgtggcttcgctaggtgttaaggccaacgcagaggagcaaattttaattaacaggaaaagtgacacaactaatccaaagcattgctgaagggtttgggaaactcatgggcacctgacctactgaaaagtcaaaaagggcagccttaaggt

SEQ ID NO: 15168 - DNA, 1181 bp, Homo sapiens
ggtctcagtcccttccctgcttccaccccgtccccaccacactgccccagcccgcttcagtctcccacatgccgtccctcccagcttctccaggcccaccccctgccctgcatctggcctcctgtgctcctggctaggtcctatcaccctcctgcttctctgttgcttttttgttttgtttttttttttgagatggagtctcgctctgttgcccaggctggagtgcagtggcacgatctcggctcactgcaacctctgcctcctgggttcaagcaattctcctgtctcagcctcccaagtagctgggattacaggcgcctgccaccacgcccagctaatttttgtatttttagtagagacagggtttcaccatgttggccaggctggtctcaaactcctgacctcgtgatccacctgccttggcctcccaaagtgctggaattacaggcgtgagccaccgcgcccagcctctgttgcttcctttaaatgccagcagtccacagcctggggagtctcccacaaacgtcccggtgtccaagctctcccagcagctggtacttctctcccccagggctggtgggcttgtcgctgtcttatgccctgtccctgacgggcctgctctcgggcctggtgagcagcttcacacagacagaggccatgctggtgagcgtcgagcggctggaagagtacacctgtgacctgccccaggaaccccagggccagccactgcaggtgggcctgtacccccaccccaggccaaagctctggaaccctgaaggccccagtctccctcacaattcctttctttttgcccacccatctttctcagctcccataacctctcttcatgatgaccacaattcttcaccatgtcccttcttccccatctctcattctctcattcctctcacactgtccatttctcattattctcccctcctcaccatcgctcctcatctcccctatctccctttccccgtctgtctcccacccatggaccccaccagctgggcaccggctggctgacccaggggggcgtggagttccaggacgtggtgttggcgtaccggccagggctgccgaatgccctggatggagtgaccttctgcgtgcagcctggagagaagttgggcatcgtgggccgcacaggctccggcaagtcttccctgttgttggtgctc

SEQ ID NO: 15169 - DNA, 1214 bp, Homo sapiens
ccctgggaagtgccacccctggccaggcggcagtgtgcagcccgtgctgttgactggcccagctgtaggccaggcacacactgccccattgtactgtgctttccgacgcagcccttgtcatagcctctaatccttgggctgcttctctcccagcccctcagagcctgtgggaggtggtgggatggactctgctggcactggtgcgggatgggttgcagctgcagctgtgggtggctttgttcttacagcctagctttcagagtcctggtgcagcctggcagcagtgtttggggaacaggcgagatagaggagctgagccccttctccaacagccgtcctctctttctgttgaccaaccagagaggctttttgcctgaggtcagcaagctggcctccctggttggcagggggagtgcttggcttccatctggcatggtttccggatgggagaaagcccctgagggtctggtggtaagtctgcgatgcttcccatcaggagagtgcagtgtgcagtgtgtccccttgggcatcctgcagcttgccattcctctgctttctctctgcagctccggagttgggctgctcacaaaccaagctgtctgtttatatggagtgcctggagggcatctgccatgagtctgtcgctaactgcactaaccaggagagctggctggttggggagaagacactaaccctgtgagtctgacctcagccagctaacctgccctggggtgccaccagcagggcctctgtcctccatccttccccgcagcctggctgcctccctccttagcttatatcacgccatctcctctgctctcttgttcttactactgcgtccctctattttcccagtctccctttgctgtgggtggggatgtgcccccttcacggccacctgcccatcaccagcctgctgctgggctccactgaccaccccccaccgtcacccttccccgagtcagcagcgtgctcttcacttctcccttcatacagaattggttcgagtttctgttgaatctgtgcttttagcacagagtttgagaagatccctcaattaccatgctgctgctgcttctcatgcctcagagacagatgaactagagtgggaagggacttttctcctagatcagatcatttcctccctttatcaagaagggaaggttggatagtgtccctgttactctcaccctaggataagaagttaggatcag

SEQ ID NO: 15170 - DNA, 1158 bp, Homo sapiens
tgctaaggagcccttccccagctcctggctcctgtaccagctgccacccttacagccctttagccacatgaggcctctggagaggagggcagtgctgggctggatttccaagagatgaataatggagaagcctgattgtgcagtggggaaactggagctgggggcttggtggccagctgacatgggctgtaaccagagacaggctgggagccatatccctacccccaattctttatttctattctccgatagtgaagggaggctggactgtcccctaccatcccctcttcctcccctgaccctccaacccaggctgtgttcccagggccagcaggcctatgaaatatgctgccttagactcagactaagactccaggagtttccctgtcctgtttgcctgtcctcatgtcatcccttccttcctgagcccactctggagctccagggcatgcccttctatctctcatacccctctgcccttgatcccacaacaccctgccaggctcttacaggaggagaatgaagagcttcgccggcgcctggcctccgccaccagacgcactgaggccctggaacgtgagctggaaattgggcaggactgcctggagctggagctgggccagagccgcgaggagctggacaaatttaaggataagttccgcaggtgtgggaatgaggggccagacacacacacacacacacacacacacacacacacacacacacacacacacactctctctgtctctctctctctctgtgtctctgtctctctcctttcataggaggttagctggaagatgccttagagatcatctaattcctattaaaaaactggataagttctgcaggtgtgggaatgcggggccacacacacacacacacacacacacacacacacacactctctctctctctctctctctctctctcctttcataggaggttagctggaagatgccttagagatcatctaattcttattagaaaactggataagttctgcaggtgtgggaatgcggggacacacacacacacacacacacacacacactctctctctctctctctctctctctctctctctcctttcataggaggttagctggaagatgccttagagatcatctaattcctattagaaaactgaagttcttg

SEQ ID NO: 15171 - DNA, 1099 bp, Homo sapiens
gagatagcagagtgctgagtacacagaggtacttaaaggtgggagccattactttcgccatgagtcaagttatctttggctgcgatcattgatgtctctctttcctgctcttttacctcagctgccctgtgagctacaggacatggttcggaaacatttgcacagtggtcaagaggccgccagcccaggtcctgctcccagcctagccccaggggctgtggtgcctacctcagtcattgcccgagtgttagagaagccggagtctctactgctcaattcagcccagtcaggcagcgccgggcgccccttggctgaggatgtctttgtgcatgtggacatgagtgagggtgtcccaggtgatccagccagtcccccggcccctggcagccccaccccacaacccaatggggagtgccactctctgggtactgccaggggctccccggaggaagagctgcccctgccagcctttgagaagctgaacccctacccaaccccgtctccaccacacccactgtatcctggccgcagggtaatagagttctctgaggataaggttcggatcccccgcaacagccccctgcccaactgcacttacgctacccgccaggccatttccctgagcctggtagaggaggggagtgagcgggcccgccccagcccagtgcccagcacccctgcctcagcccaggcctcaccccaccaccagcccagcccagcacccctaacactcagtgccccagctagctctgccagctctgaagaggacctgctggtcagctggcagcgggcatttgtggaccgtactccaccacctgctgctgtggcccagcgcacagcctttggacgcgatgccctccctgagctgcagcgccattttgcccatagccccgctgacagagatgaggtggtccaggcaccttctgcccgacccgaagagagtgagcttttgctacccacagaacctgactctggctttcccagggaggaagaagagctgaacctgcctatcagtcctgaggaagagcgccagagcctgctgcccattaacaggggcacagaggaggggccaggcacttcccacaccgagggcagggcc

SEQ ID NO: 15172 - DNA, 1192 bp, Homo sapiens
ctagcgcgggtttcagcgacgggagccctcaagggacatggcaactacagcggcgccggcgggcggcgcccgaaatggagctggcccggaatggggagggttcgaagaaaacatccaggtaatggccccaaggcaccagctgccagcagccggagggccggcgatgtccagaagtgtcttggggattccccctctgggcctggaagtccgctccatttacaaaactctcttctttgggtcttcgtgcacactaaagtcagtgggattaacattgacctgaaagggccagactactactccagcctgaggatctcgggtttcagggcccgcccgaggcattaggaagaaggtattcttggaacaagttaggaggttggtcggggtaaggcatggagtggggttgggtgggattcactggcattcgctgaaaacatactatgtgtatagttttgtttggggcttaggaaagaaggaaatgggcactttttcagccttttagtctttgataggtaacataggagaaagacatgaatggaagactagtaggtttcccaggctagaaaagatagccaaagctagaaaccaggcgttctgagagcatatgagggggaatggagtggcatgatctgtagtgattccaagccgtatcctcagcagtggaagaacaaagccctaaaccctgggatgagcagaggacttaatggatggaacagaaaagtcctgcactctaggagccattgtcttcacagggcggaggctcagctgtgattgacatggagaacatggatgatacctcaggctctagcttcgaggatatgggtgagctgcatcagcgcctgcgcgaggaagaagtagacgctgatgcagctgatgcagctgctgctgaagaggaggatggagagttcctgggcatgaagggctttaagggacagctgagccggcaggtggcagatcaggtaagcaagattgaatcctctgcaggtagaaaagtagacctaggtatgtcccgtgttctggaattggtgttggtgatgttcgccccaggttgtccagttagaaccatgtagaaatcaaacggaaaataggcaacaggatctagaaccaacagtaccacaatacctatgcccatcttccttacttcagatgtggcaggctgggaaaagacaagcctccagggccttcagcttgtacg

SEQ ID NO: 15173 - DNA, 1099 bp, Homo sapiens
tagaatatttaataagagacatttgggcaaagggaggtttttggatgagaggataatacttgagggaattatctaagggggaggtatgaagagatattacacagagagcagatttcacttaaatgttttttcctgtccctctagaatttccgtgtggatgtagtacacatggatgaaaactcactggagtttgacatggtgggaattgacgcagccattgccaatgcttttcgacgaattctgctagctgaggtattggcaggcatggtgacaaggctggagttgctttgggaactgcactgacacctcacttggagaattaagtgtctcaagctgtccttccctccttaattttcctggaattttgctgagcattttaccttctcattctttgtaaatttctcattaaacattctaggaagagagatagctccctacctctggaggttggggttacggggataggtagggggtctgttgggtttttgcagataagtggttatttttccttgggcaggtgccaactatggctgtggagaaggtcctggtgtacaataatacatccattgttcaggatgagattcttgctcaccgtctggggctcattcccattcatgctgatccccgtctttttgagtatcggaaccaaggtgagaaaatgaaattttgggagaagtggactatctgggttcaaatcctggttgactgtgatgttgggtaagttacttatctttgtacatcagtgtctttcatctgtgagaacacttgccttgtctcccaagtttgccataattaaatgggaaacacgtaaagcattcagcatagtgctggcactcagacgtttactagttcttaggagctccctccatttgtgcaggagatgaagaaggcacagagatagatactctacagtttcgtctccaggtcagatgcactcggaacccccatgctgctaaagattcctctgaccccaacgaactgtacgtgaaccacaaaggtgagtagtggtagggtgaggaagaggccccacctgtgggtagctgctagttttagggactgagatcttctgacatgtttttcctccagtgtataccaggca

SEQ ID NO: 15174 - DNA, 1543 bp, Homo sapiens
atatcctcatcgctcagctgcggcctggccaagaaattgacctgctcatgcactgtgtcaagggcattggtgagaaccctgtgtgccttcctgggaagggggatagttcggttgcagtggggcaagctgactagggaactcagctgagacattcccggcaggtagaaagccaagagggttgtgcttttgctgttagtagcttaggaggagtattcttcctaaccctagaagggtttcctataggcacgttccctcttcctctccaggcaaagatcatgccaagttttcaccagtggcaacagccagttacaggctcctgccagacatcaccctgcttgagcccgtggaaggggaggcagctgaggagttgagcaggtgcttctcacctggtgttattgaggtgcaggaagtccaaggtatggtatttgggatgctgttcaagttaggacctaaattatattttctttcaaggtgacagaaataaaaaccctgggctcctaaaagtataacctggtttgctaccaagtggcaaattagaaaaaggaataaaaaaacatggtttgttctcattaggtaaaaaggtggccagagttgccaacccccggctggataccttcagcagagaaatcttccggaatgagaagctaaagaaggttgtgaggcttgcccgggttcgagatcattatatctgtgagtatgaagtggtgagatgagtgggcagtgctctttggtgctgcagcttccttccagtctagatgtgaagtttatgagtaagttttacaggcaagccctgcctagactaaagtgtctctttggtccccagtctctgttgagtcaacgggggtgttgccaccagatgtgctggtgagtgaagccatcaaagtactgatggggaagtgccggcgcttcttggatgaactagatgcggttcagatggactgagcttggatgcttctgaggcaagctgaagctttgggttctgactgacccaccctacaggactgctgaacagagagcccagtgtgactagggatcctgagttttctgggacaattccagctttaatcaatacattttgttaaatgtgccataaaatgagactttttacgcctttataaggccttagatgtaaataaactcacccaaacaaaaaaactttttgagactacttttgagtttgttttttgagacagtctcactgtgttgcccaggctggagtgcagtggtgcaatctcagctcactgcagcttcctcctgggttcaagcaattctcaggaggctgaggcaagagtagctgatgctacaggcatgcaccaccacacctagctatatgtctaattttttgtatttttagtagagacagggtttcaccatgttggtcaggctggtgtcaaactcctgacctcaagtgatacgcctgccttggggcctcccaaagtgttgggattacaggtgtgagccaccgcgaaaaacagggggcctcacttcagaactggtttagcatttaccaattaagaacatcagatgtgcactccagcccggg

SEQ ID NO: 15175 - DNA, 1255 bp, Homo sapiens
accagaagtaattatactaaagtatcaagaaagggagttagggcttaaactattctgtctagatgtcccagatagttcccattctacttggagatttggcttttccaagaaaagctagagcagagcagcccttctcccacaagccctcccacccccgtgcagccacatacctgtacagaatggtaactaagggtgctgtgcccaaccctgcgactagcaaggctcgcagcaagagcacagccctcaactacttgtgccagagtttctcttggaccactccaactcccactgagcccttttgctgctgggctggcaggaaactttccccactccctaaggggcatgtctgggttaggtgctaagtgctgaagagaacttggtcagttctctcaactttgctttgggcaagaatctggtcacctgatgggatccatggtacaggctactgctaaacttggcacagtatcaagtatagtacctccaaggaccagggctgggaagtctttagtgctaacatcccctttagagttcacacatcttgcccttccatgaatgacccctcagtctggcctccccagcctcaaggtccactcaggcacaagagccacagtaccctagatagtgtcacatgacaccgttgtcatccaaggataatacagaccaactaggctacatctgtgatgagcagctagcaaagccgctggtcttctcctaggactaagtccaggtgccttccacaatctcatggtctttcaggtccctggttacttttctcaaaggccatttccaaaagaatacatgccttcacatcacaacctgtactgtgagtccattctagaggtcactgaaaggccctgtaaagagaggacatggatacgggacctggccctgaggttattactggccgtaaggcagagttaatccatacagaaaccagtgtgtccatgtgctctgcacaaaaacagacctgttgtccatccagtccactgacaagagggtttccccgagagccgaagtggactgaagctacagtttttagctggtgcgggccacaggcagggtcagattgagaagaagcaaagctggggaagcagaagttgggagtcttgtgttgctccctcttcctgtgtggtgctctgggtttctgtggatcgtgaaggcgatctcaagagtgtttccctccaaacctgatagctgcctattcctgtctggttggggctgtggaggatgtagttgtatttattgcattgtaata

SEQ ID NO: 15176 - DNA, 1667 bp, Homo sapiens
tgtgcccagccccgtcttctatttttaaaaataaaatatttaaaaatggataatttccagggaaaatgtaacttattctaactcaacaagatagaaaacctaaagagatataacttcatattaattatattggtagtagttaaattagaccaaaaaactccaggcctaaatgattttacatgggagttctcccagaccttcaaggaacagataatttatctcttagacaaactattcccaagaatagaaaaatgtagcttcttctccgagaaaacaccaaatggcggatgacgccggtgcagtgggggggcctggaggccctggtggccctgggatggggaaccgcggtggcttccgcagaggtttcgccagtggcatccggggccggggtcgcagccgtggaccgggccggggctgaggccgcggagctcgcggaggcaaggccaaagataaggagtggatgcccgtcaccaagctgggccgcttggtcaaggacatgaagatcaagtccctggaggagatctatctcttctccctgcccattaaggaatcagagatcattgactttttcctgggggcctctctcaaggatgaggttttgaagattatgccagtgcagaagcagacccgtgctggccagcgcaccaggttcaaggcgtttgttgctatcggggactacagtggccacgtcggtctgggtgttaagtgctccaaggaggtggccaccgccacccgtggggccatcatcctggccaagctctccattgtccccgtgcacagaggctactaggggaacaagatcggcaagccccacaccgtcccctgcaaggtgacaggccgccgtggctctgtgctggtgcgcctcatccctgcacccaggggcactggcattgtctccgcacctgtgcccaagaagctgctcatgatggctggtatcgatgactgctacacctcagcccagggctgcactgccaccctgggcaacttcgccaaggccacctttgatgccatttctaagacctacagctacctgacccccgacctctggaaggagactgtatttaccaagtctccctatcaggaattcactgaccacctcgtcaagacccacaccagagtctctgtgcagcagacccaggctccagctgtggctacaacatagggtttttatacaagaaaaataaagtgaattaagcgtgggaaaaaaaaaaagaaaaatgtagtgctccataactcattttatgaggcttatttattttgataccaaaaccagacattaacagtaccaaagaggaaaattataggcctaaatcacttgtaaacatagagacgaaaatcccaaatcaaaagcaatatggagctagtaataagtcttttaatataaccacatttccattgttatatctcaaaatactaccagtaattcaatatccagtatacaatcagtattcaaatatcaccgaatgttttccttttttctgtttatccacacaaggtttatatatatttaagatatctcttagtcactaaattaggcttagcgtggtgcctcacgcttgtgatctcagcagtttgggaggccgaggcaggcggatccttgaggctaagagtttgagaccaacctggccaacatgacaaaaccccatctctactaaaaatttaaaaaa

SEQ ID NO: 15177 - DNA, 1263 bp, Homo sapiens
tcttccgtaacccctgcacagagcagattctgaaacttcttgacaatttgcttgcgcttataaggtgagtcagaataatggcttttctctgttgttttctactttaccttaaaaatttcaaaagtttagtctgtttacatgtcttcatatcttagtggtattaatgagggattgatttaagtcttatttctttctagagggtgtctcagttttaaaaaaaataacatcagctctcacttgcataaatcttaatttccatgtgaacccaaggggataatcccaaaagggcttttcccattttgagcctcctctttgttgttcttccatttctttatacttcatccctatttttacttgtaagttttatttggtctaaattttttagtaaaggaattgctcattgggagcagggcagttgccttctataatgatgcttgtctaggtggtattcatatgagctaatctgaatttatcaatactgagtctgagctcagatgaaccaaacaaccgctggctgaacatgctaaacaaaggaattataaatttttcatctgagtttgctagatccttggttctcaaagctgagtcctaagaccagtagcattagcatcacctgagagcttatttcaaaggcagaatcaaggccccaccccagacatactaaatcagaatctgcattttaactagatgcccagtggtttatatacacattaaacattcagaatcactgttttagatcacatgagttaatatattcaagtggaagtaggccagtataggcttatcagttactagatatagatatttgatgactcagggatggtctctaaatgaaaagataggtttttttatataattcagttattggccaaagagtgctttttgtatctcacaggattggttttttttttgtttgtttgtttttttgagacagagtctcactttgtcacccaggctgggagtgcagtggtgcaatcttggctcactgcaacctccgcctcccaggcttaagcgattcttctgcctcagccacccaagtagctgggactacaggtgtgcaccaccactcctggctaatttttgtatttttagtagagacagggcttcgccatgttagccaggctggtctcgaactcctggccgcaagtgatcagtccacctcggcctcccaaagtgctgggactccaggagtgagccaccacacctggcctctcacaggatgtttaaattacattgttagagctctgtttcagtactttttgg

SEQ ID NO: 15178 - DNA, 1157 bp, Homo sapiens
ccattttggtttaagagctaggcccagggtggggtaggggttaaggatattgaagtgtgatggcattatccatgatatctgaagttctctaaaagcagtcttttgtaatttaatctctggttcaattagattgtgggtggggagggcacagagtgagactcctgtggtgtctgcattgcagcaccagcacatttagaaaaatgagaacagctaggaagggccatacaaccacacagacacttatctgtgctcacacagtagagaaattattttctttatattttgaagattatattcttgtttaattcttaaattgttactaataatatttgggagtgggaagggaaatttaaaccttcaaatgacaactgacaattagtatgattatactcctctcactataaaaactgctcttaagggccaaataatgatagcctgttaactcctgtggaagaaactgtccttgtttaaagtcatgatgtaacttgtttttccccctccaaccttcagagtgctgtcagatgttgatgctttcattgcgtatgtgggtacagatcagaagagctgtgacccaggcctggaggatccgtgtggcttaaaccgtgcacgagtaagactttcctgggaatgggaagtggcattggccatgggtaggagtagggtgttgtcttttgtcaagtttctcatagatttgttttttctatactggtgagaaacgtgggagtctccacttccctaagcttctcctttcttttcttctttagtcttgaattcttgagttagttcccacagcagagcagatggtcttttctatgaagtcattattttggctttaaggatctctaaatagctctgaagactgaaggtgtaatgaggaagtaggtcagaacttggtcagcagggtgagtcctccctgccattgctctctggcatgtaaagtcttaagtgatggcttaacttgcaaacctgagatttttcagtgctttgctatttaaataagcattgttcctggctccattatggcacaagtcccattaattaacctggcaagtagtaggttgattcagagtaccgtgaggggggattaggacactagctgtcaaggcccaataagggtcaactcaaagaagatgaagtgatggcattttaaacacttt

SEQ ID NO: 15179 - DNA, 1252 bp, Homo sapiens
aaagatcaagggagcttgtggccctgggctgcctgaacctggccacacaggcttgcggcagcaagagcccagcccatctgtttacaggacgctcagcagttactcccaggaaaatccctgcacttcaggaaagggaaactggtgaaaggatttgcttgcccaaccgtggcctggcctgaggaggtagtgctccactctcccacgtccagcttgggcccccagccctcacaggcacctctttgttctccctccacaggtacctgacgcgctgggctcctggctccgtcaagcccatctacaaaaaaggcccccgctggaacagggtgcgcatgcccgtggggtcaccccttctgagggacaatgtctgctactcaagaacaccttggaagctgtatcactgacagagagcagtgcttccagagttcctcctgcacctgtgctggggagtaggaggcccactcacaagcccttggccacaactatactcctgtcccaccccaccacgatggcctggtccctccaacatgcatggacaggggacagtgggactaacttcagtacccttggcctgcacagtagcaatgctgggagctagaggcaggcagggcagttgggtcccttgccagctgctatggggcttaggccatgctcagtgctggggacaggagttttgcccaacgcagtgtcataaactgggttcatgggcttacccattgggtgtgcgctcactgcttgggaagtgcagggggtcctgggcacattgccagctgggtgctgagcattgagtcactgatctcttgtgatggggccaatgagtcaattgaattcatgggccaaacaggtcccatcctcttcatgacagctgtgagctccttactgtgggagagctgcagggagccaaggtgggctgcctgacacacttgccgctctcgtgtgaatccaagaaactgcgttcctcaaaggggccctggttgtcaccttctcccacagccatttccacccatcgttgtctagaatctctttcattagcacattccaacccctctgccacttggtttagaaatgagctccctggctcagtgggcctttcagaatctggaaccagacggaggtggagttaagaagataggacagaacaggcaggccaagttcactgaagcttaagaaaatcatgtttagactctgtttaaaaacatccaggctggctcccattctatagcatgaagggcaagtccatgttcttctcgccagt

SEQ ID NO: 15180 - DNA, 1220 bp, Homo sapiens
cccaccgcccccgctctctctctgtctctgtttttttattttccagaaaatcagttcgaggaaagggaaaggggcaaaaacgaaagcgcaagaaatcccggtataagtcctggagcgtgtacgttggtgcccgctgctgtctaatgccctggagcctccctggcccccagtacaacctccgcctgccattccctgtaaccctgcctccctcccctggtccttccctggctctcatcctcctggcccgtgtctctctctcactctctcactccactaattggcaccaacgggtagatttggtggtggcattgctggtccagggttggggtgaatgggggtgccgacttggcctggaggattaagggaggggaccctggcttggctgggcaccgattttctctcacccactgggcactggtggcgggcccatgttggcacaggtgcctgctcacccaactggtttccattgctctaggcttctgcactcgtctggaagctgagggtggtggggagggcagacatggcccaagaagggctgtgaatgactggaggcagcttgctgaatgactccttggctgaaggaggagcttgggtgggatcagacaccatgtggcggcctcccttcatctggtggaagtgccctggctcctcacggaggtggggcctctggaggggagccccctattccggcccaacccatggcacccacagaggcctccttgcagggcagcctcttcctctgggtcggaggctgtggtgggccctgccctgggccctctggccaccagcggcctggcctggggacaccgcctccgggcttagcctcccatcacaccctactttagcccaccttggtggaagggcctggacatgagccttgcacggggagaaggtggcccctgattgccatccccagcaggtgaagagtcaaggcgtgctccgatgggggcaacagcagttgggtccctgtggcctgagactcacccttgtctcccagagacacagcattgccccttatggcagcctctccctgcactctctgcccgtctgtgcccgcctcttcctgcggcaggtgtcctagccagtgctgcctctttccgccgctctctctgtcttttgctgtagcgctcggatccttccagggcctgggggctgaccggctgggtgggggtgcagctgcggacatgttagggggtgttgcatggtgattttttttctct

SEQ ID NO: 15181 - DNA, 1199 bp, Homo sapiens
gcctgcctcatcgccaggcctcctcacttggccctaaccccagcctttgttttccatttccctcagatgtgacaagccgaggcggtgagccgggcaggaggaaggagcctccctcagggtttcgggaaccagatctctcaccaggaaagactgatacagaacgatcgatacagaaaccacgctgccgccaccacaccatcaccatcgacagaacagtccttaatccagaaacctgaaatgaaggaagaggagactctgcgcagagcactttgggtccggagggcgagactccggcggaagcattcccgggcgggtgacccagcacggtccctcttggaattggattcgccattttatttttcttgctgctaaatcaccgagcccggaagattagagagttttatttctgggattcctgtagacacacccacccacatacatacatttatatatatatatattatatatatataaaaataaatatctctattttatatatataaaatatatatattctttttttaaattaacagtgctaatgttattggtgtcttcactggatgtatttgactgctgtggacttgagttgggaggggaatgttcccactcagatcctgacagggaagaggaggagatgagagactctggcatgatcttttttttgtcccacttggtggggccagggtcctctcccctgcccaggaatgtgcaaggccagggcatgggggcaaatatgacccagttttgggaacaccgacaaacccagccctggcgctgagcctctctaccccaggtcagacggacagaaagacagatcacaggtacagggatgaggacaccggctctgaccaggagtttggggagcttcaggacattgctgtgctttggggattccctccacatgctgcacgcgcatctcgcccccaggggcactgcctggaagattcaggagcctgggcggccttcgcttactctcacctgcttctgagttgcccaggagaccactggcagatgtcccggcgaagagaagagacacattgttggaagaagcagcccatgacagctccccttcctgggactcgccctcatcctcttcctgctccccttcctggggtgcagcctaaaaggacctatgtcctcacaccattgaaaccactagttctgtccccccaggagacctggttgtgtgtgtgtgagtg

SEQ ID NO: 15182 - DNA, 1134 bp, Homo sapiens
aaactccggctttctggatctagaacccactttccacaccttgagccctcagtgagcatttgtagagtagctgagtgactgaaagaagtgcagacaggcaggtacacagaggggatggccgagggcctgactgggcagtggggactaggcctgggtttctggactgatttgggggctgaagtcagcagcccagattctgaaggtctctaggctgtggccctgccttgctctgccaaccatctggctctgcacaggctgtccaaacaggactccgttgctagggccctggcagggatgcctgacctgataatccctgcctcccatgggaacccagcctctccccggccatgtccatcaaggtcatctagtgtggcctggctactagctgcttccgaggtgctgcccatctaccctttccttccttataccccctctctgagctgcttctttggaccttctttaataattagtggttaattgtcagtggtctagggtcagactgcctgagtcccagccctggctctgctgtgtggccttgggagtgttacttaacctctctgagcctcatttccccatctttaatatggaaatcagaacagactattgtaaagattggtatgaggattaaatgagctaaaacatttaaaaggctctaacagtacatctcaaactgcatatatgtttttgttaatattattatgtcttactcattcatttaaattgatgacagtgtagccagtgcagagtgagaggagaggtggtcagggcagttaaagtactagcatccctagtccatcttctttgaaaaaccagagctgagtgacagggacactcccttgctctagcttacagtctttcctgggttggggcggggtgggagaagtaccactccccaggcaccctcattccgggaggccctacgctggtgtgtctcaccttctgctgagacagatacccaacatcgccctgttcaatacttaaagctcagctacactttgaccacaaggcacagttttctacttgatgtatttaaatggatttagggccgggcgcggtggctcaaacctgtaatcccagcactttggaaggccgaggcgagcggatcacctgaggtcaggagtttgagacgagcct

SEQ ID NO: 15183 - DNA, 1187 bp, Homo sapiens
attcccagccacttgggaggctgaggtgggagggtcactttagcctgggagcttgaggctccagtgagctgagattccaccactacactccagcctgggcatcagagcgagacgctgtttccaaaaaaaaaaaaatgcttagaggagcagtgcctggcttgtaggaagccccaagtcagcgtgggctggatgctgcaggccccagcctggctttccaactagaggccctgtccctaaccctcccacaaaggtggaggccattgagtactacacaaagctggagcagaagctgaaggaagactacaagcgggagaaggagaaggtgaatgagaagcctcttggcatggcctttgtcaccttccacaatgagactatcaccgccatgtgagtccccaactcggccctcggccctgagcagccctccagggctccctgacccctgtgctcatggccttctgccagcagtgtggcctccaggtgggcctgtggtaaccagtgcccatctttctagcatcctgaaggacttcaacgtgtgtaaatgccagggctgcacctgccgtggggagccacgcccctcatcctgcagcgagtccctgcacatctccaactggaccgtgtcctatgcccctgaccctcagaacatctactggtgagcaaacaggtgtcagggcaggctttccagggcctgggatgggctcagtaggtaggcggaggagagggagtgtcttggtgtcactgggggccaatcctgcccttggttcctggactgaccggttccccaccttgccagggagcacctctccatccgaggcttcatctggtggctgcgctgcctggtcatcaatgtcgtcctcttcatcctcctcttcttcctcaccactccagccatcatcatcaccaccatggacaagttcaacgtcaccaagcctgtggagtacctcaacgtgaggcctcatgcccctgtcactttccacgctgggtcacaacacacagataccaggccctgatccctcttccacttgcccagcccagcccgttctgcttgttccaaccccgtgccaccaaccagctcccaaaaacccctgtgtgcacttcccttgggctccctgccaccttccccctgagagaggccaccctcaggtgtgcaacacctggagaaacacccagggaagagagagagcctgcat

SEQ ID NO: 15184 - DNA, 1099 bp, Homo sapiens
ctgccctcacacctctaggggtctctctgcagccctgtggtagtccctttgcctactcctctcggtggcctccagaccctccaactttcctcctgcttgtgtaagctccccatgccaggatgtgtgtgatggggcggggctgagctgcctgacactcaagtcaggctgggaatgatcttggtctccacctcatttttccctttagttgaatcagagttccccccacctcccagtctacagggctaactgagaagcagcttttatacctctctccattccaaaaggagcttgaacatttaatatggattctagctcctccactcaccagctctgtgacttcaggcaagtgactcaacccctctgaacctcagctggccccatctattcagtgctagtactagcttatgggtggttgtgaagaaaagacaagagatctgcaggtagtggctagccccatatgaaatcctgggagtggagaattgcaggagaggtgttgggagtctggaggcagggaggtactcaatttggtggctactttcaggggcccacctcagcaggccaaggcatagttggagggacaccagatgctctgagctggtatcagatccctgtttgccgctgggcaaaggcagacaaaagcaaaacacgaaggctggccagctgaatgttaggatatgggcaggaggagagggctggagttgaattgtgcccaagactggtatgggaactcctgagaacagagagagcaggggtgtagcagggggccagggaagaaataaatacttcttctctaagcctaagccagttttacccaggagaacaggagctattctccccaccctaggcccccatctgctttgaagctacacctgctcttaactgccaggaatcttgcctgtggggtggagtacggggtatgcgggtatgaagtaagaacctagaggaagagtccctactacctaatagaaaacctgagacctaggcagggctcagtggctcatgcctgtaatcccagcactttgggaagccaaggtgggtgggtcacctgaggtcgggagttcgaaaccagcctggtcaacatggtgaaaccctgtctcta

SEQ ID NO: 15185 - DNA, 2660 bp, Homo sapiens
agtagagatggggtttcaccaggtcaagctggtctcaaactcctgacctcaggtgatccacccacctcggcctcccaaagtgctgagattacaggcgtgagccaccacgcctggcctggattcgtggttctttaatgcacagccaccatgaagacacaggcatttgggtgactctaccccttctatctagatctcagtcctggctttctctgtctgcttcatcttcactatcaccattgggatgtttccagccgtgactgttgaggtcaagtccagcatcgcaggcagcagcacctggggtgaggatgccacaggtttccaggatgggaacagacaggatcttgagttgggctggaagtggggaagggagggagcctgggtcaccttctccccgtttcctgggtccatttgcccttccctgggctggaagcatcttctccattttactgttggggaagctgaggcccagtgaaggttaggcttgctatacctgcctctgtgagcctgataaccacccgttcatctcctcttccagaacgttacttcattcctgtgtcctgtttcttgactttcaatatctttgactggttgggccggagcctcacagctgtattcatgtgggtaagtggaggaagagggccccaggcccctgtgggaagtaagagtccagcctggacccagagagggaacccaagaaagtatggtagtaaggggaccatttgttttaaagtcgaggcataatttatgtatagttaagtacaagtcttaagtgtacaacttaatgaatatatgtatatacacatacctgcccagatcgagatgtagaatatttccagcactccagaaggctccaccatgcccctttcaagagtaaccccctaaggagaaccaggctttgaggtttcagttcagatcctgaggggccccagatggatccttgggggcctggctgtgccctggggtggcggcctgggctgaggccctgcctggtgcccacagcctgggaaggacagccgctggctgccaagcctggtgctggcccggctggtgtttgtgccactgctgctgctgtgcaacattaagccccgccgctacctgactgtggtcttcgagcacgatgcctggttcatcttcttcatggctgcctttgccttctccaacggctacctcgccagcctctgcatgtgcttcgggcccaagtgagtagggctggcagggaacttggtggcatcagacaggatctagagttccagtgggggacactcagtagagggagggcaaaaggagagtccctgctcccagagctgagaggagagatggctcaggaggggctcccaggctgaggggatagtgactgtagtggaggggggcgccaagcttacttgggtggaggtggagacaggtttgcaggaaggagtgaaagacaaccccaccatacacgttccctcaaggaggagaagccaggttggggttaggcagccaggatgggttgatcaacagaatgaggttcgacagtcaagttgctccaccccacccctccttccacccagaggctctgggctggggtacagccattctgaggtagccttgcccttccttccccgcttaggaaagtgaagccagctgaggcagagaccgcaggagccatcatggccttcttcctgtgtctgggtctggcactgggggctgttttctccttcctgttccgggcaattgtgtgacaaaggatggacagaaggactgcctgcctccctccctgtctgcctcctgccccttccttctgccaggggtgatcctgagtggtctggcggttttttcttctaactgacttctgctttccacggcgtgtgctgggcccggatctccaggccctggggagggagcctctggacggacagtggggacattgtgggtttggggctcagagtcgagggacggggtgtagcctcggcatttgcttgagtttctccactcttggctctgactgatccctgcttgtgcaggccagtggaggctcttgggcttggagaacacgtgtgtctctgtgtatgtgtctgtgtgtctgcgtccgtgtctgtcagactgtctgcctgtcctggggtggctaggagctgggtctgaccgttgtatggtttgacctgatatactccattctcccctgcgcctcctcctctgtgttctctccatgtccccctcccaactccccatgcccagttcttacccatcatgcaccctgtacagttgccacgttactgccttttttaaaaatatatttgacagaaaccaggtgccttcagaggctctctgatttaaataaacctttcttgtttttttctccatggctccctgtgtcctccagccgtggcttcatgccctggagtgggtagagggctggcagcctgagtctgggagatgagcatgacccagctgggccctggccaggactggacctgggtccaagggggaggaggggggagtagtcctcttggcctcagaggggctgcaatgccccctgctggggccacaggggagggacaggcctggaaccagaacaccaagactgttagccaagactaagaacgggtttttctttgctgcttcattctttctttcataggacagaggatggagatagctccccatctttcctttgtcttcac

SEQ ID NO: 15186 - DNA, 4407 bp, Homo sapiens
tagcttttctgttacaaggtagttgggttaggattttctgggctcacaccagtagcagaaattttgggcatcctgtctgtaaagcagttcttcacagcagttctgctgatacttactaattgctggtctcaactgcatatactttttaccctgttacacgcttgtaattgactcttctaggtgagcccattggcaggggtaccaaagtgatcctccatcttaaagaagatcagacagagtacctagaagagaggcgggtcaaagaagtagtgaagaagcattctcagttcataggctatcccatcaccctttatgtgagtatggacttttaaatcttttacacttaacgtgcaggatgtttcctgttctggagaatctcattgtccctggcttttgctttccctggtagtgttttgtactccaaggctaacttctgtttttgttacttagttggagaaggaacgagagaaggaaattagtgatgatgaggcagaggaagagaaaggtgagaaagaagaggaagataaagatgatgaagaaaaacccaagatcgaagatgtgggttcagatgaggaggatgacagcggtaaggataagaagaagaaaactaagaagatcaaagagaaatacattgatcaggaagaactaaacaagaccaagcctatttggaccagaaaccctgatgacatcacccaagaggagtatggagaattctacaagagcctcactaatgactgggaagaccacttggcagtcaaggtgtgagaagcctttgcatgttggctcaacatgcacatatggagaggaatgagttaggtggaagagtgttgggtaatagacacacggaacttgtccaactgataacagaaatgtgatagccatgtgatttcacttactgattaccctgtcatagtgaagtgccatcatttctaatgacctcactttctcttcttatggaaatctgggtaatgtctattggcagccttacacatccagggttctgatcagaggggactgttttctacatacagctagtacccatctagatcgtggagggcattaaggctcagttttctcaggagctgcttgttgtgtgtgctctatcccttaggcttagggaggatcattgttccacttttagataatttggtgttggggctaaaaggtcctcttttgaaatgtaccacttatttttggtttctttcagcacttttctgtagaaggtcagttggaattcagggcattgctatttattcctcgtcgggctccctttgacctttttgagaacaagaagaaaaagaacaacatcaaactctatgtccgccgtgtgttcatcatggacagctgtgatgagttgataccagagtatctcagtgagtatctccttggcctaatttagttgggtgaagtcttgggaggttttaggcattctgctaggatattctaaggtaacagttttctgcaatacatagtaggtgtaagggttcaggaggctattagagccttctgtttgaatctggggaccaggtctggtctagctgttttttactgagctttctcaccctggttgatggcagattttatccgtggtgtggttgactctgaggatctgcccctgaacatctcccgagaaatgctccagcagagcaaaatcttgaaagtcattcgcaaaaacattgttaagaagtgccttgagctcttctctgagctggcagaagacaaggagaattacaagaaattctatgaggcattctctaaaaatctcaaggtaaaaaggcaaataatgcttattccctttaccactttcttagtaataacaataaattattccattcacattgaaagtgaagttattgtagttaagctggattgtttttcctcttcccacccttcaagcttggaatccacgaagactccactaaccgccgccgcctgtctgagctgctgcgctatcatacctcccagtctggagatgagatgacatctctgtcagagtatgtttctcgcatgaaggagacacagaagtccatctattacatcactggtgcgttgactctgattgaagcctttttggaggagtggggagcacaattagggcttcctgggaactggcagtatgaggcattttagtcactgagttcatttaattaccctacaggtgagagcaaagagcaggtggccaactcagcttttgtggagcgagtgcggaaacggggcttcgaggtggtatatatgaccgagcccattgacgagtactgtgtgcagcagctcaaggaatttgatgggaagagcctggtctcagttaccaaggagggtctggagctgcctgaggatgaggaggagaagaagaagatggaagagagcaaggcaaagtttgagaacctctgcaagctcatgaaagaaatcttagataagaaggttgagaaggtaagccattctggggctaggatatattttgtaacatcttcgaggtgggctccctcacaagcatgtttctatacaattagtggtttgaggcagcctatttactgtttcatgccttcttgcctcttgttctcttctctagtcaggtttaaggctattttaataaaatttggcacagattaggcattgcttcagttaacttctgagagtagataaaataccatcattttcttttttttttctttttttgagatggggtctcgctctgtcacccaggctggagtgcagtggcacgatctctgctcattgcaagctccgcctcctgggttcacgccattctcctgccttagcctcctgagtagctgccactacaggcgcccgccaccacaccccggctaattttttgtatttttagtagagatggggtttcatcgcgttagccaggatggtctccatctcctgaccttgtgattcgcccacctcggcctcccaaagtgctgggattaacaggcgcaagccaccatgcctggccgattttttttttttttggactggatctcgctcactgcaaactcaagtctcctgagtggctgggattacagatgtgtgctaccacacccggttaattttttgtagacagggttttgccatgttggccagcatggtctcaaactcaagtggtctgtccacctcctccccctgctggaattaggcttgacaatgcctgttttctctttcaaagtggtaatgtcaatctaaggcttttgtgatcgtccacaggtgacaatctccaatagacttgtgtcttcaccttgctgcattgtgaccagcacctacggctggacagccaatatggagcggatcatgaaagcccaggcacttcgggacaactccaccatgggctatatgatggccaaaaagcacctggagatcaaccctgaccaccccattgtggagacgctgcggcagaaggctgaggccgacaagaatgataaggcagttaaggacctggtggtgctgctgtttgaaaccgccctgctatcttctggcttttcccttgaggatccccagacccactccaaccgcatctatcgcatgatcaagctaggtctaggtaagtagctttggtacttggtgtggcaaggagtttgtgcaactcgtctcctctatggatttgacttaatgctatttggtcaagtctcacatggcttaattttacttcaggtattgatgaagatgaagtggcagcagaggaacccaatgctgcagttcctgatgagatcccccctctcgagggcgatgaggatgcgtctcgcatggaagaagtcgattaggttaggagttcatagttggaaaacttgtgcccttgtatagtgtccccatgggctcccactgcagcctcgagtgcccctgtcccacctggctccccctgctggtgtctagtgtttttttccctctcctgtccttgtgttgaaggcagtaaactaagggtgtcaagccccattccctctctactcttgacagcaggattggatgttgtgtattgtggtttattttattttcttcattttgttctgaaattaaagtatgcaaaataaagaatatgccgtttttatacagttctgctttcccttgtgaagtggatgttatccttccctagcttcttcatccctccagctcttgctgttttcatgagcacagcaagttgagctggttttgtagtgaaaataacagaataccagtgagtcttaagagttcacacactgaagctaaaggcagtttggaaaaactaccatataataatgccctttcagtcaaccaaaacacaggaccaagtccactgcagtaatttaatttaataaaataaaattataagagcaaaaagttacatttctaaagtaccaaaacctgcaacaggctcatggaacagagcctagggatccaggagcataggaggtggtggtgctgggcagggctctgcat

SEQ ID NO: 15187 - DNA, 1318 bp, Homo sapiens
ggggctggggaccctgacgtcccggatcgtggaggggagtgtgggggaaggggcgcttcctctgacctgagcagccggctagcgttggagggaacagaggagacctgtgtggccagaggggcggatccgcccccggggagggaggaagctctgcctggccagcgccggcgcaccccctccccgagagagagagagagagagaggctctttgtccgggccggagctgcagcggagggggcggggaggagactccgggcactactccagtgtggtcccctctggagggcggaggggatgaggagctgcgccctaatccttatgtccgctttccttacagatggtgggcagtggtggtgctggctgcgttcccctccctaggggcaggtggggagactcccgaagcccctccggagtcatggacccagctatggttcttccgatttgtggtgaatgctgctggctatgccagctttatggtacctggctacctcctggtgcagtacttcaggcggaagaactacctggagaccggtgtgtgaagaaagggcggggaagtgagctaggtcgggaaagagggtatttggccagcagtccaaacgggatatgacttggagagggcgggaggtcggtaggccggacagcagggcaggctggctgctctggggaagatgaagtgctatggagaagatttggggcttgactttgtgtgctttcttcaggtaggggcctctgctttcccctggtgaaagcttgtgtgtttggcaatgagcccaaggcctctgatgaggttcccctggcgccccgaacagaggcggcagagaccaccccgatgtggcaggccctgaagctgctcttctgtgccacagggctccaggtgggtaggtgggctcagcctctcttcctgggttggatgccggtgggcagggattctgtgaaggtttccattttaccagtcccagagctttgctggctggtgtgtttcgtgtcctcctcccaggggcacactgcacctccatctttgaggtgtttgggggaaatgcccttttgtttcttccttttctcctctccagcactggtactgaaagttcatgctgttatttcaagatgtctagtgcagaagagaggactcctcttgccctattctctgtgatttctactgtgccgttattatacttccttcctgcactggtgtctcacatactgtaaacccactgataaaattgtgggggagccattcagccttcccccagtactgcatgtgagagagtgctaacatgctgaccccatggcattttgcagtgggtactagttccacctt

SEQ ID NO: 15188 - DNA, 1200 bp, Homo sapiens
cagcactttgggaggccgaggcgggtggatcacgaggtcaagagatcgagaccattctggccaacatagtgaaaccccgtctctactaaaaacacaaaaaattagcctggcgtggtagtgggcgcctgtagtcccagctactcgggaggctgaggcgggagcatggcatgaacccgggaggcggagcttgcagtgagccgagatggcgccactgcactccagcctgggcgacagagccagactccatctcaaaaaaaaaaaaaaaaaaagaaaaagaaaaagaaaaaaaatttaaatgcgcacaggtagggctggttctagtccggtcatcacgtctgattacacagagggcgtcagttgccctgtaagtcagacggaaagatcctaaccagctccagccggcacctaaaccaagacagacttagggtccgaccaggcaaccagagcacagatggggcgggaaagggtgagtgggcagaagcgggcaccaatgacgggctccccgcgaccccgccgcctgccccccgcgccgcaggtctaccacgaacgcgtcaacacgcacgtggcggaggctgagttcgactacgcgcgctgcggcgttcgcgacgtgtccaagacgctggtggggctggagggcgcgccggccacgcggctgcgcttcaccaagtgcttcagtttcgccagcgtggaggccgagaacgcgtacctgtgccagcgcgcgcgcttcttcgcagagaacgagggcctagacgactacatggaggcacgcgagggcatgcacctcaagaacgtggacttccgtgagttcatggtggccttcccggacccggcccggccgccctggtacgcctgctcgtcggccttctgggccgcggcgctgctcacgctgtcgtggccgctgcgagtgctggccgagtaccgcacggcctacgcgcactaccacgtggagaagctatttggcctggagggcccgggctcggccagcagcgcaggcggtggcctcagccccagcgatgagctgctgcccccgctcacccaccgcctgccgcgggtcaacacagtagacagcacggagctcgagtggcacatccgctccaaccagcagctggtgcccagctactctgaggcggtgctcatggacctggcggggctcgggacgcgctgcggcggggcaggcggcggctacgcgccctcgtgccg

SEQ ID NO: 15189 - DNA, 1186 bp, Homo sapiens
cagcctcccaacaggggcctcctcacctgggttctgagtgtataccccttttagagagtgagatgccacccgggcagcactcgttaaagctggccagcacgagtgactaaggggagagagcatgacatagacctgggtggcaacggggacctctggaagcaggtgggagtaagagaggagagggcagtggagggtagaggaaaaggacctccagaggtggggtgtctgtgggggcggcctttgcctccctaaacctgtgcggaggagtggagtgtgcttgtcgctcaaacacatctctgggggactgaggacgttgtcacaagccccaactggagaaataattccaatggcagggtcagaggcaagcattctctaaatcttgcccaacccttccatccttccctatcctatgagctgaagccctgctgtgtgtcgcagggtcttcaaaggggcatcctgccaccaccccagggcgctggccccacgtcctgttcccctaaagctctgacaccgccttctctccgtgtgctccccccaccacctccaccctgatgtgcttcagtgtgcatgtctgtgaacagccctcctgccctgccaactcccctggctaaagtctccccagcagatttagcacccagggattgagctcacatttcaggctagagaggataacccttgggccacccacatctctcacccctgatgcttcttacttcgcctgagccatcagaactcctccttaccctccttcagcccctctcatcttccttcagcccagccaggcctgcaccaccaactgtgtggcctccacctatgcaacatcgcctctggctccccttcccttcttcctagcggggagtgcgaggggcccaaattgtggggataccatggcccatggcttctaaagggtttagctttactttcaggtagagatggctgagtgaggagggagaagaggctagagagagggaggcttgggcaggggaaacagctgcccaccaggttttcctggacagcagtgcccacctgcctactagcactgaacctgcctggaccctgagtctgtgctccttgggggcctggcgtttggagcacccttctttcctctgaatggacatctgtgaggtacaggtggtgagctgcagcctcaggctccatttcttagccagctggcacctggatgtca

SEQ ID NO: 15190 - DNA, 1148 bp, Homo sapiens
taattttggatcctgggataaatgaaaaatgacctctgtggacatgaagaaacattgtattattcagctagtggcaccaacgttcgaattagtgatctctgaactccaagttaccaaaatgttaagatagtaggatattaaacttctaaaattccacaaggaatttaggaatatactgtaggattccactaattgtccacatttctaatacgaggcactcagtttggttagttttgttttgttcttaggcattttggtctcaaaatctaggcaggtaaacacattgtttacaggacttgacttggtgaagtattttagagttggagtccttcaagatcatgtctctgtcctaaagaggcttttctttcctggctgggaaatcaggagagagtacttgggtatataattacctctacccagaactgagccacatgcctgatgcaggatggcgcacctttttacggggtctacgagccaagttcccggcacactctgggagaggatgtgggagcccatttgagatgactggtgtccttcccatgctggggagccccaagaggtactgtggcctgatgccaccctcaggaatggggaggccactactgactcacctgggagccaacactgaggctcctaaatccaggctataacacttacatgaaaagtaaacattttgtggtgtgcatgaagggtcctagccttatatcaaacaagcagccaaaatatcccaatgtcttattttctgaggaaatgtgtctgcctccaccaaatgtggtgtgggggcagcagacggatccagcttccagtggtgaagctgtgagcaagggtatgcttatctggctagaaatgtgttcttttgtctgagcacagtttgggctggagtaaaagttgggattctgttagacagaatggatttaggggcatagttatactaaatattgtttgttctttatttaaaattcatttaaatgggagctctgcatttttttttttttttttgagatggagtgtcgctctgtcgcccaggctggagtgcagtggcgccatctcggctccctgcaagctctgcctcccgggttcacgccattctcctgcctcagcctcccaagtagctgggactacaggcacccgccaccacacccggctaa

SEQ ID NO: 15191 - DNA, 1198 bp, Homo sapiens
tgagtaggttgcgaaaattttctcccattttgtaggttgcctgttcactctgatggtagtttcttttgctgtgcagaagctctttagtttaattagatcccatttgtcagttttgtcttttgttgccattgcttttggtgttttagacatgaagtccttgcccatgcctatgtcctgaatggtattgcctaggttttcttctagggtttttatggttttaggtctaacatttaagtctttaatccatcttgaattaatttttgtataaggtgtaaggaagggatccagtttcagctttctacatatggctagccagttttcccatgatgtataacacttctaatgtgatgtgttagattgatagaaggaatggaaacattgaaatctgccatgactggtattcattttctctgttagctttcattgagaaaatgagtaaggattctgcctgcttcaagattggtatagtaggaccagaagagattctgcaagtctgtctaaacttttaaacttgcttctttgtcttcttgttaatcaggaagcccagaacctcatggccctcaccaatgtggacaccccattgaaaggtggacttaataccccattgcatgagagtgacttctcaggtgtaactccacagcgacaagttgtacagactccaaacacagttctctctactccattcaggtattgtaaatgaacacgtttttattttagaaaaacttgaattcaaggacttagcatatttgctttagtaatgtttacggagaatgactacttattgtgttggattttcctctttgatttcttcttcatagtaataaataatagtgtccaggaaatggttaaatactgtggagtgcctccccccctttctttaagatggagtctcgctctgttacccaggctggagtgcagtagcgcgatctcagcttacggaacccctctgcctcccgggttcaagcgattctcgtgcctcagccttctgagtagctgggattacagacatccgccaccatgcctgtctaattggagtgttcttttgcaaagcttcggatcctatcacgttatttttgaatactttgtatttgattttagagtagattgattcatttttaatgattactttgtgaattttattatgtaatccttttatgtatgtattactattgctttccctccagcattttattatgaa

SEQ ID NO: 15192 - DNA, 1160 bp, Homo sapiens
agagtatcttcagtgatcacaagtgaaagtttttggttggtcttaatgttgggaagaaggggggatagaaaataaacataagacttgtcttagctctgaagtcaggattatttttctagaattaatattaggctgattttttttgagactttttttctctttctgtaatttttaatttttgtggatacatagtaggtgtgtatatttatggggtacatgagatatcttgatacaggcatgcatgtgtaataatcatatcgtggaaaatggggtattcatcccctcaagcatttaacctttgtgtttgaaaccatccaattattcttagttattttaaaatgtacagttattttgactagagtcaccctgttgtgctatcaatttttaagagactcataaaatactggtggaatgtttaatatgcatgaattgagaaggaccacttcttttctacaggaaagagaatcccgagaacatctccgtttagggttgttgggccttcctgcccctaagaatgattttgaaattgttctaccagaaaatgccgagaaggagctggaagaacgtgaaatagatgatacttacattgaagatgctgctgatgtggatgctcgaaagcaggtgggtaactgtactgaaagaagcgtgagtttggctgaatgtgtcagtaggctggaagaatgaagaatagccattaaatgtcccaagatctctacctagtcctttttaatattgaaaaaacttctaaagtaaataacttatgtcattaataatgtatcctcacataattaacatactcacaatattttgatgagcattcttaaaaatatatatatggaaatttaaatacattctgtcaaattcattatgcttctctaaaatacacataggtagtcttttagacattgcttcaatctagcaaagaaaagatgttattggttagtcttaaaaacaaatacatcttggttcctgggtggtgcgatgtacgagcctgtagtctcagctgctcgagaggctgaggtgggaggattctttgggcccaggagtttgaatccagtccggggaacatagtaagacctctatctaaactggagttggaaatttagatagagtgtgtcaaaataatattagtaacactttgtactaatatatcttatacg

SEQ ID NO: 15193 - DNA, 1135 bp, Homo sapiens
tttttaggctatagaatagttaagaaattttaaacaaaatttagtatcttttggtctttcacaccattcatatgttaagtggcagaatagccttagtgctacctccacttttttctccagtatttgcatcacagaaataatccctctgtttaacatgtttgttcagagccaagggtttattgtgaagaactgtcatcctgcctttgctagctggtaccttctagtaatcaaaattaatatgaagaaactaggttgtgacagactagattatatttagtaggggaaaaattgggctcaagaaccattcatcagtacgtgagacaagcagttaatagtatgatctttaaagttttgacaatataaaataaacttggtaactgttttacaaatataaaagtataataaatatgcagcccagttaaatattgattatctgtgatggtaaagaacaacagtggtgccagtcatcaaacatacagtgcgtcctattgagtcactgctaatttcttgagcctggtatttgctgcctattgtatttgtggttgttgagaggcattttcaaaccctgtataaataatccatgctgttggtcataagttaactgtattaagaacagtaaaataaataaaaaccaatagtactaattttgctttaaaaaaatttctaatttttttcacataaaacaattatcctaaaggttaatagttgatcgaaacagaataatagaaaaattctactttaatttccattaaaaagcaaatagcattgacacatttaaagcttttcatttaaagtagtggatgtttttgaagtatctaaaatagtagcagaatattttatacttggtccttgcaatggtgtgagttttaatgattgcattatcgtgattggtggttatgagtttcagaaatctatacttggcatccaactcatgagtggattttatataggatggaacaggaaggtatgtcctgtcagtatcttaaccctttcaacaagacatttacctatttgtctttccttacgttctcaaaatattaactcgaattgtaaattaagcaaaaatttaaaaagtatatgttgatgggacaagaagaatagtatttatttaataaaacatatattatattgaact

SEQ ID NO: 15194 - DNA, 1843 bp, Homo sapiens
accggctattcgaaattattggagtcaagagccaggaagccagccagaccctcctggactctgtttatagccatcttcctgacctgctgtagaacatagggatactgcattctggaaattactcaatttagtggcagggtggttttttaattttcttctgtttctgatttttgttgtttggggtgtgtgtgtgtgtttgtgtgtgtgtgtgtgtgtgtgtgtgtgtgtgtgtttaacagagaatatggccagtgcttgagttctttctccttctctctctctcttttttttttaaataactcttctgggaagttggtttataagcctttgccaggtgtaactgttgtgaaatacccaccactaaagttttttaagttccatattttctccattttgccttcttatgtattttcaagattattctgtgcactttaaatttacttaacttaccataaatgcagtgtgacttttcccacacactggattgtgaggctcttaacttcttaaaagtataatggcatcttgtgaatcctataagcagtctttatgtctcttaacattcacacctactttttaaaaacaaatattattactatttttattattgtttgtcctttataaattttcttaaagattaagaaaatttaagaccccattgagttactgtaatgcaattcaactttgagttatcttttaaatatgtcttgtatagttcatattcatggctgaaacttgaccacactattgctgattgtatggttttcacctggacaccgtgtagaatgcttgattacttgtactcttcttatgctaatatgctctgggctggagaaatgaaatcctcaagccatcaggatttgctatttaagtggcttgacaactgggccaccaaagaacttgaacttcaccttttaggatttgagctgttctggaacacattgctgcactttggaaagtcaaaatcaagtgccagtggcgccctttccatagagaatttgcccagctttgctttaaaagatgtcttgttttttatatacacataatcaataggtccaatctgctctcaaggccttggtcctggtgggattccttcaccaattactttaattaaaaatggctgcaactgtaagaacccttgtctgatatatttgcaactatgctcccatttacaaatgtaccttctaatgctcagttgccaggttccaatgcaaaggtggcgtggactccctttgtgtgggtggggtttgtgggtagtggtgaaggaccgatatcagaaaaatgccttcaagtgtactaatttattaataaacattaggtgtttgttacttaagtagtccgagtatatttaatcgttgaatttcttgctttgtacatgtcctctagttgtgactctttgattagtcttttgcaaaagtatgtgtgctctaaaaacctcagctattctaatctgtaaatcgtggaaattagcaaagatttcaggcagggcatccacttccattttctcactgaaagaggaacttaaaattgctaaggtctggttgttggaattctgtagagccacagttcccaagcaaagggagacatgcaatgaatatgatatgatatatgatatgctataatgtattctacaattctatagatttgtgtttggaaaggtacctggaggttcgtagggaaggactttagtgaaaactaccaagcacttcctagtcttttggattaagtctgagaattcagtttttgagattgtccttattataggaaatgggtagatacctcattgttcctgaataagttcagagggctctcatggtcttgaggcagggtgagatctcatgttgat

SEQ ID NO: 15195 - DNA, 1141 bp, Homo sapiens
tcctggtcggatctttaacaggaatgatgatggtggtgctggaattgttggccctttttctgctctgctcctatgtaacatcttcttggtttttgttcctttccctccccttctgtttctttcagcttggattccttagcaccaccacagctcagccagaacagaaggcctcgaatctcattggcacataccgccatgttgaccgtgccaccggccaggtgctaacctgtgacaagtgtccagcaggaacctatgtctctgagcattgtaccaacacaagcctgcgcgtctgcagcagttgccctgtggggacctttaccaggcatgagaatggcatagagaaatgccatgactgtagtcagccatgcccatggccaatgattgagaaattaccttgtgctgccttgactgaccgagaatgcacttgcccacctggcatgttccagtctaacgctacctgtgccccccatacggtgtgtcctgtgggttggggtgtgcggaagaaagggacagagactgaggatgtgcggtgtaagcagtgtgctcggggtaccttctcagatgtgccttctagtgtgatgaaatgcaaagcatacacagactgtctgagtcagaacctggtggtgatcaagccggggaccaaggagacagacaacgtctgtggcacactcccgtccttctccagctccacctcaccttcccctggcacagccatctttccacgccctgagcacatggaaacccatgaagtcccttcctccacttatgttcccaaaggtaacttaacctcatgaattatttatttgaggaaggctttgagcccagtggaggtaccaagagtgggcttataccaaagatgttttctccatttcgtgtattccaaagtcaccccttggagagaggccttcatatggtggctaattaaatctggcttttttggacttaatagaaacatgtagactcagaatttttctgttaggggagatcagatatctaaaaactaggtcacatcaagctataaaatatgaaccaagagaaacaaggacagcgtgtgaccttatgtaagttacttaacctcttcaggcctcagtttcaaacttgtcaaacaaatgaataatttagatgtttaaggttccttcca

SEQ ID NO: 15196 - DNA, 1269 bp, Homo sapiens
gggtaactgtaaatggaaactttgtttaacagtattatctttattctatcttaaaatagtttatgccatttttttctattctagcccttaatcctacagtcactgggacccaaaactcagagtgtggagataacaaaaacagataccgaaggtaaaattaaaggtatgtttttgaataaagctttcatattgggaatagtagaaacatactcaaatgtattaagagacttgttggaagcatttgttacactgtcttattagaatagcaaattctattagatgtaagcaccatgaggtcaaggattttgatatactttgttggttgatggatgtatctccttgtagttgaatctgtgcctggaacatcacaaacagtaaatatttgaatgaatggattaatgaaattgttacttaacatacggtattgactataagtattttaaaatttaaagataattaagttcatctctaataacttttagtatactttacacaagatagaggctaaataagtatttgttgaatgaatccatttgtgtgagccacattatttacattctttatttcagctaaagaatattgtagaacattatttgcctatgaaggtactaatgaagatgaacttacttttaaagagggggagataatccatttgataagtaaggtaaggtgtttctgtttttcagtgaattgcttaatttatttatagaaatatttttcaaaagttatacattcaccctagagtgttcttatattcaccctggaatctagaagagctgggactttgtcttgtttctaagtcctgaaaacttggcacgtaataagtgctcagaacgttctctttttgagctaacttttattgactatatttgttgtaatttacatattgggaattattgttaaccatcatatttgttcttttttaagtactttttttttaaaattaacctcaacttcccaggtttttattcttacttctcttccacctcattctattttttctcctgtctgtcgtttggagtgttgtttgtaatgtaaacagaagaaaaatagggaaacaagctaaacatccatgagtatggaaatggttctgaaactctttttactctggaaaatgatgtcaccattttaaagaatgaagtgattttataacttggaataaatcctaatgcaaaataaagagaaaacccagtactacttgtgtgtgggcagaatcctataataactagtattatgggaaaattacaaatattttgtttttgctataac

SEQ ID NO: 15197 - DNA, 1266 bp, Homo sapiens
cagtctattgaaattttattaaagtgactttctatttttttagtgaaatagttaaggggtgtcaggctatggactcattttagtgactcttcctggacctattaaattgttcacaattacttttaagtgaagctctttggacattccaaacaataagtattgaatatgaaagatcaaagtaatacctttataatgctgttacattcttgcccctgtttcactaggcaaaccatccataatatacatttgatggatttttctttcttccttttttcttctgttaataaaattgtcattttctacaaaaaccactaatgattacaaatgtattctttagttgtctggtgatttttccagttgtgaacatcaaattgcttttgaatttccaaatttgccacttatcttgaagtacttaattgtttttcttcttgctgttaaaatctttcgaacgtaaatataatattaaataaaatcagaaattttttttttacgttttcagccatctgtgtacctttcaacaccttccagtgcttctaaagcaaatacaactgctttcctgactccattagaaatcaaagctaaagtggaaacagatgatgtgaaaaaaaattccctggatgaacttagagcccagattattgaattgttgtgcattgtagaagcactgaaaaaggatcacgggtaagtagcccttcttttctcctgtgagtactacttaacccatgcataaagaatttttttcaaaccatattaagtaaaaatctaatctgtggctgggtgtggtagttcgcgcctgtaatcccagcactttgggagaccaagtttggaggattgcttgagtccaggagttcgagaccagcctggacgacatgacaaaaccccatctttgcaaaaaaaaaaaaaaaaaagaaaagaaaagaaaagaaaaagccaggcttggtgacacatccctgtggtcccagctactcaagaggctgaggtgggaggatgtcttgagcctgggaagtcaaggctgcagtgagccgtgaacatgccagtgcgctccagcctgggcaacaaaaccaagaccctgtctcaaaaaaaagtctctggtatgagcaagtatattttcaaagaaattttcattaacagtccttttctctttttggcaaaaaagttaaattggtgaagttattctagtagctggattgtggaaaacgtgcatacataaccataattttaggctagaaatcttctggtcggatatgattagtttttaaactacta

SEQ ID NO: 15198 - DNA, 1098 bp, Homo sapiens
attctttttactgttgtttatgtatcctttgtttaattatagatacatgtacatttcttaatttggtttcaaggattcttttgttctttgtaggactgactgatttttttacagctttaattttaaatgctcacatgacttaacatttgttctggctgaaagggctataattgcttttttcttattgtaactgccatttaggaacttgcattgtactgttgaaactttattcaaccaaattatagcatgggaaactggattttaggtctggaaaaaaagtctgaaggcttgaaagtatgatcacatcttaatgacatagagtaaaataaactactaaactaaggatattttatgtttgctcaatttatgttttttgttttagatggaaatagagaagctgaaaaaagctgtcctgtcttcttgagtggtgtggacctggtgttcataatgttccagggattcagaagcaacgctatgaacttcagctgacttgttacttaaaaattgtgaattctgttgttgtgataaatatgagcaaatgaagtgtaatatctatagaaaagtagagtgagggtgaatttatatatatattttgttttgccaatatgaagaaaaagaggccttatttcttaactgtgctgggattgcaaacactttttaaaaaattgtttgcttgaaaatactactgaatataaataagaatgtgcacagtagtttttttattgaaacttgtattatttttaaagagatctatactataaatatggtgatatatttacaagtaatctgttaagatatactatttgagagggacagattagccttttagtaactatagtcactactttttccataatgcataagggatataaactctgtgtgtgtgtgtgtgtgtgtgtgtgtgtgtgtgtgtgtgtgtatatatatatatatatttttacttttatcctcttaccgaaggttacactgttgtgcctgtttgtctgcaatgctgtttatattttgggtgatgaaataggagtttcctagctatataaaccagattactcacccatgcatatagtaagaactaatgaataatcaaaataatttcatcaa

SEQ ID NO: 15199 - DNA, 1189 bp, Homo sapiens
ttgttggtcattttctcaatagtacatgaaatcaagatgcttatgagcatggaaatgtatttaaagtttttgcttgtgtcctcctcagtcagaatagaaaagtaactgaaatacttttacctttctgtccttgataaaatagtaaagaaaaccaaacaaacccaggcctgatgggaaaaatgattcctttattctagcaacttactttctgttggtatgggaaatgttattaatttctattactaaagttcatatcacaaaatgatatttaataataaccttggggtaaatcatgaattttttttctacgtgtgagtataaaagacaaaagttgaacagcatggaatctcattgccaaattattagtgaatgtatagttcaggtattctttgagacacacagtatcattaatttctgaattgtatttcagtgttattttttgtttgtgaccactaagcttctgtcttaatacaaagctgttaccttctacagaatttaagtctgaagatgtaaagagagaacaggccttgtgtaacagaagatactcttttttatgctccttactgtgatcacagaaaaattaaaaatccaagtgctctctagatttgttgataaacattttatgcttgcatttaaacttgaaatgtatgagcagaatgagacaatcagttaaatcagaaatgagaagtattataatgtaaaggccttgttttgctgtagcaataaaatgaccaagtgcaatgacttgatttaataaaatcatattttaaaagttgctgctatgaatatttttggctataaaattttaccctgacttgctttcaataactgttacgtaatgcagttgatgttgtaacctaacattccaaaaaaaaaattgagagggggaatctcaaaatagtatatacttcactaacttgtttacaggtgctgtatttaaaagcatgcttctctctcaaaaagaaaaattaaaggattttattgccagtcgtgtcagtctttattggttattttttgttaactttagcatttgtgtatttcagagtatgatgaaaattatattacttcaatttccaaatacaagaataaatagtaaaccaaaaacattaaaaattctagacccgtatgacttttactgaacttttctgagtctggtttttcatctgaaactgagacagtaatttctact

SEQ ID NO: 15200 - DNA, 1172 bp, Homo sapiens
tcacaaggttccacaataggctatctgcaagctgaggagcaaggaagccggtctgagtcccaaagctgaagaacttggagtccgatgttcgagggcagaaaatatccagcatgggagaaagatgtaggctgggaggctaagacagtctgggctttttacatttttctgcttgctttatattctggccaagctggcagctgattaggcccatcccaattaagggttggtctgcctttcccagcccactagctcaaaagttaatctcttttgacaacatcctcacagacccacccaggatcaataccttgcatccttcaatctaatcaggttgacactcagtattaaacatcacagtaagtatgtcctaaatgttgcatgggacatatttatactaaaaataattcattcattgatctaaaattcacatttaattgggcatcaaatattttatttagcatccttattagtcagtctcctgcaaagtcgacaagtactgtatttctgggagtcctccctttgccaaacatgtccgtttagcagtggacactactgctgtagtttcagccatgatgcctatcacatatgcgcttggtattggagaggaagaggaactctgattacagtgagtgtgactgaaggcacaggattagctttcatgctgatatactcctctgcagtttcaagaatgaggacagcagctctttaaggataggaaagaagaaatttcagaccttcactgaactttctagtttgacaggaagagctatatatatatgatatccttgaaatatcctctggttcacttaggctaaaaagacaatttagaaatttcccagaaatgcctatttttcacagtcaaacatggctgagatgccaaatagagtgttgttggaaagtcaccagattagaaagcatacccagggacaatatttgacacttaagtggcagtcctgtttatgagacacacatttaagtttgcaacacatttatggaggaaaattaaacagatagtgaagatgaggtatatctgcttctagtaaaagtcattttttaaaaaacctgctagctacgtttatactatgtaagaataaagggaataatcactgagaataaagaaattgtgtatttttaacagatattttggaaagcacttgtaatgtttattatattat

SEQ ID NO: 15201 - DNA, 1343 bp, Homo sapiens
atattattttagttatgatcaaagaagagagtaaagctatgtcttcaatttaatttcaatacctgatttgtactttccttgaaagctttactttaaaataccttacttataggcctggtgtcatgctataagtatgtacatacagtttcacttcaaaaataaaaaaaaaatccctaaaaactctctatactctctataacaatactttatcaagaactctggacaatggtattatttttaaaaatcatggtgatgtatttattagaatgtttcttataaatctgtttactttttatattaagaattaaactgtacctaaaaaaactctgactattcccatttgtcagtttagcattacattgtcttgagcaccagaaaataaaatccatatattaataaaaacctatcttgaaaaactagtggagtgtatttacgtggcaaaagagattttgggaggagtcctcagccaaattctaccagaatcaccttaataaaagaagtattaaaatcaagcacagcaggttggaatatggggaatttgacagtatatttcttcaagtctgagtttactttcttcctgatcatgaccatctgaccttgttatttctgggcttggctcaagaccaaggagagtggatgttgatgaacattcctttaaataaaagtgcttaggttgtagttatggctttgtctagaatggtgatgtcaactgtgagtgtaggtctgtgatatagaaagaattcaactttccagatctagaaagatgctaccttgcatagatttgctccttaaacataaattgcaaaaataaaaatatcacagagaacacctgtactttgcttactgaaagatttgctcactaaagaaggaaagttgccatttacctgtttaacaaatctgcacatcctgcacatgttccccagaatgtaaaataaaaaaagtttaaataaaaaaggaaagttgtcctttattgttaacatgatccattacatgaatataacataaataattatcttttttaataaatttctattgtattagatcagagagcagtcttttggaaagtattatagatacattactgtagaatttacaaactcattgtaatacaatgtatttaattttcagaatatgattatctgaatggtattgtcatgattattgttcccattttcagatgaacactgacttcaagtccaatgatatattcactatgccattttattgacttttccttgtaaagcaatgcacactaatttagtaagtatttggtttctgtgatgtgttcagttgcgtgctgggtgacatgtgaaataaactcatccttgaggaatttacagctc

SEQ ID NO: 15202 - DNA, 1151 bp, Homo sapiens
aacaagtactttttctttggtctcatttattactgtatcgctatagtagatatagagatatagtaatatctggcacatattaggcacacagctaatgttggatgagttagtgaacaaatggatggaatatgctaaaagatttacttcttatcaaaaaatatttatgggagtgttgctgtttatccatttgtgttaagtggtgaattattcagcaaccttcaggtacttgtctatatatataattattaggtcattcagtcatttcttggttgacaaatgttgaaaagagaattggatgcataaaggcatccagaataaatttttcttaagtaatttcagaagagatgctttcataatgcattaaaaaattcttattttacatttttacagtcatttacttatgtaataaaatgtttaattatattgaatattatggtaaacagatatctttatcacaaaataatgaagttaatggaaccaccatttcatgtttcagatgtacagtgggagaaatcacagatgccctgaaaaaggtatttggtgaacataaagcgaatgatcgaatggtgagtggagcatatcgccaggaatttggagaaagtaaagagataacatctgctatcaagaggtaatatgtaaggtttcttaggccagaatttcatcttttctgttagcacaatccccttgaatctactgggagcttaatttccttacatacaactgagaaaatttttgaattttataataataaatagtaaattaaatattaattatatagactatataacatataatagagtatataatttattcattacatataatatataattagaaatatatcatacatgatacatattatatatctatactatcattttaataggtacatgataatatttaataataaatatcaaatattgaaactaatattagttttcatataattaatactattttgaactttcaccatagtccccttcaggagtttctcatgtcaaacagatgtttaactaacaatgatattgcttcatatcctccaggtatttatatttcaatctgcttactatggtagagtttcatattttttgaagttgtttacatttttcattgcttgaataattataaaatcttaattttcataattgaaa

SEQ ID NO: 15203 - DNA, 1190 bp, Homo sapiens
ctttccctgtcctgtcaccagactcttcagactgcacatgcaattcaggcattaatgtgatacttgtaatgattcctacatttttagttgagaatctatggtgtgaaatataatgttggtgttgagaataaacttacattttcattaaaaatgttcatatcttaatgccccaaaatgggccattcttcagccttttgtggggaagaggaaagtacctgatgacatgcatttgtttataggtgtccttcaacttcttaatgtggaaattcagaacttcgggtcaccattgtactcatctgttgaattcagtaatgtgtcagcaggatcctggatcatatcatctactctgcaccagagctgtggcgggggcattcatgcagctgccagtcatggagtacttttaaatgacaatattgtgtttggcacagctggccatggcatagatttagagggtcaggcctatactgtcactaataaccttgtggttctgatgacacagccagcgtggtccaccatttgggtggcgggaatcaaagtgaaccaggtaaaggacatcaacctccatggcaacgttgtggcaggatcagagagacttggctttcacatccgaggccacaagtgctcctcttgtgaactgctttggtctgacaatgtggcgcattcaagtcttcatggccttcatctctataaggaaagtggacttgacaactgtaccagaatctctggcttcttggctttcaagaactttgactatggtgccatgttacatgtagagaacagcgtggagatagagaacattactctggtagacaatactattggtcttttggcagtagtgtatgtattttctgctccacaaaattccgtcaaaaaagtgcagattgtgcttaggaattcagtcattgtggccaccagctcttcttttgactgcattcaggacaaagtgaagccgcactcagccaacttgacatcaacagatagagctccctccaatccaagaggaggtcgaattggtattctgtggcctgtattcacctcagaaccaaatcagtggcctcaggagccatggcacaaagtgaggaatgatcattcaatttcaggaatcatgaaacttcaaggtaggatgttttattttatctaggcagtgccatttcatacatccatgcataaaatttttaatggcattctga

SEQ ID NO: 15204 - DNA, 2135 bp, Homo sapiens
ggaagggactttgttcccttggagagggtgggaaacaaactgctggtcatcaatagaactcaaaactagaggcctgcagcttttaacattttatattctcatttaatttcaaacttactgaaaagttatgagaaaagcatgaagaacttctggatgtcctttacccagaatcttcagttgtttaaattaataattctctctttctgagagagaagagttttacaataaggataaaacttaatgtcttactgtaacctcagattcttcttggtgggatagatacattttggccatttgtttttgaaatgaagaatttttaccaccagggttttaggaaacatttttatctatgaattttgtttactggacaccaagaaactccatagccaagttttacgttttttctttttatactttaaacacataatacagtgtatttactgaaaaaaatttgaaacacattgaaaagtatttagaaaaaaaattaaaatcaattgtaactctatccctcaaggacaaccatcaactgtatcttaaaatgcttgaatcagctcgtatagatctcacttttttttttgagaccggagtgcagtgtttattttttacttttttacagtgtttattttttactttttgtagagacgggatctcaccatgttgcccaggctggtcttggactcctggcctcaagcagtccttctacctgagcctcccaaaaggctgggattacaggcataagccactgtgcttgtttgatctcattctttttaatgactgcagggtttccatggtatggatgggtaaaaatttaatgaaattctctgatgatagacatttgggttgttccctgtttacagtaaaacagtattaaatttatcagtgtgcactcatgcaagtatagctataaggtgagttcctagaaatgggctccctgggccaaaggatatacgcttttaagggtttagtaagtgctgttaaattgtcccgcattgacgctgaccgggttactattttacagtgaatgggaatgccaatttcccacacgctagtacaatagtttagctttaaagggggctcctcaagggtagcactgccatcagaggcagatgtgtgtgtgagaaagaatattgaggggacgcctctactgtattaatactatggattttcctagtatagctgtttcctgagagcatttgggtttgtttactcctcttccccctttcttctgtctggggcaggttgaaggcattcaaggtggccctcttggatgtgttccgggaagctcatgcgcagtcaatcggcatgaatcgcctcacagaatccatcaaccgggacagcgaagagcccttctcttcagttgagatccaggctgctctgagcaagatgcaggatgacaatcaggtcatggtgtctgagggcatcatcttcctcatctgaggaggcctcgtctctgaacttgggttgtgccgagagagtttgttctgtgtttcccaccctctccctgacccaagtctttgcctctactcccttaacagtgttgaattcaactgaaggcgaggaatgttggtgatgaagctgagttcaggactcggtggaccctttgggaatgggtcatgaaagctgccatggggtgaggaaagaggagacagtgggagaggacaatgactattgcatcttcattgcaaaagcactggctcatccgccctacttcccatcccacacaaacccaattgtaaataacatatgacttctgagtacttttgggggcacaactgttttctgtttgctgtttttttgttttgttttttttctccagagcactttggtctagactaggctttgggtggttccaattggtggagagaagctctgaggcacgtcatgcaggtcaagaaagctttctttgcagtagcaccagttaaggtgaatatgtattgtatcacaaaacaaacccaatatccagatgaatatccgagatgttgaataaacttagccatttcgtacacatggtcttaatagtcatagtgtgttttttatacataacattgaattgttttccttgagagcaatcgtgcagggtttgctgctcccgcatttgcagcaaactaccacaaggtggcagcagcctgctgtga

SEQ ID NO: 15205 - DNA, 1099 bp, Homo sapiens
tagttgaggttttacttgtatcttctgagtaagggactccaaaaagttctaagtgcttgtagcctaaccaacttgccctgtctttatgacaggtaggggaaagggatcatctttcagagtcaggtcctgccttgggaatgagaagagcagaataaggtttgggaagcaggggcctggttttcagacctacactcagcctgttagaggttcctgtagtagaaagtggggcttcctaggaagctcagttaaagaagggttgcaggtagaagagatgatttacattgtttaatggctttaaaacacttccctttttcactgctttttgtctgttttgctctttgaggtcaagcctttcattcccactcccagaactgcagcagccttgttgttctttcttcctattgatgtcatgtccacttctgttgtcctcgcattccccagtatgaccagtataagactccaatggagaacattgggctacaggactcactgctgtcacgatttgacttgctcttcatcatgctggatcagatggatcctgagcaggatcgggagatctcagaccatgtccttcggatgcaccgttacagagcacctggggagcaggatggcgatggtgaggccataagaatagtaagagtaactaatggaaaggcgctaaacagatggtagtttctcaggcccaacccaggtggtggtaggtgtttcagtgtccgggttgatgttgaagagccctcaactgtttagccacctccccttcttgcttagtggagggtatcctaaggtgtgtcttttgtccatttctgggtctgggaataactgagcatcttgtgtgagccaggcagttccactatctttatttgtgggttccatgtgtctgattctttttgggccctttctttatgaatcttggtgtctccccttcttgtgctatagaagaagcaatttcccctgggttaaactctttattactctcctttctcctaacttgggtataccagctatgcccttgggtagtgctgtggatatcctggccacagatgatcccaactttagccaggaagatcagcaggacacccagatttatgagaagcatgac

SEQ ID NO: 15206 - DNA, 1100 bp, Homo sapiens
ccagctgggtggctgtggaagtctgtgaggtggcccaaccacaagcatacctattaagagaagcccagagcttccagcccccacttcgaaaactctcctctggccccacatagcaaactccttctccgttattttccccacccccagattttttttaaaaggcccacttgccgtaacctcttttggtctattttgcttcccattcagcccaaagtttatatgataaaggtgtttacttttacttcccagtctccaagtgctaacacataaacacatacatgtctgactgttgcagaactgttcgagctcctaattcagtgttaccttgttttagtcgcagcaaccctctcccctaccccttgcccgcccacgtttttctcactcttccgggttgtgcaataactctcccagccagtggtcctttccacagcctttctgtcccttaaaacacctgcaactgggggagaaatgggacccatgggagggggagtcgtcatcccttacacaagaaatagccactttccttttgttgtcattcttgtgatcctgggtgggtttctgtggcactcttttagaacatgtagcatcatcttagaggtctatttttaaaaaatgtgttgaagaggaaaaaaccattctcacgatggggcttaagtcattgtccaggaataagattggcgtggtgcccatgacatcaccgtcactctgcctaaaagcactctagagctacttgttcacgtggagaggaaggatattttgcgaagcaacagccgcaggtggagagccctgttcacctgatagggtctagctgtgacagtaaatataataccgctgtttccttgggtacagatttgagtgttcatgtgatgagactgtaaacctcatttttcggttcctctgtttaaaaaaacatctgaaggatgaactaaggctgctggtgccctgagcaactgataatgcaaatgtggacaaagtgtctgttttctactctagcctgttcatatggaccaaatttcaacaaggaactcaaggaaaatttgtacctgccgtatttatgctttcatgtaaaaaagggttggggggaggggtgtctttttgct

SEQ ID NO: 15207 - DNA, 3634 bp, Homo sapiens
ttagagcgagagcagagcaaactgcgcagcaggcacctccagaaaggtaatggtggcagaacccacagtggagtcgacctaggcctttctccagcagtcccagtcgccattgctttttcagccattcacaagcattcaaaaccaaaccaaacagcagttcatatacctgcctgagataggctggtcctcacctccagagccagccagccccgtcaggggccaaacttactaccttgacttcatctctagctgcagaaacactaagtctcaagggcttcagccccatgctggtcccttggtgttcagggagggtcacttggaccgctgttcatctggccgcccttgttgagtgttctttggaattgtcgttttttgagcacaactacagcattttagactgcatgaaaccatgactgactgagagtcactctctgggtagatgataggcgcctttctggccccttccctcacagattctttcccctcccctccacctgaagagaaggcctccaagtccttttggtgccttgtgaggacttttagaaggggcgttcagctttaaaaagccggtcctaattacggccggacgcagtagcttacgcctgttatcccagcactttgggaggtcgaggtgggcagatcacctgaggttaggagttcaagaccagcctggccaacatggtgaaaccccatctctactaaaaatacaaaaaattaggtgtagtggcaggcacctgtaatcccagctactcgggaggctgaggcaggagaatcgcttgaacctagaaggcggaggttgcagtgagcggagattgtaccatggcactccagcctggacaacaagagcgaaattctgtctaaaaaaacaaaagtcccaattaagaacctccgaactctgttttgaggcaaaggggagtagttcttggtaggtgcaggaatagtagtgtcatttggaatactggtcatctttctgacatcacagtagaaaccaaaccttggatttagattcaaaaggggggaaatgggtcttttcatcaaggcaactccccttctccaagtcacttacatcatagataaattttagcttcccagtaactgagggatttgtttcctaacgccattggaggccttcatccctctctacgataaggttgcagaaatgggaagagctacccgtggttgcttttgattacccttaggaagtgagacagtgtttttgaaaatatgtatttcccccatttctccctctccttccctgacacttctctgggctgcacagcagaaacgttggtaaaagggcagtttggtttcaacacagcagacctgatatgggatcccttagccactttagtcaaacagccctgacagagtctataattgagttcaggccccccaccttgcctaataactgcaaatcgcatgttcagccagcagcctcctaagcccaccttcctcccccattagagaacacccatcctaggtgctctccaggctgtgtcattggcagggcttcacatgcaggaggcctctctcaggtgagtccaggttaaactgttgagttgtggcttcaacagatatgtatggcatgctgggatgtgccaggtgcctgcgttgtgccagttgctggagaggtagtgtgagcagagcagctgaaatcttgccatcaagcaaccctcattctcatgcctgtaggtttccattgctctgtcccaggacacttgcgtgccagagacgccacaacttcatgtccctgtctcttgcaagctccccgtgctgccagtacttcatgccttggatgtggtcccaccagcccagtggccggggtcagcttaggctctgcttcccagtggacgggtgtgctaagggtttattttatgtaaaaaaaaaaaaaaaaacaaaaaaaaaccctgagaccatgagtggggctggcatcttgccagcctgggcttcagggatgtttggggggggtggttagagggtagttgtagggtactttgtcacccccctccccctgccaccctccctggcacgtttatttcacagcagagccaagtctgtggcaggttgacacagactgtgttgccagagctgaaataattccacttcatcctatgagcgtgttgggctagcttgttctaattttggccactttggctgttttcttcagttttatgcattctctcctgccccaaagtgccaagccatttgtgaaggctctgccagacacctccaagcttgagagctcagcaccatgcaccaagagcaggagaaaagacgtaaacctaccccagcaactgtggcctctcgacagccctggctaactaacttacatttgtggggaagccaacagacacagcaggaggagagggaggtggcgctggtggaccaaggatctgtgctacccgctcccctccttggaggtgcagtgatgatgggagttatttttaccatccgggcgctgatagctgcactattaataaattgcatgtgttccttttgaaggtaggggatggttctgggtgagaggggagcaggctgagccggcgggggatctgctgtcctcccttttgagtcagttctaatcccatgtgtgtctgggccaccagaccgaaatggttgctgagaaacttgtctgttcatgtcccaaggcataacttcccaacatttaagaaaccccaatagacacctctgccctggccacgttcacagatccttctcttgaccggaaaccctgggaccctaagaacccctgaagcttggggtgggtgtgtgcttctggggtctcttttgggacctcctttgtcagtaccccttcttttttctaagcagctaataagaggttgggtgaaagagtgcatctcctcccaggattccacaacaaaattcttatcttccatggatgctttaattggaagtgggttgccgacccccttgtgcctagaaaaggccttcgcttgggtttcctttgtatgcttcagccttcctagttggtttttctaggcctggtgtgagaggtagggaagtctgcacataactaattcttttgcttaagggcctatggcacaagtgcacaaacttcaattcttgatgttctaagctctctcctctaacagagggagtgctgaaagcttttgagtcaagacaatggagtgctcttcctccctcactctgccttccgagcttatggttccttttctcaggagaggattttcaggattattggaggattaggtcattgtcagatgactggaaaacctaaataggatctctctccagctcaaggttgtcccagtgaggaagactttaccaacttctcactctaccccactactcacatgagtgttagctccaccttgcaaaggctgaagaccagttctccccagtgaaagctgcctcattcttttatggagttccctggagtggcagagctataaagacgagcattgggatttgcagtctccatgtagcctttcgtgcttggcaacccctgtagactttttgtcccaagcagattgcgtgcgtgcgcctgtgtgtgagaataagtgccttactttgctgtgtggttttcaacttgtactccgtggccagcccccagttgccagggctcgacggcagccaaggacaccatacctca

SEQ ID NO: 15208 - DNA, 1202 bp, Homo sapiens
atagagcagggaatgaggagaacagacaaggagaaatgaggactctgaaatagtctccttctgggggaagagtgttgtcacgatggtggagtcactgcccaagggagattggagcgggagacagcagaatgtagagccacatcctgaatgtgagggctccacactgcagggcctggggcagacagaacatgcggcggcaggtgctaagcccttggcccatgtggaagaagcaagctgggtgggtagtgtagacgccacagtgatgtggatgagaagagaaaatgggaggctgagctccaactgaggagtgagtacagttacacttcttactatctcattcattcagataatgtggagaaagctcgggatttctgcatccatgcagtaaggcaacagaggtggggaaagtcagggtggagaggctctgaaagaagcaggggtcccagcctgggtgggcatgtgttcctgatctgattcctcccattctccaggtcttaaagagccacggacaagactaccttgttggcaacaagctgagccgggctgacattcacctggtggaacttctctactacgtggaagagcttgactctagccttatttccagcttccctctgctgaaggtgacccatttcacagtcttcagagaggcagacccacatctcccatcttgggatcttgtatctgggccctgggactgagcatgttttgaccccagccttctccaggcctttggtgccccaaggtctccaaaatgagcttccaggctccaattttgaggaatgaaaacacttttgttatggaaaggaaatttgtagtgcatgctaccccgcaaagagtattttgccttttattatggaaaggacccagggcccagcatgtctccccatccctctatttcagtgtggtttctgttcctgagttctctgtgatgtcctttatcccatatgtgcccacattgagtcagtctgagcagagccctttccatctggtttcctccctgggctccggctcctgctgtcagacattttgttcctctctgcccagctctccagcactctgcccccgacaatgtatctctcactgagaaaaggtggtcccatggtttgtctttactattttctataacattttcctttccaactcattttcccatattttcacttctgcttagagactgatctgtgctgatatcaaacaag

SEQ ID NO: 15209 - DNA, 1178 bp, Homo sapiens
ctttcttatttcaggcatttaaaataagaatcagcaacatccctacaattaagaagttcctgcagcctgggagtcagaggaagccacccccgatacccactatgttgaacttgccaggaagatagtgctgctctaatggcagcaggttgcgtgatgacaaacatgatgatccagtcacagcaccagcatgtgctgtctgcagaggataatagaagcaaactgtagatcccaggagcaaagtgtctgaaaagaacaaaaccatgctgccattaacagcaacgctgattaaatgtagtataaaatcattcagatgtgtgtggctttttaaagtctgtcagttgtggatgatagtctacaacttttatgaaataaatgttctgtataaataaataggagccagatatatgtagggcaggggcccacatataaccctgttcttctgtctgcatcaagattgggaccattgagggaacagggaccagcaatttgcagggaaggatctctccaacacccaccataattgctgagtacttggggtaagaaaaaaagtggcaaatgacaaattaagagttagacattggctgatgctagtaaatcttacagggatgtgtggggaacagagaatgttcattctgaaaccctgaaaaaaagttggatatttagacaacacttttccacctaacagagccacccaagactgaattttgctatgatgaaacaattccaagtagcactgagattaagatataataatataactgacaaatactacttatacaagctgaacaaaagactccccagccttgatacatttttttttttttaagatacagggtcctctgtcacccaggctggagtgcagtggtgcaatcatagctctctgcaaccttgaactctttctttaagggtacctattatgttctaaactgtaaaatttgaaactcagcctcatgttggggcttgtttgatgggaggcagaagagctgactttgtcgcagagcatatattcaggatgatgttgtaggcataattgtagttcctggtggtctctggtctgaagcaaggtctctgatctgccagtggtttggggcacacaactctatcagcttccaactcctgctgggacattccatcccgggttgcacactttattaacagctgagtgtgtatccaggtat

SEQ ID NO: 15210 - DNA, 1114 bp, Homo sapiens
ttgtgccagtagtcccagctacttggaaggctgagacaggaggatcacttgagcccagactgcagcgaactatgattgtgccactgcactccaacctaggcaatagaatgagatgccgtcagtgatatttttcccttgagtgacagtttatttttgcaaagttatctcagcctataatccagtttgatattttaaaagaaattttctctctagttaaaaaaaattatgaagaacacctttgaatgatttgcaaagggaaatgaatgtagtaatcctatgagaagttcgaaggactctacattatctgtgggatgaatgcataaagcctttggtgccatgccagactactttttaaattataactattttgcagagagcaatacaattgcaaagaataatacgaagcaaacttgcatttggatttcttctcctctactgtctctataggcttctttcatcgagacttaaagcctgagaacctcctctgcatgggaccagaacttgtgaaaattgcagactttggtttggcccgagaaatacgatcaaaacctccatatacagattatgtatctaccagatggtgaataccatttttctcaaaattatttaattgcacttctttaaaaagatatcattatgctaaggataatattaaagtcacaaatgttaacttttcactaagagaaacagtgcagtctgaaacatatatttatagatatgttggtaatgtacaaggttaaaaatcttgtgttctaaatcatgttaaaagaaaacctattatgcttttctataatgtaaataaaattttatatataggccttcctgaggacagcttaacaaaagaattatgtaaaatattctgcaaagacctgtctgagaaccatctaattgctattgtgaaaactttgagacactgggaatttgatttaagcagtttgccatgaccaagtagtctacacacaagttgtaggttttttcctccctcttcctttctctcttagtttttcccttccactttctcttttctctcttttttcctaattcttactttctctgtgtttctcaaagatgccatagagaagtctcctgtagagaaatgctcagtagaaaatat

SEQ ID NO: 15211 - DNA, 2435 bp, Homo sapiens
gacaaaagatttagtcaatgaggacttgacctcaggagtttctccttgataagatttgatcttgaaactaggcctagtgttagggatgcaattctcagtaaagttccctataaagaaaactgtggtcatttggttctcatctgcccttacacattttagacctacaacaagaaaggggcctcccgaaggaaagaccacctgaaggaccaccagaatgggtccatggctgctgtgaatggacacaccaacagcttttcacccctggaaaacaatgtgaagccaaggaagctgcggaaggattgaagtcaaagaattgaaaccctccaaaccacgtcatctgattgtaagcacaatatgagttgtgccccaatgctcgttaacagctgctgtaactagtctggcctacaatagtgtgattcatgtaggacttctttcatcaattcaaaacccctagaaaacgtatacagattatataagtagggataagatttctaacatttctgggctctctgacccctgcgctagactgtggaaagggagtattattatagtatacaacactgctgttgccttattagttataacatgataggtgctgaattgtgattcacaatttaaaaacactgtaatccaaacttttttttttaactgtagatcatgcatgtgattgtaaatgtaaatttgtacaatgttgttatggtagagaaacacacatgccttaaaatttaaaaagcagggcccaaagcttattagtttaaattagggtatgtttcaagtttgtattaatttgtaatagctctgtttagaaaaaatcaaagaccatgatttatgaaactaatgtgacataatttccagtgacttgttgatgtgaaatcagacacggcaccttcagttttgtactattggctttgaatcaagcaggctcaaatctagtggaacagtcagtttaactttttaacagatcttatttttttattttgagtgccactattaatgtaaaaaggggggggctctacagcagtcgtgatgaaacttaaatatatattctttgtcctcgagattttaggaagggtgtagggtgagtaggccatttttaatttctgaagtgctaagtgtttttatacagcaaacaaaaagtcaattttgctttccaccagtgcgagagaggatgtatacttttcaagagagatgattgcctatttaccgtttgacagagtcccgtagatgagcaatggggaactggttgccagggtctaaatttggattgatttatgcactgttatctgttttgacacagatttccttgtaaaatgtgcctagtttaccaaaattaacaaagggggggaaaggaccttagaactttttaaggtaaaatcaaatatagctacagcataagagaatcgagaaatttgatagaggtaacttgtttaatgtaaatctaatagtacttgtaatttctttctgcttagaatctaaagatgtgtttagaacctcttgtttaaaaataatagactgcttatcataaaatcacatctcacacatttgaggcagtggtcaaacaggtaaagcctatgatgtgtgtcattttaaagtgtcggaatttagcctctgaataccttctccattgggggaaagatattcttggaaccactcatgacatatcttagaaggtcattgacaatgtataaactaattgttggtttgatatttatgtaaatatcagtttaccatgctttaattttgcacattcgtactatagggagcctattggttctctattagtcttgtgggttttctgtttgaaaaggagtcatggcatctgtttacatttaccttatcaaacctagaatgtgtatatttataaatgtatgtcttcattgctaggtactaatttgcagatgtctttacatatttcaatacagaaactataacattcaatagtgtgctgtcaaagtgtgcttagctcacctggatatacctacattgttaaatgtctaaacagtaatcattaaaacatttttgattacctgtgcctgcattttacattttttgtgctggcaattctgaagaactggagaaaaatccacttaattcactgtctaggaacttacacaaatggatataaataattcagttaggaaggccatattattgcttagttctcaatgaggaaggaccctgcataataaggcatagtggtggttccaccctaatgctgtcccctctgcctcctccaggtaatcccactaaaggttccagctctaaatatgctcctttgtccttcctccccattggccccaatctctccccttaccctgagaatgttagaattactttcctaggtctagaccataggtcttctgcaaaatttttttctggaaagaaccagttggaaaatatttcaggctttgcaggacatacagtccctgttgcag

SEQ ID NO: 15212 - DNA, 1206 bp, Homo sapiens
tagtgccagtttcactaacgtggctaagcagcacgttttctgagtctgcatgtgctggccacacttgccgactgacacacagctgagatggaggacttcagagttcaatgactgccatttcttgggttttatcaccctatgtgtaatctggtatacctggttaataaatccaattaatgggaagtgtagccttctccttgttttcttcttaagttctttggaaagaatatttgtattattattttactgagcaaaaatcatgaataatacattgttattcagagcatgtaacaaggagcttcaccttgtttgatatgtattgaaaatccatgcctcctctcctgattgctttattggaattaagaacatgaataccaggtgacttttatatcatcatggttagagaaattttttcaacgtttgaaaagttgtgaatgtttttatatatcattaattttttttaatttttcagatactagagtaaaaggatggtttcttctggacaattatatacccacatttatctgctctgtcatatatttactaattgtatggctgggaccaaaatacatgaggaataaacagccattctcttgccgggggattttagtggtgtataaccttggactcacactgctgtctctgtatatgttctgtgaggtaagtcaaaggttaacacagtcttcctttcacataaatgcactcatattgctgtcctaaattgtattcctaaatgaggaaaggtggccgcttggggtgtagagacaactgggcaagcaagtatcttaatgcgttatgagtgtgttttaaaatcgatttttcaaaatgtcagagttgtttgtacaagtatgccttctagaatatctaaaatagaagcctttgttattgattcttctattatgtttcgtatgatattcaaaattaaagtattttcagaaatactctcatgcaagcaaaatacagagtggaaaatgaacaaaatgtgaaaaacacatgtgaaagcattttattattaagcatctaataagtgcctgcttcttgtttgaaggtaggggaggaaggaagtgggtggcacttgtgtttggtatgttttgtggcacatcaccctctctgattggataacttgtcaaatctcagttgttttttaaaagctaagaggagtgtgactggtgagatctgcatttaggttttgaattgtctgtctga

SEQ ID NO: 15213 - DNA, 1111 bp, Homo sapiens
atttattttaaagttatttgttgccatagattctgtctttgctcgtaatcaagtaagtgttgttgacaggggtaaaataagggagaacagatgtagaaataagtatgtgtcagtgacaatatacacatatatgtaacacatatgcacaggaaatccagtgcttgacctaggagggctgaattgactctatagcttgcagctaaatgatggtatgcctcaaataagttcctttaacaagaaagtgagaaatgccaaaactgatgagtgtgatagaccacccccttctacttagtaagaaaggctgggaaatgtgggcatagaaccacaagcactgtatccacatgtgtatccaataaataacagcaggcacgcgtgggctcaacattcaaacaactctaattgtgtattcagacattaaagagtaatcataggtcaaaatttaaaattgcctattagaacatgattgctctttgacactataaaaatgttgtgttactgacaacaaaagctattatccatgtgtggaaagaactgggaatctgtttatttatctagccaagccaggattcttgaacagactaaaacaagaaagcctgaaggttacagatgacaaataactcagaacacaatttatattgatccttcttttcaggctgttatccttgacaactgttgtactcctcttaatacatctaccatgtgttcttagactgtaaactccagtgggacaggggaatttggtaaacacctggatcaatatagaatatcagtaagtaaaattgtttcaggtttacaaagtttctcacgatttaaaaaaacaacaacactgtatcttattatcctcttgagcaaatgtgataaaagcctgttacaagatagttttatttctgaaagccattatgttaaagaattttctgtcatgagataatatataacacatcacatattccctgaaagaagcttttaaaatgtggagatgcagcattgctatgatataaaaagttaataacttatagaggttcttattaaaaatttcattgtttcccttatttgattctttaatgttgaaacataacattataaaagaaacaacataaagaaaataaacaat

SEQ ID NO: 15214 - DNA, 1960 bp, Homo sapiens
gaagccgaaacttaccttgtagttggaaatctagccttttctatattatgtctacttagagtaagcctgcatacccttgtgtaatagagaaaggctgtgaatccacaactgttttctgagtgcctactacacaccaggaaaaaaagttaagattaaaggtggcatcgggtttcaaaaattagttgcagatggacccaataataagggtgagctgtctctaccttctttcctcagattccaagaagactcccagccgaccaggaagtcgagctggaagcaaagctggcagcagggccagcagccgccgaggcagtgatgcatcagactttgacatttcagaaatccagtccgtgtgctcagatgtggaaactgtcccccagacacacagacctacaccccgagcaggttctcggccatccacagcgaagccttcaaaaatccccacgccccagaggaaatcacctgccagcaaattggacaagtcctcaaagagatagtgcaattggttctaccaaggcccttccttgagcatttattatttaagtttgaacgatgtaaaatatggtgtagaaattcttgtgaaatattgcaagaggcgagtttaaaattctgcagatggccttatttgtgtatttgtctttttattttatctgtataattttttttgtcagatattctggggttaaagtcacatcatatgtgaggaggaaaagtttaacatgaactaacatttctgcactgtaacgtgccgggcacacactaaactcagttactgtacctacaggtaagtctacatcctctctgacagccacagcactacatcaatccctgacgttagggatacctcatgacattttcctgtttttatggaaactctgagaagctgaatgatacatgcaggggatattttttgagatgatttaaatgtaaaccaaaagatggaagacaaaaagacaaacacacccacacgcagtctttgcagtatctgacagagaactcacaggaagttacttcaagcacttgccagtactatgatattcaagtaccttgcagcatttctctgccattgctttcaatgaggccagaggcatcctggatattagacctattatactgtaagaatataagtataaagtgcgttcatatacatgtgaggttttcttttgcttgagtggacagtagcacctgtatcattgaactcattttgtatcagagcaattttgcttgcagaaagctatgaaataaaacacgtcccttaactgcattgctatggaattaattttttttccccagggaaaactagtgtatttttttatgagcaatatcaatttggagtgaccaaaagatacttaaaaatgggtttattttgatttctcatctgaaataatcatgttctggtattatatctatctatatttaataaatatatacattttaatttattatgtgtactcacatactatagaaagatattagtatgcatttaataaaacatattcacttgaatatatggaatacctgattatttaaagtgaacttcttctattatttgttttaaataaaggttatatgtatgatatatgtttactaagaaacaaatagggtaaatttgggggacatcaaaaacagggagttataataatgttaaccactctttcaacaaatatttctaataagtattagccatgcaccagccattgtaagtgacatgaaactataaggttcctgccctcccctcttcaagagggaatcagttaataagtcactaaaaagcaagggatgtgtggcaggattacagatttaattaaggtaatatagtagtattcttctggcctctgtacatttaaaagtcaaattgtaaaattttcctgaatatgaaaatagtatcagatatcctcagaaggatggcaggttgtaactttaggtatgagggtcccaacattctgcataactttgtgga

SEQ ID NO: 15215 - DNA, 1129 bp, Homo sapiens
ctaatttttttgtatttttagtagagatggtttcaccaggttggtcaggctgatcttgaactgacctcgtgatccgcccacctcggcctcccaaagtgctgggattacaggcgtgagccaccacgccctgccagtatcttagctttttacatttctactctgtgccacatggagtaagcttacctgatccttcagagaatgcatatttgaactcaaattagaaagcaaaaggaagcctgagtgattgacatgcatctttaaattctgaagatgatgaacatcatcgtgggctctcatgtcctcctcaagccagatcttgatgccactaatggaatctaaaaagaccagaagcattatgggtctagctcaggatgatcctaattttcatttaaaatttatttattttacatcactgcaattattttactaagttggaggaaattcagagaaatttctgtttctctgacaggtgctggcctgggcaaagcaacatcagcagagattagcaagtgctctggctgggcttattgccaaacaggaattgttggaagctttgctggcttggttgcaatgggctgaaactacacttactgataaggataaagaagtcatcccccaggagatcgaagaggtgaaagcactcattgcagaacaccaggtaaaataaatataatcctaactcctgttaaccattatctcagatattttctttctttcactgctgtacttctcaaaacattgctttgttctcgttattttcacttcttcagactcctcagctccttacaactgtgtttccaactctgcaactgccctaaaacctctctttacaggaaccctctgtgacctttgcaaaactttccttctttgtcctctgtggggttacactcgtggtattgtctcacgttcactcctgccctcccttttgccttctaaatgtcagctctccttactccttaggtgttatcctcagctctctatttctctcactctgttccctcttttggtgatctcacccacctccacctccctggcttcagtgggtacaaggtacccacattaaggtatccacattaaatgtggatgcattatgttcacattgcattaatcaaacaaggtttgattgctc

SEQ ID NO: 15216 - DNA, 1123 bp, Homo sapiens
gtgtatacgtgtgtgtttgtgtctttctgcaggcacatctcattttaactgttagagttgaatcagtcaaataatcacttttgtgataggctcacttttgtgaatgatctgagtatcagaatagaaacctatagatatggccaaatggtaatattcatttatgatgatttttttaaaaacacattaattttattgtgacagaatgttggttattaatgtttgaaagatctagttgcatacacagactcttggatcaaaaataaagagctctgggctcacttcttagatcagtctgtggccaaaataaatgaatttaattcctggcacatcagtttgtcaaaattaggcaggaaaaaaaaaaaaaaaaaaaaaaaaaaaaaagcaaacccagaagcttttcctctaaggtgaaagacaaggatttaagcctctaaaatttgacattatgagttagtacctaagatattatgaaagaccaaggagtgttataggaataaaagaccatctgccaacttcctatggaattccctgccattatctctaagacatccgtggtacacacatcaagattgcttagtcctctgttaggttcttagatacatctcttagagtagtgccaaagccagcatccacttgacattcacactagtgatttgagagaaattgggacaccatattaaagaatcattaagaaaaggaatttgttgcattgttttatgaaattgaaataatgaaggctggctgccattatttaaatccaatatgtcattttaaaataagataatcttatcttgttttctcatgagaatgtgacaggactgaacaaatttatacaagactcttcttgatggtgctcaaataggagcagtgtgtcatttatcttctgaagatgctgccagaaatatggttattaaactgtaggtcttagatatctttacatgatgttatgtgcacatatatatctcaaacagtatgtgttgctgttttggttttgtaattaaaattaatttttcaaaatatggtcttcttaggccttccaaaaagagttggggaagaggaccagcagtgtgcaggccctgaagcgctcagcccgagaactcatagaaggcagtcgggatgactc

SEQ ID NO: 15217 - DNA, 1179 bp, Homo sapiens
ctaggggtttgaaggcgggggcagggcgtgtctataaagagacagcacgaggaagatttttgggatggttgaactgttctggatcttgattgtggtgatgattacgtgaatctatacatgtgttaaaatgtatagaagtgtataccaaaaaatgtcaagtttactgcctgataatctaaaacaaaattttaaaaatatttaaacagtttaaaaggcttatttttatgaagaaacatgaagggtccatggtttccaaaggtgggaattttcctggaacagatgccatgtatttaaggaataagaaagaaagtttagaaaagttttgtctttttcctaagaagagcaaagaaacaacaatgaataccaacatactgctcttccccttgagtaccactcaaccttcatcaattaattttagatgttcagatatatgagtgacgttttttgttgcaaggatcaatttttctacctttttccctagacaaaacaaattggaggaagccctgttattttctggacaattcacagatgccctacaggctctcattgattggttatatagagttgaaccccagctggcagaagaccagcctgttcatggagacattgatttggtgatgaatctgatcgataatcacaaggtattgttatctgggacattttattttatcttgtttgattattctgagtgtacaggaaatgtaaaccatttaaattagccttttaaaatcagaagactatagatcatactacataacagtctttattgttgaaatatgtgtccgtttgagcagaacctggaagcaaactttaaaagtgatggggaagtattatttagtgtcagtgaaatacttttgcttttaattaccagatctaaaacctttttagaacttggaaagtgatttcattctctggtgctttaaaacagatttcaagaatgttttactatctttagttatgcacttaaacaattatgtaataaaatttaaaatcattcattcagtgacctgacactaagtcattgcataagtatgtagatttgtgacatgacccatggtggtcatgaccaactgcttttaaaaataccgaaccaaaactgttttaaccttgccccttgaattatagcagtttatgagtcagcagcttatgctataagggatttgattattatttacttcg

SEQ ID NO: 15218 - DNA, 1180 bp, Homo sapiens
tcctattgaatatttataaacatctactaggtgtaagatgataatgagaggcctacaaagacaatgtccctgctctataaaagcttatgattgagttgtgtagaaagactatacagatgctcctcaacttacgatgggtttttatccccataaaccctctgtaagttgaaaatacggtaaataaaaaatgcatttaatacacctaacattagcttacaataggacaagatcatctaacccaaaacctgtttctataataaagtgttgaatatcttaggtactttattgaataggtgactgaagtatggtttctactgaatccctatggctttcgtaccatggtaaagtcaaaaaatcctaagtcaagtcattataagtcagaaagcatctataattcatctccatttattagggatgcctctgttaatgcctcttacctgtttattagtcccaagaagaaattcgcatttttttcttgttaaatatttaggagtttcagaaatcactcggagccaagcattctgtctacgacaccaccaacaggactggacgttctctgaaggagaaaacctccctggctgatgacaacctgaaactggatgacatgctgagtgaactcagagacaaatgggataccatatgtggaaaatctgtggaaaggtaaaatgttctttaagacagtttggttactctgtagacctctttcaaatacacagtaatggtgctttgcggggacatttcgggaaccttaaatatttcctttgcctgaggaacttctgcttgtcctaagtatcccacacacatagcacttgcattgagaagtctttgctgttcattaatttttaactactcattacaataaaaagtgatatcattgtccaagcttctgccatctcagacttgactacacccactgcttctgactcgtcttcccatgtccacttttatcacttctttgacttaatttctacataactactggatagtcttttaaaaatgtaaatggaatcttgtcattcccctccttcacaccctttggtgacttactactgggcatgcattgaaacacaggcttcttaatgtgacgtgcaaggtaccactgatctggccccagcatttctttccaactccatctacccctttctgatctccctctttctcattacatttccatgaaaac

SEQ ID NO: 15219 - DNA, 1196 bp, Homo sapiens
agataggattctcttttcagacaccaggcttttttttttttttttgagactgagtctcactcctctgtcgtccaggactgtggtggtgtgatcttggcttacttcaacctctgcctcccggttcaagcgattcttgtgcctcagcctccccacaggtagctaggattataggtgcccaccagcatgcctggctaatttttgtatttttagtagagatggggtttcagcatgtttgccaggctagtcttgaactcctgacctcaagtgatccacccacctcagcctccaaaagtgctgatcacaggcgtgagccactgcacccggctgacagcaggcctttttaaagtcaaaagcatgcatttggtatttcgaaagctttcgtttgtcctttaaaataatttcaggtttatgacaccagaagcatttttaagattgatctgattttcatttgtttctacttatttcctttttttctgggaaaggtttttgccaatgaagtaaattctcatcgtgagcagataatagagctggacaaaactggaacccacctaaaatattttagtcagaaacaagatgttgttctaatcaagaatctacttatcagtgtacaaagtcgatgggaaaaagtggttcaacggttggtagagagaggaagatctttggatgatgcaaggaagagagccaagcaggtaataaccctttagaaaaattctctgaacttgtcaataaaccacttcttgctgttgaaatatatgttatggatgtacttttatcacaggctgtattaggcataacaatcatggcatggtgccatggtggttctttcctaaaagggctgtggcctcagtttggatgctgacatcactttttgacctggcagcaatttcagcccctggggactaatcttaagaagactgattatagcttgacttcatagacaggctattatcattgaggcccagaaagaagctcagaatttttttttattgggtttgttttctttttctttgtccttttgacctctgttctcataatcagagtgagacatcatacttcattgtattgctaccttttgtttagttcctaagccagactttcttcacaagctatcagtgctgagagccagacatgtagccctcccgacagctttctgaaggggcatattctctgtctgagttggtcggcactccccacct

SEQ ID NO: 15220 - DNA, 1143 bp, Homo sapiens
aagccgttaataaagcaggaaatgatctaattgaatcaagtgcaggagaagaagcaagcaaccttcagaacaagctagaggttttaaatcaacgctggcaaaatgttttggaaaaaacagaacaaaggaagcagcagctggatggtgccttgcgccaggtgagtaagagaataaattctgaaagtttttatagcattcaagaccaaaatagcatggaattcttttattagttcacagactcctgtttaatttttataccttaaggagaggagtaaaaataagtgaaataaagaacagaacagcagaagagaacacagctttctagttcttagcataatactcttatctactagagctctcctgatgaagaaaggcaaatctaatggtacctggctgttcttaagaatgcatagagaggcttagcaggctgggattgtttgaagcttatttcctgcttgaaactgacagtgtttatggccccaacttaaaactgcctattacttcaggccaaagggttccatggcgaaattgaggatttgcagcagtggctgactgacacggagcgtcatctgttggcatctaaaccgctgggaggtttaccggaaacagccaaggagcagcttaatgtccatatggtaagcaaagtatttcctacagctttagcctcagaataacaaactgaccatgttatatgggccctggcgatacataaatcgtgggagaaggctttaaagatatagtttatggcagaaatcactgtgtatacatgttagaaacacaccatttattgattaaaattttaaagtcagaacccattctttatttctttctttttttaattttattattattatactttaagttttagggtacatgtgcacaatgtgcaggttagttacatatgtatacatgtgccatgctggtgtcctgcacccattaactcgtcatttagcattaggtgtatctcctaatgctatctgtcccccctcccctgaccccacaacagtccccagagtgtgatgttccccttcctgtgtccatgtgttctcattgttcagttcccacctatgagtgagaatatgcagtgtttgggtttttgttcttgcgatagtttactgagaatgatgatttccaatttcatcc

SEQ ID NO: 15221 - DNA, 1146 bp, Homo sapiens
tgtatttaaccaagaagatgaaagcaaaagtaggatactgcctttctgttgtggtatctttgtaccttacaggtcctacctggtcctgcctagggtaatgacataaaatgtaaatccaaagctagattattctaaatctactaacaaatatattaatttgtattgtttttggatttatattttacttgtctatgttaaatgtatattggtttggaaaccaaaatgtctttctaagccttacagtattgttgatatttttaaaaatttgttttggtatttgttaaggtatttcttatttatcatttcttaaatatctttataataaacatttgacatttgttactaaaagggtgctgtttttcttttaaaatatttcttgttgaaaaaatttattgcagaaacttagaaaacagaaaaatgattagaatgccaccttctagaaataactaccattgatattgttgtgtactttttaaagttttgatgtggttttgcttaaaattctaaggctgtcattttcttattctagaccataagggaagaaatagatggactacaggaggagctggatatagttattaacctaggttctgaactcattgcggcatgtggggagcctgataaacccattgtcaagaagagtatagatgaggtacaactggcttacttatcagaatggcttttaaaaagtttttagttaactaaaatattttgttaacagtagttgaaagtttaaaatatggcactaaaagaattctaacatacatcttgtagttaaattcagcatgggattctctaaataaagcttggaaagaccggattgacaaacttgaggaggcaatgcaggctgccgttcagtaccaggatggactgcaggtaaggggattacagtgtatgtgctggtcttagctggaaggaggaatcgtactaattgatgtctacatattggcaccacctcaagatctgccagtgcatatgcaattgtgggcaaattattcctgcagttgcctgtgtatctcatttcatgttttgtcttttagaagatatttctgacctttcagatatgtgtagatttatatacacatctaaacacatttctgtatacacattcagtgaaatttactttgaaaagaaatattttgattt

SEQ ID NO: 15222 - DNA, 1115 bp, Homo sapiens
ctgaacggacaattttactcttgatttggggagcataaaagtgtacctaggtgattatttcactccctttgggattaaggatagccttaatgaacttgaaacttgataaacttggttctactctgagctcacttttgtcaggaagaaccttggtttggcaagaatagcagacccagagatattatgttatttggcatagactcttggacccactgatatccactggactggggtcattcaaaacttggtccagttttagatacttagcaaattggatcactactttctgtgtgaactataacattctgctttgttggttacgtggggctaaccagtcgccttgtggatattgttttgcttcatagctgttcaggataagcttgaccaaatggttttcatttgggagaacatacacacactggtggaagagagggaagccaaactactggatgtgatggagctagcagaaaagttctggtgtgatcacatgtcattgatagttaccattaaagatactcaagatttcatccgggacctggaagatcctggaattgatccttcagtagtaaaacaacagcaagaagcagcagaggtaagcagaaaatctcatttaaagttagaaaaataagttgtggcataatgaaatccagattccttgggtaaatgttaggagttactctgttaacatttatatttggttctgaaaatggaatgtgcagtgatacagtaggagatagagtatacccacaaatttcactttgagattgtatgtttaaaacaatttctcaggcctgcgtggtggctcatgcctgtattcccagaactttgggaggccgaggtgggcggatcacttgaggccaggagtttgagaccagcttggccaacatgacgaaaccctgtctctactaaaagtacaaaaattagttaagcgtggtggtacacacctgtagtaccagctagttcgagggtgaagcatgagaatcacttgaacctgggaggtggaggttacagtcagccaagatcgtgccactatactctaacctgggcgacagagtgagcccctgtctcagaagacaaacaaaaacacaaaacaacaacaacaaaaaatttctctt

SEQ ID NO: 15223 - DNA, 1185 bp, Homo sapiens
ttgaagtatgatcacatgtgggtgaaagggagttggtgaggtcaggctcactgagcctgtaatgattctactgtcatgatataaagccagtttgtcatcattttgagggtcacttaattctggcttggaatatcctcttcattttacttttctgttacctgattacttagaggttcccagaaagcaaagaataatacaagttaacttgcttgtttttgcttctgaaattttaaatatttatattaaatttcaaagataaaatcttgccgtgtcgacaaatgaattgttctttgaacttctcaggaaacatttttctttttgcaaaatagctttagataaaaaaggtttatttaactcgactgaaactaagggagggggggagtggggcaaagcatcacattattcgcctgcaaaggacttgagctccaagaacagttaaaggaaaagtctgttgaagctcttaagtgttactaacttatttgtatgttttcaggaactgaaaaaggaagctaagaacaacaaagccttactggactcccttaatgaagtgagcagtgctttgctggaactggtaccatggagggcaagagaaggacttgagaaaatggtagctgaggacaatgagcgctaccgattagtgagcgacaccatcactcagaaggtggaggagatcgatgcagccattctgcgatcacagcaggtagggaaaaatggtttgttgtttaggcaataaattttctccagctgttcttggagcttttacctgaacaaagatgactgttaatactgtttccattcatttgctgtgcttccaaaatgaaagagtggatttgaaaagaagttgactgggcttcttcgacgtctgagcaccagggcaaggctaatctgcacattgttcacagccatctgcctcattgtttcacagatttatccttaccaagtcagacactgcgaagatcagcccagctttccaaacaaaatgcttttgtctacacatatgcatattgctgatattaatttttatgtattgactaagtctaatctgtatgtgagtaaatactgtgaattgttatgtaagtcagtattaactgttcatttacagaaagctggggcaaagagaatgttttctttttaaaaaggaagcagttttgttggtaatgtgaagtttttttctgaagatgacag

SEQ ID NO: 15224 - DNA, 2001 bp, Homo sapiens
tcaggaggctgaggcaggagaatggtgtgaacccaggaggaggagcttgcagtgagctgagatagcgcctcaacactccagtctgggtgacagagcgagactctgcctcaaaaaaaaaaaaaaaaaaaaaaaaaaaaagtcatagacgcgaaaaagtcatatttaataagagatggattatttatcaacataattaagaactttgccatcatcacttctccatactggaatagagaagacaccagcacagcaggcgatgtgtggcatggccactccctgcaccttgatgcatttttacttatttccttattctttgttttcccctctcatctgtatcctgcatcttttcttgattgtgtattttcttctgcctacttcttgcttcttttcccctttgtcaataacttaagttcacttgtagttcttatagtcaatgctaaaagcccttgcttttcaacaattctatatattcattcagagatttttattttggcttttcatagattaaattaacattttgatgtaaaataaacatatcttgtaattttatttctagagaatcatgtccagcaccttcagtcggcctgtgcaagctctcatcaatttcagcaaatgtctagagattttcaggcttggctggatacaaagaaagaagagcaaaacaaatctcatccaatatctgccaaactcgatgtcttggagtcattaattaaagatcataaagactttagtaaaactttgaccgctcagtctcatatgtatgaaaaaaccattgcagaaggtgaaaatctgttattaaaaacacaagggtctgagaaggcagccttacagttacagcttaatacaattaaaaccaattgggatacatttaataagcaggtgaaagaaagagaaaacaagttaaaagagtcattggaaaaagcccttaagtataaagagcaagtagagactctctggccatggatagacaaatgccaaaacaacctggaggaaataaaattttgcttggatcctgctgaaggagagaattctattgccaagttaaagtctctgcagaaggaaatggaccaacactttggtatggtagaattactgaacaacacagccaatagcttgctcagtgtctgtgagatagataaagaagttgttacagatgagaataagtcactgatccagaaggtggacatggtcactgaacaacttcacagtaagaaattctgtctggagaacatgactcagaagtttaaagaatttcaagaagtttccaaagaatctaaaaggcagcttcagtgtgcaaaggagcagctagatatccatgattcgctgggatcccaggcttacagtaacaaatacctgaccatgttgcaaactcagcagaaatcacttcaggccttgaagcatcaggtagatttggctaaaagacttgcacaggaccttgtggtagaggcctcagactcaaagggaacctctgatgttttattacaagtggaaaccatagctcaagagcatagtacactaagtcagcaggttgatgaaaagtgttctttcttagaaaccaagcttcagggcattgggcatttccagaataccattcgagaaatgttttctcagttcgcagagtttgatgatgaactggatagcatggctccagtggggagagatgcagaaacattgcaaaagcaaaaggaaactataaaagcctttctaaagaaactagaagccctcatggcaagcaatgacaatgccaataaaacctgcaagatgatgttagccacagaagaaacctctcctgaccttgttggaatcaaaagggacttggaggccttaagcaaacaatgcaacaagttactggaccgagcccaagccagagaagagcaggttgaagggacaattaagcgccttgaagaattttacagcaaattgaaagaattttctattctgctccagaaagccgaagaacatgaagagtcacaaggtcctgttggtatggaaacggagaca

SEQ ID NO: 15225 - DNA, 1232 bp, Homo sapiens
ttgttcattttgtccatatttttcctttagggggatgggattagtttagacaggatatctctgtgaagcactgtggctcttcggatttaagagaattgtactgccctttaagtaaaaagtaggaaagtgataactaaaaaacaaaaactggagaaataattaccatttctgtctgtttggacaccaaatctgtgttttctacaatcaattatataataatttgcgtttgtttacccttgttaccttagattttgctgcaagaattcgccactcggaaacctcaatatgaacagctgacagcagctggtcagggcattctgagcaggcctggagaagacccttctttacgtgggattgtgaaagagcaactggcagctgtgacccaaaaatgggatagcctaacagggcaattgagtgacagatgtgactggattgaccaagccattgttaaaagcacacagtatcaaagcctgctgagaagcctttctgataaactgagtgacttggataataaactcagcagcagtctggctgtgagcacgcaccctgatgctatgaaccaacagttggaaacagcccaaaaaatgaagcaggagatacagcaggaaaagaagcagataaaagtggcccaggcactctgtgaggatttgtcagcactggttaaagaagagtacttgaaagcagaacttagtaggcaactagaaggcatcttaaaatcatttaaggatgttgaacagaaagcaggtttgtctacttttaatacatatatttcctggtcagaaataaatgtcatatattgcctatttccaagatgttgccaataatccaggaccccaaagagactctgccccactgttaacatcagtgaagaggaggatgaatacaggagctcagagagcagttttgtgttcataggcacatggaatgttagggtcattctacacacataatctgttggcaaaattggcttcctgaaggcctattaaaatctcaggtaccccaaactggtttttaaaaaatgtaaatgttttttgctgtatgaaagtcttatttagccagaaaaaaacatgaatagttagtaaaaggctttgcatcatcttctcatctgctgttactttatctattctgtcatagaaaacttttctagagaaatgtgcgaaagagaggcatttgtcactattttcctctctcactgtggctataattctgtggcatatgtgatgatatttgtc

SEQ ID NO: 15226 - DNA, 1114 bp, Homo sapiens
acaatctccataaaaattatatttatataacattttttgcagttttgtgtatctgaaataagtaaaatcaagttgttcagtttgacacttggttttgttgctttctttttggttaatttgagatattttgtcacttgggataacgttatttgacctaatttattgagtttggtgcttgagatattgctaagtaacattttgtggtttgttttttgttacatttaaaatgtcttttttatttcacttgttatgcaattttcttgaattatttgtgactaaatagcattataagatgatccaaacttttatttctgaaaagcttatgactttatctactaggcttaataatgacaagctagaagtgacaaaataccatgtaaaacaaacttttatttctagacctctgctccaaatgtcctgaaaatgtgtcagtatagttgtttttcttactcctaggtttaacatccattaaaaaggacatgactgacataagtcatggttatgaagatcttggcctcttactcaaggacaaaatagcggaactgaacactaaactctccaaattgcaaaaggctcaggaagaatcaagtgcaatgatgcagtggttacagaaaatgaacaaaactgcaacaaaatggcagcagacacctgcacctacagatactgaagctgtgaagactcaagttgagcagaataaggtatattctgtgggtgcacctatggaagacatgaaagagaatggattagcagttggaacggagctctggtagtcagaagctctgctctgttttcttttctagctctgtaacctttagcacataattgacagttttgtttaatgtgcctttctataaagattgataataatagttacttttttttaaatttttggcacagccatgtcataggttagcaaactgttgggtgtaagccactttgccacctttaaatcagtttaagtctaggatgttaaccagtcaactactggaaaagatttatttaagggctaaatgtatgaaggatctgttctctgtagtataaaaatagggtagctaataccttccttttctttaatagagggtatttctttctacagctgccaaggttgggaaaa

SEQ ID NO: 15227 - DNA, 2139 bp, Homo sapiens
ttagcatgcgtgtgtatgaaggagggagatagggtgataatttttatatgtaaaagttaattcttcagaaatctttgtaactgtgtattgtcttgagaatggctgtgtgtgactcacctttttttcctccgaaagtaattttcaataagtatggctaatgtgaaatgtcagattgagaaccagtatttatttcaaagatttgctgttcggactactcttttgtctctctgtgacaattcaaatgtttatgcatccaaaaaaatctcttttcaaatgcagatgggatatatattaacttttaaaaaaagatttcaattttcagtatccattgggctcttttctttctttatattttaacattttaggtggtgttctgattatgcattaggaatttatcattgaactttttattttttaaattttttgtgtggaaattgtatgattcaccttcatgtgtttttgaaaagggatagggcaaagagaactttgtggttaatattcctgatctgtttggagtagatgacattgttgggagatatgaggatctgtccaagtctgttaatgaacgaaatgaaaaactccagataaccttgacccgttcactgagtgtgcaggatggcttggatgaaatgctggactggatgggaaatgtggaaagttctctgaaagaacaaggtcaagtgcctttaaactctactgctcttcaggatattatcagtaaaaacattgtaagtgactttaaaaaaaagtcccattttcagttttttaaaaaaacagttttataagctcaaagtgtagttagatttaagataaacttaaggacacaaaaaagagacatttactgaatatgagtgtggaaagtaatgcttgcacaaaatcaagtgtgtaaaatggtttatctgtgaagaagtgtaggaaggactttgtgtactttttcttgaatattattcattatagagggcttatgcatacattgagtcttatcttgtttatcattgtttcagccagctgcacatgaggttaatcagatcagtcttgtctagtcttttaagaattaggaccatggctaatccccaggctccattagattctaggggttgctgagtagcagcagcctcctgcctctttcgaccaactagccagctgttcttcactctctcagagagatttaagatggcattcctcaagggacagaccaaacttgtcattcagtttcaactgttaaccttcctaggcacaggttgtgcaagcttatgttgttaggaatagtcatttaaaaaaattctgtcacattatttataagcatcataataaaagatatgcaatatttggtttattttagatgttggaacaggatattgcaggtcgtcagagcagtataaatgccatgaatgaaaaagtgaagaaatttatggaaacaacagatccatccactgcatcctcactgcaagccaaaatgaaagacttgtctgctcggttttcagaagcaagtcataaacacaaagaaactcttgccaaaatggaggagctaaaaaccaaagtagaactgtttgagaacctctcagaaaagctccagacatttttagaaacaaaaactcaggctcttactgaagtagatgtgccaggaaaagatgttactgaattgtctcagtatatgcaggtatgcctcccttactactcaggaggctaatcagatagattaatagttagggcaaactcatatacttagtgccagaattataattggcaatcattttaattgcttatagattagtaaagatctatgttttactcctttaagaatttcaaaccttatcttttccttgaagcctttgctgattgattggaaataaatatcatttatcacatgtatcataggtagtataagtatcatcttacgtaccagaagccacaaagagacaaaatatagaatgcattttaaattaaataaggtttactgtgttccctttcaaatagcctatatgcatgtttattatatttagaatactggccataggcagactcattcttatgtgaaattatgaatagagccattctgatcccgcacagacctctggatggaatgccatttgaagatctagcaacatttatattgactgaatatcttaatgctttgta

SEQ ID NO: 15228 - DNA, 1176 bp, Homo sapiens
aggtccttattcaaatatgtggtgcactattgctatgtcaaaaagcttaacagctacttgatttattattaatatccagtggtagtaaataaggattatcactaaggattattatgggattctgggtttccaggtacataattgaccaagtactacaaaaggtttgaagagttggctttgcttaactttttcttaatatttaagtgaggttgtgaaactttcttcttgtgaaatgtgtgatcactcatcaattatagttaaaattttggaatgtatttttaagaacaggggaaacttcaaagtaactgcctgttgctctgaggtttaatttcagttgttaagttttcaattgtgtcagtttttagtaccctcattctaatttaaaatgttctaagtatttacttttggaatgtcttaaaactatgccttggcccacgttctgaattcctcctgtgaactttcccttcccaggtagcagcagtgaagcagctggaagagagcaaaaccaaaatagaaaaccttttggactggttgtcaaatgttgacaaagactcagaaagggcagggacaaaacacaaacaggtaatcgaacagaacgggacccattttcaagaaggtgatggcaagtcagcaattggagaagaggatgaagttaatggtaacctgttggagactgatgttgatgggcaagttggaaccactcaggagaatctgaatcagcaatatcagaaagttaaggtgtgttgttataaacatatgatatcgttcaattctatttccaggttggtaaagagagaaataacctagcacatgagttcttttcaaaccttactgacaaaagaggtttttttctgtgttcatcatgtcagatataaattattatgagagttctaagcaagtcaaaaaataatgagaaataaattgtagagttggcattctccatgtaagtgaagtagaattattataaagatttaataataatagttaacatttataggacagttaaagtgggcactcttctaagttctttccattttaactcattttgtcttcccagttactccttggggtttttattttcatcttacagatgaggaaactgtaactgacagtattaaagtagctttctcaagttacatatctagaaagggctggaatttggatttaaaactaggc

SEQ ID NO: 15229 - DNA, 1279 bp, Homo sapiens
aggcttctggcctgagagtcagaaaactgaaattctggcatatttcattcatatttcaaatccctcaaagtattatttatatcttaccacaattacatggatgttgtaaatgttagcaagtcatattttaaggtagatgtttctcttcagtgtgctaaatatacctaagttaggtctttgccttttgtcagagttatattttaagtgcaatgtgacaggtaaagataaaacatttttagagggattatttgtctttttatataatactaactaccatggtatttaaataattaatttatcatttattactagatgataaatagatttttgatgaatagcaaaaaaattcataaaacttccattccctgatgtgagaaatgtatttacaaaacataaatattattgttaatataaattttatcatggcttaactttctactgatagcttgtactacttttttaacagaatgtattaaaagaccttggacataccaaaatgcagctggagactactgcctttgatgtgcagttcttcatttctgaatatgcacaggatctgtctcccaaccaaagcaaacaactgctgaggctcttaaatacaactcagaagtgttttcttgatgtacaggagtcagtaactacccaggtggaacgtttagagactcagttacatctagaacaagatcttgatgatcagaaggtttgcctttcttcgtggagttggcattcattgtttttagtgtgaaaccataatgtagatacccaaggagtatagtgtgacaggaaagattttctggaaaggcattaatggataagatacagtgtacatacaaatcctacagtgtataacaatattgttttcactaatgatgctataatttagttgatttgaatttttgtgactcccaaaaatacttaacttcaagtgagagtcttgattgcctcccaccccaagactaggaaatttgaatgcacttagaaatttaacacattgaggaacatatgactaaagaaggttaagagtttcgttttcctctgggaaccaatacagcacagcaattcagatcatgggctctggagctagattgcctgatttcacatcccagctgcactactcattcattctgtgaactagggcaagttacttaacctcagtttaatcattggtagattggaaataacaatagcgcttacctgctagtgttgtgagcattgataaaaagaatgtatgtaaaacatttagtaccttgcctagcatgtgttaggctcttagtaaacg

SEQ ID NO: 15230 - DNA, 1907 bp, Homo sapiens
taagtcatgataaattgatgcacagtcagggaagttttaatgatacacacaccccagagagcaatggaaataagtgtgaagccccagccttatcattcagtgacaaaaccatgttgtcaggtcaaagaataggagaaaaatttcaagaccagtttctgggaattgcagctattaacatcagtttaccaggagagcagtatggacagaaatctttaaatatgatttctagtaatcctcaagtacaatatcacaatgataaatacatttcaaatacttctggtgaggatgaaaaaacacatccaggttttcagcagatgcctgaagacaaggaagatgagtctgaaatagaagagtattcctgtgctgtgactccagggggtgatactgataatgccattgtgtctcttacttgtgctacaccattgcttgatgaaaccatcagtgctagtgactatgaaacgtcactgctgaatgatcagcagaataacacaggaacagacactgatagtgatgatgatttttatgatactcccttgtttgaagatgatgaccatgattctttgcttcttgatggtgatgatcgtgattgcctgcaccctgaggactacgacacactgcaagaggaaaatgatgagacggcttctcctgctgatgttttttatgatgtctcaaaagagaatgaaaattccatggttccccagggggcaccagttggtagcttaagtgtgaagaacaaagcacattgtcttcaggatttccttatggatgttgagaaagatgaattagattctggtgaaaaaatacatttaaatcctgttggctcagataaggtgaatggacagtcactggaaactggatcagaaagggaatgcacaaatatccttgaaggtgatgaatctgactcattgactgattatgatattgtaggaggaaaagagagcttcactgcatcattaaaatttgatgacagtggcagttggagaggaagaaaggaagagtatgtaactggacaggaatttcactccgatactgatcatttagattctatgcaaagtgaagaaagttatggggattatatatatgacagtaatgatcaggatgacgatgatgatgatggcattgatgaagaaggaggaggtataagagatgagaatggaaagcccaggtgccaaaatgtggctgaagatatggatatccagttgtgtgcctctattttaaatgaaaacagtgatgaaaatgaaaatattaatacaatgattcttctggataaaatgcacagttgtagctctttagaaaaacagcaaagggtaaatgttgtacagctagcatcacctagtgaaaataacttagttactgaaaaaagcaaccttccagaatatacaactgagattgctggaaaaagcaaagaaaatctgttgaaccatgagatggtacttaaggatgtattgccgcctatcattaaagacactgaatctgaaaaaacttttggccctgcaagtatttcacatgataataataatatcagttcaacttctgaattaggtactgatctagcaaacacaaaggttaagttgattcaagggtcagaattgccagaattgactgattctgtgaaaggtaaagatgaatattttaagaatatgacaccaaaagttgactcatctcttgatcacatcatttgtactgagcctgatttaataggaaaacctgctgaggaaagccatttgtcattgatagcctctgtaactgacaaagatcctcaaggaaatggaagcgatctcattaaagggagagatggcaaaagtgatattctaatagaagatgaaacatcaattcagaaaatgtacttgggtgaaggagaagtgcttgtagaaggtctagtagaagaagaaaataggcatctcaaa

SEQ ID NO: 15231 - DNA, 1110 bp, Homo sapiens
gttgaaccattcattggactaccttatcgttatttcaaaactgaactgccatttgatgcaagccttactattcaagacactgtaattgataataattaaggttaagcttccacttttcttgctttttaagtttagcttcttgggcttgtccctagaataatcactgtcactaaattgcacaactcagggagcagaatgtttatattcaacccaataaggaatgcccttgggggtgtgcctcagggtgctgcagccttgagttctttatacatacccgtcttgtgcttagttcattgcagtccaattattttgtctctcccatctctacatcttccaccctcctgatggatatcgctggacaccgtgactattcggttactattctcttaggttacgggacttagagggcattggcaaatcactgaagtactacagagacacttaccatcctttagatgattggatccagcaggttgaaactactcagagaaagattcaggaaaatcagcctgaaaatagtaaaaccctagccacacagttgaatcaacagaaggtatgtaaaaataattccctctactgaggttatgtctgcatttggtcagtcatgctcctcatcttcctttcctatgttaaatgaaaaagtcaccaactctttagaggaaggtggagagtatataaaaaatattaaaatcttgcaacccaaacctacatacatgacttatttttatttcttggaagtaatttttgaaagcatgggtaatcagaaagtggagagtgttgggatacttttcaaattcctaatgataatttatttaatcataggtatagaaatctctttgacactttgctggcctcaatagttttctaggttcctaaataagtaaaaatggttagcaatggaaaattaaataccacatttgacagaaagttgaatgctttgagatttttgttctatcttaggggccaatcatctctagctctattttcttcagaaataggtggtggccaagggcatcaagtctgcttttggataattcctaaggagtttagtaatttctgctttgaaaaccacatggggtgggtcacttctgtggcttaatctgaaagttt

SEQ ID NO: 15232 - DNA, 1200 bp, Homo sapiens
tgtatttctttagcaagtggtgaaactattgcaaagcaatttttaaaagttatctcagtgatttttaatgcatgtatttctttttaacagtgggattagtaggcacttaaaagcagacaatgaaaaagacatattttattaatggaggtagcaaacttgcttatggaatatattttattttgttgatatgcaaattttattaggctgaacgttataaaattgtcattaaaaaatcagagtacaaatattgaaaatttcataaggtttgaactaatataatattgtgcatatgaaagatattctttcctttatcttattttctacctgtcatttgtaaataaattgtaaaattaggtaaataatatatttacccagtgagtggttaacatttttataacttttaccaattaatgtattttagcaatggagatctgaagtagatgaaaagagacaggtattccatgccttagaggatgagttgcagaaagctaaagccatcagtgatgaaatgtttaaaacgtataaagaacgggaccttgattttgactggcacaaagaaaaagcagatcaattagttgaaaggtggcaaaatgttcatgtgcagattgacaacaggttagtatccttttttgttcagttttagcacagatttaatgtctatctatggtaaatgagtaaaatctacacatatgaggctatttttttacttccatagttaatttgttaattacaatacctctacttagccatatttctttcttacttggaggactttagtaagacatttaacttaaaataagcattttttcaactctgttactattcatgtattctagcatttatatagttaatctgcttgccttttctgaaggaaaaaacaatgtagttctctaattattaccaacttataatattcaaataaccatgacttagtaagagcatgaagcatgcatgtgatagggctgtgtgtagcttctatactggacttaagaaatgtaaataaatggaaatgccctgatgttcattttaattgaagatacaagaaagtcaaaattctcagttactgaattaaaaaaggttttagggttcatcttaaaataaatgaattcgtgtcctttctcattcactttcgtgcttatattaatgcaaataaaatgcttttatgatacagtgccattctccaaaagtaaaattatgttc

SEQ ID NO: 15233 - DNA, 1720 bp, Homo sapiens
cctagttaacttttgttaaatacagattttattctgaactttaaaaattttaattagagacaattttattagtaatattctattttttaaaaatcttaaacattaaatattatttacctaatatttacttttaaggatttttatttgatttttgtaattaatttttgcagctaatataattcacatttttgtgaacataaaatagcaacgtattactttggacagcatttaatcggaaattggtacttcaaatggcatttgggaaattttattaattcttcttaaattttaagatttatgttttaagatttatatccttagaatgggtttgtgatgaaaacaggaatcatttgcttgactagctgtgtcccagtaatataaaattctcatattaaaacataaacagaagcttctaagagatagaaaacaaggtattttctaaacatatttattttcacagaggagcaagaggaatcagtttataatctctacatctctgaagttcgaaacattagacttcggttagagaactgtgaagatcggctgattagacagattcgaactcccctggaaagagatgatttgcatgaaagtgtgttcagaatcacagaacaggaggtgagagctataaatatgttgggaaaaaaactaactctcttaatgaccttatgtatcaactcttgtgacttcttaatgttcagttttgcacactcacactagccagtctagtgtgaggtgaggtctgattgtgtaattattgctgattataaactaggattcagtctacctctgactcaggtaaacatgagaatatgtacacgctcaccttcattgtgatgaaggatataaggacttgtaataaaagtcattatacacctgctgtgtgcaaaagtactaagttagatgttgaggctaaggagatgaacagtaagggaattattgattgtaaaacttgaatgctatgatgtagtttctttgataacaaacaaagaatatgtagatttctaagtcattggttcttaatgtgaaatgtgtgtttttcaactagtttaagaaaaacacctcatcacaggtgatggcctgatacctttgtttgttctctgttttatagaaactaaagaaagagctggaacgacttaaagatgatttgggaacaatcacaaataagtgtgaggagtttttcagtcaagcagcagcctcttcatcagtccctaccctacgatcagagcttaatgtggtccttcagaacatgaaccaagtctattctatgtcttccacttacatagataagtatgtaactgctatctcaatatataaattgcttcatacaactctcatttttatttactattaatttaaaattttatttttattaatataaatattaacttttattttgtcttaagaaatacattattggctgggcgtggtggctcatgccggtaatcccagcactttgggaggccaaggcaggtgaatcacctgaggtcaggagttcggtaccagcttggccaacatggtggaaccccatctctataaaaaataccaaagttagccaggcatggtggtaagcgtctgtagtcccagctactcgggaagctgaggcaggagaatcacttgaacccgggaggtggaggttgcagtgagccgatatcgcgccactgcactccagcctgggtgacagaggaagactccatttcaaaaaaaaaaaaaaagaaat

SEQ ID NO: 15234 - DNA, 1154 bp, Homo sapiens
acttggaaaacacctccttaagttgtattaacaaatctgattaggaaagaagaacgtagaattttcaatactgtagagttttggtttagtaaaaagagaataaatgcttttaaattggacacaaatgagttaaatctgactttttcaatctgttgttaacctctttgaaactcagatttcctatatgtaaaatggataaaatttatttatttcctatatgtaaaatggggaaaatttataagggagaggtatgagggctaaataaaaataattatatagaatagctaatggtttgataactttctacatgtggcacattctcttaagtgctgtacacatgttatctcattcaaatctcttaacaatctcatgaagcgggaattgttattatcctaatcttagattttggaaagtgcttggcacatagtaggttcttaatctgagttagcttccttccttcctaaaggtttaacactttctgttatatctagatatctgatatccatgttactggagagtcagaggatatgtctgcaaaagagagattgctactctggacgcagcaggcaacagagggttatgctggaattcggtgtgaaaatttcactacctgctggagagatggaaaattatttaatgccatcattcataaatacaggtatggaatttgtgtattttttccttatacaactgtaagacacatttctttcatctctgaattttaaaattatcttttattattatagaagcaaaagcatggcaaaaaattagaaaatacagaaaaattaaaataaaaaattggccaggtgcagtggcccatgcctgtaatcccaggacttagggaagccaaagtgggtagattgcttgagcctgggagttcgagaacagccttggcaaaagggtaaaaccctctctctacaaaaaaatacaaaaaattagcttggcatggtggcaagcacctgtatttccagctactccggaggccaaggctgcggtgagctgtgatcatgtgactgcactgcagcctgagtcacagggtgagactctggcttaagaaaataaaaaaaaaaatttaaaaatcacatttccactacttagaggccatgattctgaattgtagcttatacacacacacacacacacacacacacaca

SEQ ID NO: 15235 - DNA, 1179 bp, Homo sapiens
aaaccataaccgcctttttatcatgccaaataaggatatttccctgtttgacttaactgcaccaatttcgaatttataataatttaggtagaatatgaattgtagttttattctttcacaactcctgaagaagtagtactgaaataaatttgtaatgaaaaaacaactttagataaggcagctacctaagataatacaatgtttttgagcattttttgtgtgtattttaaaagcattaattttcttatcaataattaatatgttaatatattgatatttatgttacctctattttttcaagtaggctgtctaaggaactctcccaggagaacctgacagctaattttttatgaacgtacttgtttgatgtaaaaaaattgcattgaaaaatattttaatttataattttcactaaagcaaactatccttcttctcgtcacccagttagtataagccagtgaggcgatctcatttgggacaagccttcttttattatttatgtttctttctaaagatagctgattgttttccagaatactgtatcctttagatatagaacttctttaagagcggactgtgaaccctttatgtggctgatgttttgctccctactgcagagctcactaggatgcctgcattttacccaaggttcattaatggaatgactcttccagtttcctttttttcctgagggacctttcctctattattgtgtacagattgggctcttgattttacctgtgattgatttgtttttgcttaagataatagtttacagggaagcttttatattggtcagagatattatggcctcattctgtttaaaattcgtagttttctttgtgtaggaaaagttcaagcttcttaacctgggatataaagcctctatgtccaccggcgcatcgttccagcctcatcttccacctcatgcttcattgacttcaccactgctttccttccttgcaactcatatgtagttttgtgtgtccttgcctttttcctttgttcttgctcctccctccacctgcaacattcccatcttctttgctgggaagacctcagactgggttaagctcctcatagcttcctgagtgttctctgaatgcatttattttatactgcaatttcttgcctaaatttctttcatttcagattacaggcttcaagaggtggcactct

SEQ ID NO: 15236 - DNA, 1233 bp, Homo sapiens
caaatttgaggggtctgaatacatcacctagtattatttgcttggcagccaaaaacagttgtttttattgacagacttaattctgtaacttctgcgttttttcatctgcttgatcaaggcattttggatgtactgctaatggaatatggcactgttttacggtttatgtggcttctgttcttgccacagttgttgcacagtggtaattgatgttttctctggtgccacactttttaataatctattggaagctcattcctcctcccccatcataaccatattcagcacccatttttaaatctacttttcttccttatttgtgctacagaggttgatggcgtaaattttcctacttggaagaaattactttatcagttaatttcagggtactgtattgatcttgtttgtcctatttgtagattaaacttgaactagtcttaataaaggggatattgttttgcaaatttagcccagtcatatcaagagttaatatttatcttatttttctgtattttactcaaaattttatttccacttctgtagaaataggtccatgccagtgttctctacaaagtgtctttcaaactaaactctagaagaatatcgattacctgaacagaaacaaaggcctaagaaatcatacatttttgtagcttatgtgtattgcaccaatcaagcaatcccatgtgctcttgatattggcactgtagttttatcttagaggacttgccactggagaactcagtggtgagagaccttggaaatgttttatgtggctgcacataagtgtttctgactagctaaggctacttcagacttttcactttccatttgtccccttttccttccctgaattagatgctatgtcataaacttggtggtttttgaaatactcttatttcaaaccttaaactaaaccgaaataagttatgcctgagaatgcgtttgtctgaaacgattttggcacttccctttaatatgcttccccttccctttgccttttaaattgtggttaaaaaaaaagaaaaaaaaaggcacataaagctgagcaccttaaccattttttaagcgtatggtagtgttgactatatttgcattgttgcgcagctcctccattcttaaatatttgtaagatgatgttgctgttctcttttcctcctgtgatatttatgttgcccagtaataagtaaaagtatcctttcttagttactctaactgatatgcccaagtgtc

SEQ ID NO: 15237 - DNA, 1132 bp, Homo sapiens
cagtagttaaaacctggttctgtgaatgcaatcagcgattcccaagtgaagatgcagtagaaaagcatgttttctcagcaaacacaatgggttataaatgtgtggtctgtggaaaggtatgtgatgattcaggggtcattcgtttacacatgagccggattcacggaggggcacatttaaataactttcttttctggtgtcggacatgcaaaaaggagttaacaaggaaagatactatcatggcacatgtgactgaatttcataatggacacagatatttttatgagatggatgaggtagaaggtgaaactttgccatcatcctctacaacattggataatttgactgctaacaagccttcatcagctattactgttattgatcattccccggcaaatagttctccgaggggtaaatggcaatgccggatttgtgaagatatgtttgattcccaggaatatgtaaaacagcactgcatgtctttggcaagccacaagtttcatagatacagctgtgctcactgcagaaagccttttcataagatagaaacattgtaccgacattgccaagatgagcatgacaatgagataaagattaaatacttctgtgggctttgtgatcttatctttaatgtggaagaagcatttctgagtcattatgaggagcaccacagcatagattatgtatttgtgtcagaaaaaactgaaacttcaattaaaaccgaagatgattttccagtaatagagaccagtaaccagttaacttgtggttgccgtgagagttacatctgtaaagtcaacagaaaagaagattatagcagatgtctccaaatcatgctggataaaggaaaactgtggtttcgctgcagtttatgttcggcaacagcacagaatttaaccgacatgaacactcatatccatcaagtgcacaaagaaaagagtgatgaggaggagcagcagtatgtaatcaagtgtggcacctgcaccaaagcatttcatgatcctgagagtgcacagcagcatttccatagaaaacattgcttcttacagaaacccagtgtggctcattttggatctgaaaaatcaaacctgtacaagtttactgctagtgcctcacatacagagagaaaact

SEQ ID NO: 15238 - DNA, 1198 bp, Homo sapiens
aacacttccagtacgggaaaaaaaaaaaaaaacctatttagagatttttaagtgactcattcaacacacttgcccagaaggcactaatatagaatttgtagattttaaaaatacagtatgggcaggcaacgcgctgagggactaggcagagccgtggaaccgccgccaggtcgctgtcggtccacgccgcccgtcgcgctgcccgcccgctcggcgtcggccgccgccatgggagtgcacgtggaaaccatctccccaggagactggcgcaccttcccgaagcgcagccagacctgcgtgatgcactacaccgggatgcttgaagatggaaagaaatttgattcctcccgggacagaaacaagccctttaagtttatgctaggcaagcaggaggtgatccgaggctgggaagaaggggttgtccagatgagtgtgggtcagagagccaaactgactatatctccagattatgcctatggtgccactgggcacccaggcatcatcccaccacatgccactctcgtcttcgatgtggagcttctaaaactggaatgacaggaatggcctcctcccttagctccctgttcttggatctgccatggagggatctggtgcctccagacgtgtgcacataaatccatatggagcttttcctgatgttccactccactttgtatagacatctgccccaactgaatgtgttctgtcactcagctttgcttccgacacctctgtttcctcttcccctttctcctggtatgtgcgtttacctaaactatatgccataaacgtcaagttattcattttactttttcattttggggtgaagattcagtttcagtcttttgaatataggtttccaattaagtacatggtcaagtgttaacagcacaagtgataagttaacgttaggataggaattggtgttgagggggttgcaagaatattttattttaattttttggatgaaatttttatctattatatattaaacattcttgctgctgcgctgcaaaaccatagcagatttgaggcactgttgaggactgaattattctccaagttgagagatgtccttgggttaaattaaaagccctacctaaaactgaggtggggatggggagaggctttgcctccaccattcccaccccaccctccccttaaaccctctgcctttgaaagcaggtcatgttcactg

SEQ ID NO: 15239 - DNA, 1140 bp, Homo sapiens
tttcgtggacttacgtgtaaatggatttgtgagtcgactgttgtaaccaatactcaaacgaagatataaagaaaattaactttttatgattttttccatttacactgatgtgcctgttcatattcctttctgcatcaggtcacagcctaattaatcaaaagataaattgccacaagagaggtgatggttgtctataagacactaaatattactgtagggggcttttgccttgtttcatttttttttttttttcctcccagaaagcggcgtggagcttttaacagcaagcaacttctgtatttggagaagtatcgtcctaaaatgcggctgcgtttcaaagattccaacggtcatagaaacaactgttgcattcaataaaattggggtgcctaatgctactggaagtggaacttgagatagggcctaatttgttatacatattagccaacatgttggcttagtaagtctaatgaagcttccataggagtattgaaaggcagttttaccaggcctcaagctagacagatttggcaacctctgtatttgggttacagtcaacctatttggatacttggcaaaagattcttgctgtcagcatataaaatgtgcttgtcatttgtatcaattgacctttccccaaatcatgcagtattgagttatgacttgttaaatctattcccatgccagaatcttatcaatacataagaaatttaggaagattaggtgccaaaatacccagcacaatacttgtatatttttagtaccatacagaagtaaaatcccaggaactatgaacactagaccttatgtggtttattccttcaatcatttcaaacattgaaagtagggcctacatggttatttgcctgctcactttatgtttacatctcccacattcataccaatatacgtcaggtttgcttaaccattgatttttttttttttttaccaagtcttacagtgattattttacgtgtttccatgtatctcactttgtgctgtattaaaaaaacctccattttgaaaatctacgttgtacagaagcacatgtctttaatgtcttcagacaaaaaagccttacattaatttaatgtttgcactctgaggtgcaacttaacagggagggcctgagaaaagaat

SEQ ID NO: 15240 - DNA, 1228 bp, Homo sapiens
tgtaaataaaacaagcctactttatggttttaataggtatgggataaaaatttaaaatatttgattttagctcttttatgtggacttattgtaaaagcagtgtctgatgcttaatttgtgaaaaggttgtggttaaaaacaatagtttttatgctttaagccatgtaattcttttgtatgtgtcaagttaatggactatatacatagtttttttttcctaaaaataatgaactgagtaaacatttagtaggatttctggtaaaatgatatactacatgcatgatgaagaaacattatttagtaaagattcgttctacatttccaaatgtatattctaaaaacaagtgaggattttttttttaaacaacaattcagaaataccttaagtgtgttcttagactcaaaactattaaaataatttggtattaggtgattttcaattgatagctttatttcttatggtattttttttgtctttctatagggctgaaagacacacagaagtcttcatggatatagttgatacatttaatcatttaattcctactgaacacttagatgatgccctatttctaggatccaacctggagaatgaagtctgtgaggattttagtgcaagtcaaaatgtcttagaggactcgctgaagaacatgctcagcgataaggatcctatgctaggatctgcaagtaaccagttctgtttgcctgttttggatagcaatgatcccaatttccagatgccttgttcaacaggtaattcttacttttttttttttttttttttttagtctgcaatttaaaataaaaaaattttcagcagctttttcttttttctttttttcttttttttttttttaatgaggagggtagtaaatttagggttatttcctttgaatttagagcttcttttccaggcatcagaattaaaatttaaactaaattttcttccaaggagtgtggagttatcctcaaggatattatggatataggtagggtgaccatataatttattatccagtatgggacacttactagaattacagagagtactttaataattacatcatgacaacaggtgtaaattgggactctttagtaaatagggattgcccggcaaattgagacatgtggtcaccttaggcctgctggagtcgggggatggctgaattgacctttctcagcatacctcccagcccctgaaatatttacattgtttgctcccatttca

SEQ ID NO: 15241 - DNA, 1149 bp, Homo sapiens
ttaatggtaaaggaagctcattttacttacgtcactcctaggttactttttatggaaaagagatttgatgaaaacatttcttttaataaggtataatattagtctgaattttttagaggcttttccccctgctagaattcagagaactttgataaatataaaatttgacatatgttaaattatatatatgtgtatatatatcatgtcaccattatgagtactgttcaatacatttttgttgagcaaattatagctcagaataaagaagtgatatattctaaattgtattgaaataaaagcacatgacaaaatagctaagtatttttatttattttttccccctgtgatagaacaagtaagaagtttgcgacagagcactattgccaagcgttcaaatgcagcaccattaagtaacacaaaaaaagcatctgggaagactgtatctactgctaaagcaggagtgaaacaaccagaaaggagtcaggttaaagaagaagtatgtatgtcactgaaacctgagtaccataaggagaatagaaggtgcagccgaaatagcggacaaattgaagtggtacctgaagtatcagtgtcttcaagtcattcttcagtgtcatcttgtcttgaaatgaaggatgaagatggattagattctaagcataagtgtaataatccgggagaaatagatgtgccatctcatgaattaaattgttcacttctttcagagacttgtgttactattggagaaaagaaaaatgaagctttgatggaatgtaaagccaagcctgttggtagtccattgtttaagttttcagataaagaagaacatgaacaaaatgattccatttcaggtaaaacgggtgagactgttgttgaagaaatgatagcaacaagaaaagttgaacaagattcaaaggagacagtaaaattatcccatgaagatgaccatattcttgaggacgctggatcttctgatatttctagtgatgctgcttgtacaaatccaaataagacagaaaacagccttgtaggtttgcctagttgtgtagatgaagtgactgaatgtaatttggaattgaaggataccatgggtattgctgataaaactgagaacacccttgaaagaaataaaattgaaccgttgggttattg

SEQ ID NO: 15242 - DNA, 1238 bp, Homo sapiens
aggatgtcaaaaattaaactgcgctttccatcacaatagaggacgatatgttgatggccttttcctacctccgagcaaaagtgtgttgcccactgtgcctgagtcaccagaagaggaagtgaaggctagccaactttcagttcagcagaacaaattgtctgtccagtccaatccttcccctcagctgcggagcgttatgaaagtagaaagttccgaaaatgttcctagccccaagcatccaccagttgtaattaatgctgcagatgatgatgaagatgatgatgatcagttttctgaggaaggtgatgaaaccaaaacacctaccctgcaaccaactcctgaagttcacaatggattacgagtgacttctgtccggaaacctgcagtcaatataaagcaaggtgaatgtttgcattttggaataaaaactcttgaggaaattaagtcaaagaaaatgaaggaaaaatctgaggagcaaggtgagggttcttcaggagtttccagtcttttactccaccctgagcctgttccaggtcctgaaaaagaaaatgtcaggactgtggtgaggacagtaactctctccaccaaacaaggagaagaacccttggttagattgggccttactgagacactggggaaacgaaaattttcgacaggcggtgacagtgatcctccattaaagcgcagcctggcacagaggctagggaagaaagttgaagctccagaaactaacactgacgaaacaccaaagaaagctcaagtttccaagtctcttaaggagcgattaggcatgtcagctgatccaaataatgaggacgcaacagataaagttaataaagttggtgagatccatgtgaagacattagaagaaatgcttcttgaaagagccagtcagaaacatggggaatcgcaaactaaactcaagacagaaggaccttcaaaaactgatgattctacttcaggagcaagaagctcctccactatccgtatcaaaaccttctctgaggtcctggctgaagaagaacataggcagcaggaagcagagagacaaaaaagcaaaaaggatacaacttgcatcaagctaaagactgatagtgaaattaaaaaaacagtagttttgccacccattgttgccagcaaaggacaatcagaggagcctgcaggtaaaacaaagtccatgcaggaggtgcacatgaagacggtggaagaaattaaactggagaaggcactgagggtgc

SEQ ID NO: 15243 - DNA, 1167 bp, Homo sapiens
tacctgagtttgaaatggatgaagacagctgctaccattaaggaccaaattttatgctaccactaaacaaaaatacccactcagtctgtgttagattgtatgtctttttaaaggtatttagagattcaactaagctttaaagagggctgagcagctcaggaagcctgtaatgtgggcataactctttggacctgatcttgatgcttctgctgctctgttggcctctgaagagcaatatctaatttattattactgtaattttttaaaaggctttaaagtgcctcaggggtcccctgaaactaattttctatttctgggattccctggattcattatatgagatggtgacatgattagaggaattcttttttagtatgaaaattgtcccttttcttcttcagtacttgcctccttgctggcattgaattaacacagggacaaaatatggttaattttttatttctaattctcccaacaaacccctgttgcccagtatttatgtggtggcctttaaccacctgagggaaaaaatgagcttattcaagctgccaatatttatctatgggctgtagcagtacactgaattgtactgtgccagggatattgagatgctctgggggtatattgtatacctgccagttttcttcatttctgaattgagttttcttttcttgatgttggtttccttcatatcacctcaaggtttagatttgtgaaggaataagcatgatggaaataatagtcttgaaaggagatatgttgtatataatcaggaggaagaggaaggaaggacttacccattttgatattttgctgtaggtggccagttttgtttctcatagggaaatctgacccccacctgtcatgttggctcctaaggaactgctgttgtaagcggctcatcaagagttgaacttcacgtagccttgttgggaatatggaaaaggaagaaagccacaggactgcccattcagtcttgttaagattgggatgattctgcacaagcaaaaatgacttgaaatttatgtatcgacacacctctaccaatccatcttcagctgactgaatgttgtatgatagcccttctccaaagcaggggtagaatgttcaggtttcaccacggattttctacttatttcgcttttggaatcagcttacagattccag

SEQ ID NO: 15244 - DNA, 1176 bp, Homo sapiens
tttagtcaggcttttcaaagaaatccgcattttaaaagccagcatttatggtccaaaatatgggacgggaatcagagctggtagaaaaatatgaaaagcctctttacaccctgagtatttgaaacaatccgatgagcataggaagtggctgccaacgctctggcggctgctcgtgctgccgccgctgccgctgctgttcctcgcatagggctggacagagctagtcccggtttcagcacctccggcgctggacagctctctgcacgccgcaccgccgcctgcttgctttttcccactctcgctttgcattactggagatgcatctaaattacatcctgttcaacaacaagtagatttttttttcctgtacaggaattacagtagacgactctctcaattaaactgcattttcttctttacggatttggctatcaggcgtatttatcccgatttcctcccccctcactcccctttgcaggaacgagtctttgggaacgtggtccacccagggatgtaaaactgtgcttaccgatgcatcccatacgaaatgcttatgtgatcgtctctctaccttcgccattttggctcagcaacctagagaaatagtaagtaacaaagggaaaacacggctttaacgcaaagacagggatattgtggctagtgtttctccagggaactgcattttaaatggggaaatggaaaatgttgcagggtacaaaattgggttcgtctcctccttagctatagtagcttggtggaatgaattctagttggtattctataactaaattctactcaattttatgtcttctaacttgaaatttctgcagtgtagtttcaaggatgaagtccaatcatgtcactaatatgctgcaaactttcaaataaaaataattgtcaacttaacctttattttaaagctggaaagatattctggggaattttagagggtattgttagtagtagaatgaagaccccagacactatagtgaaacacattgcatatctgcattggatattttcagtacaggttttctggaagtgtccttggatgtaaatataaataaataaatatatatgttaatcaaatgaagtttttgtgaaagcatggctgtcaggaactgtaaaattattccttaatagtatatagtttttcaaaaatagtttctgaaagag

SEQ ID NO: 15245 - DNA, 1196 bp, Homo sapiens
ttaaactaacattaggatttgctaactagctttcatcaaaaatgggagcatggctataagacaactatattttattatatgttttctgaagtaacattgtatcatagattaacattttaaattaccataatcatgctatgtaaatataagactactggctttgtgagggaatgtttgtgcaaaattttttcctctaatgtataatagtgttaaattgattaaaaatcttccagaattaatattcccttttgtcactttttgaaaacataataaatcatctgtatctgtgccttaggttctccagagtgatgtggaattttaaagtgtctctctctgattgcctccaaataatatttacaatatagctgatgaatgttactcccatatgcaaattgttttcagttttctgcataaaatctttagcaccactcaagtagatttcatgaaaagatttcaaactctagttagtgctctaagagcatggcgttccaagatgtgttatattgttcaaatatcagtccattagataacttacaacctctacagtatttaaggcatacatattgttataggtagcttttgttttgcatctgacctcaaaatgtgtatttcaatataaataggggtattgtcaagaataattaatcctggaaaaaaaaatcagtttatggattaatttaagatatatggcatcatattttggttttagagataatttttcattctaaagatttgaaatttgcaaaagatgtaatgaaagctgtatgacatcagtagggtattttgaacacattctggatagtgagaaataataaaaaattatattctagtttactaacataagcacattagaactcataaaaaagtatatatcatgatccttgaggtaaaatatcattaagtttctgaaaaaaagtttaggaattaacaactatatctaagttaattattctctcccttaatttttgtgccatttttctctgttctgattcttcatctctcttgataaaccttcacagctttcgtatttggcttctgcttctgcaactaccctttagcattattcaccaggatttcattcccttctgttcttattttacattttcttttttctttttttttaagatggagtttcactcttgtcgcccaggctggagtgcaatggcacgatctcagctcactgcaacctccccttc

SEQ ID NO: 15246 - DNA, 1654 bp, Homo sapiens
tatcatacaaagtttataggataattttagactattttacttcctaaaattttcttactccttagtagttaaagcacaatatcctagtgtaggtgaaagttagttagagtagcggactcattaaaatcccaagattgctttggtatttttttttaagtaagttgtggttaatctttggggaaactgtatctagaaagtagataaagaagggaacaaagtagctatttgctttaagaaatatttgtatggtactctgtttttattccagtgcttggactagttgtcacattaatgaaaaaatgaccaactgtgtggctaaagaaacaagaattaaaagtgaagtaagcctcttgaactaagccttttatatgtttcacagatgaatcagcagatggctggcatgagtatcagtagtgcaacccctactgcaggttttggccagccctccagcacaacagcaggatggtctggaagctcatcaggtcagactctcagcacacaactgtggaaatgaaaactgcaatacaagtttcatccagaactaccacctgacattccttgctgaaacgcatctagttcccctgtttattcatatgcatattttttttctttttacccatttgttcatattaagaatgatctgattgaccgtgttggtctgtactgattcaatttgatgtggtgaaaagcaggttgataaatcattttatgtcaagggcagctttgctcatatttcccatgatttcatgtactgcattatttgagaagctgctcaacttgcaaaatcagttttcctctcaataaaattatagctctaatgtttgcatataagggaagtagttatcatgttagtaatacctctaatagtataaaccccaccccaaaattagccagtaatcctgtaggaaggtactgtatgatcaaatgtttaatcatataaatagaatgtaaatgtctcactgagcactgttttctagtgtatcaaaatgctcttatttcatcattcacttcactgtgctgttgttatgatgtgcttaacagggaacgtgattagtgaaaggaagataaacgtggatgttactccaaaacttcgtttaatgaatgcttaaagaattcaaattttatctgcctctcttgtaatttggatctcttcttaatgtacatagtgctaacatgaagacctttttctgcactatatgcaaacagggtaactaactaaaacaaagccactttcaatcttcaatccttgaaggtatatctaggtttatgacagtaattgtgtttacattttatggtgcctagtattgacaaaatgttatttccctacattaaacatgactccatagaccttttcatttgtgggtttttatttcctatgatgtatactgccactaaccttccaaaaattacttagtattgcaaagtcaggaatcatcaggaacgtttagctgacaaaatacttgtctgttttaaaaacctgttcaagtctaccaacctgttcaagtctaccaattataagggcaaattggagaaaaagaaaaaatatatactcaagagtggtatcttgcagtatcggcactgtacaaaaaaatcttccaatttagttgttgtagagaaaacatgcagaacaaatgaagacaaaacatacattttg

SEQ ID NO: 15247 - DNA, 1147 bp, Homo sapiens
aggactgggaaatagtcatgagaagccacggacagaaattaaagatttataagaatgcctcaataaagtagatacttattaattaaaacaatttttaggtgactactgttagctgagggtgttaagtgggtgtgtgcatgcatgtaagcatgtgcatatagtgcgatgtgctaagtatgcatacttgttttctctatatatgtacatgcaacaaacagttgtttaaattgaaaacattcttacaattaaatttggtttcgcataatcatttatgaaggaaattgaaaatatttcatataaaatcaagaaatagagtatattttgttactaacatttacgttccccattctgtgtaatttgaatcatgttcatctttagattaacagttgctagtactgtatattctgcatttttgtttaatttattaatcatgtgttatttctaaattttatttaattgaagtcatttcaaaagcattgaaatcttaaaccattcagttcctgaaaggttcttcacatgttttaataggcttccattatgtgtttttgcagcaagcttagtagtggaggagcgaacaagacagatgaaaatgaaagtgcatcgatttaagcagacaacagggtctggttctagtcaagaacttgatcgcgagcaatattccaaggtaaaattagtagtatccaacaaatagtttcccttttaaaaatgtgtagtgtgtgtaccaggcaggattagaaagcaccgaattatataagagaagttatcatttgggccgggcatggtagctcacacctgtaatcccagcagtttgggaggccaaggcaggcacatcacctaaggtcagaagttcaagaccagccaacatggttaaaccccatctctactaaaaaatacaaaaattagccgggcgtgcgcctgtaatcccagctacttgggaggctgaggtaggagaatcccttgaacctgggaggcggaagttgcagtgagccgagatcgcaccactgcacaccagcctgggtgacagagcaagactccatctaaaaaaacaaaaaaagaaaaggtatcattaaatgatagtcctgcatcataatttctaccaaagccaaaaaaacaaaaaactctttcctcttgatattttcgtgtgata

SEQ ID NO: 15248 - DNA, 1181 bp, Homo sapiens
ctacctggcggacaagcatggttttaggcaggagtatttagatacattctacacatatgcaaaattccagtatgaatgtgggaattactcaggagcagcagaatatctttattttttcagagtgttggttccagcaacagacagaaatgctgtaagttcactctggggaaagctggcctctgaaatcttaaagcagaattgggatgcagacatggaagaccttacatggttaaaagagaccatagataataattctgtgagttctccactccagtctcttcagcagagagcatggctcgttcactggtctctgttttcttcaatcaccccaaaggttgtgataatattgttgatctcttcctttaccagccacagcatcttaatgtgtccacacattcttcactatttgactacagcagtcatagcaaacaaggatgttcgaaaacgttggcaggtgctaaaagatctaggtaaagttactcaacaggagtcttacacatataaagacccaattacagaatttgttgaatgcttatagattaactttgacttagatggggctaagaaaaagctgagagaatgtgaatcagtgcttgtgaacgacttcttggtggcttgtcttaaggatttcattgacaatgcccatctcttcatatttgagactttctgtcacatccaccagtgtatcagcattaacatgttggcagacaaattgaacatgactccagatgaaactgaaaggtggattgtaaatgtgattagaaatgcaagactggatgccaagattgattctaaattaggtcatgtggttatggtaacaatgtactctcaccctatcagcaagtgattgaaaagaccaaaagcctttcttttagaagctagattttggccatgaatattgagaagaaacttaatgacaatagcaggtcagaggctcctaactgggcaactcaagattctggcttctactgaagaaacataaggaaaagattttaaaaaaactctaaaagaaagatgaaataataaaactattatataaagggtgacttacattttggaaacaacatattgagtgtaaattgtgaagaattggaataaaattgactgattcaaaaaaatttaattcacaaaaaaattttaatccttttaagctaattatagattcacatgtagttgtaaga

SEQ ID NO: 15249 - DNA, 2041 bp, Homo sapiens
gtttccgaatttcggttttctcttttgttcaatggcaagagttcctccagagttcccgggacgttgtccgggtcgccagcaaagtggagccgcgggtcctgctccttaaggccgaggggatacggacccttctttggaacgtgtgaggcaggaactcgattcggcagctactgggtggtcctcgcaccctcaagcctggacgcccgctttccgaggttcaggtcccaccggttgttccctagaggaagaggcaagagcaccttgcccccagccattcccaagcccatgggattctggtgcgaaagacacaggtcaatgcaggtggaaaccctagttaacttggagacagctgggcccgggtgaggctctcccgaagtcgcgggaagcggaagagttggcaacctgctggaccgcagccagggcggcggggcatggactcagggtcctggcccgggccgggggcggggcctggccgggggcggggccaccaggtgcgaggctttatcgcccctgagcctcggccggcgtgattaggcctggtttgcgctggagagtggtcttggttgtgagggtcataagatgggaactctcccggcacgtagacatatcccgccgtgggtgaaagttcccgaagacctgaaagatccagaggtgttccaggtccagacgcggctgctgaaagccattttcggtgagtgtgcccagtactggcgggctgccccggctcgggagtctcagccggcccggggatctcatctcttttccccaacaggcccggacggatctcgaatcccttacatcgagcaggtgagcaaggccatgctcgagctgaaggctctggagtcttcagacctcaccgaggtcgtggtttacggctcctatttgtacaagctccggaccaagtggatgctccagtccatggctgagtggcaccgccagcgccaggagcgaggtgagaggcccagagactgggtacgcggaacacaggctcgcgggggccgcttcgcgcctctcctccagccctctcctctttctcctctcttgctcgctgccagcaccttgggcgtcaccaggggtgcccttggcatctgggccttcccaagacccctttgggaatgggggccccagaatgccggccgtcggtcttggagacccaggggtgagactatggtgaaaggcggctggtgctggacccactgggcagggttatctgagctatctcaaccgtctccccgcccccttcagtttcttggagaatgttcgaatgggccgagtagtctcgggttccaaggttctgggcctgactctcaggcccagaacgcctggatcagaagtcccagaaacgaaccctgaaagaggcggagaacagtccgggcgcttactattttcccccagactcacgccgctgttgctatttctggtgcagggatgctcaaacttgccgaagccatgaatgccctcgaactaggcccttggatgaagtgaaccagtttccagccaatgcaatgaagccgggttgcagagattaggttgtggccagagctagagtgattccttaagcttgttttaaaatctgctccagcctaaagagttaagggaaaaccatttgttcccttaaagagttaagggaaaacccttggctctgagtcttgttgtgaatatttctttgatgattgttaataaaaagtgttttttcttttttcccatttttaaaaataacaataaagttttaaataagttgatagttcagtgtggttgatggattgtaggtactaccttaaatatctctgaagcacagctgaagtgtggccctgagcttaacccttaattgaaatcctccaaagacaaaatgagggtccaaaggcacacttggctagtgtcaaaaagggtggaggagccagggtcctgagatgcagcactgaactaaaaacctatgggagatgtgatgattgtctcaagtgacctggactcacttgaaaacaaccctataataggttgacattttgtatataagctgaaaagcaaatgtgtccaacaaaaa

SEQ ID NO: 15250 - DNA, 1375 bp, Homo sapiens
tcgagaccagcctggacaacatggtgaaactccacctctagtaaaaatacaaaattagctgggtgtggtggtgcatgcctgtaatcccagctacttgggaggcctaggcaggagaatcacttgaacccaggaggcggaggttgcagtgagccaagattcgccattgcactccagcctgagcaaaagagcaaaactccgtctctaaataaataaataaataaaaaataattgcatacttaaaatcttctggccctggccagttgcagtggctcatgcctgtagtccaacattttgggaggccaaggcaggaggactgcttgagcccaggagttcgagaccagcctgggcaacatagggagacctctgtctctacagtgggtgtgatggcatgcacctgcctcagctacccagtgagctgagatcgtgccactgcactctagcctgggtgacagagtgagaccctgtctcaaaaaagaaaacaaaagaagagaaggagccctcttcctttctccgccatcgtggtgtgttcttgactccgctgctcgccatgtcttctcacaagactttcaggattaagcgattcctggccaagaaacaaaagcaaaatcgtcccattccccagtggattcggatgaaaactggaaataaaatcaggtacaactccaaaaggagacattggagaagaaccaagctgggtctataaggaattgcacatgagatggcacacatatttatgctgtctgaaggtcacgatcatgttaccatatcaagctgaaaatgtcaccactatctggagatttcgacgtgttttcctctctgaatctgttatgaacacgttggttggctggattcagtaataaatatgtgaggcctttcgtttttaaaaaaaaaaaaaaaaaaaaggaaagaaaaagagaaggtgagaaagaatcttccggcccttaagagctctgtgaaacgtcagtttgctctggccgctttcccattttgatctcgggctggcgtcaggcccactgcaggatccctggcaccccaagaagctaacccagatggcgggaaaagtgttctattaacccagccaagttggctcagtgcatctctccacctcagtctctggtgttggcttccatgcactcgggaaaactgcccacttgtccccaggcttccaaggaggcccacgtgactgactgagctcccaaaaggttttcttgcacaatagccctcctgttttggcaggctcaggtgcaaaggcctatcggtctccccaaagctgagagatgcgaaaccaacacttgcgaatcagattctggcctctcactgagcagggaggttctttcctcaggggagagcagtaatcccacaggatcatttcttc

SEQ ID NO: 15251 - DNA, 1949 bp, Homo sapiens
gtgggattaataattctaggtttctttatcccaaaaggcttgctttgtacactggttttgtcatttggagagttgacagggatatgtctttgctttctttaaaggctgactgtgctgtcctgattgttgctgctggtgttggtgaatttgaagctggtatctccaagaatgggcagacccgagagcatgcccttctggcttacacactgggtgtgaaacaactaattgtcggtgttaacaaaatggattccactgagccaccctacagccagaagagatatgaggaaattgttaaggaagtcagcacttacattaagaaaattggctacaaccccgacacagtagcatttgtgccaatttctggttggaatggtgacaacatgctggagccaagtgctaacgtaagtggctttcaagaccattgttaaaaagctctgggaatggcgatttcatgcttacacaaattggcatgcttgtgtttcagatgccttggttcaagggatggaaagtcacccgtaaggatggcaatgccagtggaaccacgctgcttgaggctctggactgcatcctaccaccaactcgtccaactgacaagcccttgcgcctgcctctccaggatgtctacaaaattggtggtaagttggctgtaaacaaagttgaatttgagttgatagagtactgtctgccttcataggtatttagtatgctgtaaatatttttaggtattggtactgttcctgttggccgagtggagactggtgttctcaaacccggtatggtggtcacctttgctccagtcaacgttacaacggaagtaaaatctgtcgaaatgcaccatgaagctttgagtgaagctcttcctggggacaatgtgggcttcaatgtcaagaatgtgtctgtcaaggatgttcgtcgtggcaacgttgctggtgacagcaaaaatgacccaccaatggaagcagctggcttcactgctcaggtaacaatttaaagtaacattaacttattgcagaggctaaagtcatttgagactttggatttgcactgaatgcaaatcttttttccaaggtgattatcctgaaccatccaggccaaataagcgccggctatgcccctgtattggattgccacacggctcacattgcatgcaagtttgctgagctgaaggaaaagattgatcgccgttctggtaaaaagctggaagatggccctaaattcttgaagtctggtgatgctgccattgttgatatggttcctggcaagcccatgtgtgttgagagcttctcagactatccacctttgggtaaggatgactacttaaatgtaaaaaagttgtgttaaagatgaaaaatacaactgaacagtactttgggtaataattaactttttttttaataggtcgctttgctgttcgtgatatgagacagacagttgcggtgggtgtcatcaaagcagtggacaagaaggctgctggagctggcaaggtcaccaagtctgcccagaaagctcagaaggctaaatgaatattatccctaatacctgccaccccactcttaatcagtggtggaagaacggtctcagaactgtttgtttcaattggccatttaagtttagtagtaaaagactggttaatgataacaatgcatcgtaaaaccttcagaaggaaaggagaatgttttgtggaccactttggttttcttttttgcgtgtggcagttttaagttattagtttttaaaatcagtactttttaatggaaacaacttgaccaaaaatttgtcacagaattttgagacccattaaaaaagttaaatgagaaacctgtgtgttcctttggtcaacaccgagacatttaggtgaaagacatctaattctggttttacgaatctggaaacttcttgaaaatgtaattcttgagttaacacttctgggtggagaatagggttgtttt

SEQ ID NO: 15252 - DNA, 1176 bp, Homo sapiens
tgcgagcgcggccaccgagaatcggacgggggtagtctcaagctggccggcctgctctggtgcctggcctcgcgccgccgtgtatcgccccgccctgggcggcaaggctggcccggtcggcaccagttgcgtgagcggaaagatggccgcttcccggccctgctgcagggagctcaaaatggaggacgcggcgctcgggagagcgggcgggtgagtcacccacacaaaggaaaagggcctttccgtcctcagccgtcgcttcatgtgactccacggagtaccgggcgccgtccaggcacctcgattagttctcgagcttttggagtacgtcgtctttaggttggggggaggggttttatgcgatggagtttccccacactgagtgggtggagactgaagttaggccagcttggcacttgatgtaattctccttggaatttgccctttttgagtttggatcttggttcattctcaagcctcagacagtggttcaaagtttttttcttccatttcaggtgtcgtgaaaactacccctaaaagccaaaatgggaaaggaaaagactcatatcaacattgtcgtcattggacacgtagattcgggcaagtccaccactactggccatctgatctataaatgcggtggcatcgacaaaagaaccattgaaaaatttgagaaggaggctgctgaggtatgtttaataccagaaagggaaagatcaactaaaatgagttttaccagcagaatcattaggtgatttccccagaactagtgagtggtttagatctgaatgctaatagttaagaccttacttatgaaataattttgcttttggtgacttctgtaatcgtattgctagtgagtagatttggatgttaatagttaagatccgacttataaaagtttgatttttggttgcttctgtaacccaaagtgactaaaatcactttggacttggagttgtaaagtggaaactgccaattaagggctggggacaaggaaattgaagctggagtttgtgttttagtaaccaagtaacgactcttaatccttacagatgggaaagggctccttcaagtatgcctgggtcttggataaactgaaagctgagcgtgaacgtggtatcaccattgatatctccttgtggaaatttgagaccagcaagtactatgtgacta

SEQ ID NO: 15253 - DNA, 2253 bp, Homo sapiens
tggcattctaatgtttgctttttattcggacaggccacatgatgcatagagcctctttcatgtgacttgtgtctactgcttaaatctttatgctgtgttgatgatattatattgacatatgaagctgtatatgtgtatgtattttgtggagaaagggattacaagatgtatgagtataatgacttgctaacctttcaggattcagagaaagatgaagaaagaccatatctaaataatacacttcatcattttcatgtgtataaatgcttaaagtaccatctttgttgaggtggttcatgtatccagtttatccagtacagttatttgtcaagcttagctttgatttcaaaggacacgcttaccttgtctggcataagaattaatgctcatgtctgcagtggttgggtaggtcctgcttaggagaattaaaaaattcctctttccgtttggttgaatgttgcagtcaggaaccccaactcacttggaatgtttttatatgtaatcatttcccttgaagcttatactttataagggaagaaagaattcaggtgatatgggaaaactgcttggcagaccttcatcttctgcctcaactgtaaaccacatgtaagtgcttaatggagactgttttcattcttgtgatatttaacattcagaaaattacttcagctttggaaatactcaggctgtttttattctgcaggtaagtgttttgacttaagtactaatattccagaaatttttgaaagcagtaaccttaatttcctatgtatttcattccacttttgcatataggtcaaatagcaatgtgtatgcacattctctttagttaaggcaccaattgttttggttggttttcctaagacatactttaaaaagatgttctataaatttcctaattaaattatggggattttggagtatgtacatgataaattataatatgtatatggttgaagttattttattttttactaatgaattattttaatattccttattgaataaatgctgtaacttgtttgctatggaacttattcttaaagttctagttaaaaataatttttccacatgcatgaaaatatgtattaatcagaggtggcttaattacattgaaattgcttttttgttgttgtttttttactgaaataactcatgtttgtgtagaagaatgcctgtttactcagagtttatattttccttcagttatattttaaatcaaaaggtctgggtaatgtatacttttgattaatatatactttttttaaaaaacaaaaaacaatgtaatggttaatagtagaaatgtgccacacttttcaagttttatataacatatgaaattcagttaaaagaatgtgtgtttcataatgacttttaactggtaaaaatattacttgcacgaagtacttgatgtatggttatcctgaaatttcggagtatttggtgtgttctttgtctaaaaatagtctgttttgtcagtccttcagaatattatttattctgaagattgtccctcttgcacttggcagtttattttcggggatacattgttgggggagaggggtttctgccactctttccagattgagtctgtgctgtttaaggaggactaccatcctgcaactctttttctaactggggcacagaggatgtcgctaaagaaaagttgaagagccctttcagcactttctcatctgtggagaagatggaatcttaaaatacatttggagttttatctgttttacaagtccattgatggcctaagttcctcctgttttctgctgtttgatctctaaggaactcctgttgctaaatatgaagagtatggaacattcgtatagtctctgtgaagcatggggggagggaagacatttctttttcttataggctttatgctcaaatgtcatagtctcctttcaaagaattgtgttgcattttaaatgcacccagcttaagtagaagacattgaaggatgcattaattttcaggaactattttgaattatgaaaagattcccaattgaaaaaattattcaacaagtaaaagctaagaaatttcattgaaatcataaggcagtttaagcataaattgataaaaatagctgtgtactactaattaatagaaaatcattcaaccaagagaagagtcaagtgaatatcgtttgtttatttgctagtgagtttctttgtaacgttgattttattaaatgataatatttggttagtatgtcctatgttaataaaaatgaacaaa

SEQ ID NO: 15254 - DNA, 1222 bp, Homo sapiens
taatctgaaggctggctgcaaaagcaagcctgaaactctgagaaacagaccagagggtataaaacacacctcaatgaaactgtctgtcccctccctacttagattggtccccagttgcacccaaccttagcaatttgaaacttttcatgaacaccagacaagatgtgaatgctggctgctctcatccttaggccaccaccccaaaattttttaaatgtcaaagacttcagcgcgcactctcaaaggacgcccaccaactctggctcgtagctcaatccacccgcgccccctgggccgaaccggctcgcagccgagcccctcgcctaggcggactcgaaccaggtgcgctcgcagcacactccctccccgtcatcgctcatccctcgtacttcaccgcccccgaaacccacccagcgcagataactgaatatccggggttctgggggccacgttttccagtataccctcccttctccccgtcaagggcagaaacagacgtaccttccagaaaagtaatctcccctgcgctaccgccgctcttgccggccgccatcttcctcctcccacgccgcctccttcttaatccatggcccacaccgccgccgtgctcgccgggatgaggggccgcgccggaggagggtagacgccgcagggttgcgggcctcgggctcagccgtcaggcgggctgcgctcccacgttcagacgggcctatacaaaggcaggccaggcgcgcccgggcctgtccgcgggctggcgggcagcgaggcccgcggcccgagcttctcaggcctctccgggggaacgcgaccggcgacgacgacgacggcgcttcccgggcccggttcctctcggcccacgactccccatccaccgcccacccaggctgcctgagaaacttcccccagccgtgggttcccaagaaaggagaatgaaagcgagcacacaaacacgcctcccttcgtcccaggccgtaaaatggccgcacccgccgcgccggagcggcgaggtctctgcgaccgtcaggcgcccccaggcccctagctcgttctgcagccgccgccgctacggccgtccgcccaccccgcccaggcgtgaatgcatcagcggaggcctttgcgactgtccatgtggacaggggtgggtctcctctgccaccgcctcgcgtcggtcgccacagcagctccagccgccgccgctgccgctcctcccccacgggcgctg

SEQ ID NO: 15255 - DNA, 1430 bp, Homo sapiens
taggggcagcaaagaaaactgtataatcaagtcagcaggacagattctacttacatttgtcttttatttattctgtataagaataagcatttcttattccaactgcagcatgactgtcactaaaaagattttgatgttcaaagacaagtcattgagagttcttcggttttcttccttcaaaaacattgaatgattttatgctacataccaggcatagatgaggtgcataaagatgaatatgataaaatctctaccagtaaagctcaagtttgattgcagtagagattgattagggtacagaaagacaagtaaacaaatgattacatgcatggttagggcagcagtagagctatacaaaatacgtgtagtaaaaactacagagaagggaacaagaatttataaaggaaacattaaaggagtttttgagtttaccaggtagaagaagaaactgcatgcagtaggaatcacgtcttcaaaggcacaaagaaaggctttaactaagattgttgcttccagggatttagcacaattgttagacttcaggtgagggtaaacacattggcttttacagcttctcctaaattttcttattttctgaagtcttaattttttttttttttttaattatagagatagggttttgctctgttgcccaggctgtagtgtagtgtctcagtcatagctcactgcagcctcaaacttctggtctcaagcaatccttccacttcagcctcctgagtaactaggactgcaggcatgcaccaccgcaccaggctaactttaaaaaaattttttttgtagagacgtggtctcactttgttacttaggctggtctccagcttcaagcagtcctgcctcagcaccgtaaagtgctggaattacaggcctgagcactgcacctgtctcaagtcttataataatttgaaatgaaaacaaaagccatccatctggtaattcatacatagtgtattcttggggtgagtggtatatcttgtcttttaagtaaatcagtcctgctaaaatctgagtaattcgtagttctttagtaataatatgggaacgagtgctttacacctttttatctaaacagaatggtgaagtttgttaaaataccacattagattaggtagtctttgggtcataattaagattccaatctattttcttaactgctattccaaatgttaaattcatatttaaaagatagattgtttatacactaatagtgatagagaagtatggaaaaaaatgcagaaatttaaaagtctgtagttcataccatccctgcccctaacttcaatctgacttgttgaaacaacacattttatgggttgatgttttacttacactttcacattttttgactttttattaagtatagataaaaagacttataagaaccttataagaaattcttgtaattcttataa

SEQ ID NO: 15256 - DNA, 1117 bp, Homo sapiens
ctgtttcataagctttgtaattcagaaatccttgtatttagtaagtgcttgttttacataactgataattttaaaatgttttctttgtgtgctgttagtattgattcaaatgtcagcagctttaagcctaatatttatgactttcacatttggaatttaaagacaaaaatacatcaaggagttatgctgacataattctaaggagttttgttgtattttagaataaaattataaagtaaaatgattctctgtactgctttttcccccagtttttagagaccctaacctttgaaatgaaattccagtgatttcttttttccctagaaagattacctcagttagggaagtatttcccagctgactagtgtttgtgagccacagacactgtcttcagaattgcttctctcatgtcttagtagagaaatatttatttattatgatacattcaaatgattgtcaagttaaattaaatggttgtgtctgtgctattgagaatgcaaatgtgattatcttttgaaggctgtattactgcatagcttcacccaccctcgggtcatttcgtccctgtgattggggacagaaggtgtagctactgaagtaaatgacctattctctctcttccatctctcgcctttaactggtgtttttatttgtgtaggatagtgaatgataagcttttttcctaaccagtagtgagtaaagttcttgaacaaaatttagtagccaaattgttttttaatgacatgtctctttagtacaatagttttgtgtatcttttagatacattaataggcactagatggaaaattaaagagttaaacatatttaaatgagagaatctaatgtttcagaaatttgtaagaaatgtatcacagcaaagggttgttataagtccttagtttttgactctaatagttaatacaattatagttaatcttaagccataatgtttctaatcatgtcacacagctgtcctagaacttatctatttaaaatagtttcctgagttaattttggccagcagggcaactgccctaattcagatagatttacagtaacctacgtacagtagatgcacatacacacagacacccctttgctggagaaacttaggacc

SEQ ID NO: 15257 - DNA, 1130 bp, Homo sapiens
ttacgatatttaggtatgtaattccatgattaaattgcttcctgctttaaaatataatgtcttgtttcttgtcctaaaccttgaccaagacagacacggagatcctgtggattttttttttttttttttttttttttgagacagagtctctctctgttgcccaggctggagtgcagtggcgcaatctcggctcactgcaagctccacctcccgggttcacgccattctcctgcctcaacctcccgagtagctgggactatatttttttctttatactatagagaataatactgaggcaggagatcttctattgtgcttcttagccacagatttgacaatagaatcaatgtcaacctaagcagtgttgatttgttcttctcacataaatccttaggtattagtacaaagatagataatcattcaaggtgtacaaaccaacattgatttcaatttgagaaacctccttgtcaagataagtcctgctacaccactttctgtaacataattttcctctagctttctcctagtcggatgtttaatttaggtaaaagccactgcctgagagaaacaaaggacagtaccagtctatatccctatggttaaccagatatagcactaggaaaatttttcattaaaatttctcagtgataaactgattaatgtttttaatatcagcagatccaattaagccatagttattcatgttcatgtgtgatgtgattgctaatttggtcaatttaattataactccaatgagttatccattcattaataagaagcatgttttaccttgagcaatacttggacacatcaacagacccttgacctaagtcatgtgttgctcctgggaagaactgatgggtgacaggtgaccatttttcaaaatctatacctgccatttggttttgcctcaataatgtcagaatcttcatttttagacaagttttgtagaaaataaccccagaggatttgaacagtcatgtcctagggcatagcacttgctgtcagctattctccctgcatagaagatacattgtgctacttctattttttaatgttaaatttaagagaaatagaataggaattgcgttttactactgtatctaaaattttccagtttaatgtattac

SEQ ID NO: 15258 - DNA, 1117 bp, Homo sapiens
tttttttttggaatagcttaatgctataacaaattgcaatcatctttatatttaggattacatttattttttgacaggttttatttgtcttttaagtgtcctatttatctgtttttgataagtttctactagaaatccaaacgtaccatgaggattctggatttaatatggatcctagaaatcctgaaatttattttttaggataactttaatgtgcagtgaataaatccaggtagatagttctagactttagattaggctggaaaaatgtatagtgtaatatcaatcccattatcaaattgaaaaggaaattagataaatggggtaaatgggatgagcctgagattctgcatttctgatacacttccaggtcatattgatgctgctggtccgagaaccactatttgactagcaagggactgtgagtgtgagggcgggggttggtagttgaagagagtgcaaatggaaggacagcatgctggtactttgagaaggaaccagcagagagagaaaagtagaagatacagaaggaagaggataacaaaagaatcattgctggctcaggttctttaatgtagaagaaatacagagcgcaagtggaaagacttgtcctagatctcaagaatatgtcagcttctctttttctgagactcttttgaaggtaggagaaggtgcccctttatctttgtttttgctgagttcatttctgacaggttttctacaagctattctttaaagtttattttcttctcccacttctcccccagtgccctttattcagaaatctgtgtcctggccccattgtttcttttttcaactgcctttgggttttcattcttgaatttctttccttgctgcttcaactcttgtctaagaagtcgtcctcccctcttgccttgattatagataaggaaatgaggaaaataagttatctaaaaggttaaatatatagtaaatggaatggggttcctatagaattctagaacaatgacttttagtactttaaggtggttccttagatcagtgaattccccacaagctgcatgagcatcaggtgggaagttgttagaaatgcaaattctcagatcccaccattcctgattctgttaagaatcag

SEQ ID NO: 15259 - DNA, 1817 bp, Homo sapiens
ggtaagcaataaaaacatctccaatttactgaaagttcagaaatataactcttacatgcatggaaagtgtaaaccaatttaggtatttctaagtacccaaccctagtattctctccctcaactccaacattctcaagtcccagatgaaaagtttcagtggagcattagtttaaatatttagtctaatcagagactcacagccctgggcaatagatacatagctttttaaaattttatcctttgtgacctgctatagtggcattggactattttctgcatgtattataaactaaagattggccttatttcaattgtttttattgcacaacttcactacaaatttaaagactgctggcattattataaaactgtcttcctccaatccaagtaaataagtatgtggaatatttgtgagctggattaggtaacatctgagacttgggattgactaaatttagttatcacttggaaatgaattacataagatacagtaatcagagaaaatatctttatgcagcatgtatgttaacatctagaactgtccctcatctgcagtgcagtagaggaatcagacattttaagaaatgtattcaaatatttttatcttatatgttagcagcatttacatgttttcagatatgatttgtaatataaattaatttctccagttaacaatgtttacttcaattctgacattccattttatacatatatacctactgtatatctctctcaaatgtcagctagaagcaactttttcagttttctatctaatgaaaacggatatattctgaatgtttttgttacctgaaatttatttttgagtaggttgaaaggaccaagatacttgagtgattaaaggactgtaagtgttctgcttatatgcaggagttacatgattttaaaagtcataataggggaagtagttttatcatctgattactcctattaacctaaaaagtatttctaacataacagattgagcagtggttttgttacacttaggcaagaatttattttcccattaaaatttgaaaaatacacttttctttgcttctacccttgcagtttcccttagttcccctaatttccaagtgatctgaactaaaattaatattacatttactaagaaactatttttgttaattatactgagcaaagtttgctccaaatgaaaagtcattacgaactatgtatagtacccaagaaaaggtcaaattgagtcagaagactgtaagtaccacttttggcgctccagagataaaccttgtacacactgcagtagaacagtgagtagaaaatatgagctataaatagatattatttttagttttgatagctctgtgttgaaatacttttttaatgcagataaaaattatcaggaaattaaccttatggcacagaccaaatacttagtgcatggctgagtttctacaattcaaggagccaagaaaataggttcaagatggaatatagtacatgcatataaggcagatgcacacatgctggttactttaagattgtgtgtgttgattagtcacaatgatagactataacatgagacaatacaaagttacatttttggaccatattaaaactgcaagaagacaggggtcttactgaagatcttttagaaaacttaaatcctgtcacaggatatttagacatgtgtagaatgtagctcaatttttaaaaagtaactgacctagagggtgaaagttgaaactgacacattttcaaattaagattatgcttattttgtacagaaaacaatgtttaaacacaagcagatctgttgtatgtaataagtaacacag

SEQ ID NO: 15260 - DNA, 1112 bp, Homo sapiens
attacccaggtataaattcttttttcaggattttttagatagcagtagaataaaaataattttaaaatgtcatactttatagtttaattttaagggggaaattggttattttcaattattaaaggttaaaataggccaaatcactttttatgcaatcatgttttatacagtggtctcattgcacattgtgttttttctgcactttttacggtatccttatcatgctggtatgtcaatatacaccctaaagaaaaactccatttaatgattgtgccttgtattctattattttttgcatcattagtaaaattaagttgtctattgtaaatgataactatatgacttaggagaatgtattgctatatgtactgctatggaaaaggaaagcagttatttatttgtttatggtacagttagttattttataccttaaaaaccaacatacttaccatttctattgtttaaaaattactgtccatttttttaaaaatttaaagaatgtagtattttctgaggactggtatggtacaaaaatgtaatcaaaattttcagatactacatttttaaaaagtgaggatggggaaaatatgtatcagcatgaccctgatgtagaaaaataaagtctgcaattgaaccttggcaaaatacattacataattatttctgataaggataaatattagctgtcatttaactgtcgtgaagaatgaaaaagtgatacatttgggctttttagatcatttgtaactaaatttgtacagaaattctcctgtgaaattaagtaaaccattttccagatcttgactgcattgctgagattttgcagttgaaaaataatttcaaatttttcaggttttttgtatatttatttttttctaacaaatatatttaactataaaattaaaattcagtagttaaactcttcataatgcagaaatggatggcttgattgtatagaaaaatgagtctttcagttacaccattcttgaaaataatagtgtatgtttgaaatttgtcattaattagttgcttttgaaggcaatctatttgaaatatgtaatttcctgatgttatctgcattgtgttaagaaaaaaataataggctataaaat

SEQ ID NO: 15261 - DNA, 1099 bp, Homo sapiens
ttgaccaagagtaacttatttctaagttaggaataagaaacctttagtcatcccagctttatactcaatcacaatgttaacttagataagtcacttattttctatgagctttacctccctcatgagatcgttaagaatctgtctcttttaattagaaaataaataagatcattgaactattagtgttttctaggttcttttttctcattttaataaaataatttggattatgtcattacatataagtataccaatggggccttactgacaagtttgagagtcaaacaaaaaaagaaactccatatattaagtgtactgttgttcccttttaggagattgtaagaacaacgctcttgtaccaggaaccattcaagtaaatggccatggaggacagccatcaaaacttgtgaagaggggacctggaaggaaacctaaagtagaagttaataccaatagtggtgaaattatacacaagaaaaggggtagaaagcccaaaaagctacagtatgcaaagccagaagatttagagcaaaataatgtgcatcccatcagagatgaagtacttccttcttcaacatgcaattttctttctgaaactaataatgtaaaggaagatttgttacagaaaaagaatcgtggaggtaggaagcccaaaaggaagatgaagacacaaaaattagatgcagatctcctagtccctgcaagtgtcaaagtgttaaggagaagtaaccgaaaaaagatagatgatcctatagatgaggaagaagagtttgaagaactcaaaggctctgaaccccacatgagaactagaaatcaaggtcgaaggacagctttctataatgaggatgactctgaagaggagcaaaggcagctgttgttcgaagacacctctttaacttttggaacttctagtagaggacgagtccgaaagttgactgaaaaagcaaaagctaatttaattggttggtaacttgtaccaaaatattttacttcaaaatctataaagcaggtacagttaaggaataagtagaactaaggcttctgcttccttgctgctgtggtggagtagggaatgttatgatttgatttgcaaaaaaaa

SEQ ID NO: 15262 - DNA, 1228 bp, Homo sapiens
cagatgagattaatttttttctgataactggctttagataatgtcatgtttttagctgaagatcagtgataggaaactcacagcttcctgagagaaaaagccccaaacaagcttacttttagttttgtattacaaaacaaaatagataatattagtcaccattgtagcttgcatttgttttgcagctatgatttttttttttttatttcagaagttcaatttcttttacagaaatccacattgagggtactttgatagtagatagggaaccaaaggtaaatattaattatcttatcccacttgtcttatttgctggtgagtacacaagtgctctttttaagtggtttaataaagagctttgtgtaagctaacacaagtatttaacactttttggtatttaaaaatatacttgttcagaagtggacagaacaggtagatttatcagtgttaagattttgaattaaaatttatggggttaattctattaatatccattcttactttaagggttctgatgactgtcttgtgaaaatatgggcaacagatgatgggaggttgttagctaccttaagaggacatgctgctgaaatatcagacatggctgtaaactatgagaataccatgatagcagctggaagttgtgataaaatgatccgagtctggtgtcttcgaacctgtgcacctttggctgttcttcagggccatagtgcatctattacatcactacaggtaattgtcttaatccctatacattgttgttgttgttgttgttataatgtaaagtaaatttaatgaagtcacttttggttattaaattttaagaagttacttttataatcacctttataatccagtatataaggccaactaaaatgaagacaggagtatgtctgctttctttataaatatatggactttaaataacataaccttggtaaattcttgccattttctaactgttgttgttagttgctatttgtatggcaaaaagtagattttattttgactgtgtcactcttgtaaagattttttttctgtgattgtcttttcagttctcaccattgtgcagtggctcaaagagatatctatcttctactggggcagatggcactatttgtttttggctctgggatgctggaacccttaaaataaagtcagtttctattttatttcatagattaaatgtgtttagtttaatgagtgaaattgcaaaagtataaagtagtcg

SEQ ID NO: 15263 - DNA, 1205 bp, Homo sapiens
tttttaaatatcattctgcatgtcagatttcgagtgttcaagtgttactgatttatgaaaagtacactgggttccagttttaagtgcctttgtaagaaaaactatttcatagacagcttttaaggaaataacatataaatgctttaggtttttaaagagcactagccagagagtaaataaatctgagctttaatcctagcttcatgccttactttgtgatttttggacaggtcatttaacttacaaattaagttataaagtgagaatgatagtgcctgacttatttcaggtgaaacaatgtttttattcattactttaaagacttttaactagaagccatatatatcagaaagcttctttatttttacctgcacatgacaaattggagtatgtgaattcttaaaaggtgatcatgtaagaaaattaatttccagattacatttattttccttctttttcttggtagcggatactctgttttcaaggaagctgaatgggaaatacagacttgagcgacttgttccaactgcagtgtatcagcacatgaaaatgcataaacgaattcttggacacttgtcatctgtgtactgtgtaacttttgatcgaactggcagacggatatttactgtaagtaattgctaaagtattatttatattcatatatgtaattgaggaaatattgcttataggtgaacttgaagtaaaaccttgcttttttttcttttaataggaaaccggaaattcaggtggtttcacttactctaacagaagagtttagttaaatttggactttatccaaattcagaaagtttctaaatgacatgttgcagcacagtcacagttattatatggttgtacatcatgaataagtatggttctcaacatatatcaaatacacagtttgacattttgcaaaatggcataaaataattttaattttgaactaaggacatctaagtatgttgagagattattaaatgtgcctttttataattgtatgagattattgaatatacctttttatattatctgtagaaaatcacttgcttgtctatgagaaatttcccttaaaatagtgattttaaaaaagctaaaaaattctgagcatatctaatactcttattacctgttattcttaacagttcattcttcaaaatatctgatgttttgtttatagagcctctttgggtttgtttatttgttat

SEQ ID NO: 15264 - DNA, 2422 bp, Homo sapiens
ttcttgcaaggggcaagtttcacccaaatgcctgagactgcttgaaagatatattttaagtggtgcactaattagtgaatatataggaaaattatctgacgagtatctgaaggcattttcagctctagcaatttatttataatatataagttcatatattttttaatccagctcccctaacagacagctgctgcttctattttgtgaagggactatattttttgagaaaggaaaatctcagttagatatattttgtgaacccttgattagacatattaaaatataccaatgttgtagtaaaatttaatttttccttttgttacttttcatttgcctctaattttgcttgctcatatttctggccaatgtacagcctcatatttttcagagtaatacagatacttgttctcattccgtatatgagcacaagtaaggtttcagagcaacacacatgagaaagagagtaacccggaattgtacttgtcaagcaaaatctatactcctattggagtggatgctgatgaacatcgaacatatctacttcattagagcagaggctatttttctgcattcttgtccctataacagggatgcttaattttttttttaacttagagttttaaattgccaaacatgggaacagccttgaataggataaattttcagagggctgcctaaaatattttatttctagcatcctgattctggacttttcattataattctgagcaggaaatttataagaaattgaaagagcagaagaattacagccctgtcacatgtgcccagcactccgccccatgccttgctaaatgtagactaaagaacttgttgaatgctaaggctgaaatcccaacctgagatttgtagtccaggattacaaccagaaggaaagtatgacagatttctacttaactagaatggacacatgatccacaattttctcttcaagggaagctgttgtcaaattatggatattactggttagttgtcattaagtaagatccaggtcaaattccatttgacaaatcccagggactatccaggaatttttttttaactggatattgtgtttgagtatgtgagtcttctgataaaactcagaatttctttttaagcagttgtaaaaattgtcatgttgtaattcattactcagctaacatttagtctactcttgctagtgagtgccaagaaccaacttggtaaggttgaggctttgcaagttaactgctggggttataggatcaataccatacttgctagacaaagctacccagatttgtcttatattataatttttgagttaaccgtagtatacctattatgattatagtaaacagactagtgggtagtaatgctaaattaccatcacagttatgtgccatctccccaccccatttttttttttttttttttgatcagcaaagaaatacaggagaccagtctcgagtggtgctgtacttgttatgagtgaggcagcagcacagtgtgtggcatttacatggtacccaggctccacagagtaccaagatgttgccctctgggaccacacttagctcagagaatatggggtccttacttgtattcttttatcagctgattttgaaacatataataatgattttcttgttcccttctttaactagctgcctttagattttgataatcacagtcttaaaatactaggaaagaagtggatgggaattgtaggcatagatttcatatcaagggcatttcaagacagaatttttatttcctgtagtaggcttgctggagcaaaggaaatgtgctgctaaaaatcaacttatgccattttaaaattagataaaatatggagtgccatcctgctaggtgagtacagaccagaagaaaatttagttgggaaaatacttgtttttccaaattccggtgttttattacaatcaaagaagaggaaagcaaggtattttttcacctcagattctaatatattctagatttgtttctgttttatagatttaattcaatacctccacatagatgtttttatattacatgaatttaataataaactaaacttttttttgtctcccgttattgaaaagtaccaaagcttctttctgttgtgtttgattttactataggggttttgctttttctagagatacttttcatttaacagcttttgttaagtgtcaggctgcactttgctccatataattattgttttcagatttcaacttgtatgtgtttgtctcttaaagcattggtgaaatcacatattttatattcagcataaaggagaataaattccagaaaacacatattctgaaaatggagtgtttgttccctgccatttttcacacctctcttaattttagttctgtttagttgagaggctgtgattttactcttgcctgtgaacctcatgcatgaaagcagc

SEQ ID NO: 15265 - DNA, 1142 bp, Homo sapiens
cttgtgactaagttgcaagatcttatttattaactaggtatgaagtataaacccattttggtgcaatattcttgactccttggtgctaaagattgttaaattcaatgcttgatgttacaaggtgttgttaaaacacaaaatgaataaaagtgagagtagtcagaactataacattcaatttgctatttacaaatgaagtatttcatgtaatataagtgaacaactggaaataaagtaggaaagaatttgtatcatgttttactacataggttaattttttaagggatgttgcaaagggattactagagaaagacaaaatgtgaccaaaaaaaagcatgaatatttcttaagtatctcaacaacatgtcaaagctgcatgtgtaggatgtatgctgtttgtacaaactatttcagaatattttgtaagctataacatatttattgtgcattaaaattaaatactttttccccaaaggcatgcagtcatgagaattacagaaaatttgcaacatataaagtagtttgatctaagaggattcaacacctttgttttgttgctcagtgtgtaatgactgagatttgtaaatctttgtgaacattctgtactggttcccaagagctattcattccctgctacctgatttcagcacaataaatatacttctgctgtgggaaaaatatgatttttttttgttaatcagtttattataatgtaaactgtctgctagatgtttatttgatttagttaattctaaattgttttctgctgctaatttcttatatagaaaaaatcaaactagaacttgggtatctaccatttctggtaaaaagcttattttctatagtagcatatttttactttaaaaattagctgcttttggaagagcttttcattcagacataaaacataccattttcttctaaattattcttaacataaatggggaagttcttgtattctttcatttaaatcattcagtccttactataagtttctttatagaagatgattataagatgtcataaatacagccttttccagtagctttcataatttctctattatcacagatatgttgcatgccttatatctagaaactgatgaataaagattgtgtctcctacttggtaaaactttgtca

SEQ ID NO: 15266 - DNA, 1299 bp, Homo sapiens
agataaagaaggccttgaaggctcatatgtatgtttattagtagctctgttatatttctctcatagaaagattgagttatatctcatgataggtaatgcttaaggccaagcttcgtgtttaaaattctttattatctctaatagtttataaaataatttcccaactgtaagaacaagagagaaataaatgtattatatttagaatacatcaaaatacatctactgatgtgacagtacatttaactaaaaaattgcaaaacagatttgtgttttttaatttcagactttatatgaacactatagtggtggtgaaagtcataattcttcatcctccaagacttttgaaaaaaaaaggggaaaaaaatgatttgcagttattcgtaatgtcagataccacctataaaatatattggactgttatactcttgaatccctgtggaaatctacatttgaagacaacatcactctgaagtgttatcagcaaaaaaaattcagtagattatctttaaaagaaaactgtaaaaatagcaaccacttatggcactgtatatattgtagacttgttttctctgttttatgctcttgtgtaatctacttgacatcattttactcttggaatagtgggtggatagcaagtatattctaaaaaactttgtaaataaagttttgtggctaaaatgacactaacatttcaaagttgtaaggttgttttctttaagcaaatgtattgttggcatggcagcaaaattcttaattagtaaaaagtagattagggaagatgtgagactagaccttagtaaatgaactttgaaaaacaaatcctgaagggtttgaattccaaaatagacttcctaattatttccggcaccgataacagtctataattttaggactgaacttggctctttcagatattcataacgtctgttgtttttggtatttagaatatcatgctggattctgtgttgtaagctgtatagggcatgccctcactgtatgacttgctaggtaatggataattgtaaatgtggccccagagtctcttgactgaatctgatagcttaaagtatcctcacatagcatccttttctcaatttttaaaaaaagattttaagagattttattttttatagcagttttaagttcacagcaaaattgaccagaacgtacagagttcccatgtatcctttccccaccccacccccacacatgtataacttcccttgctatcagcatccaccatatcaacattccacaccacaatggtacatttatcacagtccgtaaacctaccttaac

SEQ ID NO: 15267 - DNA, 1241 bp, Homo sapiens
tcatttaaatgtggaaaaacgaaatcaataaaaatctatatatgcttattaagcattttaaggagggtgtgaataaggagtgaaagctttgagcagtgactacagcagtttttcgaaagtcaaaacaataaccaatgccaatcagtagctctcttcacctctcacacaataatagagacaggacaggataaaaaagggttacatttaaaaaaaagtatggatgttaaaccattggaaatggcactgtaaatgacaccggaaaagatcgcctccaggcactgtgtggaactttgcaaactcgggtcctcacccgaggaccgcacggccgacctcggggaggctccaccccagaaactatttcattggcgccacctctagcccacacttcccctcttccgcatgcgcacaaggagcagaagccgaccagctcgtcacgtcgccttccccgcccctaaatttccagttccgattggtctgtttcatgggaccgcccctctggcccgaccaatgtggaagcctcctcgggtgctccgccctccccgcaggcggcgtgcggctgcatagcctgagaatcccggtggtgagcggggatggcggttgtagcggcggctgccggctggctactcaggctcagggcggcaggggctgaggggcactggcgtcggcttcctggcgcggggctggcgcggggctttttgcaccccgccgcgactgtcgaggatgcggcccagaggcggcaggtggctcattttactttccagccagatccggagccccgggagtacggtgagccctgggactgcccactcggtcccgctgcagcccggactcccaggctcgcaggcgcccgcgaggggcaggggccggcaggctgcaatccttgcatcccagcttattaacttcctgactctctggaacctccttgcctcagggtctaactgtggttcacttcttgctctatttttgtgactgttcagccctcgagacgcagtcccccctcccccgcaactttgagatgggtgagagggcatactgccacctggaagagcctgagggtggaggggtggtgcccagggaacgcctcccttttctctgtcctccgtccttgctttctcaacccaggccttaggtgttgttccagcctggccaggactgggccactagcttaggtagaggcatttaaaagatatatatatatgtttatatatatatattttaaatgtatattatatatattatat

SEQ ID NO: 15268 - DNA, 1793 bp, Homo sapiens
tattgtatccatggaaagtgatagttcctcaaaaggaaattggaaggcaaatacatcctgcttagtttataattaaaagagtaaagagtcttctttcccttcctcctttcagattgaggagcatgccatacaagatttattggttttctatgaggcatttggcaaccctgaagagtttgtcattgttgaaaggacaccgcagggaccactggcagtacctatgtggaataagcatggatgctagttcactgtggagttgagatgcattttacataattatgagtttgttcatataaagaaaagctgtggaaaagagtcttagagattttgtaatatcattctaaatagattaagaaaagatataatttctttactgcagttaaatcatataatgtttgtatgattaaaaataaatttctcagaattgtgattttagtaactttatataaaatgtgtgagacaaaaacttattaaggttaaatagaattgtttcttctgaataatctaacaaaggaaaatataagtgattgaatcataagatataaggggggtaaagtattaaaaataacttttttgtttgataacttgagaatttagaagattttgccaagtatgtgttgttgcttgacttcttaaatatggcattgatgaatttaaagtaggagcatcagttattacttctgattcattaatggccagaattttgtgtttggtgtaatagttgtgtcaccattcttgttgctttttaaaaatcaggctaatcatgtggtccatgtctcttcaaagcttgacctgcacaaatgccatatttctatttggaccacatattctccattttgcattgagcagtagagtacagtggaaagggaataagaatactgattattctgaacagtttagtcccaagagaatagcgttttaaaaaagaaaaacaagatttggagtcattgtgggttatttttggtgggatggaggatcttaaaaatgcctaattgtgagagaatcaattgctgaaagtgttaaaatttctgaaaataaatgcttaattacatatacaggaattaaatagtttggaagagggttggattatcattacctttacaatactgtataatcagaagttctctgaacctcaattgtatatctagacataaaaattgttttctgtataggatgttgtttggtttgtttctgagtgtttaaattttgcaaaaacaaatgttaaatttgtgcttcagtacctagataaattggaaaggttaatgttctagtttctggaaggtaagcctgggagacacataagcaattcactgctataatttagttgatgtaaaatgacggaaactgactcaatatgtcaggtttaactctgcccaaaagcagcagacatgtaagcagatgtgcaataaaaaatgatcttgatccatttcactaatgtgtgcttgacattttttactatattgacatttattatggaaagagttaataattattttttctgatgtgctacactagtggccagtatatggttaagttgatgctgtatttattctaagacggatttaaaaaggcagttttctaaatatgaacttgtgaatttttgtatgtgtgtttgagtaaattgagaaatgaattttataaatgttctattgatgttgcagtaaagaagccttttgaagtaattgatttcatttgaagctttgattcttctgtatatgttgacatctttaatatttacagatgctgtaaagtgatgattttcttgctgtcctccgtgctgcctgggaagcact

SEQ ID NO: 15269 - DNA, 1143 bp, Homo sapiens
tctgagaaactcgtcagtccaaggcaaaccacaggagggttggtcttcctactgagaagggtgaaatgttggttgggaaggtgtaattgcattcccacagtactgtaagaaccagggatacggacaacttagttcttatcattttaatttgagagaagaatagaatataaatataaaaaggaatagaaaaaaattaaaggatgatatagcatctaggactttgtgcaatattcttgtattttaggaaatgccaaatttaaaattttctaaatattgttaaaaaaattgcattttaaaggagaattggctaggtatgaaaaaggatttccttcatattttttgaagcataatttgtttttgtcttctttctagcctttatgaaattccagctgtgtcctcatcatccttttttgaagagtttggcaaactgttgagggaagcagatgaaatggacagcattcatgatgtgacatttcaagttggcaatagactcttccctgcacataaatatattttggcagtgcattctgatttttttcagaaattgtttctttcagatggtaatacttcagaatttacagatatttaccagaaagatgaagattctgcagggtgccatctctttgtggtagagaaggttcatcctgacatgtttgaataccttttacaatttatatacacagatacttgtgactttttaactcatggcttcaaaccaagaatacacttaaacaaaaacccagaagaatatcagggaactctgaattctcatttgaataaagtgaatttccatgaagatgataaccagaagtctgcatttgaagtttacaaaagtaatcaagctcaaacagttagtgagaggcagaagagcaaacctaaatcttgtaaaaaaggaaaaaatattagggaagatgatcctgtaagaatgttgcaaactgttgcaaagaaattcgacttcagtaatttgagtagtaggtatgatttctcttttatatctgttcctgtacctcattcagtcctcctttaaaaaatttcccacccttactgtgaaaccccatctctactaaaaatacaaaaaattagccgggtgtggtggcgggcgcctgtagtcccagctactcaggaggctgaggcaggagaatg

SEQ ID NO: 15270 - DNA, 1099 bp, Homo sapiens
ccagactgatgatatcatagtagcccagtttggttacgcacatattttctgaatacatgcaagaaagggggaagagaaagggaggaagcaaataaacaagcagattatgaagacagtagatttatatatttttaatccaagttgaagaatttttttccctttgggcaacaggaagtataagttgaaaagttttaaaagctagtatgacactagatttgctttttagaaagggaactttggttgcagtatggaggatgtgtttgttgaaagagatggaatcatggataattgagaatccatccaccaaaaatttcctgtataatacagccaatatattcagtggaaaatgtgttgaagagaggatgtagttcttcaaaaacactgaatatatgtgaaaaagatttccatatttttctaactccttttctattccatttacttctcaatcattttagtagtttcagtaaagccttgattaatggtagtttatttttttttaacagagattttatcaaaccttcacaattcctcatcagatgtgtcttatgtctctgatataaatagtgtgtatgaaagaattcgacttgagaaacttacctttgcacatagagctgttagtgtcagcacagatccaagtggatgcaactttgcaatcctgcagtcagatcctaaaacaaggtatacttgtatatattaaatttcattttttagaaggaacaatcactgaattttcttgttttcagtagctgctggtgcaaatttaattgaagagctgttgccaagacctatagagaccttagacataatcatgtttacagattatgtctacagataatccagaggtagaatttgttatacttggagtgatgaatgtttcctttggtttataaactgacatttattgaaaatattgaaaatatctatacatgcactcacaaagtttattgtctttcttttttttttttttttttttgagatggagtcttgctctattgcccaggctaagtggcaaaatctcggctcactctaacctccacctcccaggatgaagcagttctcttgcctcagcctcccaagtagttgggattacaggtgcccg

SEQ ID NO: 15271 - DNA, 1213 bp, Homo sapiens
tgaaaaactcaaaacctaaatatctaacagttgagggaatcatctcaaaagttttgatgtacttatggaatagaatattgtggactaattaggattcatctaaataaaacaacaaaagcaagatatagtatgtttattcacgattctcaaacttcgtgtgatatgtacagatatatcttttgaacggatggcaaagaaatacactgtcatgtttagttacttatctctgggtagtgagataaaggatgatttttccttgtttatacctccttgcattttcaaaattagctgtagtgagtatatattacttttataattggggaaaaaattagcattgcaaaccttgtggttaatgagtttctttcatcttttatggtcatttaattaagaaaatgttagtatcattttgttctgtgaaaaatgatttttcctctttccactaggaagctcctcagggtgctcccactgccgagtgagaactggggagctctagttggagaatggtgttgtcatcctgacccctttgctaataaatcacttcatccgcaagagaatgactgttttattggagactctttcttcttggtgaatttaagaaccagtttgtggcagcaaagacctgaactatccccagtggagatgtgctgtgtttcttctgacaaccattgtaaattggtaaaatatcatttcaaaataaatggtaatttagaggctgtcttagatactgacttcttcaatcttttcctaattaagggcttgttacatagactgctgtaaaggccaaaattcattattttcaactgtcatcgctatcgttgctttatcaaaacaggaagagcatatggctttaaactaaaacagccacaggcgcctggaagaataaggagaggaagacctctgcaggcttagaattgcgagtgctaccattttacaaacaaaatgtcttgctttcttgttcttaggacaatattgcataatttgtgtgcattttatcctaaatagtctgatttaggttaaaagtgttgtcttgctccaggatatctactatactattaggctgaggtattttactatttctgcccatagtctagacttctgctgaagtcataaatggagatgtcatcaagtaaaaagaggaatggaggagcccaggaatggagataaagcttgtgtttcagggtctgagttggtgcttgacagtgtgaggtcaggt

SEQ ID NO: 15272 - DNA, 1885 bp, Homo sapiens
ccgcaaaacaaagaagcatttgtccgctcccagatgtatagtactgattatgaccagattctacctgattgttattcttggcctgaagaggtgcagaaaatacagaccaaagttgaccagtaggataatagcaaacatttctaactctattaatgaggtctttaaacctttcataatttttaaaggttggaatcttttataatgattcataagacacttagattaagattttactttaacagtctaaaaattgatagaagaatatcgatataaattgggataaacatcacatgagacaattttgcttcactttgccttctggttatttatggtttctgtctgaattattctgcctacgttctctttaaaagctgttgtacgtactacggagaaactcatcatttttatacaggacactaatgggaagaccaaaattactaataaattgacataaccaacattaaaactcataattattttgttgaccattttgttaaaatctacttttcaaaaaaaaaaagctagaaatgaatctaggcgtaggtgaacttttgctaagcagaaataacactactttgttgcctagagaaagataacttctcaagtatttttattccagtcctagatcatatatgttcttttgtgcaacggaattctaacagttctaagagaaagatcactgctgtttacagcgccttgtgcagccttagattttaatattcttttgtcattgttacatctcatagagtaaagctcttattaccttgatcctgagtcagaaatcccacctgaaatcaccttttttcccccttgatcaaacatcccatccttcagctaccatactgttgctacagggattttgtggactgtggcccctgtcctgaggttggcaccttcagttcagcacagcctgagcagtgagaaggtctgaaaggagagtatatagttaagatccttgagaaagggctgcctgaggaactgacctcttaaagatctcaggatctttaagacaacaagttaggttcctactggagttacctgccagaatggcctcttaattaactcaggtaatgaagagctaactgtgttataatcatcttgcttttgcctgaatttggagaaagtattataattaagttcccagtatcagaaatgtccttacataagattaaaatatcttgatgactaataccattctatgagaaagagtagttatatgcccagactgtattaatttactttagaaactaatgtttgaagtaatggaaaaaattttaaattataaagctaaggtgcaataacatttgctacttatttatagaattatttgaagaattttgtttttgaagtaatgctttaaggagtataagatattcaagataaattatactataaaatgattttattgaaagttgaaggttacacaaattgttttaggtatgagcagaagaggttaaggtatttctaaaggtaacatatagtcaagagtttcctcaaaatagttatttggagaagaatcagaatgtctgtgtatttcttgtctgtttctatgttgtcttatagctctgactaaatgtgtttacctatgcaaaagatttattaaagcatagaaaaggtgaatgaataaaaatataaaataattgtcctttttcttaaaatgttacattgtaatgcttggtcttggggtcatatgattatgtgtgacgaatttctaaaatattctaataactgctaatttcagtataaacatcattcatttaaaacatatgtggctgggcacagtggctcacgcctgtaatcctggcactttgggaggctgagacaggcagatcacctgaggtcaggagttcaagactagcctggccaacctggtgaaaccctatct

SEQ ID NO: 15273 - DNA, 1179 bp, Homo sapiens
ccatcgccttgggggtgaggatttcaatgtgaattttgggggactcaaatgttcagaccataacaccaactatcatatcatattggtgtacttatcctggacccagaggaacagcagtcatagtctagataaagaagtctcttgggcttcagtgtctccaatcagatgcctctccagagggactccttatcccaatctaccacatcattttcttaatgactacgggagctgctctgatattactttgtcttgtattaatgccagcaaatatcttaggtccattatggtttatgcatcaatgcataatttctatttagttttcatgtttttgagcttcatagcttgttattatcatttgttttatacaatcaatgttcatgtaaacaggtaacataggtataataatagggttgtaatggatatactgaggctttagacaggaggaagcatttgaggtaagacataaagggcagagaaacagggaagaatatcttgaccatgtgccatggaagaataaaagggtgtggtatgtatggacaatggtgagaagttttgtatgcctaggagtacataagaatcaaaggctacaacttgggagaggaatgttgaaacaggtaactcagaatcatataaggcatttcctgacctattttaaaggtggaatcacagcaggtcacaggtgacttactcacattcataattttaaaatctcttctaataatgactttttatttttatatgtactgacattgataataatgattatatcttctttcatttttgtgtctttaagtagtttccttccattcatcatctgattttatcctaattatctctgagtggcacagctctgaaatattatagtattctaatttctacagatagggaaactgagatatggagagcttacatggtttactcacagccacatggccatgcttccagtgacgcagacttcggatttttaattgcatatacttgtcagattttatatgtatgctttttgtctattttcctctcaaatactgttgtgtgtgtgtgtgtgttttttctctataggacttggcctttaccctggaagagagacagcaattgaacattcatggattgttgccaccttccttcaacagtcaggagatccaggttcttagagtagtaaaaaatttcgagcatctgaac

SEQ ID NO: 15274 - DNA, 1056 bp, Homo sapiens
tactgtgaatctgacttaaaatgtaaagtttcctcatgataaaataggaacaacatagaaatggattgatggggtgatctgagttattgtatataaaagtttttaaagaatagaatgaacatcaagctagataggcaaaaattgacacattcagaacagcttttttgactgcgaagccaaaagttgtcagaaacagcaaaagatcccttattattacagagtattttacgtagtctctattttaaggagagaaattaaatagaagggcttcatgcatttaggggagggtgctaaaacttctcaagttcgtcaaacttacaggaatacccaccatgatcattttctctctaattatgtataccacaaaattttcatctggccataggaattcactggtgggtgtaaaattaatgactaaagaaattaagtgacaaatacataaaagaaacagacttgtggggatattgttttaaggtgtattaattactcagtgatgataccactcaatagggcatgccactacttttcttaagatgctaattatgaagcagtgctcacaggcattttttaactagcaaattagtagatggacttttggggtctgtcactttttaaaagtatttaagacttaaattctattagcaccacagtctgccttcagtaatacacctaaaatatttttcaggaccagaagcattcagtttgaaaatttgcagatgcaaaccagtattattactaacgctctgggtcaaagattaggtttttaatattaacagtagtctggtaaatatttagaagtctggcattgagaaacaaaagcttgtacctgactagtatttttatttaaaaaaattagttctgttagcttatttaaattgtgttttatttatccgtagaatttatatttatttcattcctttcatctcactgaaaactgtctgcaggccctttgatttggattagatgtgtgaagtactgtcttttgccaaaaacctcaaattacctgttcttttcaacgtagtgggtttgtgcttgtttggagatcagttcaaaaac

SEQ ID NO: 15275 - DNA, 2821 bp, Homo sapiens
tgtgttccaacagaaatccttcataactcctagcatggtatcttaataaagaataaagttcttttaaaaatctgctctaagtagatttttccccttttttaaattaaggatcccaacagtggtattttgaaatattctcttgaatttgtgcatttaaattttattgcagtggtatagatgaatgccactgatggtatccttaaattttatttctgctcaccaaggttaatcatgattgtctatatcttttttatagtgatcacttttgaattgtgttcagatatgcagtttcaggtgtaatcatcagagctggttagtcaggcattccagatagtggttcttttcagaacctttttaaaagggttggttaactacctcagtagcagaggattgaactataccctgtctgtactgtacatagaaaatctttgtagataaaagcaaggcttgttaaatatgatatgagggtaagattttaatataccaaatgtaacattcttagttgcctttagtttcagaggcttgtaagacttcctcatgaccatcataacaggccttgcttttgtcgtattttgtggctgaaaaagcagccttgcttcttcagatattgtagttatttggatgtataatagtttagcaagatgttacttttgtaagacatcagatgttcaaaaaagtgcatccgaacttgtactaaatactgcagtgtccctttataaaaagtcagactaaaactgacaattgtacagcgaagcctgacatttggatattttgaagttttttcataaatcatagaaattagtatatggctgtagtttagctttttaggtaaaaggtatgtttcattagtgcatttcttcctgctgatcactgtaaacatgtgaatcagctttccatttcttatgcaggtcatgataacttgtagagtagagtacaatcatttgtgctatgtttttaattttctaaagcaccttgatgacagtgagtgtccagtggtgaagcatcctctattgaaccaccctcaaaaatttttttgccaagtcctaagttgatagcttaaagtaaaaagtgaaaattatagtttcattaggacttggtgtaaagaaatcccctccccccttccccaaagggatactgcagttatatcacatacccaataggcaccacgatgaagatcagagcttatacttaattaaggttttatacacaccagttccccagtaaatgcaaatttaacaagaaaatcagacatgtcatatgttcaaaatgctcatggcaaacaatcattttgcattcctgcaaataaaattgttttatactgtaagctggaggcgagtgtaacttatttttgtaataaagtttttattttttttatgtgtcattaatataaatgtgtgttagtgtagaaatcttctggtttaaaaacttagaattgcacacatttcagtatgtttatttgtacttacataattttagaatagtggttgccaatagcctgtatgtttcacattaattggttttttgttatctaaataaatcattttagtatgttgtatgtcagttactgggatagctgggacatagagtgtaatttaaaatttgtcaataagtattcattggaatatatgtaaatgtgccttgccggttattgaaacttatctacaaaatgagtatggggtgacaaaaattagttcctggtgcttaatgaaactttctgccactgattttatatattaccccgtgcttttttaaagtacatctctctcaaaacttagtgtaagtttgagggctacacaaaacatttacatttcattctaacataatgaatataataggttgtggaaagtgggtaaactaaatgtagccttcagtaaaattgaatctcagtgtaatccttggtgctggcatttctcagttccgaggagttaaatgatcccatctaagaggtcattgccatgcctattggcactttactgtcatagcatttttaagggacactgtcaaggtgtttaagttctcagaattacttgttgggattttaggacaggtttgtttacttaaagtaagaactgcattgtcaaagttgaaagaggaacacttttgtgagttcacaaatgtgttcttaagaaaacattaaaatatggagctctgggttttcaagactatttggcattcttaatttggggacttgggagggaaactgataaaaagaaattgaagaattgatggttatacttaaagaagggtaatgtaaacagtggtgatgaaatatatacacatcaagtgaaattacttgacagtgttcatttgaatgactttgaattcaagccattataattacttttaaaattaaatatcatttgcactgttctgataatgggtgcagtttttgagcaatataatcagagctaaatatgcatgtagtgattagtgatgtgaacaattaacgttctgagaagaaatactaactgtggtattttcaaacttaaatttctgtagtaaaatcagtatcaaagtcttatcagatcaaggaaaaacaggcaatgcatataaacatacttttgaatgttgtgtggcctataaagcaataatgcaatttatatggaatgtcatgggatatgagaaatggaaatgcaaaaataactaatcctttagtaaaaatgtcaacatgttaaagggggaatgttaactaatgtaggttattgctatttgtgatttgtttatgggttcttggctttgacagcttcaaagaatggacagtgataagttaaaagaaattttgtatattgtcaaggaaagggtcttaaatccgagtcaagtc

SEQ ID NO: 15276 - DNA, 1372 bp, Homo sapiens
gtggagcagctctgaagatgcaaaggtaagagcttagttaagcttagtttccaaactaaaggagtaaacctgttgatttacaggaataggaactgttgcatcgtttgaaatttacttttttttgttagatacacgaaaaaacttccagaacatctgggagaatatttaatggaaaatcgcttggttaaaacctgacacttttaacaggtatgtgttgttttagtactttatgattgagcatagcatttaatccacacctagactaaatcaaattttttttgtcagtgaacagcgttctgagtgtggacgagtagccagtgaagataatgaatgtcgaatgtgactgactagcagcttcattttgaagtaggttgtatggcttaaaagttctgtagtatttgtactataatacttgccttttagcattaccttggtttgtagtcagtgtcacagaagtgcagtttaatgtattatgtgtacatatacaaggtctgattggtctaatcaatgatgaaacctatcccgaagctgataacctgaagaaaaataagtacggattcggcttctgagattaagaccagtaattcagaggtggagtaaattttgttgccgtgattttataacagttgtgttataaaatcctgggttttttttttttctgccaacagtgagggtcgctgtctgcccattgatagaggccagattgtcttggaagttccaaagttgcaacgatttctgtaagtggagtttttctgtttgcttagagatcagtgaatattgtgtccttggtcttatctgtgatgatcttatcccgaacctgaacttctgttgaaaaaaaaaaacttttacggatctggcttctgagatggaccgttataaggacaatatttttttttaatacttttaatgcttttacatatgttgtaatgtttgtagtcttgtaagaatctcgtgtttttccttttctagggctagtgccacgaggtttacttgactgttgtgtgaaaagctgataagaaaaccatccagaaaaaagctcttcgttttacaaacatgaaaataaaacatgtaattttggattatgttcctttttgttattacttttaaataggtcctgaaataacatggggagcattaaatggaaaatccactaaccagccttgtaatcaaattactgtgagtgaatgtttcgggtttgtgcagggtacaatgtaagggtttttggatcagtgtaagagtggagagacaggaattagaagtaattgttactaagcaaatcatggaatatttagttttgatgtaactataattttgaaagcctggatgcttaagttgagaaatgggggaatgagatacagaaaataaggagcac

SEQ ID NO: 15277 - DNA, 1372 bp, Homo sapiens; identical to SEQ ID NO: 15276

SEQ ID NO: 15278 - DNA, 1372 bp, Homo sapiens; identical to SEQ ID NO: 15276

SEQ ID NO: 15279 - DNA, 1178 bp, Homo sapiens
aatgttaaatgctggccgggcacagtggctcatgcctgtaatcccagcactgtgggtggccgaggtgggcggatcacctgaggtcaggagtttgagaccagcctggccaacatggtgaaaccccatctctactaaaaatacaaaaattaaccaggcatggcagtgcgcgcctgtaatcccagctactcaggaggctgaggcagaagaatcgcttgaacccgggaggcaaggttgcagtgagccgagattgcgtcactgcacttcagcctgggtgacagtgagactgtctcagaaaaaaaaaaatgttagatgctttcctagtagaaggtagtgcttctctgggactgaaaaatattaattaataaaatgataaatcatattctgattttatttggtatttagaaaattgggatctgttttcttgcattttaacttaagcatgcatataggattggaatataaaaccagttttaatttcaaatgtaatgactggactgatgtccatgattattaccttactgctccaacttttcttattataactttttttttttaagggaacttactctcttttggagtaaattacaacaaagagtagaaccatctatacaagtgtaccttgagaggtgtcgtcaactttctttgttaacgaaaacagtatatcacattttcttcctgattaaagttattaattcagaggtaagaataatcagaatatttttaaggttaaaatgtgtacattatcattaataaaagactataacttttatgattttggctcccttttcagtgatttttaaattttttcagttagtcctttgaacattttcttgttagtcctttaagatatttgatacagaaaaacttaaaaatgcagttgagaaccagggacttgttcttagccagaagaaaagtaatatgtaatacttaaattatatcattcttctgttttggttctaggggttatactactttgataatttggctatagaaatttaaaaagtaggctgggcgtggtggctcatgcctgtaatcccagcactttgggaggccaaggcaggcagatcacaaggtcaggagttcgagaccaacctggccaatatagtgaaaccctgtctctactaaaaatacaaaaattagccaggtgtggtggcgtgcacctgtaatcccagctactc

SEQ ID NO: 15280 - DNA, 1180 bp, Homo sapiens
ctgaagactgttgaaaatggtttgtgctctagttcatttcctaattctggtgggccatcacaaaattttaccagtaacagttctcgtgtttctgttataagtggtcctcagaacacaagatccagtcatttaaataaaaagggaaacagtgcttctaagagaagaaagaaagttgctcctccactaattgcacctaacgcttcccaaaacttggtaacaagtgacttaacaacaatgggactcatagcaaagagtgttgaaatcccaactactaaccttcattcaaatgtaattccaacttgtgaacctcagagtttggtggaaaatctaacacagaaattaaataatgttaacaatcagttatttatgactgatgtaaaagagaatttcaaaaccagtcttgagtcccatacagtgttagcccctttaacattaaaaactgaaaatggtgattcccaaatgatggctttgaattcatgcacaacttcaataaattctgatttgcagatttctgaagacaatgttatacaaaactttgaaaagactcttgaaattattaaaactgctatgaattctcaaatacttgaggtaaaaagtggatctcagggtgctggtgaaacttcacaaaatgctcaaataaattataacattcagcttccttcagtaaacactgtgcaaaataacaaattacccgattcttctccgttttcctcctttataagtgtcatgccaacaaaaagtaacattcctcagtctgaagtatcacataaggaggatcaaatacaggaaattttagaaggcttacagaaattaaaattagaaaatgacctatccactccagcatcccaatgtgtactgataaatacatcagtgacactgactcccacgcctgttaaatcaactgcagatatcacagttattcagccagtttctgaaatgataaacattcaatttaatgacaaagttaataaaccctttgtgtgtcaaaaccaaggctgtaactacagtgctatgacaaaggatgcactatttaagcactatggtaaaattcatcaatacactccagaaatgattcttgaaattaagaagaatcaattgaaatttgctccctttaaatgtgtagtacctacatgtacaaaaacatttacaagaaattctaacctccgggcacactgtcagt

SEQ ID NO: 15281 - DNA, 2261 bp, Homo sapiens
gataattaatgtagtataaatacatcatttaccattttattttaaataggaagccatcaagcatgctagaattgtgaaactttcattatatttttttgttgttgacatgaattaacctggccaaaaacaaaaaagaaaaaaaaaacatgacatttgtcatgtaaaacttttttttatccctatgggacttgaggaacagaatcagtacttcagttattgtaaatagtgagctaaacctcaaatttctatcacccagttgcccttttcatgaactaaacaattatctgtgtgattggtatgtttcaccaggtcactgctcatgtataacagtactctttatttgtagataccttttttgtatatatttattattgtaaatcatgtgctgccaccagcagtctgtaagtctaaactattaaatgacacatttatatttggaattttaatttttaactaagcgatcaagttttttaaattgttcttttattgttttaaattaagaactttttgaactaaaaccagaaactctgccatagttcattgatttttacatgaaacatttatttacaagatgatatcaagattacttttcacaaaataggcacattatatcaacactttgctctgctttgtaaatttgccatccaggattttggggtggtattcatgtgaaattaaagcagattctctagcagtttcctatagctacagtttttttttttcattgcttctaattggatatagttactatgagtccatgaaatacaatggaaatgtgaataaagaatttactacattgaagattttaaacatttggtattaaaaaaaaatcctttgtgaatgtgatagaaaactagtagtgtggagcagtgtaaatatttgaggtggtgatttgtgaagtagcccagtattgccttaaataaaatcacatttcatttcttgttttatacatgtgatcttataaagattttttgttttgttttgttttccattttctgagatttatagattggtgtatagctttaaactgtataaagttttgtggaaagatttttttaaacatttttataaatcttaaaattgatatcatcaaagtgagcccatcttgtgtttataaaatacaagagtccttaacatttataattacatagataaaacactttctataaggaagttggatgttttgattttactgtttatagatgttagattgtacagatttgtctgtatttctcaccatatctaatgatacttttttcattagattggtcttcaagaacagtattagttataattattttggttattcagtatatagttagctcttacagtttagctttattcaccatatttatactgtggattcacagcgagaggtagaggttattccaggagagttgatgaccttcatttaaagtccaactaaaatcagtagtagaaacataagaaaacatctttgcaatatttacttttgtttctgtttgccgtaaatagtaacattgtttttttttattttgtgtttgttataaaacagttgcattcacaatattattggcctgagatattgatgatattgtgatggtatgaaaatgtgtacattccctgtgcaacatcagatttgcaggaaaaatgaagcacttactgaaatcgctggtactctgaataaataagcatggtcaaggagtgaactattttcttttggaaatttctttttaatttttattattaaagtattttatttttagggccttttgggttttattgaatagttcatttcacctgtttaagacttactaccaataagcataaaacctgacacgttaaaatccctgccctttggtgagcccactgttatttattaaaataaaagttattttatgggtgattaatacatgggttttctttttcctaaattaacaataatttaaataactgagtaattttaatattaaatttttgttaacaactgaatgtttccatacagttttcttagaaattgacctagctcttaaaggtgggcacttggcaaaactgccctatatagcacagtagcaagtaggtttatttctgatcattgtaactatgagccactgttaagtgaaaatgccaatgtattggggcttttcttttgctcattagcttaagaaaatttataactagacatttctaattgttttacatgtcatggggaagagtttgccaacatttaatgaaatttttatattccaggtaatgtatactaaaggtaattatgagagtgg

SEQ ID NO: 15282 - DNA, 1214 bp, Homo sapiens
agaaacagcttcaaaggagagagttattggtgtgtgattttagcctcacgtgagactccttttaagactaaaccatttgcattaaactagagccttaagtcaatctcagaaggtagcataaacaaataaaaattaactgtatggcatgatcagtgcggttatgtggaaacaacaacaaacaaacgaagctatctgagtgaactgctaatacagaaacttaatgtagacctgtttggggtctactattgttttagaatgaaggaattgtattattgtgtgtatatataatttgtaaataaaaagtatggagatgatacggtgttaaaaaaaatcatggtaaggctacaatactcaagtaacaaggtttgggacaatgtctaagggttaaagtgccaaagccatttctgtactaactgttctcttgttccggtaccggggagaaggatgacccctccttattctccaattcatgtacagtattttgtcctagcagcataaagacctagctcttttcttacaagaggcagaaacaagacaggctagttcataaacaaactgtgtaacttctcaaaatgaatctatttcataactcggacaatttctgggtggtgactgagtacccctttagtgagtacccctttagtgctatatttgtgccattcattatctggttcatatttcttttctgttagatgatacacatttcttcaaaaaaatttctaatgtcacttttgtacttttttaaataaagtatgtttaactgttgggctctcaataatttgtgaaatttcagtgttttctataatgttaatggggaaattcagcaataaactttatttgtaagaaagaattgtttaatcactttatattatagatatgaccattaagataatgcacttttattttctatatgtagaaatgcacttttattttctatatgtggaagtctatcggttagggttctctggctgcaaatcaactcaactctggcaagccttaagcaaaaaagaaagaatttttaagaaggtccacaatcagggctacaggcgtctaggttctaagaattaatggacagttgtcttttcagcttttgtaaagatctggctttacctattactgttcctgtatggtttcactcacgattcaaatactcgggaagacactactgatcttggaaggggaaagtttcttcaaacaagtagagagggatattg

SEQ ID NO: 15283 - DNA, 1200 bp, Homo sapiens
accagcctgaccaatatggtgaaaccccatctccactaaaattaaaaaattaggcatggtggcacgcacatgtagtcccagctactcgggaggctgaggcaggagaatcgcttgaacccaggaggtggaggttgcagtgagccgagattgcaccactgcactccagtctgggtgacagagcaggactccatctgaaaaaaaaaaaagaaaaaagatggtataatcttcaggaaaactttctggacctctctgttcttatttataaaatgagaggatttattaagagattgatttcaaagctagactgtctggaaagtaattatttctctgtttaatagaagaaagtgaaagacttagaaaattttagtgtttgcaatgataatccttaacagtgtcttataaagtaagcattaaaataaagtttgtcttatgttgaaatatgatgtattgaaatatatttgctaaataaatttcacttttgtgtctgtctttcaaaactagtcaacatctccatgaatttccactaatactcatttttggaatagccacatctcctattatcatccaccgattgcttcctcatgcagtatcatctctattgtgcatagaactgttccaatctttgtcttgtaaggagcacctgactacggtactcgataaggtaaaaagaataagttttaccagtgaaataggatgaaaagaaaactgccaataatagattgttaagataactgttaacaataagcctctacaactctctgagtactatattgaacatattccttcacatactttaatatttttacttaataatttttgtagtgttttatagttttacagtgattttgtatattacctcttcaggtaaaatataagctttatgaaaagagtgatcatatctctctatgtacttaatctctttatatctttactcaatagaaaattataggtttataatgtaaatttttacagaatttgtagactttgtagtaacaatgtattttgactcttacattttgatttttctaatttttatttttttgagaaggagtctagctctgtcatccaggctggagtgcagtgacgaaatcttggctcactgcaacctctgcctcccaggttcaagtgattctcctgccgcagcatctcaagtagctgggacttcatgaggtgtgccgccacgcctggctaatttgtatt

SEQ ID NO: 15284 - DNA, 1133 bp, Homo sapiens
aatttttttttttcagatggagtcttgctctgttgcccaggctggagtgcagtggcgccatcttggctcactgcaacctcctcctcccagttcaagtgcttctcctgcctcagcctccggagtagctgggattacaggtgccggccaccatgcctggctaatttttgtatttttagtagagaaggggtttcgccacgttggccaggctggtctcgaactgctgacctcaggtgatccacccgctttggcctcccaaagtgctgggattacaggcacgagccaccatgcccagccagtctcaaatatttttgatgttatacatagctttttaaaaaaataataaaaacttaaaactgttttcctttgattatgtcaagattgtaaacaacaaaatttgagtatgaggagggtagtgtgtaaaagttttgaaataatccactaaaacataaagtgcatcatggttctttagcaaagggaaagaaaaccataactgcttaaatgtacagctgtgctccttctagagagcataatgctctcatattcttcttcaagtgcaggttgggttttgtgaaccccacacacatggtttgtttggcctaaaactatgacaggaggatgcagctggagaatatgcattggcttaaagaataaactgctttttagctacagctaatttctggttcaaaaaagacataactaaaggttaaaatgtctactagattctttgtcccatgtcattaacatgtagtttgctacatgttaataaacctaatatgcctttgaaatatatctaatatgggctgaatgaagtgcctcattcctataatcccagcactttgggaggccatggtgtgaggatcacttgagacaaggagttcgagaccaggctgggaaacatagtgagacactgtctctatttaaaaaaaaaaaaaataataataataattaggctgatgagggggcttatgcctataatctcaacactttgggaggctgaggcaggcagattgcttgaacccaagagttcgagaccagcctgagcaacatggaaaaaccccatccctacaaaaatacaaaaaaattagccaagtgtggtgggacgtgcctgtagtcccagctacttgggaggctaa

SEQ ID NO: 15285 - DNA, 1243 bp, Homo sapiens
gcgcaagcgctctgaggccgccggatttgaatcggcggcgttgttattgacgccatattggggccggcggcgggtgggagagttctacgagggaggggaagcggttggacgtgttcgcttgggttcctgctgcggcagctacctcgcaatctctctgcatcgatcgccgctcgcaagctactgaccgtactcgggcgtattaggagccgcgttccagcctcacaccccacggtgctgttttcgacttcagaaaggatctagtctcagcacagaagcgcctcaggcgcggcgcaaagctcgagcggacggcgggggcggccggagcctctctcgggggagccgcgcctgaggaggcggaagaacccccctgacgcgactggcgtgtgcttctgcccgccaccgcccctcccgctctcacccgggccgtccctggccactgcccctgccgcggaggcagcggcggcagcggctctcctttccacagccggcgctccgcgacccgcttggctcctgagcccgtcgggtaggctctcctcgagttcccgctcttcaccccttccctcaccctcttctttcgtcacccgtccccgaccccacccgagcccggcgcctcagctgcccccggccatggcgtgcggagccactctgaaaaggactctggatttcgacccgctgttgagcccggcgtccccgaagcgcaggcgatgtgcgccattgtcggcgcccacctcggccgctgcctccccgttgtcggcggccgcggccaccgccgcctccttctccgctgcggccgcctcgccgcagaagtatctccgaatggagccatcccccttcggcgacgtctcctcccgcctcaccacaggtgggacccggccccgcggccgccggggtagtggagagaactgggaacaggggtcctggggtgtgggatgcggcccctggggtgggggtgccggactgtgtggttcttgttcttagcaaagtagtagggcagccacgtttttcactaggtcctcgtagcccgaggacctaataagacacaatagaaatgggctgatgtcaaggggatagtgtttggaggtgggtaggggctttgccttgcccgtattgggtagaacagggacatctttttctttgggccgaatgattggaattgtttccgtagtcgctggagccccagcggaaatgatcagagaggacgatattattcgtaaatttaggcgaaagggtcacatttcacccc

SEQ ID NO: 15286 - DNA, 1814 bp, Homo sapiens
ttctgagatccctgtattcaaaaacaaatgacagggttgttaagttgtactatattaaacaacttggtctggtttatatcattttaacaagttttttggaaatgtaaaagaaaaaagtaaagctccatttttgtgaattgcattgtttctaaaggaagtattttgagtattttcatctgtttgtattgtttcgactatgatatcagatatccagtgtgtccattctggcagtggttttgagttacttcatggaacttggacatacaccaccaggtcctttatgtgttgttctcctgggagacttctttttttaaatgccagggctacttctgctttacctcagtggtatcagcacattgtaaattacgttaaaacacacaactcactgtgatctatgggagtgatatcaaatacaaacgatgttgtgttccttctctcgaacaaaacagcaaagggaatgccagctaacttctttgattagaaggtaatgtcatggaatagaatgctgtcaccagaaaatgctctcccactgctagataaatgcagaggcaaagtgtagacatctgtaggaactaaatatcaaggaaatcaagacatttattttcaaagcgagaattctatctacattctattctgcggatgttatttctgttatacatctgaattttaaaatgtttactgatagataatggatttaaagggcggctaattgattgtctgccattgttgataaactgttctaattggtttgtgaaagaactctgagaattagctaaatggaggctagtgtatttatttttagaggtacatgttttaagtaaatgtatttaaaacaaattttcatggtctgaattgtatatgtaaatgcatatctgtgtaagtatatgcaagtgtatattcttctactgattcagtcagacacgaaatccaactgaattacccggtagactgaatatctgacgggatttctatatggacatagcacagatgaaccaaaaatgtatttatattcacctgagttttaatgtttttaaacaaagttttctcctgcagtgcttttctatatgaaatagttgagtcaagcttgggcttttttcttcgttgttcccaagtcatgtaatgtatagtgaatttatccaaaacgccattgtaacgttttttactagagtgtttttgcacatttgggcgctaaagggattaaaacaactgatgccacaatgactattgaaggagggaaaattctcaaggttccatagtatcttttacaaaatggattaaaaaaaaaatgcctatgcaacttcaaatagtctgatgcctgcttccccaggacgagtgactcttccacggtgtgctgctttccctccgagcctgtggaaaggcagagcccttttgcagatacgaaagcaagcttttgccaatgatctttaatggagttaaaatgtttatggtaattgtaacctttcaaatgagttacgtgaaaagagcatctcacttttaatacacccagatattttcttcaagtctttgtgcattttagcaggacttaattttcttaatttattctttcctttcaattatagtgacatagagtagttggccttataagtagatcccatttagcccctgaacataataccatctgcagtattataaaagtcatttagaaggtcagggggataatctagaggcaggattttggacattgtgaaggaaatgtgctccttctcagctcacttcaataactattttctgagactgaagttttttagacaagaataagaaaactttgctttcttcagttatcacatgtgaaa

SEQ ID NO: 15287 - DNA, 1183 bp, Homo sapiens
tgcagtgagccgagattgcgccactgcacttcagcctgggctacagagcgagactccgtctcaaaaaaaaaaaaaaaagatgtagggtagtatctttgaaaagtatagtttaaattgagagtactttatgaacacttgcatttttagattgcttttccatttaaaatgttttaagaggctgggtgcggtggctcacgcctgtaattccagcactttggaaggccgaggtgggtggattgcttgagcccaggagtttgagaccagcctgggcaatgtggtgaaaccctgtctctactaaaaacacaaaaattagctgggcttggtggtacacacctgtaatcctagctacttgggagactgaggcaaggtaattgcttgaactcaggaggcagaggtttcaatgagctgagattgcaccactgcactctatcctgggggacagagcgacacttggtctcaaaaaaaaaggttttaagaaggtgatatttgagaattgttaattatagaattttaatctgaaacatttccttttatggaaatgattacctatctgtgttgtttaggaagattcttacctctgaagacaatgttaggaccaagatatgatagtcaagttgctgaagaaaatcggttccatcccagcatgctctcaaattacctaaagagcctaaaggtaagaaacaaaatttatttttgtcactgatttaatatactttgttcagtcttgttcttcaggtggcttttaaaaaaatcttattattttaaaataattaatagactcaagggaagttgcagtaattgtacatagaattctgtgaacccttctcccagcttctcacaatggtgtcattttatataattgtagtacaatatcacaagcaggaaattgacattgatacagtactgttaactgattgcagatcttatttacttttgatatgcatttgtgtgtgtgtgtagttcagtacagtttgatctcatgtgtaaattcatggtagtgattatagaactgctgcatctccacagaggaattccctcatgctacctctttatggtcaaactctctcctcaccccgtccctgtactcgccagagtagaaaaacaaaaatgtgtagtttttccatttaagagaatgcccacctgacatcccagcccccagcaaaacttactatagcctccacta

SEQ ID NO: 15288 - DNA, 2717 bp, Homo sapiens
aggttatttctttttgttgcattagtattcttttgaaactttgggaccagatttccaaaatggtgccgaacactggagagaagtaagaatgtcactgaattgtagggtttctggaggcttttctgtacctaccacccagggctaaagtaacatcagaggcctaaagttgttccaaaagtatgtgattggcaactgcagactaaaaaacatagatacaattctggacttttggccctgtgcgatggtctggtgtgctgcatttaaaatgcttattcaggaccagttctttattgctccatgaccatagtgaatagaacaaatcgcagaaccccaccatggagctcaatcctgttagtcacttttgtcacctccacatctccttctcactggtgataacatgcctcatgtactccacttgttcccaccttatgattaagccaagctcagcctgccaccagcatgctctgcaaggctgaagagtcatcctgaagacccctaaaggtcagtgggaaaaggatggctggagagacattacaattagctgtgtaattgtttctgtgaaattatttcacttatgtttactttagactaacaggaaattaagagtcctaaatctacccctatgccaaatcattccaagtagataattttacgtgcatctcaagggttagcaccctaaggcatgcttgtggggcattagaaaatgagatttttttttttttaaagcagagcctcctaagaacatcaaagttggtcctagcaaaatatataaagtccctaaagcaacttatacttgaaactttttttttttttttttttagaggggggcctcattctgttgcttgtgctggaatacattggtacaatcatagctcactgttacctcttgggctcaagggatccttccacctcagcctccctagtagctagaactacaggtgtgcacaaccacgcccggctaattcttaaattttgtttttgtagagacaggatctcactgtgttgcccaagatggtctcaaactcctggccccaagcaatcctcctgccttggcctcctcaaatgctgagattacaggcctgagctactgtgcccagcctaaactttcccacttctctctgtggcttctttccaacctctctccttcctctccccaagtcctgtttctttgaagctggtaactgaatttaagatgatatctggttggtgtttaaggtttgagcctcccaaggttctgtgcattttgaaaggagatttctaaaaataattaaggtgccctaactcctttcctcatgattcctactccgaaacctggatggttaggagcccagggctccctgatttccagagctatatcctgttggacctttgccaacagacctgacacttaggggttattgttataaatctaattctctaatattttttacatgttgtttcactttgaataagcaaatgaagaatcagttttctaatatgactttatcctcaagctagagacactagcctatttggtaaatcacacattacttaggtatatttattactataaccaggttggagcttccatgtttaagctgggtatatgatgggtttttgttaaaatgtgccttaaaaagcctattacttcaagagcaaatgattctttgggggaaaggcaaaaataattctatgacatagggcccaagttcatggtagtaagtgtactctttgattaatcacacgctaatatagattactgcctctaactttgtaagtgtggcaatgacttcttaattaaagaaagatgcaggagttatgtctaagcgttcagtttttcaaatctgtgttattggaaatgtcttcaagtcattttgcattgtatttttgatatgagaggcagcttattgcgatgtgtatggccatgtttcattctcaaatttaattctataaatacaaatcctaaatacatggctacagcaactgcactggaacatttttgcttggttttagggattgagaacttgccttgcaggtttccttcctcaaaaggagcagggcagtcctttccctgttgagtcaattagaatttttacatagaggtgagactgtgaattattttggttattttcagtgatgtagattagtgtgaatgaccagggtggaatgtttttgaaggaatataaagcaaaaactggttgacattcacaaactgttcttttgtgaacatattttggacccttaaatatgactaaaatcacagcaatattgttacatacgggttatatgccaactctgtttgaaatatactctggaaaaacagctgaattgtcttggttattaaagtatggtatgtattcaacttgtacagactggatgtaatttgtaatcaggtatagtccatgttttactttaagcagtacatcacttaataaccattgttaagccattgctttcaagaatgttaactgccaatttaaaagcatgtgtcctaggttcatgctttggtaaagctctcatttcaagtgtattcatagctaagctttctgggagcagaattgtctctttggtgaaaaggaagtacagcctttcctgtttctgaggttgcttaccatacatgtatgtcactgtttcattggccctgttacatccatttggtaaaatttatttgtcctgattaaccagctctcattttatggaaatgatgataaatctcactacttaaatttaatttatgc

SEQ ID NO: 15289 - DNA, 1819 bp, Homo sapiens
tattgcagccttgataatgggtactgaccactttgaaatggagattaggtgttgccacacttaacttatgtctcagtagctcctcacagcaagaagcatcaatcatcttagtgaaatatgcctatagggcagttctgttccagggaagcattgtctctgtgggtcacattaaggccttgataggaaggtaaagatttagtgtgaatgattccaagtggatgatggggagacaccactgtagggaaagcagattttcctgtctatcccttttcctttttttcagtgtccatcctcctggaaggggcactcagaaagacatctacctccttcttagtagagttctgaaaattctcttttacttagtaataaaaggtaggttcatatgcaggaataagacacaggagatgtaaaagttagcaaaagagatcacagaagagctagctaaggatgctggtttaatcgctgcctccccatttcaaaatgtcttttgttgacaggattctatcttggacattaaagtaccgatatttaaaggacctggagagatgcctgaaatccgatcctacatggaagagttcccattcccatactatatcattcttcgagatgtaaacgcacttcctgagacactcagcgatgccctcagacagtggtttgagttggtgacagcctctgaccacccatagaacagaaagaagagtccaaagtgagacttaactgtggtcagaaggtcacattgcttacccaggtgctcccttttggacaactacaaaaaattttattgtaatatttttattttacaacgtgatcttacagcctacagaatgctctctggctcccggctttgcctgggctgaggtttttataccaaacctggaagcagcagcaggtgcctgaactcgtaactagagaagagttatccttcttccctgccttggaagccctggcctgggaggaggtcataccccaccgttggagcccagctgcctgttttcttttgcaggggatctgggcacctgtgccttgaggagatgctgccaggagcatgggactctgacagtcctttgtataaaggactaaagggagctgcccttttgaccctgttctaagctctgccttgccaagcccatagtgtgtgcccaaaagctgtcaagtggccaagacagctcgtttctggagagtatgagggtgtgttttcttattgtgaaaggaactaccttctcttagagggtaggaagaatgtggtgtgtgtgtgttctcataaagcaactggacattataggtgcccaggtcatctataaaaacgatccttgggctgtgtaaaaatgaagtggcttttcagtatcctctttcacacttgctgcttcgggagactatgcaatgatgggaaggtgattgcccctttatttcattcagtgccatggtccctgttgttgtagtaatttatttgtttagttcatttttttttttcttaacagtcaaggggaagagtgattcctcacactgctttcaagctggactgagccagtctcattctgggaaagaaacgctgtgtccagaactcagcagctccatctattttttccagtcgaaagaaactgatctttaggcagtttttacttggccagaaagcagtgctgaatacttgaaactgtgtgctctgttctacttaatgttctgtcagaatgttcttttgtaggcagtatgtcatgatgtaatcatctatctccttgtctgtttccaagttacactgtgaagtctgcgacccttttgaggtggtcatcaaagacacagattccttgtttaaccaagtgtccca

SEQ ID NO: 15290 - DNA, 1193 bp, Homo sapiens
gccatgaagtcttaagagccaagtgctgtgtgcggctgcccagcacaaaccgtctcactcttttcattgtccataggcttttgcttttttaagagtaagtttttttttaagtagggtataatttatgcacgtgatgcaaaattagtgtaaaaaaccaatcccctaaaagcctacatcctattcctgtccccaagggaccctcctcagagcaaattggtgttaccaattccttctttcagagatattttctgcatatatgacatatatggatgtgtgaaagtgtgtttctttgccttcattttagatataaaagtatatcatagagattgttctatgtaagtatatagagtcccggttctttttaatagctgtattgaattccattcttgtatggctacacctgatttacttatcctgtcccctatagatggatattatgtttactttgagtccttttgtcatgacaggcaaggctctgatgaatttccttgtatttctcagagttttaagaggaaacctgggcaggctgacaatgaacgttccatgggtgatcacaatgagcgtgtgcacaagaggctgaggactgtggatacggacagccatgccgagcaggggccagctcagcagccccaggcccaggtggaggatgcagatgcattcgagcacattaaacaaggcagtgacgcatacgatgcacagacctatggtacggtcctgggaaagctgctgcctttgcccactgagctctctatgagagcttgtgctatgtgacctataataatgatacgtatttgtggggtacagtgtgaggttttgatacatgtatacaatgtttaatgatcaagtcaagtcagctgtgcctggcagctgattgtatacacttatatcaggggagagaggaaatggctttgtaaacataagaaatgtgcagaaatacagtttgtttttggtacaaaggtatctgtaaccaagtgaagatggttaagatttcttggtttagtataaactctttaaatatccttaaatataatagttaaaaataagttgttcacatccaaaccccgatatcagggtttcttagtactggacatttctttcttcttagtcacctctggataggtccctgcactgacaggtgctatgaatttgaaatatgtgttttctccataagtgcaaaagggaggaaaaatgtc

SEQ ID NO: 15291 - DNA, 1245 bp, Homo sapiens
tatatattttctcttacaaaattaaactttctgattgagagtcactactactttttctttttacttctgctcagcaggctagtattcttctcaggttattttcctgtataaaatagtttttttcaacatttcacagttattactatgtctgactgtgttctctccagagcctgttctgcccttactcaaggactttttccaaaatactgtccttctagtatacttcatttaggtttttgtcttggcaaagtgacaaatgaccacatgccagaggcttctacaaagtcaagtcatatgttaaatctgatgtcaagctgtgaaactgcataactattagcaccaaagaggagaagaatgtcagaagtctcctgtacttccagcggatttaagataatgagctagaaaaagaattcagtatgtgtttaaattgttttcctgtggcaagaatgaaatctccttttaaaattgcttttgtgcctaattgttcacttcctttttcttttttctaagggattttgcttgcccaaagaatttatggaagattcagctggagagggagcaactgagttccatgactatgagggaggtggaattggagaaggcgagggcatgaaggatgtgagtgaccagatcggaaatgaagaacaggtacgttttcacataggtatacagttgacagaagatcactctctttcttttcaacatgtaagttacacataaaaatggtttttactaggttaataatttttaatctgtgatctacagagccctagatatattggtgcttcggcagtgggtgtaaataaaaagcctaaaatccacaggaaggaacctggcaactccatcattggttttggctataattatggaggaaatgatttttactttttttttttaaatgggcagatatttactgatgattttctagagtatttttgatagtatttttaagcataaaaggcctggctatcttaagtgataattgcattaaacaataatgccaaaatttgctgttaataggttttactgttgtatatctttaaggcatagagtgttttaaaaaatctgtatccttttttggttggaatcaagcaaccttctgaactattcagatgctgtgaactaagattgttacattgcttggattttttaaatgcctgtctcatttgtgagtgatttatgtgtattgggtgtatcacttatattctaagttaaatcagatcagaaacttgtatttaaggtaat

SEQ ID NO: 15292 - DNA, 1117 bp, Homo sapiens
tcttggcatgggactgtggccagattctgtgccctcagctctctttgctactgaagattcacacctgtctacagtccgaagagatggacagatcttagtatattgtctcaacaggatgagcatgaaaaccagcagctggacaaggtcagtggagccttcagcttgtgtctctggtttcttggctggtttttatttttgctggaaatggtcaggacacaatatatttaactggagcattctgtggccatttattgtgtagctgtcatagttttattgttcattgtgatattgctccctattgattatttattaggtatgttttaactttcttcctctgtgggagactctccttttctctcttacctttgatccaatatttgtgaaagaggttttctcagttatttggaatgtgaaataaaaggttattctagtactgagtttgttcattcaaatgaatttcaggagtcagccttttaccttgcaagacttagagaaaattatgcagtcccccagccctgagaacctgaaattcaatgcagtcgaagtgaatacttactggatcgatgaaccagatgttttggtcatggctgttaaattgctcatagaaagagcaaccaatcaggattggatgctcagagttaaatggctttatcatttagccaagaatataccgcaggggcttggtgagtagaacagcttaatttgtccactgatgtgatttatatacacttatgctatttaagtgcctcagcagctgtgttaatctgtgactacactgttaaaattacagttgggaggtctcctaggaagaaatttgtggtctagcattactgttaaggagcaagtctgcctgtagatgtgtcacaagataaacttttgtttccatgttatccttagcatttcaggatatagtcaccttcctaacaaattcaaaaggaaagcatactgtattattttactttttagttttgaacatctgctttttgtgctgtactactgctacagaaccattctatatgggaaaggtattagttttgataaatgcatttcctctaaaagtatataagattctaatcttattttagttccagtgctccatgttgtcacacttggagtt

SEQ ID NO: 15293 - DNA, 1163 bp, Homo sapiens
tcattttaattttttagttatgaacaaagcttctctgaacattcctgcttatgtctttcgacacacacatgttcattggtgtttggggatactagaagtcatattgctgaggcatagggcaggtatatggttaattgtaataggctgtcctagttcttcagatttctacctcaccagccgcgtatgagagtttctattgtttcatattctccatatcccttggtgttcccggtagacacttgatgattcctctcctccttttcctcctcctcctcccaggttatatgcttctggcaggtcgagtcaggaagcaggaggaaattgatgtgattcaagaagtccttgagaaacatttcaagaaaaaattgtgtcctcaatctcttttctccaaagaaaatgttctaaaattgctgggtgagtaggccaaaatccctagaggaatatgatttgagttgtactcattagaatctaaatatttatttttccttggataggtaaattgtctactcagatatccacattggagtgtaactttggccatatcgtgtggactgagggcatgcggagactcgcgatgctagtgggaagggcattggaatttggtgaacctgtgctgctggttggagacactgggtaaagatctgtgacagtgactcatgagggttcatttcaattccataggattacttgagttatcactgaagaactcatgaaagtattaatccccccttctttcctccttcctcttttttcttttttttttttttttttaagaagagactaagagtgggtcgggggctgggggagggatagcattaggagaaatacctaatgtaaatcacgagttgaggggtgcagcaaaccaacatggcacatgtatacctatgtaataagcctgcacattctgcacatgtaccctaaaaaaaaaaaaaagaaactaagatctgttactgtttagtttcctctaccttcagactaggttctttgttaatggaaaataatggctttattattattatttttggagatggggtctcactctgttgtccaggctggagtgcagtggtgcgatacggctcactgcagccttgactttctggactcaagtgatcctcctggctcagcctcccaggtagctgggactgcaggcatgcaccaccaca

SEQ ID NO: 15294 - DNA, 1196 bp, Homo sapiens
tgtaacagccggcttttcttgatgcctgagctaagatagttaaggggtgatgcataaggtgctggctttctttaggttctgctaatcttgctggctgtatacaggactagggccaattttcaagaggggaattgaactgctgctttattttctaggaattcagagaatggggttagtgttagccaaaaggaagttgggaatagtcaacagaatgtggtgatttaaatgaaattagactgcaggggaaagattacacaagaaatatgaggtattttcagccttggcttcttttctgtggggaaaaaagggactattttaattgaaaattgttcctccttgatctgcagtgtcataatttgttttgaggcaagactagctacagaaagtaatttgctttgaaatttgatgataacctaggatttgttgatttgtacataatgcattttaaaactttgtactgatttatacactagttcttgctgtttgtttcttcctaggtgttcttattgatgccatgagaaaaggctattggattattttagatgaattaaatttggcccctactgatgtgttagaggcgctgaataggctgttggatgataaccgtgaattgctagtaacagaaacacaggaagttgttaaagcacaccctcggtttatgctttttgccacccaaaatcccccaggactttatggaggcagaaaggtatgtagcatttgtctccttccttcaatttgttaacacatcagatagtagatttttcgtagtaagaatgaaatgtttttacttctcctttaatattttatggtgaatgtcagagcctccatattggaaattaaaaggcaccttttactgcattcttcctgtgctttgtctaggtcctttctagagccttcaggaatcggtttgtggaattgcactttgatgagttacctagctccgagttggaaacaatcttgcacaagcggtgtagtttgccaccctcctattgcagcaagttggttaaagtcatgctggatcttcaggtacttagtttcaaatggaatgtattgattatacttggtgatcaaaatttcatggcttcttttgttagaaaaaagaatctgtctgttgatgtatttttccaagtagagatttttttttattttttattgtttttaatttttttattatttattttttgcaagacacagtc

SEQ ID NO: 15295 - DNA, 1196 bp, Homo sapiens
gcccaggctggagtgcagtggcgcaacctcggctcacagcaggctctgcctcctgggttcacgccattctcctgcctcagcctccctattagctgggactacaggcacccgccaacacacctggctaattcttgtatttttagtagagacggggtttcaccatgttagccaggatggtctccatctcctgacctcgtgatccaccggcctcggcctcccaaagtgctgggattacaggcgtgagccaccgcacccggcttttgtatctttttcttcttgtaaggactatacgtagaagacttattgcatagaagaagcaataatggtatatttttggtaatggttacattatcctttaattatgctaagtttctatatcaggttgaaagacattttatactacaagcagttaaaatgagctgacatagcttcttctgtttcatgtttttctattgtcaacatagttatattaacttcctaaaaagtgtttattatgtattgttttacaggttcacagaactttatgtagaagaattagaaagcaaagaagacttacaggttcttattgtagattatctgaaaggattgagtgtgaacaagaatacagtgcaaggaatcataaagtaggttcccttttgtatgtctttataagctctttctctgaacatgaaaatgtgctactcgtgcacacacacaaatatgtattcttttttacttctaacttgagaaaactgatggcaggattattatttagattctcttgtaaagttggaacctgatatgaactcctttaggtttttctaaggaaattacatagaaagctatgaatcattacctatgagaagatataaaccatcagataatgctctcctgattacctctatattcatagctgagggtttgaattcttggagatgtacatggcttgcgttttgaatctgtcttgaagaaggttgcttttctatttgcaatatttatactagctatgtgggatgtaaggagaaaagggttaatataattgattgtgtcaggtttggaattaatggaagcttagcctaataaataatagagtagttacgtggcttgtgctttaatttgagactgttattcctgttttttgtatgccatatggacaacatgcaatcttttgtgtcagacaacctcaattctagtattggttctatgagaaactaatt

SEQ ID NO: 15296 - DNA, 1217 bp, Homo sapiens
gtcttccttactagacagcaaactcctcaagaagagtatctatttggttttgaatcccagttattaaactacagtatctggctcatagaactgaataaatgtttgttggaaatgagtgccttttccgttgtaaacacttacattaagtaccccccgattttgtaggtaattactttagatttttgtatcctcttagtcagaattatctcatgccattgtcctggttcctgaaattgaacaggatacaattttacgactaagtagattcagcattcattcccctatgttctcagacccttgggagttctgttttgtggtttggtcagagtagagaattgcgttctatgatattcccaccaatcaatgaaaatatagatactcctttttgaaaatagcttaagttgaaaatgcatttaatactctgataaacctattacaaagcagaaaaattaagtccaaccattgttaagttggggatgtctgtattctttgtgtttgaaggtttgccctgagatatttcaaggacacatccccagtctttcaaagacttttcctagagagttcagatgctaatccagtacgctatggacgtaggaggatgaagctccgggacctaatggaagcagccttcaagtttctgcagcaggagcagtctgtgttccgggagctctgggactggagtgtgtgtgtccctctcctcagaagccatgacaccttggttcgctggtgcgtagctgttagacttttttgcacttctagtgtggggatggtacagggcatgtgtggagttgtgtgtgtcaggagggaaaggaaaccatttaaaatttgttatttttgttcttgtggcttttggggttttacttcctttctttaatcatgtgtcattgcagaggaaaatgagatgatatgaatggagtttcacctttttcatgttccatcaagtaaatccattgtgcctgatttgtattttctgttcttaaatgtgttgtaataattgagatttccttttctagtgttcagttggctagtggattttatttattctttattatcaactgcagataaactgaatttacatactttctttttccctaggtatacagccaattgtcttgctttggttacctgtatgaatgaagagcacaagttatcatttcttaagaagatatttaatagtgatgaattgatccatttcaggttgaggtaagcaggaacct

SEQ ID NO: 15297 - DNA, 1239 bp, Homo sapiens
aaggagcagataataaagagcttgcaatgaaagctgagagtggtccaaatgaaacaaaaaacaaggacctaaaattgagttttatgaaaaaattgaacttaactctttctcctgctaaaaagcaacctgtttcccaggataatcagcataaaataactgatattcccaagtccagtggtgtatgtgattcagagtcttcaatgcaagttaaaacagtggcatatgttccctccataagtgaacatatcttgggggaagcagctgtcagtgaacataccatgggggaaaccaagtcaacgttattggaaccaaaggttgctcttctagcagtgactgaacccaggatcggtatctcagaaaccaacaaggaagacgaaaatagtttgttagttaggtctgttgacaatactatgcattgtgaagagcccatttgtggtacagagacttccttcccatctcctatggaaatacaacagacagaatccttgtttccatcaacaggaatgaaacaaaccattaataatggaagggcagcagctcctgtggtaatggatgtattacaaacagatgtgtctcaaaactttggcttggaattggataccaaaagaaatgataattcagattattgtggtatttctgaaggtatggagatgaaggtggcactttcaacaacagtgagtgaaaccactgaaagcattttgcagccttcaattgaggaagctgatattttgccaataatgctttcagaagataataacccaaaatttgagccttctgttatagttacaccactggttgagagtaagtcgtgtcatctggagccttgcttacctaaagagactctagattcttcacttcagcagactgagttaatggaccacagaatggcaactggtgaaacaaactcagtatatcatgatgatgataactcggttttgagcattgaccttaatcacctgagacctattccagaagccatcagtcctctgaatagtccagtgagacctgtagcaaaagttcttagaaatgaaagcccacctcaagttccagtgtataataacagtcataaaggtaatagtttgtattatcttctataactttgcattttatgagaatgtaaaatacataagatgaattggtgctttttcttttttgataacataaaaagtagcatattactcagcccctgttatctagaagtgcacatggagggtttttttgttttttggttttttttag

SEQ ID NO: 15298 - DNA, 1217 bp, Homo sapiens
gtgaaaccccgtctctactaaaaatacaaaaaaattagtcagacgtggtggcgggcacctgtagtctcagatactcgcgaggctgagacaggagaatggcatgaacccacgaggcggagcttgcagtgagccaaggttgcaccactgcactccagcctgggcgacagagcgagactccatctcaaaaaacaaaaaaaacaaacagtgaattgcctcagtatttaattttttgttatatgtaatatttaatatggacatgtcaaataactaaactttaatatacttttatcttctataaatgtgtttaatatatttttctcttctacagatgtgtttttaccaaattcagctcattctacctctaagagtcagtctgatctcaataaggaaaatcaaaagccaatttacaaatctgacaaatgtacagaagcagacacatgtaagaattcaccattagatgaattagaagaaggagaaattagaagtgatagtgaaacatctaaaccacaagaaagttttgaaaaaaattccaaacgtagagtgtcagctgatgtgcggaagtcaaagactatcccacgacgtgggaaaagtactgtgtgtttagataaagacagtaggaaaacacatgtaagaatccatcagaccaataacaaatggaataaaagacctgataaatctagcagatcttcaaaaacagagaagaaagataaagtgatgagcacttccagcttggaaaaaatagttccaattattgctgtaccctcttctgaacaagagatcatgcacatgttacgaatgataagaaaacatgtaagaaaaaattatatgaaattcaaggcaaaattttcattaatacaatttcacagaattattgagtcagcaattttgagttttacatctttaattaaacatctcaacttacacaaaatctctaagtcagtgactaccttacagaagaatctctgtgatattatagagtctaaacttaagcaagttaaaaagaatggcatagttgatcgtttatttgaacagcaactaccagatatgaaaaaaaaattgtggaagtttgtagatgaccaacttgattatttgtttgcaaagcttaagaaaatcttagtatgtgattccaaaagctttggaagagatagtgatgaaggcaaacttgaaaaaacaagtaaacagaatgcacagtattcaaatagtcagaaaaggagtgt

SEQ ID NO: 15299 - DNA, 1216 bp, Homo sapiens
gttttacaatttattttgaccgttttttgggtgaaaattgcaaacagccaagcaagtggctggaatgccccagtctaagaaattcaaaaacaatcactgagtaagccctaattacattaattacattttactcttgactccaggaaaagaaagcaagcttttatctaatctagagggaagtattcgtgagcaataaaaatcacttttttgagttgaataataatcagttaagaatatttaccgcatagcaacacaacatataaagatttgttacaagttgtttacggatgtttgactatttttgctgaagtattttagagtattgaatgtcttctctcttcaagtttctttcatgttcctaatttcagctcctgtagccagagatcacaggtcttccctgtgaaactttggtttctttctataaatgtgtgtggttttcagcgctcaactcctgtcttcaaatggtagtaagttctacttctacttctgtcattcagaacattttatgtcaaatgatgtaatgcagaaattcttgtgcatatttgtaactgaaggaagctttttagatttatttttgtttttaataaaattcagattcctattctaaactggtacataaaagtggtgaatgacttgtatcagcaaatgagctgcgaagtgttctgctctagcaccgtgtttaccttacacagaacctactaaaaactgaaatgtcacttttgtacgataatcatggtttttaagaggctgggtaattggccagttaacacatcatctcttgcatttcaaaattttgtgttaaatggagctcttcacaatttcatgagtcctaatttgtgtgaagcacaacacgtcatacattgctaagtgattcttctcatcagaaagctgatttcttagagtatttctaagttaaattaggtatttcattcctttatcaacctgctggctttccaaccctaacatatgcacacattcttataaactctaccttcattttagtaaatccatccattcatttgctcattcttttaataaatatttgtttatcatatattataaactgcactgctattaccaataccaagttacatgtccattccagtcacacagtagtttgatggtattcccatcttacagatgggaaaataggctcctaaaggttaagacttctgcctgagtctgcttttccatcatcatctgtttcaggcagaat

SEQ ID NO: 15300 - DNA, 1926 bp, Homo sapiens
ttcatgagtgttagctttttggcgtgttctgaatgccaactgcctatatttgctgcatttttttcattgtttattttccttttctcatggtggacatacaattttactgtttcattgcataacatggtagcatctgtgacttgaatgagcagcactttgcaacttcaaaacagatgcagtgaactgtggctgtatatgcatgctcattgtgtgaaggctagcctaacagaacaggaggtatcaaactagctgctatgtgcaaacagcgtccattttttcatattagaggtggaacctcaagaatgactttattcttgtatctcatctcaaaatattaataatttttttcccaaaagatggtatataccaagttaaagacagggtattataaatttagagtgattggtggtatattacggaaatacggaacctttagggatagttccgtgtaagggctttgatgccagcatccttggatcagtactgaactcagttccatccgtaaaatatgtaaaggtaagtggcagctgctctatttaatgaaagcagttttaccggattttgttagactaaaatttgattgtgatacattgaacaaaatggaactcatttttttttaaggagtaaagatttttaattctgtgattgtgtgtatgtgtgttgaaactgtaaagcttttatgactctaatattaatctcttaaatgaaattaaaaggcaaaagaacatgattgagcttaaatgatcatttcttcctgcagtgattcttggattgttttctcatgtatttgaaaaaaaaaaaatgaagaaaaataatggaaaatggaagtaattactccagctaaaaaaagcttggacttagatttctttttatgataccaaatgagaaataaaccaggcaaatcagaaggaagttaaagaagcaaatataaattcaacaagtgtcctaattatcctggatattggaatatttgattttccttacaatcccgttctagaatgcctgccgcctttcaacactttcaagagaatttcaacacttacagagtatttatattgttaacagtaattttgctaccaaaaccttcagaataactttaataataaaatgacactgaaataatagactatacaaactctatattttttcagttggtgttaaaataagtcacattttgataccagtacaagatgtcttttaaataaggatgtcatcagtctgatttttatagcattaatgttttatgaagaaaaagttcaaaatgaaagcattaattgctgtgattattagaattctatcatgactgtattgtagtttttgctctatttcagataagcaagatctaagaagttatcaaaactattctttaaaatgctaaagcaggtaactttttcttccattattttttcctcctaccactgagttttgtaatgaattccttgtgtatacaagcaatacaggtgaatactaaactgttatttttagcttcttcaaaagctattttagaaagcttcctggaaataaatgtcttctgtcatttaatttaaataaaaggagtgttaattgttcccaaatttgattacctagctgaaacagatattggattcagcatagtaatagtaaaataaaattggcagagaaaataactgtagactaggataaagcatgactcctccatagcattgttgcttgtatgtacatctgtcactccactgaaagggacctagtcactttaaagaggccttttatctcagcacgagatatccaagcgtgaatgctaaggcttgatgtttccattaggatttagcattcgagatttcagattttatttatagtcattgatgtgttttgctgtattataacacatttaagggaaattttattatggtttttacatgtagtcatttcataaaaatatccagatag

SEQ ID NO: 15301 - DNA, 2229 bp, Homo sapiens
catagatccagctatccagactatcttgtgagagaataagctcaccccagcaccagaaagatttgagcagaggaatattcctgtaatgaatagaggattgtttgattctcaggtatatttcttaagccaagattgaatgcagtgtcaggcactgccttaacacccacagagataagatgaacaaggtactatcactgcctaaaatgagcttacaattaagtggatagacatataaaagcttcctttcaattcagcctgagactgtttatatgcatgtgctactccgaatgacgtttgtatgggtcaatgctgatttaatggggaaaaaaagtagaaaatttccccaattgcttagctgtttgacatgtttctgagctgcaaactttgtcaactcttttgacccaacatattattctctccgtattatctcttctaaccacaatgcattaagaaataatatttttatgtggatgtcctcctcaataagtaaagatctccatccatatttaattaattggtaagacagtcaaattcatacatttacatttactttgtcaaattttttggtctataaaaagcatagagatctaaagaggatacactgctaacaagtttagaaagcacctgcttttttttattattattatttttgtgatagagtcttgctctgtcgcccaggccggagtgcagtggtgcagtctcggctcactgcaacctcggcctcccaggttcaagtgattctcctgtatcagcctcccgagtagctaggattacaggcgtgtaccactatgcctggctagtttttgtatttttagtagagatgggtttcactgtgttggccaggctggtcttgaactcctgacctcaaatgatccacttgcctcagcctcccaaagtgctgggattacaggtatgagccactgtgtctggcccacctgttttttttgaaggcagaaaaacattcaatattaaaagcattcaatattatttcaacctgccttggctctagtgaatgttcatgatttgaaagaactgaaagacctaaaggcagtgtctctattgttgactacaaatgtaggctctttgttggactatgactataatcacacactgataatatgacgcaagtagaggcagtactactaagtatctagcaggtgctttgaaaccccattactaagtcccagaagactgtttcctaaatttgaagtggaagaattaaatgactcaatggaaccctttagctgtgggtccattgatgtgtgagttttagagctggaaggaattataattttgttgtttataattgctataatatagaaattataattgcttttctttctacttatgagttaactagatccagagatatttattcaagacacacattcacacacacatacacacacacacacacacaccccacagctagtgacaatagttaagatttggatttaaggatcctatctttctttatcccactttcttttcaatcgcattcataacttattatagaattatgtctcaatttttacaaatgtgaatgtcttattggtatttttagggcctatagaatggtacacctcatgtagaagaacttcgacttttgaaggtatacaataaataaaacatcaaacttgttagcattcgttctggtttaaatattttaggagttgagttcagcagaaggaaatgggctatcactacatttaagtgaaatacaaccctcaagaaagtgtatggttcacagccactcctttaataaatcctgtgggttgcaattctttgtaagaaactcatgaaaaagatatattgattcaacaaaattggtttgctgttgattatacaaaccaataattatgcctagaattaaattgtggacacaaaaaagggaacagaccatttaaaatgttttatttcaaaatatcgaaaagctattaccttcaatactctaaatatttaaatattaattattgtagacatcagtaagaataaataaatgttaatcattatagaccttactaataagaatatatactgaattgtccacatccagagtattacaccctgaacaagaaagacatgagagcctgacagtcatatatattatgacagctgtatatctgacaatatgaagtagaaactgaaaaaaaaaatcatcttagtgggaaacaaatacatgcttaaaattgttatatttactgtaaaactcctgataatcttagattg

SEQ ID NO: 15302 - DNA, 1885 bp, Homo sapiens
tgaataaaaggttgctgaagcaaaatactgcaatgaagttctgaaaatgaagagttaggactttacatgatttctcttgcctcattccctcaagaatgcacatatagacacacatatgccaatatcttttttatgtagttcaagtataactttgaataaaatgacttacattcaaggaaggtcaaaactattattctgaaacaaaatgtgacaattctagccattatgtgaattgtaagggtcagtaatccataaattatttggatggtaattgtatgttttattaatgtgatgtaattttgcactattgtattgtcatatttaatcaaactcttaaaaataccctgaaacataatgccaaatgtacagtttataggttcgtgttatttctgataagaatttaattgcattgtgctaatagttgtttattgctattaactttctgtgtatgtattattgcgatgcagacccaatagggttattttaagcacactaattagtcatctggatttttatagataaaatcacatgttgatcagaaatcatttttctacttatttttttgtagagtatttttccacacttgaaaaaaacatgattattttatatcaaacatcaacttttctttaaatcttattttagtagctaatgcatgtttgaaataagatgtgttagaaattatatgactatattaaggttgtgtttatattaggtgaaaaattgcatgcaattggtgaatcatgcagctttggggacatttacactgccactcacacacaggctctgtctcaatccgtatgcatgattcacgtcctttcaaaagtcccttttcaacatttggtaaagtgaaaatgttattcatagtgctaatgagccaataaacaatgctgcgtttcttttttctaactgcagcatattgtggtaaattttctcccaaaactttatttttggagttattgttggcaataaatacaacaaattatttgttggcaagtgatacaatttactgtataacaacttaatagtacaaagcatgaagatgtgaaaatatcatcttaaccagtttcattctatgaacataatattctggcagctttttctataactgagaatggtatatctttttatacactgcctaaatcagtactactgccagtcacctgaggtcaggtctgcacaacactaaattgggcaataacatagaacatctaggcagtcttgacagtcaaccagtgtaatcactaggggaagaaaaagtaggcctacccttttacttattaacttaagtaataaaaattgtataaaaatatgaatgttggctgcagaggagcctttacatgcagataatttgaagcagtctttgaaaataacaaaaattattccatttaatgaagggtttgttttgtttagcttttctcttttattcagaaaacatacctgtgcttttgaaagggcttaatcccaaacaggtaatatgtgtggatcaatcatctctcctcccatgaaattaatcattcatggtaatatattaaggctggaacgtagctcttagtgacttaaaacatgacagtaagcatttacactgttggaaggtaatttcattgctatgttattaaaatgatgggaatcctatttatacatttatttatttatttatttacagaagattggttccttccagttcaatttaacagcttcagtgaagttagtataatgataagaaaaattgactgtagctattattccaagtgaaaatcatgcagctgagtcctgctgcatcctgggagcaaagcattaattcaaatgaggagtagtcagtcctagcactgtagacgccgactttaccaaccaagatagtgtatgtgtgtgacattcagctaacatt

SEQ ID NO: 15303 - DNA, 1187 bp, Homo sapiens
caggtttgttctctttccaaatgttgaatgaaaaacaaattttccaatccatttatccctggggaaggattcatttgttgcgagtgccagtatacttaaatgtatactttatatacatttaagcagaaatttaaaatgtggtcttttttttttaaaagaaacacttctgtgtcagaaatgaaaataaatcatgttttttatttttaaatagaaagcacttcaaaactaaaatacagaaatttacaaaaaagaaaaattattactaagcccttgctcttatttttggcagaataaacattgattttggttggggctgcaaggatgcctttacaggtgcacaagaacgctagagtggcccatgcattgctgtgttctcttctaaaacaagctactaacaagagagagaacacatgcaatttattaccagtaagcataagtcatatttaacattggaataactaagcattttatacaaagatttttctttgacccagtttgcatttgtacattttatttttttagttcaacagctgctctgtcacataatactttgtaaatactagtgtgaaaaacagataggatgccttttccagtggtaggagcatctgtaagtgcatttaaatcattagaagcttttttccaaaactagaaacccttattaaaaaatagacatttttttctaaagattattagttaaaaataactaaaagagttccttagagtaatcatttcaaccaaatgaatttcaagcaacaacttacttactatttatcaaaaagggatttaattattttgaatataattataaattaaatttcaaatatttaaaaatactattttatataattccttatgacattttaaactttatattttaaaatatttgaatacgaaaagatcagtctacctctactccattctagacaaagtattaatccttagtgaaagtaattaattaaattgccaacttggcattattattaaacttgataggaacgcaacattaaatttaaaaatgttttcccgtgggtaattttctattatatattttcatatgggcaaagggaaaaaatgataaatcctctgtaatcacaaaccccaatttcgttttgtttattcagcttctaaaatattgaacacccagacttttaattcaacctttaagaaccttatcatttatgtttcag

SEQ ID NO: 15304 - DNA, 1191 bp, Homo sapiens
atcttatgaaaggaatttttcagctccattataatcttatatagtggtctgcccttagctaaaatgtcattaaacagtacatgactgtaaatgaggaattatgttttcactgtttttcactcttgtagcatcctgagtttttcttcacagaacatacatcatggcataacccagtagttaccatgtatttagtgtgagtctccctgataaacttgtaagttacataagatcaggagatatatccagtttgtttcccattgtaagcagtgcttagtcagaagctggcttagagcaggtgcttagcaactgtttgttaagggaaggatggaaatgtatttaaagaagtgtgtaagtcaagttgaaaagtatatgccaaagatttatatagtatacatggatagcgtggtggaagactgagtatcagggaaagatggcaagtgaaggtaatttcagttggcacatgatgacgctgtcaacatttcttttgtctttatctggtggccactttgaatactaaaactgaagtcttatttcatagattttaaaattctaagtatttttagtatgacctttagaacctttttttcggaaccttcccaagttaaccataattattttgatcatagcagtgaatcaaggtcaaaacagatttgccgttttttttgaggatgagtcaacattgctcttcaccaatcctattttgaaatggtgtacgttagagcagaatgatctttatttcagtgatgtttcccttgtgttattttctggtttcccactcatgacaaaatttcatagttctatatttttctttgtgttcattattggaatttgctatggtaatgcattacatttacatagtgcaagaccaaaggactgaggatccatcctttgatttttttttttaagtgtgtgtgtgtatggttgactgttgtatatacaatcatgaggttatttgaggtatctgatggtgttgtgaaggtcttctgattctacgttctatgaaatttctattatatccttggaaacgaggtacctggttgatgggggagaggtagggtggtagggtagggagtctaacagatgtgtctgttacgccaagagattatgcttgaaccatctcagatagtcatgttatctgatgtgggaagaaagaggagaccgtggtatatatatgtatgtctttcacttgtt

SEQ ID NO: 15305 - DNA, 1723 bp, Homo sapiens
accccttgggaaatgtcctgaatccctcaactgagttttactttccaagttaggtgtttagttcattcttctcatgcgatagtgaaagtaaaagctttcctgacccttaagactgacattttctcgttagggaaagagactcgatagcagggtagactaacagtagttcccaaataaaggcacacaggagaaaatgaatcaatagaatctaattaaaattactactccagggaataagaagtattgaggatttattttattttgaattggttttaagtatggaataattgtctttacagttataaaaagtaattagtggtgtttacaaaatgttgggaatttctgctttgacagataggtaagtcccatgggaatttctgctttgacaaatagttaagtcccatggccttcagagaggcaggaagcagaaactttcaaaaaagtaacatttctctggatttaatgtggaaatagagaaaaatttaaagaataattaaaaaaccatggtagatgaaatttggtgattacatatagtttcggatgttaatgctagttgagagaagagaaaaagatagcaagtagaagcagagaacaggatcattggaagggacctgagaaattgccatttcatccattttagcaaatttaattagcatagcatgtaccagtactaggatcttgagtgagtgtgtgagtttagctctgcctaatatattactacttgggggatctttgggagactatatcttcttggagattgagtttcttctataaaataagcataatgctaccctaaatgtaagggttatcatgaagataaataataaaggactacaaaggaccaagcaaataggaattattttttgcggtggagaaacaagtgcctggggagaatatatgaccgaagattctgtagtttatgacttaaacaggcccagaatttagtttttcaaatcctagtagtgtgttttttctgtcttgccaaaaagcagcacacctcaaagaagggaaaaggtgtgaattgtgggtatattagggttattagtgcttccgagggaagataggcatcactacttcccagagatgcccctggaaatgatatagaggatgttgaagaattcaatgtgatgacggaatgaggcatttgtagtaatgctgagaacagaaaaatggactaagtggaaaatttgtaagcatgactttgaatgtagatttgttatgtgaacaaactacctagtttatttttagttcaatacaataattgttttaagaaaacatgaaataactactcaatataaaatgcattttaaaactgtaaataagtcaaaactttattctttttatcataatggtcactagctgagtcacaaatactagtacactcttctgagccatcttctttattcatatctacattgtgtggttaggcatctgttatgtggtgtcacatgataaaataaagaacttcttcccataccattcatcagtcctatactgcgttttattatatacaggagagcacttggtagcagtgatgtcagaaagtgcatggaatttagattcagaaaacagtttagatctcaggatcaccactagccatgccatctaacattttaaaagtaattactgtactagggtctgattgaagtgctttacgtgtattaacttgcttaatatttaccataggtacaaggataagtagccatattttagaagcatagag

SEQ ID NO: 15306 - DNA, 1127 bp, Homo sapiens
gagattgttatgagtattgaaacaaattttcttttaagagatacagatttttgtgaatgaaacaattttattaaagcattttttaatgttttacagaatatattcaaaattccatcaaaaaagaatggaagaactaactgaagttggtctacagaacttttttagcctttttctactgttagcagctgttgcagaggtagaagatgttgcaagtcatgttttagacctcctgaatttcctcaagcctgcttttgtaacgtctcagagagccctcatttggaagggtcacatggccttcctcttgatgtatgcccagaaaaatctggacattggtgttttggctgagaaattttcatgtgctttccgggagaaagcaaaggaattcttggtgtctaagaatgaggaaatggtacagagacagactatctggacccttctttccatatacattgatggtgttcaagaagtgtttgagaccagctattgcttgtatccttcccatgaaaaactgcttaatgatggatttagtatgcttctgcgagcatgtcgagaatctgaacttaggacagtattgagcttcctacaagctgttctggccagaatcaggtatggttttcagttgtatgctaatttatgatttgttttatataattacttatgtggattttatattaaagttatatatatgcatatatacaaatacacatgaaatccaaatgtagaggaaggatttagttttctactacatgggcataaatcagtacaggttgaatatatccgtgtactaaaatgctattatatgaaaagcttgggactagaagtgttttggattttggatttgtttagattttggaatatttgcatatgcataatgagatattttgaggaggggacccaagtctaaacataaaattcagttatgtttcacatacatcttatacacaggctgaatgtaattttatgcaacattttgaataattttgtgcatgaaacaaagttttgactgcaacccatcccatgaggccagatacaattttccacttgtagtgtcatgttggcactcaaaaagttttgaattttggggcattttggattttgaattttcagattagtgaggctcaacctgt

SEQ ID NO: 15307 - DNA, 1209 bp, Homo sapiens
attcttgtcaaaaaagtcaacataaatctgatgaaacctctagatatagccaccaatttacagaaaagggaagggaaaaaagattaagtaacactagagccatacaagcagctaaatttagaacatgggaaattttatacaaccaatgacctgatattaaaaacaagtggtataacaaaaacattgggaaacttaaagaataaaagagcccacagtgccatgcatatcactgaatgcaatgtatggatcttgtttgtatcctaatttggacaaatcaactgttaaaaacacatttgggggacaatccaaaatttggacacctcttgatgctctgtactttcatggaatttttattttagagaatcgtgttcatgtagtttttgtgattaagatgagtcagacttttgatgaaccaactaactgggatttgcagcttaccattttatttactaagagactaataattgttttctatcttttttttccccccttttagaatagttccttcagtatttcttggcttccttttaaaggccttgctaataccatgaagtcacccttgtctatgcttgaaatggtgaagacttgctgttgcgataaacaagatcaggaactatataaatccagcagtagttatactatttttctttgtattctggcaaaagttgttaaaaaagcaatgaagagcaatggccctcatccttggaaacaagtcaaaggaaggtatatgcagtatcttctgtcatgagtgtgcactgatatctttggataggtgttactatttgtattttgttatgtttacttgggattagagtcttaattagttataatgttactaggtaatccattatatgcatttgattaaaagtgatagaaacaaacatcttcaagttgtacgttggtaggtaatagtttcaacatataaaacttttgtgttctttgagcccagcggttcacaagcactggtttttttggtttgttttgttttttaaatgagaactgaccacagtatagtagaaccagataactaatgttctcatttgggaactatgctgttttcatttctgataaaataaactttggtcacattagtccattgttttctctgtctcttttgagagttttgcttgttcaatgagtatacttttaaattgtctttcttttttctacttcctttgcctatattagctcttttcttagccttctttg

SEQ ID NO: 15308 - DNA, 1184 bp, Homo sapiens
gtactctgacaatcctttggttttagaaagaacaactcctataatcctataaaaagatttgaccaagtacttaagtatgaccaagcactctggatttgtgtacatcttaatcgttacatcatttttgccacttctttttggtttgggttccttttctggtttctgggtttccagtaccattcaattatgaaacacctgtaatttttaaataattgaattaaaagtcgagttatgtgacttctgttatctgaatgtgttaatggtgtttaaaacatgtttttggaagtatgtgttgtgttgatttagacctagtctgcatatgagaatgggtatgattgggtgacacatatttattttctttttagctgcaggttatatacagcacaatatcaagtgaaaatgtttatattgccagagcccatttaccttctcataacttcagtttattttttagggtgtcattctagaagaacaattacgaatgtatcttcactgttgtttgacactttgtgatttctgggagccaaacattgcaattgttaccattttatgggaatattatagtaagaacctggtgagtgaatagaataggaatttgctccaggaattttaaaaatttgtacatatttgaggaatgtctttatggtttaattatgaatagttatggatttttcttaaaaagttaatttttttcagagtagattggagtagctcgtgaatagttttatctttaacattgtagagctttgtcataagggaaacagcatttggtatcctttttctcttgagagcaagggtaaacaaagtagctaaaatgtatcagatatttataaaatcttcatttataaatgtttctaataataattgattgctcatgacacattgaacaggcactgctgtcctgagtaagaaacaatcctggcatttgagtagcttataggctactagtgggtgggtatacatacattgtgggaaaaaagttataattgtggaactccagaggagagggtatctaacccggtatctgtatttgtggaagacttcatgaggtcataatttttgaacttggctttgggaatgagtagaattttctaacagaagaaaaagggatccaggcagaatgaacaacatggacaaatacatggaggtatgaaaaagcatggtctgttcctaccatgttaaat

SEQ ID NO: 15309 - DNA, 1245 bp, Homo sapiens
gagatttgggctaggagagccaagatttacaattgcaaacaaaactgctttgcttctgaccaacataaggattgctcattatggggttaaagaggcacttcttaaaatacagcaacttctgagaaatccatgcactttacttgaaaaaaaaaaaacctctttttgaatatagcatttgcaaaacaatcttaaaagactgctgtagattcacaaagaggtaaagggaggagagtttttcagactgcttaccacttaagcaattgtgtagggcatatgtaactgggaatacgtgctgagataccctaagttagaaattcttattccatgggaaacttagttgttaatatcttattaaaaccattcttatttaaagggactgtttgatgcctaataagaatgtggtggagaagatatgaatggataagcctgtttgaggctgcagcatcatttgggaggactgtttgcctcccctctctctagcaagtgtgttttaaggccaactggtggcatttctgtgtgactagggagactcctggactgaaaatatgaatataatgaacaggtggactgcagacctgtctccacaaagcatgggttgtccttttcccaccacattttagtagaaaagaaatgtatttgaatttttttctatgaacaatctatcttactgtacagtaccaagtgtgatgtattttctctcaaaggatgattaagttatgagaatgtagattaatatatgtttttaattttatattacttggaatacaagtatgtggagaaccaactttgaaaatgaagttgtaaaataagtcattccatccaggtacctcttacaggggcatgaatggacattgctatctggagtcttgggcaattgcctgacagcatataactgggcatcaacattttgtaggtgttaatttgatttagagccctagaatatgcccctgctttactttcccaaggcgggttatgcaaacaaaataaccaagacaaagtcaccatagtgtgagtctttatccggaaggatttaattttatgtgcttcattcttaagctacccagatttgaaatgttctccaatttcatgaacaggtgctaattataggaaaaaactataagaagttaagggacattttggtcatctggcttcttgttcaagttctgtgtttcctttttgctggaaggtaacttgaagtatgtgatctttaatgttaacagatgcttttggttggacaacagaccc

SEQ ID NO: 15310 - DNA, 1144 bp, Homo sapiens
tttcctatccatttagtgtgctctcagcatttttaatatagaaagttgcatgaaactcttggaaattggaaggaaaatatttattaaatctactctttctgatttttttttttttcagatggtctgtcagttcaaacagtggtaggaatgctctataaccccttctcaggttactggcattggagtgaaaataccagccttaactatgcagcttatgctgtgaaatccagggtccaggaacacccagcctctgctgagtttgttttaaagggagaaacagaagagctccaagctaatgcctgcaccaatccagctgtgcatgaaaagctgaagaaatgaattgtttctgagaactatagtaatatggcttggatatctgatgttttcaaatacaaaaatgtacaatttatcctttgagagagaatcatgaagaaaagaaggtcaataaaaagggctaaaaccttggacaaaagtttttgttatttcgtctaatagctactttcaagggattctgtgaataaaaagttttgtcaagatattgcgtgatctaggagtgtaagttcctcaacctttgttgtataactagggtatgcatattcatttcatcgtacaaaaaaatacatatatatatatattctgcatgtatacatatacatatgtatatgctgtaatttgtttttgtttcaagatagggtctcactctgttgcccaggctggattgtggtggcgtgatcatggcttactgcagcctcaacctccagggctgaagcaatcttcacacctcagccttctgagtagctgggactacaggcatgcaccaccatgctttgctattttttatttttatttttatttttatttcttttgagatacagtcttgctctgttgtccccgagctggagcgcagtggcgctatctcatagctaggctcactgaaacctctgcctcccaagttcaatcgattctcctgccttagcctcacaagtagctgggattacaggcaccagccaccacgcccagctaatttttgtatttttagtagagacagggtttcgccatgttggccaggctggtcttaaactcctgacctcaggtgatccacccacctcagtcacccaaagtgctgggattacaggcatgagcc

SEQ ID NO: 15311 - DNA, 1147 bp, Homo sapiens
ctatagagaacttgaaatgtggctaggcatgtgctgtgggtataaattacatgctagatttcaaaaactttacttgaaaaagagaacagaatttttttaaatttattatgtgttgaaatgataatatttttggtatattgggttattttacctgtttctttttacttttttaatgtggttactaaaaaattttgaattacttacatggcttgcatcgtaattctattgaaaatggtgttctattgttacagtctggtagcttgacatttggtagtatgagaattttacatgaacattttcttagtgtttttgtctttttctgtttcagaagaaaagcagcaaacagaaagggttacaaaagagatgaatgaatttatccataaagagcaaaatagtttatcactactagaagcaagagaagcagacggtgatgtggttaatgaaaagaagagaactccaaatgaaaccacatcagttttagaaccaaaaaaagagcataaagaaaaagaaaaacaaggaaggagtaggtcgggaagttctagtagtggtagttccagtagcaatagcagaactagtagtactagtagtactgtctctagctcttcatacagttctagctcaggtagtagtcgtacttcttctcggtcttcttctcctaaaaggaaaaagagacacagtaggagtagatctccaacaatcaaagctagacgtagcaggagtagaagctattctcgcagaattaaaatagagagcaatagggctagggtaaagattagagatagaaggagatctaatagaaatagcattgaaagagaaagacgacgaaatcggagtccttcccgagagagacgtagaagtagaagtcgctcaagggatagacgaaccaatcgtgccagtcgcagtaggagtcgagataggcgtaaaattgatgatcaacgtggaaatcttagtgggaacagtcataagcataaaggtgaggctaaagaacaagagaggaaaaaggagaggagtcgaagtatagataaagataggaaaaagaaagacaaagaaagggaacgtgaacaggataaaagaaaagagaaacaaaaaagggaagaaaaagattttaagttcagtagtcaggatgatagattaaaaaggaaacgag

SEQ ID NO: 15312 - DNA, 3810 bp, Homo sapiens
attatttaggtcatttgtttttgaatgccacagtgataactataatatataatgtgcctttctagtcttccctcttctgtaggaatagcatgttcctcaaatggtcctgaactttttcaccattttggtgaacccttttaaagtaaatttactcaatgctttaaaattcatagtcttaaaataaatgtgaattttgtttccaggtatttattctggggtacaaaaacttcccagaatttacagtaggaaaggaaacccctttatgatgtggcttattattacaagcattcagaaatgatgctggctaagtcaaatcattccttgagacagtgattcctaaatgtaatgccaccttcctgaactctcacatattctatatcatggttattttaaaaaatatatttttagccttttgtaaccttagtcttgttttgagcaatcatattccgtgttttatgtgcttttatatttttataataaatattaaagtaaaactattaaaaattgtttatccacgtaccacttaacttaaaatcatctcagggccatctagtggtatatatgtgtactaccatttaggaaactgctataacacataatttcatgaagtaacacctaatacggtgtagttccctggtcatattttatacaattcaaccatataaaagggtgtcactgtaatttcagtagtgtgggtttacaaataatctgctggttagcttattaccttgaggttttgaaaaactagaattatattgaggcatttcataaacatatctcttgcaccctcttcatggtggagttaaggataacttgcaggtggttggccaaggcccaatatagatgattataacatttagaattggcaattagaagttgataatccatataggaccataggatagctttgaaatataaattaccaaattatatttgtaaatgatagagaattatattcttaacagaaaaatatatactttttctacttcttgtaaatactaaacacagttttggggttttgaaatcactttgtcttcagcaagcatcattaataagttcaggtgaatttagcttttaatggggcattaagctggcatttttgattttctttttaaataatagcaaaaatatcatttttcccctctagaatacaaattattgagctgtcaaaacttggcatgaagaatatactattacttaggcttaaatatcaaaagataatggctacttcagtgtcatattgttgaaatagaaacaaaactgcatggttcaagcatcctaatcattagtgccaatgaatgatagtgcaggcaagtgccaggtaaatgcctagtcccacttcattctcctcctgggaagaaaggataagaatagtggctgcagataaggtatggaaatatttaatcaagactgtcttaaacacataagcatatataatgttatcaaggttaccagtgctgccttttgatatatggatgaacataactgtaattaaagacggtaatagtatacaaaatgcagagcttaaaaatgtcattgcataaattctatttttaagatgttgaaatgttagtagtgtttttcttgatttttaacagtgaaataatcaagaaatatatctttaagttaatctgcaaagtcaggctgtgttctgtaaaaggtatttcacagcattttctgtttaactgtaatctgttatcatggagatctcagtaccagagcagtgaattttttgaaaaatattgactgtctttattcaagtcagccatcttggtaagagcagttttcatccccccactgcccaaatgtaaatatagatcacctaatttttcttacagaaagatactgttaagaggcatgcacttttcatcggatggtcacttgtttcttgtttcaaagacaaatatttggatagatacccatacttgctatgagtcagtcacagtgctgacactattttaacatcatttaaaatggaaagatctacatagatttttgacattattccagaagtaacatgcaagtaagatatttttattgtcattttcttcatgttaaaggagctacttatgaaacctatttttttatggcctagagtttatgagtgctttttccttgtcttctgaaaatggaataaattggatttttgatacttaagaatttcctaaagatagcttttgtaacagagaaagcatgttaaattacacatgggtctaccttaaaatttttgttattatttccaaagcacatttgcagggatagtaaatgtatatagtagcaagtctactataataacagtagtttctggatcacctcaggaaacagtataaataaataataatgtttacttatcatcaacataactaccatagtgtttgaatgaattaaagtttcattagctttatttagaaactggtttaccccagcttcccgtttttttccaaatataaaatgataaaatattgattatgtgccaatattgtcatttaatgttcttaaaacttgtgaagaccacctttttaggtagctgagaagagtgatagttggtatcaatttgttagccaggcatggtggctcatgctgttgggaggctgagtggggaagatgcttgagcccaggaggtcaaggtgcagtgaaccatgatcacaccactgcattcctgcagagtgacggagtgagaccctgtctcaaaaataaataaaaagaagacagttggtatcaattcaaagaatagttgatgcctgttctcttattttaaatgtaccaacagagctattttactgtatttaatagttcttagcttccatgtgtgatgattttaatcagtgattttatgcaatagctgaagaaaattttctgaagattaagctgtgaaatgtatcaaccctcatctaatttttgtagtacaaaatgacatcctgattccttttaaaaattcacgtttgtaatttatttttctgcatgtattgatcaaataagcctaaaccaaatatgtgcaataaaattgagcctttagatagtatctagtgcattgttaaaaaagattatttctagatatttatgatgtttttgtttacgtagaaatcatgaattcaaatgtttaaaagatgaccatattttcaattttgagtaatacatattattcctactgttttttttcttttgccatgtttctagaaaacagctgtgtaacttattgagcgttattttggtgttactgtataaaacatgcataataaatattcttatttatctcatgttacaagattggtcctggaattttcacagtttacgttattgacagaatgttttatcaacaatgcatttgcttatgtcttagtccactcaggctgctataataaaataccatcaactatgtggtgtattaacaaaaatttatttctcacagttctgggagctgggaacttcaagatcaaggtgccagcagacttggggtctggtgagggcccacttctgttcataaagacagtgctttcttgctgtgtcctcacatgggaaaagtacaaggcatctctgtgggtccttttccatgcagcccattcatgagggttccatcctcatgacctaatcacttctcaaaggccctatctccaaataccatcacatttgggatttgtgaatgttgtaggggacgtaaaccttcagttcatagcagctttctcagctatattcaaaataccctacatattttagaaattctctatttcaaaacagtttatgggccactttacctcagatttcagtatctaccaaggacgatcatcttcctttcaggggtttcttaaaagg

SEQ ID NO: 15313 - DNA, 1175 bp, Homo sapiens
aaagtctccctcatagccctgttctacaaaagtcctatttccttccccacaaatagcctctgttacactgttgttagtttcttgtgtgaagatttacttttaaaatagaactattttttagtatatcttctagtgatcttagtttcagtaggcttaggaaatggatctgagagaaatggtatttaataactatgatatgtttaagaattattggcatttattttcaatgaggttacaagactcttttctttgaaaacactgtcaacttacagagtcaactaattcatgaccgaaaatgtattagaaaattgtcatctggagaaactgtcacataccagaaaaatgaaaaccttgaaatgaatggggattctttaatgtttgccagcctcatgaattctgagtcacgtctgaatgaaagccctactgatgacagtgaaaaagaagccagccattctgaaagcaatgttgatgctgacagtgagccttcagaatctgaaagtgcttcaaagcagactgggctgttcagatccagtagtggatccggtgtgcagccagatggacccctttaccctctgtcagcaggtaaactgctgtacaccaaggagactgacagtggtgataaggaaatggcagaagctatttctgaacttcgtttgagcagcactgtaactggagatcaagattttgacagagaaaatcagccactaaatatttcaaataatttatgttttttagaggggaagcatttgaggtcttatagtccccaaaatgcttttcagaccctttctcagagctatataactacttctaaagaatgttcaattcagtcctgtctctaccagtttacatctatggaattactaatggggaataataagcttctatgtgagaattgtactaaaaacaaacagaagtaccaagaagaaaccagttttgcaggtaattatttttttaattacataattattgatctcctgatagtgtctagtgagttacaaatttcactgagaattttactgagaatcttgtccctatacttgtgttacttaggcagagattgtttcattcatatttgtacctgagcgcttacaatactgggcagaacagattttcaagtttttttatttaaataaagagcaggaagtatacaactctgccttgaaaatgcaaaccca

SEQ ID NO: 15314 - DNA, 1493 bp, Homo sapiens
aattctctttggtcattgagggaccaaaaaaggacgtaaaatttacagtcaatctatgagggtttttttccctccataagtttaactttaaaactgtatttaaggaatcaaatcttacaaaatcctggaagattttggtaatgatgttgataatttcagggaaattaatcaagtacctatattgatttaaaagtgtattttattcagtagtttgaggatcttgccatggaagatactagcccagcctagcagaaaagtgcaatatgtatagcatactttgacattttaaacatgatagtccataaccattttgaaatgctgggcaaactacatgaagttatttataattaattcacagctaatcaggcattttgaaagcttaattggattcaaaaaccataatgttggaatttggtaaaattttaatgttgatttttactgtgaaaaggtttttataagatatacacaccctagtttaatgttgtgtcttggtgtggatttacagatttactacaggtattctgaaccaggaacacaatcaggtttcaggccagtttgatactggctgtccttaattctaatatgagagtaggacatcatactaaatgttatgtcagtgggactgtactgtctgtggaacttagcaaattaatcattttcttcagacttgaaggagagtgataaataaaatttggagtcataggatattgatgcacaatttaaggattaaacatttttaatcaattgtggatgatggcttattaaatgttgacttcctagtataaaactgcaagaataaaagtaacttctccagctgtatcgactagtgtcttgaatttatctttttgaatttgcctgatgttgttttttgagaattcttcttcctttagttaagtgttaaagccttttataggttgtcaagggggtaatttcaaatcattacaaacagattttaaatagaaaatttatttctgatggagcgtatcaaatgagctggaaagcgagactgtgtaaagtcagactgatgacatatataggtttcctgggcttaataagaaaaaaagctctcctcaggtctgaaggaattaatgttgggcttaggtaagacctatagtctttaagtgtttatttttaaaattaataccatgcctcatagttttgttttcagtctcttattgtggaagatttaaaacaacatatacaggagtaaagtaaggaacctccatgtacctatcatctagcttcagtagttatcaatttatggccaatttcatttcatctaaactcccacccactttccgtaagttgccatcccccatcttattttgaagcaaatcctagatatcatataattttatccataaatatttcagcatatattcctaagaaataatagctctttaaaaaaactaaaagtattattgtgcctcaaaaagaattagtaaaaataatatcagattttcagttatttcacaagtataaaaattgttaga

SEQ ID NO: 15315 - DNA, 1149 bp, Homo sapiens
atttcttccaaactattacgcatctctctggtatctgctacttgctggttctgcaagtagaatattgggatccatggccactttagataaaattctatttgaagatagcactttgctttttatttcaacaattaactacattcttcatacatatacagcctccttggtttgtttcacgtgttgtgtagctatcttctcccgccttaaaaaaaatttaaagtgtctatgattatagcagccagcagaaaattttcaggcaagaatattcattaaattcaactgactcctttctaagtgacatactcaaatgtaagcctaagggaagtataaagttgagcttttccaaaaaccataaggtgtatttcatgcctcacctattagaatattttagatattccatcttgcccataatatagcaatatgaaataatttaagaatctctactttaaaagtattctgtataaattttatattaccttaatacttcttatacatacattataattttatactaaaataatgttttatattaaaatatgtatgtacatgagaaatttggtaaataaacttggtcctttagttttccttaaagaactgtgcttaaggatatatttctcagtaaaagatcaggtaattcacctggagaaatataaaatagtaggatttctattttattttattttaagtttcgggatacatgtgcaggatgtgcaggtttgttacataggtaaacatgtgtcatggtggtttgctgcacctatcaacccattacctaggtattcagcccagaatgcattagctatttattctaatgttctccctcactccccacctcaaccaagccccacaggccccagtgtgtgtgattcacctccctgtgtccatgtgttctcattgttcagctcccacttataagtgtggtgtttgcttttctgttcctgcattagtttgctgaggacaatggctataaaataatttgatggcataatctatgaaatgctgaataattgtcttattgccacttcaagggattggtgataatataatagtatattgaatgcaaaataactagatatttccttctctctgaagacaagtgggtacaaacaattctctgtggtcataaatagacaaatatctgcttggtag

SEQ ID NO: 15316 - DNA, 2203 bp, Homo sapiens
ataaattatatattttcctctaagaattgaattaaatatgaaattagcgttccaagcaggtttactgccatggaatagctgaattcttaaggggaaaaaaagcgttaacatcggttgttttatttaaacgaccccctcccatgattttagtcaggcttgtgtgtaaggcacgcgtgtgcacatatatgactgcctttttttctaaatctatgattcacaaggtccctccattgtgtttaagtagaagcacgaaatcagcattctgatttatcctaaagaagcgttccaaattgtctttaagataacatgtttgagtttttcgtgttcattcataaattattttgatgtcagcatagatgaaatggcgattggttatctcttcctcttgccagccccttaaggatacgaggtgaaattagtagcaagaaagcatgtaattgacaaagtcacgtgtgctcagggggccagaaactggagagaggagagaaaaaaatcaaaagaaggaaagcacattagaccatgcgagctaaatttgtgatcgcacaaaatcaagatgttagattgatgcagaagatcactccgttccaaagggaaagttttcatctcacgagtttggagctgagggcccgtggggcaacatggccgaaggttaattttcttttctattgttttactgtgaatttctttcttcttttctcctccccctccccctctcccacccttcttagaccgtcccccccttccccttttaccccaatactgggcattacctcccaaccccccatcacgcagtggggctttctgcaaacctattgttatagatctccaaaaatgttttgtaccgcccacactgattcacaacttgaaaagctttcagggggctattgtttgaattgtgtgagtgtgattaagcgcagtttcagttagtgattccaagaaaacttttatacacctgccccctcccccattccaccccaactttaattgaaagttatgggggggaggggaatgcacattgcaaataacgctggattcagtgctgccccatgtgccttaactagtagctctaaaccatcttcacgatttctctttcctcctcgtgcccgccggagagaatagtttcgctgaaaatttctctttgtcaatgggatcagtattaaatcagcaatatacaagtaaagtatcgcatgctgtaatgtaaaatgtggctgaaaaatggagttaaatgaataagtacacgtatgtatagaaacgtggaagttggtgtgatcgatagaacagtgtggcttccccctcccccgctttccttttaacccttttcattttaagtattttctgtggagaaaagaaatcaaaccattaaaaaaaattttttttttctgttacccttcccccccaaccccaggcaggcaattttttttttttaatctttgaatgcacattgaatgggaatacagactgacttttttgtcctgttccttctcaggcggggctagcaaaggtggtggagaagagcccgggaagctgccggagccggcagaggaggaatcccaggttttgcgcggaactggccactgtaagtggttcaatgtgcgcatgggatttggattcatctccatgataaaccgagagggaagccccttggatattccagtcgatgtatttgtacaccaagtaagccaaacttttttgtccccctcttcatctttttccatgtggaggagctgatcggtagttatgccaatagacgtacgataagatgtccttcggtatattgaaagacaaaatcttccctgaaatcactaggtagtccaacgtttagggtacgtgtatgggccttttcctgggttttctgtctaaagagaaaagaaaatatttgaaatttcactatatatattaaggttgacgttattagcatttccccctgcttcattctacagcgaaatagtgttcttgttgtttccggtattacctatacaatatactttgtcgcctgtatctggtgaatgggtagaaaaatgaagaaacatgatcattttaaggttgaaaaaacaaagcgaaacagtttgctgtggaaagaaatgtatagattgccttattttagacacctctagtcacagtagctccctttattatttcatcgctgcctgtcctgtaatcattttgtagattcagatcaaaataatttgacttcatagtaaaa

SEQ ID NO: 15317 - DNA, 1174 bp, Homo sapiens
gacacagttctttaactctttttttttttaactcaacaatatgacatgcttatctttctacattagaacatgtagaactaataaaacttctcttaatggcttaataatgttatatggtgctattatattaataatttatttaatcagtttcccattgatagatgttcagatagatgtaattattttttaccaatcagtgctgtggtatctttttgagcctttgtgtatgtctgtagtagaattattaattgtggaattgctgggacaaagaatatgcacattttaatttttctaagtattgccaaattgccttaaaaatttttttctcccactgccagtattgcaaaaagaaactttaaaatggtatatgtttcactgaacttaagactttatacttttgtaatgcatgacagagtatctttcttttttaaaattatagagataatttataaagcaatgataattttaatctctctttttctcccccaccctcttctgctctttacagagcaaactattcatggaaggatttagaagcctaaaagaaggagaaccagtggaattcacatttaaaaaatcttccaaaggccttgagtcaatacgggtaacaggacctggtgggagcccctgtttaggaagtgaaagaagacccaaagggaagacactacagaaaagaaaaccaaagggagataggtaatcatttttactttgttaatttatcagtttattgtgtttggaaaggatttctgaaaatgttttcatcttactgcatttcatattgtctagccaaaggaaaccaccatcatgtagaatatattaaatatcagaaatataggctatcttgcagtttgaattatctgcagaatgtactgaactgagccttcagcattaagcactgaatagttccttgaccaccttttccaccagactgttctgagaccccagttgaggagttgaagttcccaatagatagaggtgcccctttttacacccagaatttgccaaacacctcacctcttttttcaaatgaaaatgtacctattgttttgtctgtttttgaaagacagctcacgtatagaaagtccaaataatataaaaaccgtaaagaggaaaaaatcacttgaaatcctagaggtgggaattataatatatatggtattttgaaacttgtaat

SEQ ID NO: 15318 - DNA, 1199 bp, Homo sapiens
gaattttttaaacagacaaatcactctaagcaaattacatttgagcagggtgtcatgttttatgttaattcagagaataagatactatgtctgtcaatatgtgcatgtgtgagagggagagagcctgagtctgtgtgtgtacatgaggatttttatataggaatgtagacacatatataaagaggctttgtctttatatatttgtgtatagatcaaagcacacaccctctctcatataattggatatttccaagaattgaaaacccatgtgaagcattatagatagttttaaatttaacccactggagttttcttgaaataccacttcttttatattatataaaactaaaaacacgactgttaccttttgtgtgaaccaaaggatacttcagatctcagagctgccaattatggggtactaaaggtttttaagacatccagttctcccgaatttgggattgcctctttttcttgaaatctctggagtagtaatttttttcccccttttttgaaggcagtaccttaacttcatatgcctctgactgccataagcttttttgattctgggataacataactccagaaaagacaatgaatgtgtaatttgggccgatatttcactgttttaaattctgtgtttaattgtaaaattagatgcctattaagagaaatgaaggggaggatcatcttagtggcttgttttcagtagtattttaatatcagcttcttgtaaccttttccatgttgtgagggttgtaagggattgtgtggcaacagcagcttcccttggctaactcaatcttctacccattgcttagagcagggagccctccttatttactactgaagaccttagagaactccaattgtttggcatatatttttggtggtggtttttattcctcctggagagttatctaatttgtttctaaaacaaacaagcagcaaagaaatgaattaaatactggggttgagaattaaaattaagtggatgttcacagttgcccaatatatatgacctgcaaatgatacgaaaaagtgcagcatttagtggcagttaacaagagtgacaagcctggggcagaggtaccaaacctctcccaccagagagctagaagtattttatacagtaactttgatcttatggaagtgaccttcaatgcttattctgaagtaacctatatggtggatacaggatg

SEQ ID NO: 15319 - DNA, 1427 bp, Homo sapiens
cgtattgcagcattatagccccaggcacataactaactagcactggcttgccaaggaatgaacatgcaatgccattactagctattgagggaaaagggtctgtgtgaagcatcactttgcagggattactaatggtggggcagcaggtctgtgaattaagttatctcttgacctcaccctcatgtcaacacaaatgtaattcctaaacaagatgcattgccagtctcttagccctgtaagctgatcttttgctacatggcagactataatgaaaacatttttatacttgggtttctagtcttcactagaaggccttggatgtatttttgcagttgaaagatttagaaagatttttacctgcttataacttggaagtttagagtgcaatgtaagaaaaaagatcaagaaatgtcatgttattagcatcagtccacctccaatattgccgatactttttttattctggctcagttttattttgcaccagtgcggccccaagttactgctggttgtatttagtttgtgaataggagcccataagtgttaatagactttgtaacattcactataagatgaattatacaggacatgggaaatctcattaagtcttaaagttaatttaaattaatttatctgttttctctaagaaatgtttatcataaaatatatatgtgtatttcccctttggttataaaatttgggaaagtatgtacaagtgcagctgcactgactttaattttctagatgtcttaatgagatttatttgttttagagaagaacatcttgttaaaagcatcaaactctgtcttacatagctgtcaacagcctctttaagatgtggtggttgtatgatctgtgtcttaattgttcagttagagtgagaagttgacctatgattcatttttaaattttatatttggaacaaagctgcaagttatggtaaagtactgtactgtgagaagtattatgatatttaatgcatctgtggcttaacacttgtgagagttaccagcttgaaaatgatggtgttgactacctcttgaatcacatctatcaaccactggcacctaccaccaagctggcttcaattagtatgtgttgctttttggtattaacaactaaccgtactagagaccaaagtgaaccctgatttttatatgtctttaataatggtgttttatctagtgtttttaaattatcctgtgtagtatttagattacctcattgtccattttgactcatgttgtttacaagtgaaaataaaaacacttgaactgtatgtttttaaaagacaaaaaaggggtagatgtttggaatgcgtttcactcgcatgcagtcatctggagggactgaagcactgtttgcctttctgtacactctgggttttatattctcatttcatgcctaatgtcttattctgtcaatta

SEQ ID NO: 15320 - DNA, 1114 bp, Homo sapiens
tgccactgcactccacgctgggcgacagagtgagactctgtcaaaaaataaataaaaaataaaaatttggtttacagaggtatttgcagaactcctctatgttcttaaatgtttccctacttaatttaaaatctgacaaagtccattaaaatgttttattgaagtataatatgcacacataaatggacatatataaatgtacaacttgatgaattttctgatgaatttcactcaatattccagaatcctgactgtataaggaacatgataacatgaatcttacaggacattatgtcacttattataatgtatgaatttaatattttgcctttcaaaatcataaagggcaagagtcatcagggatctgaaatacacttcctctaccccccacccctccccaattatgtgctctctttctccttcccttataaatgttgttcttgtgttttgataggatcagagtgacagttgatggcgaatttctgcattacattttcccccttcagttcctggattctcctgagtgggattcactgagacccacagaggaaggcatttttcaggtaagggataccagaacacacagttagcactccctctttcaaacagatgtttgtttaaaaataagtaaacaaataaacaacagtggataagacaagaatattttaagactttggaatgtactttgcagcatacatgactttcccaattctgctggactcttgatgattaatgccactttataggtccagcgatgagaagaacaggtgctacatatgacaggaaggaggctgtgatcaatactttaagctttactttgcataactgcgtatttaggaattaaaatataattgagatttgactaaacactgctaatgcgacgtctagaaaacatcaagaacaaaaaactgcacttactaaaaaataaatgatttttaaaatttaaaatgccagtggatttcagttgttttacagcaacagaatgctaaacttactgtcattactctgctgccacgtctggcagttttgaaagataatcatttcagcaggtttcatttattttgttacacagttttctaacaaatatatgtgtgtatgcaacaaactcaaatat

SEQ ID NO: 15321 - DNA, 1104 bp, Homo sapiens
atgccatgttttaaaaccactgcgaaaatttccccaaagcataggtggctttgtgtgtgtgcgatttgggggcttgagtctgggtggtgttttgttgttggtttttgttgctttttttttttttttttttttaatgtcaaaattgcacaaacatggtgctctaccaggaaggattcgaggtagataggctcaggccacactttaaaaacaaacacacaaacaacaaaaaacgggtattctagtcatcttggggtaaaagcgggtaatgaacattcctatccccaacacatcaattgtattttttctgtaaaactcagattttcctcagtatttgtgtttttacattttatggttaatttaatggaagatgaaagggcattgcaaagttgttcaacaacagttacctcattgagtgtgtccagtagtgcaggaaatgatgtcttatctaatgatttgcttctctagaggagaaaccgagtaaatgtgctccagcaagatagactttgtgttattctatcttttattctgctaagcccaaagattacatgttggtgttcaaagtgtagcaaaaaatgatgtatatttataaatctatttataccactatatcatatgtatatatatttataaccacttaaattgtgagccaagccatgtaaaagatctactttttctaagggcaaaaaaaaaaaaaaaaaaaaaagaacactcctttctgagactttgcttaatacttggtgacctcacaatcacgtcggtatgattgggcacccttgcctactgtaagagaccctaaaaccttggtgcagtggtggggaccacaaaacaaccagggaggaagagatacatcattttttagtattaaggaccatctaagacagctctattttttttttgccactttatgattatgtggtcacacccaagtcacagaaataaaaaactgactttaccgctgcaatttttctgttttcctccttactaaatactgatacattactccaatctattttataattatatttgacattttgttcacatcaactaatgttcacctgtagaagagaacaaatttcgaataatccagggaaacccaagagcctt

SEQ ID NO: 15322 - DNA, 1239 bp, Homo sapiens
tgtgagattgtggccaaactggccaacccctttgagcttccggggttttgttgttgttgttgttgttgttttgtctgtaaaactggggagaaaagagggagaggggataatgtaggcctcatagggcggctgtgaagatgacgggacatggtgtactgaaagtggctagcacagcagctggcacacagtaggggctctcttactgttactactaataatacattcatcattttcaaaagttatgaatagatttttccttaactaaaagacatacacattacaataaagaaaataaaggaagtgacccttacctttaatgtctaaaactaaatttggcttcaacttgctgtaaatcctgccatcggacttcaagctccagaactggctgtcagcattctggtccagggccaggcctagcttggagccagatgttaccaggctgcccacaatcgtcaggcagcagtcttctgctatctgctcagtggaaaagaccagatatcttaaatatgtatccagctgtaagtctcatagcaattatttctctggttacattgggctttaaaattatcttagttcctagcttcatttaccccacatgaggcagttcagctcttagccaactagaatcggacaataaatatttatgccatttatttcagatgacacgaatgatgggaaaatctcaatgtttgtgcatcgtcagagacttctgccctttgcaagactatcttactagtagggaaagcctcataacattagaactgcccatcatatttttccctgtcataagtgaccatgatcccaggcaggttctgtagctatatctccctctgacatctccacctctgcttggcctgaccttccagtatatgactgcacctctaattttgtagcactgggtggctaaagggcattttatcattttaaaactcggaattgcatttattagcatttgtctttccttcatgagaattaaaattttctaaacaggcatgctttccagctatgaaaacagaaaaatgcagactcactagagggtgttttaatgcaaagattttatgagcccttccctgaagtgaatctacccttaatatataaataatgtatggcagtcatgttcacatgccattaacaaaaattactggccaggtacagtggctcacaactgtaatcccaactctttgggaggccaaggtgagaggatcacttgtgagaccctatctctacagaaaagtttta

SEQ ID NO: 15323 - DNA, 1186 bp, Homo sapiens
cttagaaggagagagtgtaggaacagccatatgttctgataaggtaaatacagtgcaatagttgtcattatttttgagacagtgtgttgctctgtcatccaggctgagatgcagtgacatgatcacagctcactgcaacctcaacctcctgggctcaatgatcctctcaccccaaactcctgagtaggtagaactacaggcacatgccaccatgcccagctaattttttcacgtttttgtagcgatggggtcttgctgtgttgcctgggctggtctcaaattcctggcctcaagcaaccttcctgcctcagcctcccaaagtgctgggattttgtagtctcaaattagaattggaagtatcaatatgaactcaagagatattttgtgtatgtgtgtatgtaaagccatcacttgaaatatcatttctcactgaaacaaggcagggcttcttagagaagtagctgatttcagatctagagcacaaatataaagaattaacctggagtatattaaatagcaaggaagatatcaaagactagtcaggtcatgtcaaaagactcaagagctaacttgaagaaatgcccaaagatgtaacagtttgagcttcagtaataataatgaccattacaatgggttgaaaccttttaaatatatttaaatccatgagttcatgatacttttttcaaaagaggtcacttttggaatttgatagggaaccaatttattatcttataaactgataaagaaaaacagttaagcatttgtcttgcctttcctacattaactgtataattgagcagacaaaataatatgtgaggggcagtgatatgaggggcagtgttattttgtgaaagtattcaggctggacgcgttggctcatgcctgtaatctcagcactttgggatgccaaggcgggcagatcacctcaggtcaagggttccagaccagcctggccaacatggcgaaaccccttctctaataaaaatacaagaattagccgggcgtggtggtgggcacctgtaatctcagctactcgggaggctgaggcaggagaattgcttgaacctaggaggcagaggttgcagtgggcagagatcacgccactgcactctagcctgggacagagcgagactgtcccccacaaaaaaaaaaaaaaagaaagaaagtattccaactacttaaataa

SEQ ID NO: 15324 - DNA, 1059 bp, Homo sapiens
agcagcaatcatcaaccaaccaaccaatgggatctacttagtggtgaatagattggctatttaattggtaaaagttgctggtctgaccacaccacagcatgaccactgggttcatttagagatggcctccgtttccaacgttccccacaaatgtttgcttctttcccagtcaagaggggatctcgagactcccgagtggaggtcgtgagcttgcaccccgcctggctgtgtagatcgactgtatagatacatgaagtgggggtgagggccaaggggctattactgctgttgggaaatacttgcctctcgtagatccagccttaatgtttttctgacatcctagtaatagcagaccctgcacaaagtggatatcagacttaatactgtgaggagacaaaataatgagaatagttttaccaaagataatgaaatctcgcatcatgtctgcattttaccatagattggagtgcatccttaggaaactgaatgtaacaaaaacccaggacatttttggaaattgtatgctctctagcaactttgtgtgaatttttatacaaacactgttttatgagttatataaaatgttataaaaatagaaaaacatggtctcgtaacatgttattttcttagagcactggtctctcagaatatgtcttggtctatttgtctttgtgcgtggcctcctcacccacctcccagggaagaacgtgaatattccgggggatttcagcttctggggcttccatactctacgtgtcaggggtacagctcataggatttcagtttggccacagctgaatgaatgagaaattgccagataaatcctccaaaccatttctccacaaaccacttcctggccatgtagtgggaggcttgtttgaccttttttaacctttcctggtcaggtgccaggccagtcctgcaaagccagcagagtttcattttcatttaaccgcctttttttttttcactttggatcaaatgggttttagtttcccgccgccccaaccctgctagagtgcagtggtataatcatggctcactgcagcctcgacttcc

SEQ ID NO: 15325 - DNA, 1049 bp, Homo sapiens
gtcatttacagattatttctgttgaaactgcaaacagatttagaaaggcacagggactgaatgactctctgtcttacacagctactcatgcacacacgcactgcttactaaaagctgaagtgagatgaagggggcctacacgaataacaagttcaacttctttgtgcctggaaaggagggactggagcagccaggagactcactttcccccctcgcttgggcccttctctatgccttagtctctccagcacatgcacacagcatgcacacacacgcaccctacccaaagacagctgtggccctctcccaccacctcccccttcccaccgctggttgttgggggctggaggcgggaggtcccatggaatttgttctggtttctaggatgtaaacgaggactccaagccatgaattgccctgctttctagagggtggaatgttgaccctgcaactttagaagcacaatcatttattaataatttttttgaaactcccatctacccctgttagagaaatcaacaggttctaggaattaaatatgtctctttgtaacccagagcatgttcaatttttggaaaccgtatttcagtgattttcttaataccttacatgtgtagggcatcttcccccagaatcttacagtccctttctgtgaagagaagtggacacacgtgggaactctcaccatctctggactgtcgtcaggaaacgcctgcaggtccttgccctgtctgtatggtgtcctcacttctccatccatacaggtggctccagtgggcatttttttattttaaattttttacatgaagcaatagaagtacaaaatacttattttttcaaaatttaatgtgttccatgaaacctgttggcagtcgctttccttcccccacatctaaattctttggtttttagttgtttgttttttggatttttttttttttttttttggccttgtatcccaaggactaaaagattagcacagacacgttttgatgttgaatgaactagtaagtcacagtaggtggtagtcttcattgatttctctgtaa

SEQ ID NO: 15326 - DNA, 1276 bp, Homo sapiens
cacacgtaaacacccacccaaccgcaagaaagaagccttgagtttggtctcttgtacttacaacttctgtcctatgtgccccggcggggcagcctgagtgtggggagagcaagctgtgagggcagggaccagaggttaggggtcctctctccctggttgtgccctccccagcccctcacagcttataatgcaaacccagcaactctcttgcccctcttcccatattttacatcttccattttgacccatttttttttaattaaaaagaaacccttaaaaaaaatcattgggctctttgggggccattttacttagaaaaaaatctctttaaaagtgccatgttcgtgcacagtggctaatcatagcttcaggtggcatggatactgattttactgaccttgttttttacatctgattttggaagagtcaagatgccccttggatggcagtagaggggatggaatagtgcgaagtcctttacgaccacatgcaagttttcccttctgctctggtgccagggaaggcttccgttcagcttggcctgtccttcaggcgcgttggtagaatgttgtgtcactctttaggcgagaacactggatgatgatgatatgaatgtagacagccgtggaaacacgttcgcagtgtctccatctgagccgtgtccttccgctgcccccattccttctccatacatggttgctggttggagggagtggacatgtttccttggaaaacagtgcaggggcttttggcttcttgttagatttaagggtgggcctctttgagctcaccatgaactgtttacttttccgtgtgtgtatttgtacaaaatccaggttccgggagctttgtggtgacttccccagacctcagtgttagctactccaggcagtactacatcctcattcctcagggcgggcccaggtctgggcccctcttggggataccatgcattggaaggacacaggccattttagatggggtacacatgtcccttcccagggtccactcagaactttcctcttggactctctagaaggtcctgctgtcctatacctggccaccccctgccttggggggcacatgtcttcgttccctcccgactgggaatgtcaggctcctgcaggccagctgcatgctctccaggagcaccaactgggaaatcccctgacaggtaaagtcctttaaaatgatacttttacctacctaactctgggggccaaatgcttaagagggaaaggaaacagtcgaatgcaaacagtgtgtcataccagag

SEQ ID NO: 15327 - DNA, 1264 bp, Homo sapiens
gtggaataggcatcatctgtatctcaccaaggaggcagatgaagcttagatactgtgcccgaagcagagctggtacgtggggaagccgtattcaactcaggcctgttggacacagcccaagctctcccgtctatccaagcgggcatcaaacaggccaaaattcagttgagtttatcaacttcttatggagaggaagaggagagatgagcatttattgagcacctaacttgtacactgctccttccagggactagggagatacaaaggtaaatgatggcgtgcccccatctggtgggagtgcaaactccaggaggaaggaagcgggggccaggagagtggatctcgtaagatgaataattgctcacatttgtatgcaggctgtcttctaagtgtttttcggtagtatttatttggatctgggtccataggacaattatcgtcttcattttattgatgaggaaaccaagacagagacattaaagtaacttgcccaagattttaccaaattagcagagttgagatgcaaatccaggctgtctgactccagagctgcattttttaaaaaaccactgtaggagaataggctaattagtttctttattaccctacatactaaaattgttttacccacctcagtgggtaaaacaaccctcagttgtcataggggaaagtttcttaaaaaacaaacaaaaactgagtctacctcctaacttctctaagtgttcagacagttgaattcttgtttctgcagcaccaacaagcctaaattaccaacccattactccacagtgggaaatacaaacgtggagcacagcacttgctgtggtgtgtccagtccctggtctctaagttgggcccctagcatagccaggagattgcttgggaagcacagaccagagcaaggagacttgtcagttgaggaagaaaggtttctcagccaccatcgttcgaggtttccttttcctctgatggctttgccagtagaggaagaatactaaaaatgagttcaccattccttcttgattttacatctacaagttctgctgcctgaagacagatggcctcagccttctcacagtcacctcaattgaaaatgcccctgatttcttcacgagagtaatttaatctggttgacaaagctgtgagtaatgggaagatgtgtgacaaaaaaagtgacggccttcagaaagtcagaaagcattgggaattgtcactttaaacacattctaatatcactcattcaggtgaggctgaaaagaagaag

SEQ ID NO: 15328 - DNA, 1196 bp, Homo sapiens
ttaagtttagttgaagattttaaaaggttgtaaacttcctttgatcttcaacttttaagactccaaatgccagttctgcagcttctgtaagctggaaaaaatatccccccgaataataaggaaaacaatgtataaacattttccgaactattctatccacaaagaattccatttataaatggaatactcccttctttgtctttgcctaggagcttgagggatagctgtttgtatttgtacattttctgaatttctacagtttacacttgtttatggtacattggggagttcagagtaaccatttgcaaatgtttgaagatattcaaaagaaaatattccccctcctcagttttccagggaaatgacatagactctttaagtaaaataatcaatggaaaaaatgtgtacaaggagtaaccctttcatctcacttttccacctttgtggctcccaaatttctaagtttcaaaaaccagaaagaaaatataagaccctttttcctggtcccaattccatgatactactccaggctcagcaggggggacttgacatcttattttctcagggaaagctggaggaggcacctgtagtttggctttttggagtttaattattagtctggtcatggagccacagtcctagaaacaactgttccaaggcaaggagttcacttcattggggaagccaaaagggtggaggtcccaaaaagttttttgccaatttagtttctcaaactgagaagttcaagagaggaggctgtctgggaggaggttgggaagtcagtccatacattcgaaacaatactataggtgcctacttttaaaacaaggaaaagaaggaaaactgagagtgacaaaaggaaatcagtatgaatgggatgtgctcggatcctgtgtcagacttgtgctatctaatggtccagtacttgactattgggaatattaattggtgacagtccctaagttaagggttagcttgtctgttgggatgcagttggcacatatagttctaggtagaggtacttcagagagccagaaagaagacaccaggtctgtgtcatggacacatgtgagtgggaggacctgggagtgtgcttcctgtgatcatttcagacttgtagaggaaagttttctggaatgaatggtgtcaagattggcctgagatatgtcccaattcaatgctgctgggaccatgtt

SEQ ID NO: 15329 - DNA, 1141 bp, Homo sapiens
tctctggttttaagattctggagaggatgataacctagtaacaccacagtgcttaaaaaaaaaaaaaaaaaaaaaactaccatcaccagaaaattccaccagtttgttttccttttctctttgtgtgatgtgtatgtacttcccaactaagtaaaataaaatttcctctagtgagtgctttaggtaacctctttccatatggcagtagtgaaagaactgagccttcagttgatagttcttctctctccagcaagtcgctaaactccacatcccttcgtttttcctctggaatgagaataacaaactatcctagtttgcatttaatctaatggaaacttgagcaaagtttcaattttcttcctataaagaaactgacattttgtcaacaattgatgagcctatagatcatacagtgtataggaagtgaaattgaaacagttaaattatgtgatatttttctctaattggtaaagtacctattaaaatacagctgttcatgaggagacttaccacaattcaaagtgtagcagttgtgtattttagcattataatatttgattgaggccctgaggtgttaatatctcaatctcagagttagatgttcatgtcctttttgaattttttaaacatttttcataattttttttttaagttagggagcacattgagtgaagttctctgtgtagaacaataccttctgctctgcttctcccagctttcactgagggctggaaaaggacaggcctgtccagctgtactgtcccactgtgtatggggaagctcaggctctggtggaagcagggggcgtggatgtcaaacaactgatgtggaaacagggagggagagatataatgaggctctctaggcatgttatttttgaccacaagttttgttcagtttgcttcagccaatccaaaccatatactagagtgttctgtagtcacaattcttatttcaaatgtaattcagcaccttacataatttttgagaggttgtcattcatcacatatttactgagtttctatgtgccaggctctgtgactggatactggagctatcaaaatgaaaaaaatagtgttaagaactcactcgctggtgttagagcaggtagatgagtggcaatccatttaaatccatttgc

SEQ ID NO: 15330 - DNA, 1919 bp, Homo sapiens
ttctttgtaattgctgtggtcaaagaaaaccttttgtttaccaagatttcttccattatttctccccaaatttctgatgtctacatttaattcttctttctagttggaagttcatgaggctaagcctgtgccagaaaatcacccacagtgggatacagcaatagagggggatgaagaccaggaggacagtgagggctttgaagatagctttgaggaagaagaggaggaagaagaagatgatgactaagcagtactctgaatggaccacagtgtttgcacatatttgcaattttttgctgttttggaagtgtatcataaaccagaaacagtacagaactgatgttgagggaggtgtagtttttttactcttgaaatgggtgcataatataactaggcagtggcggtgccttggtacaacctgaaaaatgttaaggcttattgaaacctttcaagtaggggatggtacatttatttcatctgcaaatgataataaatcctttgttattataactgtccagaagtgtgggctatgtattatctgatcagtctatggtcccagtaaaagtaaagatgcaggaaacacagtctgtaaatgagcgacttttctttgttcagctttagttttagcaaacaccacaaatatgttttaagtaacatcgctcaagtttaagtaacatcgctcaagttgataatctcttgataagctctgttgttgacattttgcagtgatacaacagctccactcatagatttaaacttttatttttacttatcttggtcataagttggcattctctcacattccacatgatatagagggctacgttttggaattttccttttcttaattgcccagagttatcagacagattataaaaatggcttttaatggcttaaaccatttctaaacctctatcttagcagatcaatgcaggatctaattcttttgataagttctagctctaaaagtgatagtgggactgtatgttttctgatactggtggcttatgttattaaaccttttttaaaaaaggttcactctaaaagctgaactacatccttagttttcagtctacttgactctatcaggagctttttaaggaaagtaagtataacatgcaaaggaagctttttttgtattcattttggactcctgtcaataaaaatagaagtttgttgactcgttttatgtttcaatggtgtgtgtctttttactatcaggacataaatagggcaatccacttctttatttttcaactaaagattgaatagtattgtacattactgctaaagtgactgctatttctgtatactgtagaaaaacccaggagtgagagggatttcccctcatagtacaactggaaggatagtgcttgtaaagagtagagatgtgtacatgatgaatcattgagggagggtggatatttttattcctagatatggaggaaacataagtctgtagtattataaaactgattgtaataattctttcctatcaaaatctccataggtcaaaatattgttggaatactaaaatttgcaaccttgtttactttaaaaggttgccactttcagtgcagaatactaccggcatcttgttactgcaatagttggaaataaaatgtgaaaattagcaaaaccatgaatggtttttttggttctaaatttaagatgtaatatttcctataaaagggtgaaagcagtttctttctctataacctcaatcaccagtttagtgagagcctttcttggcaggcaggaggcagtgtcactgaggatttttttcatttacttcattgtacaagtaggagggtgggtttaattttcaaatcaggttctgctgtgaagcaccagtgtcttgaggcagctactgattacctaagtgtggtggcagggggtaagccagctggtgtcaagtg

SEQ ID NO: 15331 - DNA, 1118 bp, Homo sapiens
gggatcaggtcttgctgtgttgcccatgctggtttgaactcctggcctcaagcagtcttcctgcctctgccttccaaagtgctaagattacatgcatgagtcgctgtgactggccccaaaattatacttttctataaactacctgtttccttaaataaaatatgattgatgtttttgaaagcagaaccatcttagcctttgtgttattgggctttgcaaatagaaatacttttatttgacaaattatgaagaatgaataaaataactaacaatagacagactagccagatattaaactctttagtctgactcccacatctttataagtaggaatgtttataattttaaaaaattgtatatgaatagtgaaattgtcatcgagtcagtttagttaaattgacaataagttaacttcagggattcagattgatatgttctcattgagatatgcagaatctttgtgtttgcctttcccttttaggaagctgcagtaaaggaagatgaagaagaagtttcagataagggcagtgattctgaagaagaagaaaccaatagagattcccaaagtgagaaagatgatggtagtgacagagactctgatagagagcaagatgaaaaacaaaacaaagatgatgaagcagtaagccttataggtttaaataatttaaataattggaattatatctctgatgatagctttgggttttgttgttgttgttcatttgtttgcttgctcgcttgctttctttaaataatatctgtatattttataattttattactttgaagaacgtttttaaggaatggtagtcaaggttatacagaaaaatgatttctaacaaggattggaaatcctcgttttcttaaatattaaattgttaggtagagtaggacctgggtttgaggttaggtcagttggtctcataaggggattttcagtgttggggatatctctgggaatatgagtaaggaaaggtgtttgtgaaatgcatagtgcttacttggaaggctgtgtcacaagctccagttcatgtttactgtagagaaacagtactgtggaccctgatgtcaagaggttggttaagggaaaagctaacatttatagaataccaccttgt

SEQ ID NO: 15332 - DNA, 2139 bp, Homo sapiens
tgtgactgacacagacccttgatgaactcagctgctgcttcctcgtttataactacagagcccttttgggtgacaccatttctcctccaggtctgtccaggtttctgtcatctcttgccttaccatagatattttcagtccttaatggtcacctacaaaatattcattgatgtggccaggtgcggtggctcacacctgtaatcccagcactttgggaggccaaggtgggcggatcacgaagtcaggagatcaagaccatcctggcagtggcgggcgcctgtagtcccagctactcgggaggctgaggcaggagaatggcgtgaacctgggaggcaaagcttgcagtgaaccgagattgcaccactgcactccagcctgggctacagagtgagactccatctcaaaaaaaaaaaaaaaaatcattgatgaaaagtggctgtgctctaccggcgggatttgactgcgtgatgtctcacagaaagttttctgctcccagacatgggtccctcggcttcctgcctcagaagcgcagcagcaggcatcgtgggaaggtgaagagcttccctaaggatgatccgtccaagccggtccacctcacagccttcctgggatacaaagctggcatgacccacatcatgagggaagtcgacagcccagcatccaaggtgaacaagaagcaggtggtggaggctgtgaccattgtggagacgccacccatggtggttgtgggcattgtgggctatgtggaaaccccttgaggcctccggaccttcaagactgtcttcgctgagcacatcagtaatgaatgcaagaggcgtttctataagaactggcataaatctaaaaagaaggcctttacgaagtactgcaagaaatggcaggatgaggatgtcaagaagcagctggagaaggacttcagcagcatgaagaaatactgccacgtcatccgcgtcattgcccacacccagatgcgcctgcttcctctgcgccagaagaaggcccacctgatggagatccaggtgaacggaggcaccgtggctgagaagctggactgggtctgcgagaggctcgagcagcaggtaaatgtgaaccaagtgtttgggcaggatgagatgatcgacgtcattggggtgaccaagggcaaaggctacaaaggggtcaccagtcgttggcacaccaagaagctgccctgcaagacccaccgaggcctgtgcaaggtggcctgtattggggcatggcatcctgctcgtgtggccttctctgtggcacgtgctggggagaaaggctaccgtcaccgcactgagatcaacaagaagatctataagattggccagggctaccttatcaaggatggcaagctgatcaagaacaatgcctccactgactctgacctgtctgacaagagcaccaatcctctgggtggctttgtccactatggtgaagtgaccaatgaccttgtcatgctgaaaggctgtgtggtgggaaccaagaagcgggtgctcaccctccacgagtccttgctggtgcagatgaaacggcaggctctggagaagattgaccttaagttcattgacaccacctccaagtttggccatggctgcttccagaccatggagcagaagaaagcattcatgggaccactcaagaaagacggaattgcaaaggaagaaggagcttaatgccaggaacagatttcgcagctggtgtggtctcaataaaagttattttccactgggaaaaaaaaagaaaagtggctgtgtcttccaagcgatgtgactccacaatacatgggcagcagtgaacattggttttcccgtggcgccagactcttcctctgcctcagggaagcagctctgcttgaagcccctgtggatatggtttccatgatttttcttccagatatcactacttggaaaattgtggttttattcctactcattaagtcttataaacattatgatttgacatgtcacattccccagtgaatttccgctttgtaaactctgggctgtttagtcagttgcagaaactaggtagggaggctgggggtggcaggaatgtagactatcaccccctgtccctgtcccttcccacacagacaatccagccaatggcagaagactgccggaaatgtagaag

SEQ ID NO: 15333 - DNA, 1308 bp, Homo sapiens
ctactcagggggctgaggcacgaaatcacttgaacccaggagacggaggttgccatgagccaagatcagccactgcactccagcctgtgcaacagagcaagactccatctcaaaaaaaaaaaaattatacatgcttctcaactttaaaatatgtgttttgaactcccccaccttgtataaaatattggactaaatttatattttttattctcagggtcgctggtcatcctctggcacagaacgaacgttgtcttcacatgtttttacaagatgaaataatagataaaagctatactccatctaaaataagacatgcctgaaatttggcaagaaggggcaaaaacgtgactattaatgattgataagcaccagtgaagaagttctaacttttagcatgctgcacagaaactggtataacatgccttcagtatactaacactcatatgctcagttttgttttgttttggcagttgacaagaagttaatttgctttagtaaaaatccctcattccagcctttctatataaatagctctttcttgctgttttaatgtggtgcacactatagcctcacaaacctgttattccagtgtaatctgcagtgtcgtaactaaagttactggcttggtcttatttgcacagtttttgcgtcttgtttgcttcttgcatctgattaactagaatatttctctttcccccttttaatttgtgatgtcacttgaccccatttatgtgtaggagcactacaccattggtttccaatactgcacacataagatacatacttgtgtgcagaaagtatcttcctccaggcttgtaatacccttcacatggaagattaatgagggaaatctttatattctgtataaaaacaaaagcaaatttatatactaaaatcatttgtctaaaaatttaagttgttttcaaataaaaattaaaatgcatttctgatatgcactgattgtgttgcctccagctttttttgctctctatgagtgactacttaagtcacttgttgagagggattatttactaattatatacttctcattcctgtaactccattccctttaaacagtggtgatatcaaatatacttccatccattgaatggggtatttttaacaacaacaaaagtgatatactaaaaaatgtattgcttaaggcttattgaatcattttgaagcactttgtgtatttgaaaactgctttataatctcatttattaaaaggactttcaaagataaaataccatttctcctatttttcagaagttttttcctagtcaactgagtgacttgtttaaacaa

SEQ ID NO: 15334 - DNA, 1517 bp, Homo sapiens
gccaagaagaaggcagccctgcagacagcccccgaatcagctgacgacagtccctcccagctctccaagtggcctggcagccccacgtcacgcagcagtgatgagctggatgcgtggacggacttccgttcacgcaccaattctaacgccagcacagtcagtggccgcctgtcgcccatcatggcaagcacagagttggatgaagtccaggacgatgatgcgcctctctcgcccatgctctacagcagctcagccagcctgtcaccttcagtaagcaagccgtgcacggtggaactgccacggctgactgatatggcaggcaccatgaatctgaatgatgggctgactgaaaacctcatggacgacctgctggataacatcacgctcccgccatcccagccatcgcccactgggggactcatgcagcggagctctagcttcccgtataccaccaagggctcgggcctgggctccccaaccagctcctttaacagcacggtgttcggaccttcatctctgaactccctacgccagtctcccatgcagaccatccaagagaacaagccagctaccttctcttccatgtcacactatggtaaccagacactccaggacctgctcacttcggactcacttagccacagcgatgtcatgatgacacagtcggaccccttgatgtctcaggccagcaccgctgtgtctgcccagaattcccgccggaacgtgatgcttcgcaatgatccgatgatgtcctttgctgcccagcctaaccagggaagtttggtcaatcagaacttgctccaccaccagcaccaaacccagggcgctcttggtggcagccgtgccttgtcgaattctgtcagcaacatgggcttgagtgagtccagcagccttgggtcagccaaacaccagcagcagtctcctgtcagccagtctatgcaaaccctctcggactctctctcaggctcctccttgtactcaactagtgcaaacctgcccgtcatgggccatgagaagttccccagcgacttggacctggacatgttcaatgggagcttggaatgtgacatggagtccattatccgtagtgaactcatggatgctgatgggttggattttaactttgattccctcatctccacacagaatgttgttggtttgaacgtggggaacttcactggtgctaagcaggcctcatctcagagctgggtgccaggctgaaggatcactgaggaaggggaagtgggcaaagcaggtcagtgccgaatgctatggcataaaaataacaatatggggatgaggggggatctctgggggagcctgtcttctctttactttgaactttattccacactgaaaaccatggagcagtggtgcacataatatggctcccagccagttccatctcagggttttacctgcaaaccaaatagggctgtcaggtgccccccttcccccgcacagtttgctgatagttcagaaatctactgctcgtgaagagaacacgtacgcattca

SEQ ID NO: 15335 - DNA, 1108 bp, Homo sapiens
ggtgagcattaagcttgcagtgagaaatgtgcgaagagtaaaaacccaagtcaatgctgaggcagttctaacttcactgttttcctaaatacacatccttgattattttcagccttgctatataatctgatctgctagaagtgtatgagtgagaggcaatagcatacaaactgattttttaaatataagcttaggttgtaattgtacaagtgactcaatggaagtacaaaatagggcagttttaacttttttttctgcttctatggatttcattttgttgtgttttcaaaaagttatggtgctgtataggtgctttctgtttaacctggaaagtgtgattatattcgttaccttctttggtagacggaatagttgggaccacctttggtacataagaaattggtataacgatgctctgattagcacagtatatgcatacttctccaaagtgatatatgaagactcttttctttgcataaaaagcattaggcatataaatgtataaatatattttatcatgtacagtacaaaaatggaaccttatgcatgggccttaggaatacaggctagtatttcagcacagacttccctgcttgagttcttgctgatgcttgcaccgtgacagtgggcaccaacacagacgtgccacccaaccccctgcacacaccaccggccaccaggggcccccttgtgcgccttggctttataactcctctgggggtgatattggtggtgatcacagctcctagcataatgagagttccatttggtattgtcacacgtctcctgcctcgcttgggttgccatgtttgagcgatggccctgttgatttcaccctgccttttactgaatctgtaaattgttgtgcaattgtggttatagtagactgtagcacattgccttttctaaactgctacatgtttataatcttcatttttaaagtatgtgtaatttttttaagtatgtattctattcatatggtctgcttgtcagtgagccagacttgcttactatattcctttataataatgctagccacttcctggattctttagtaatgtgctgtatgcaagaactttccagtagcagtgaaggagggttgcctctc

SEQ ID NO: 15336 - DNA, 2308 bp, Homo sapiens
ggtcagccgagaatctggtagtgaagcctgtctagggtcccggcaccctcaccctcagccacctgcagagaggccagggccccagagactagcctggttctgaagtgggcaggggtgctgccagagccctctgccccttatgttgagaccctgctttcaggacaggccagccgttggccaccatgtcacattctgagtgagtgtcacaggtccctaacaataattttctgatctggagcatatcagcagaatgcttagcctcaaggggcctggcagctgtaatgtttgatttatgatgagaactatccgaggccacccttggcctctaaataagctgctctagggagccgcctactttttgatgagaaattagaagagtacctaatgttgaaaacatgacatgcgctcttgggatctgctgttctctccagggctccagaacctgatacctgttaccaaagctaggaaagagctttatcacaagccttcactgtcctggcatgagaactggctgccaggctcagtgtaccccattaactgtgaatgaatctgagcttggtttcctttattgcttcctctgcaatatgattgctgaaacacattttaaaaattcagaagcttgtcactcctgttaatgggaggatcagtcacacatgtgtagtacaaggcggactttgtgtttgtttttggtgttaatttttagcattgtgtgtgttgcttccccaccctgaggagaggacaccatggcttactactcaggacaagtatgccccgctcagggtgtgatttcaggtggcttccaaacttgtacgcagtttaaagatggtggggacagactttgcctctacctagtgaaccccacttaaagaataaggagcatttgaatctcttggaaaaggccatgaagaataaagcagtcaaaaagaagtcctccatgttggtgccaaggacttgcgaggggaaataaaaatgttatccagcctgaccaacatggagaaaccccgtctccattaaaaatacaaaattagcctggcatggtggcgcatgcctgtaatcccagctactctggaggctgaggcaggagaatcgcttgaacccaggaggcggaggtcgcagtgagccgagatcatgccagtgcactccagcctgggtaacaagagtgaaactccgtgtcaaaaaaaaaaaaaaaatgttactcatcctctctgaaagcaaaaaggaaaccctaacagctctgaactctggttttatttttcttgctgtatttgggtgaacattgtatgattaggcataatgttaaaaaaaaaaatttttttttggtagaaatgcaatcaccagtaaagaggtacgaaaaagctagcctctctcagagaccggggaggcagagtactactagaggaagtgaagttctgatggaatcatgcctgtcaaatgaggtcttgaagcggatgcccaaataaaagagtatattttatctaaatcttaagtgggtaacattttatgcagtttaaatgaatggaatattttcctcttgtttagttgtatctgtttgtatttttctttgatgaatgattggtcatgaggcctcttgccacactccagaaatacgtgtgcggctgcttttaagaactatgtgtctggtcacttatttctctaaaattatctcattgcctggcaatcagtcttctcttgtatacttgtcctagcacattatgtacatgggaaatgtaaacaaatgtgaaggaggaccagaaaaattagttaatatttaaaaaaatgtattgtgcattttggcttcacatgtttaactttttttaagaaaaaagttgcatgaatggaaaaaaaaatctgtatacagtatctgtaaaaactatcttatctgtttcaattccttgctcatatcccatataatctagaactaaatatggtgtgtggccatatttaaacacctgagagtcaagcagttgagactttgatttgaagcacctcatccttctttcaatgcgaacactatcatatggcattcttactgaggattttgtctaaccatatgttgccatgaattaactctgccgcctttcttaaggatcaaaaccagtttgatttgggaatcttcccctttccaaatgaaatagagatgcagtacttaactttccttggtgtttgtagatattgccttgtgtattccacttaaaaccgtaatctagtttgtaaaagagatggtgacgcatgtaaataaagcatcagtgacactctatcttactccaagaagtctctttgttctccctccccctttcttgaaccctag

SEQ ID NO: 15337 - DNA, 1478 bp, Homo sapiens
caaagttatcctggctcagagtattctctagttgtcacatatgtgctttttttcactaataggagcagtaagctccttgaaagtaagagcttttttctcattatatttctacctgacaagcacagtgttaggcatgtaatagatgttcaataaattaaaaacttaatgaattgaattttttaatgttcaattttaactttttaacgttaaaccatcaattcaacctatctattttggaatatatttttagtatatttttgactaaaatgttagatttttttttctctccaggtctgtaaactgcagcaaaaagttcaaaactcaaagatgagtgaagcttcaggtattcagcaagaagacagctaccctaaaggatcaaagaacataaaaaatagccccagaaaatgtttgactgacactaacctttttcagaaaaacagcagctttcatccaatacgagttcataatcttcaaatgaaattgagaagagatgatatcatgtgggaacagtaacaaaacagcaaaactgtcaccttaatgaactttgtcagtgagaccttgaattgtctaaagtggttttaatttaatataactttgtgacattttgaatcatgtttctagtttctataaaacatgaagttgcagtatttaaaaattaatgcctaatgacctggtgggttccaaataataaattaattgcttttttatttttcttattgattgaagcccgtaacctcatcttgtcttagaaacattgttggctttgcagatatcttaagctaaatttaagaaattgtactagattgacaatattcaaaattgagttaaatccaagctacaagtaccattcattccacttttcatttagtaggtttggaaccttaaaaaccaatgttcaatgaacagagttcagaaagatcatttagctttcctggtgccttctttctattttgttttagagctgtgaaatgtttttctcttttggaaaaggaaaaacttaatagttacacagttttgtgaagaagcctttaatccaagttttatgagacagtaggaacctatagctacttaatttttaggagacagtaattcagttgcagaagctttcctctgctattcccattctcttttacaaaactagttttttttaaaaaatcaatgatcaattttatcttactactttataacttttgctgacttttattctttgcattgtatgtaatgtccatcagtataaattgagactgtgaatttctaggacccacaaaagtggtattttttttttgtacaagaaagtatagaggaagaggaagctgggcattaaattacctcatccagcagaaattcacggtagtatggtatatttttattttttatattttaaaatcaataatgtcaaatgtcattgtgtatgcatgctttataataaatttacacttgatcatttttctggaagcctatgggaactagtacaactc

SEQ ID NO: 15338 - DNA, 2659 bp, Homo sapiens
aaaaatcaattaaatcattgtgttcaacaggaatatttaaaatattctgcatgaatcctgtggctgtcttattttaaatagctgctgctgtgggattatattttttttccttaacatgccaaatataactttctgaaagtgatggaaaatgttgtcttgtgcagacaacatcatggctcttggcagtttaaatttagtaattttaatttagtgaacagaattgagaagaacgtgccaaatgagaatcaattaggtggatttttggctgtcatttcaaaagtggaataaatttattaatttagtagtactaaatggtatccttagattaaaattttgtgcttgataacagctgttttttctacattagaaataagatgccacacaaggaactacattccagatttaaagaaatgaaaggataccattagtgtgtataacagattattgttcatacttgtaaagcatcttatgtcattgagaatataaagaacagtgccttagaagacagtgaaaggtaagctctagcttaatgtctatgatttgttctttgacattaaggaaggtaaggattggtcagaggatgtaacttgatgtgagcagtagtaaacctgttttagatatcatactgttaatattttattgaaaatttatttcagagcggagaaacttaagctaaagtctgttatacagaattgaaagccttcgtatcttgaacctcccaacatttttcttatggctgttgaaaagtatagagctaaattgatttaattacactttcctttgtactttaaaaaaaagtatgctagcactattgtaccttgaaaggatttccaccagactgtcttgagtagtgacttctttggtgaggcaagaaggatatacattattttagaatcatttactatttaaatgagacaatcatattattttagaatcatttattttaaatgagacaatcattttaagttttaagataacagaagtgaccaatgtaatttcacaacacctaaggattttttggttgatcaggttactgtagatttttactgattgtcctggatgaatagactgtgctttttctttttctctcccttccttcttggtttcccatagtataataagcatgcatactttaacttctatagttttctcctttagagggtcgtcttcagttttagaggtttacttctcccttgcctttgactcattggactagtgcagaggctttaagtagtttaaaatgggcttttgcttttctaggtcattaacgttttttatttagtttctttagccaatagtggctgagtttcgcacttgattttcaatattttatagtaagaaatgacaaactgctttgtttcatttcataaacaaactctgcatttagataactattaaaggttgttaagatgaagatttactgtttctttgttactcgttggtacagctgtttgttttacttgcacatttgtacatatacttaatgttttcaagtgccttaattgtttaaaatctctggcttcaaagtttcttggggaaaggtcggtttacctcacattttttgtttccattagtaatattctaggtacctcacaaaatgtattatggtgccatggctgttagtttttagtgagtgctgtaggattaattcgaaaataggcagaattccattcctcccaaggtggcaaaaattagctatactgatgtaattgtcatttacctgggtatgaattccctgacacacattcatgtcaacatatgtagcaaattttgtgaaaacataacaatttgaagcttctgtaattttgagcactgctctaacaacaagcataatataaaattagttagattttgcaagtctacaaatgagctcttgcaacagaactcacagcctttttacttttttcccctaactttagcaatgtagtatcttgagccattaatttttgggtttttttaaaatccagaaggtatatagaaaccttttcagatttttcatctgatttgttcttgcagatgttcttctatcaaataccttattttaccttacagatatttgttgcacaggcagatactgctgtatttagacatttctatttcagttcattaaaaactgcaaaaccaatctgtatcatgtaccaaactgacttaaaataaatctacatgtttattgaattaatagtgtgttactgcgttttgcttataaaatttaatgcttagtggatttatcttagtccgcttggggtgggctttctactcattttattgcacctctagaccagccgatagtaactaaggcacatgttcatatcaatagaaagcagagccttggaagtaataggtggagggaggacttggtacacttgtgggagtgatttgcaagttgatcttccacaaatcaatagaaattatgctgtagttttccaataatttttgagaggaatactatcttggttttataatctgaaagctagtttgtgactttctgcctttttagttcatattgcatataaagtaaaaaccaagaactatttggtataaattactatcaagccacatgctgtgactttgaagtgtggttcttgttattttgtgggcaaaattatgttctattttatatcagtggacttgaactaagaatttactcctctgtaagcct

SEQ ID NO: 15339 - DNA, 1190 bp, Homo sapiens
agaaaaaaagaaggggtcctgccgaagatataaggaagctccctggggatcccgcagcacagcacaaacttagttcttgagagccgcacaaaaccaacttccgccccagtggagttgcgtccggaaggcgcggccccggaggtcacgtgggcccgcggaattacagcctggcggggcgctcaggtggaagcagtaggccacattatgtcgactgttccatgcaagtcagggtgggggccgtccctatcgcaggcatgagacaagtccagctgcgtcgtgtctggtaatctgagggcaagaagaacgatttgcagaagctcccagttttcttggctgtggcacagtcgctttgagggccaggttccttcggcttcctcccgactcccctgcttccccccgtaggattcccgttggtatcgtccgagccccacctccctcctcttcgcccccgcacgccgaaaacaggggcctctcacgtgacccctgcgcgctcccgcgggggagcgtagtctcggaggcggcgccgcaggggattgaggggttgactgagcgttgcgagccttagctttctcccgaacgccagcgctgaggacacgatgtcgcggctctcccgctcactgctttgggccgccacctgcctgggcgtgctctgcgtgctgtccgcggacaagaacacgacccagcacccgaacgtgacgactttagcgcccatctccaacgtaacctcggcgccggtgacgtccctcccgctggtcaccactccggcaccaggtgggcgcgggccctgtgggcttcccgccctcccctgcccagccgagccgcactgcctcctcgccgtgcgggcggggcccgggttcgggccacggtcgggcgggcgggccgcgctcggggtgcggcggcgactccggcaacatggcggccagcctggagtccactcgtggccgggccgggtggggagcgcgctggggggaagcggacgcgcggttcccagtggctgcggggctggggcccccctcgaagtgttgcaagtcgaggtgccttttaaaagtgcatcgtaattcctagcctcacttggggtcggaaatggggacgtggcttccttccgcgggggcagcggtggggttgaggatggggccgggcgtcgcgcctctgaggttggcggtggggccgagctgcctctccctgccact

SEQ ID NO: 15340 - DNA, 1286 bp, Homo sapiens
tggagtggcacggggcttcctggcagcctttgatgcagcctggatggtgaagcggtgggcagagggcgctgagtccctagaggtgttggctgagcggtaagacctgagttgaggaggatgtgggcagggcaggacatgtgacaaggttcaggaagaggggcaggggtgctgagtgaatagacggaggaataggcagaagaaaaggcctggcagttcctgagaggtgggtgctgacaggtgccctcccattcatgcccctgccccttaccctcaccccctcagtgagagcctgtaccagcttctgtcacagacatccccagaaaacatgcatcgcaatgtggcccagtatgggctggacccagccacccgctaccccaacctgaacctccgggcagtgacccccaatcaggtcagacccccgacacacccaccagccttcccaagccaacccccttcccccaggtcaggccctccctgcccagtcgctgccctttggggtcaatcctacccccggcaggcccttacccctggactcaggggctgtgtggccagcctgccttgagacctgagcggggctgccttaggtacgagacctgtatgatgtgctagccaaggagcctgtgcagaggaacaacgacaagacagatacagggatgccagccaccggtgagcaggccttcctcccaaggggtgaccaaaatatgtactacccagcgaggcccaggtggtccctgcaaagcagctgcagcctcaggacaggagcagcgtgccggagcactcattgttggctggtgggttggttgggggcctgctggaggaacggaggggcagcaccgcacaggcagcagttggctgccagtctgaatgtaagcgcgttagtgtttgaaccaccgttacagccatagtggtgctggcaacctcccctgcccccagtttagtctgctgccctctatgtggccagttgcgatttcactttattcactcctctactttattccaaagagattttttttaaaagagaattgggatggagagctgctgatagtcagctttaggctggtgccctagtagaggtgggtccctgactcctcctcccctacagaacccccacatgcagcagctgggctccctatatgcctgggatgggcagagggggccttgggcacagcacagccttctttcccagggtcggcaggcacccaggaggagctgctacgctggtgccaggagcagacagctgggtacccgggagtccacgtctccgatttgtcttcctcctgggctga

SEQ ID NO: 15341 - DNA, 1209 bp, Homo sapiens
tatctatctatatatattatatagatatatatttgccaaattgcctttcagaaaggatgtaaacagttaatgttccccttggcagagtatgggagtgcctattttgaaatgtatttgccaacttaacagacagaaaatggtatgttgttctaatttgcagtatttgataactagcgaagttggatttttatatatccattggctgtttctgtttcttttgaaaattgtgtgtacctgtttttctattaggggttaatctgtgtctttcctacatttagttggtatttatttcaatgtctgatgtgaggtaggggtctaacatcattgtcccttccacccccaccccaatactattgtactgtttattgaataatacttcctttcattgctgatttcagaggacactgtatcataaacttaatattagaataagagctatttcagttcaaaaatgaatttttttctctaattaaaaagaattgttatatttaaacctgatctatttaaatgtagtcagtagtaaaattggctaatgtttaacctgtttgaatggtatttggtgcatattctttcttcccttcaagcacaattaaacataaaagtggctaatcatttcgccctcttgttatccacaaccacagagagcctaccagttttaaacccttgttcatatccagagtaccaccatcttcctggaggtgattgttttatttgcagtcagaagtagccaggagaagatccttgggctcattagggctggccttatatctcaagcttagtaagtgaccgtaaacatcatacatgtattttcagttgcagcagcagtacttccaaaaaggcttctttatgatcctttgaaagaatattctttttttggctatgtttctcacatcttacattttaccatacttgctaaaaattaaaggtaactgctgttaaaggatgaaagaaactcctagaaaatgtggctgaaaagtgcaaagcttctctagattatattaagatattttgaggtactacgtagaatgaactattaagtgctattaaggctatttaagaagcagaaagaatgtaattgccataagagcatcatgtttacttttgtattatgtaaagagggtacaaattggggcagtaatgtatgcattatttaatgcttgatgttttctctcaacaagtgcaaagaaagtccccaaatgtgctcagcat

SEQ ID NO: 15342 - DNA, 1179 bp, Homo sapiens
ggcgtgagccaccgcgcccggcttcttgcagctgttattaagttctgtgttgcttcaggaatatttaaaatatttggaaggtctcagaatttgtatgtttctcaaatttattcttatcaatgcatattattggaataaccaacttaatacttgagcttactgtccctataaatggagcactgctaatttttacattaaatttattattaataaaatattatttacatgaatttttgctgacaaaaaatttgaaactttatttgttgagagatgggtataaatacctatatttatatttattgatgacagttaaccataggtaaatatggttgattttctgaaattttgtattactttaaagtgttgaagctatttagatacagcttgggaacagccataactcaattttccactgcagaaattagctatgtattaaaagcataatttaaaccccttgctcaccttgagttacatcacaaaggcaggtggtttgagagtttatatgtgggaataaaaggaagctggtattacatccccattttctaaaaaaggaaattgaggtgcagagataatgtcttggctaagattattcagttagatgattcagtgagaatcagctctaagcctaccactgaaaataaaattgtatctaagtagataatatggcttactcagttgatttaggtctcctttttctgtttgtttgtttttcctctagaatgtcaaaattctgaaaactattttttggtgtcaggggaagagggaattgatactgtgcataaacaatttttataaatactgtaagataaatttcagtgggtttttaaaaaaactttctagtgtcacccacctgtacaggttattttgctgacagttaaagcagcattacagttctcaaaagaaatgaacagtttacccagaggcagcaacaggacaagagcacagagctcaggctcacgtagagctgagttggaatttctgcaagtgtatgtggcctgcgacccattaacctctcaacctcattttctcacctataaaatggagatgattatacatacctcacagggtcattgaggcttaaatgggaaaatatatggaaagtacttaatactgggtctgacacagaataaaccctgtactgaagtagccaggctctggaaagcctgcctccagttaata

SEQ ID NO: 15343 - DNA, 1649 bp, Homo sapiens
cctgaaagctttctacttacttcctcaaagcttcatacacttgccagttttttttttttttttttttttttttttttttttttttttgagacggagtctcgctctgtcgcccaggcgggactgtggactgcagtggcgcaatctcggctcactgcaagctccgcttccggggttcacgccattctcctgcctcagcctcccgacacttgccagtttttagaaaactctggcagtgattgtacacctgatttaagaagtttaaagttctgtacaaataatcagtactatgtggcattcttcccaaaaaatggatcaacattttttacttgctgaagatataaagttggataaaagtaagctgtttgaaagtttttctttagcactgtaatgatacaataattggtagtttctgtaacactttcttgacctttaaaaaagctaatgaaaaacaaatggtaaacttttccatagtcttcaaagaaaatacttttaagtagttaaaaaaatggaaaggaaataaggaaatctgttcttttggtttcagtccttttttttttttttttttttttttttgagacagtctctctctgtcacccaggctggagtgcaatggcatgatctcggctcactgcaacctccgcctcatgggttcaagcaattctcctgcctcagcctcctgagtagctcggactacaggtgcatgccaccatgcccagctaattttttgtgtttttagtagagatggggtttcaccgtgttagccaggatggtctcgatctcctgacctcatgatccgcctgcctcggcctcccaaagtgctgggattacaggcatgagccactgcgcgtggcctggaaatcagttcttcagacctgccctgtaacctcccatgggcaaattagaacaaaactacaaaaccgtatccttgaaggaaagacagatccatgcagtccaagcaggcttccagcagatatgcactccagaaagctgctgggtatcctctctgcctgctgagttggcccaggccatttcctctggctcttagctcaaagcctgccttagtgctgttcaagtctgagaagtgctgttcaagacctttcagaagaggtcatatggccgttgtgctcatcagtgggtctccccaaccttggttgaaagtgttcctctttgaagtggctagagtacttggtggggggattcttgtggtccagaggaaacctagtctgtggccggctcttagcagtgtccctgcttcaggaggtggatccccagcctgatcctgccctttccacgtcacttgtctcactgccagcaccatcctgcatgcttccccccatgcttcctgcattccacgcattagatatttgtcacccttagatgtgtgaggctctgcaagatcatcttcctggcttcaggaacatttctgttcaagttctgcaccatgtttaaattaatagaagttcaatggcatgcacatttgatttcattcttttatccatggttatgacttacattttaagtagaatcccttttcctacttttaacaagcccactttaaaatcaggcaaagtcttatgttacatacagtactcttaggtgtttttctgaaataagcatactactgaaatttgaaagcttacaccattttg

SEQ ID NO: 15344 - DNA, 1099 bp, Homo sapiens
cagtcaccagctacaggcagaacacctgtgtttgtgagccccactcccccacctcctccaccacctcttccatctgccttgtcaacttcctcattaagagcttcaatgacttcaactcctccccctccagtacctcccccacctccacctccagccactgctttgcaagctccagcagtaccaccacctccagctcctcttcagattgcccctggagttcttcacccagctcctcctccaattgcacctcctctagtacagccctctccaccagtagctagagctgccccagtatgtgagactgtaccagttcatccactcccacaaggtgaagttcaggggctgcctccacccccaccaccgcctcctctgcctccacctggcattcgaccatcatcacctgtcacagttacagctcttgctcatcctccctctgggctacatccaactccatctactgccccaggtccccatgttccattaatgcctccatctcctccatcacaagttatacctgcttctgagccaaagcgccatccatcaaccctacctgtaatcagtgatgccaggagtgtgctactggaagcaatacgaaaaggtaattttctcagctccatgaaaagcattgctatagtagcattggaaactttctaaatatttaagacaaaaatgtgttccttatctataaaattttaggtgatcatgtttgtgtacaaatggcctttagaaagtaaagctatatccaacttatatttaaaattattttccagaaaatatatcacatttgaccattttattttcatgctttgtaggtatccttaaaatgtttattgagtgaatgagaaatttaatatatcagacttaaatgttatagaacatttaattaaaaccctttatattatgcttaatgtgtatattaactcctttaaaaatggtattttcttcaatgttaaggctgttcattttgggtatccatgacacttgctctaccagatgcctttagaggagtgagtttcctcccttagtaacaaaggaaagacttctcatattcattcatttattgtcattatttcctaagcaatgactataggccaggcac

SEQ ID NO: 15345 - DNA, 1239 bp, Homo sapiens
acttgatttacagataatgttgatgacattgaccctttgtttaaaaaaagaaactgtaaatttgacataatttcatttgcaacttcattttgttttttataaatgttatttatacagaaagtggctattgactttctatttgacaagtagttataattggcaagcagtttgagtttatactcatgacatactgaaagcatctctttggggtcaagaaagaatccctagtggatttgggattctagaggaggtgttataattaattattcagaaaaatgcatgtatttacctcttcaaccaaaagggcagtaaagaatagggataatatattttaatgtaaatttggaagaaggataaaatcacccacagttactctccctattattttcactgggtcaagttttaatcttttggcttcatgagttccactccctttgatgatatatgttgtatatttttagttgtaaagcagtaatctttaactgtagcattcctctaattataaacagtgaaaaatcaaaatcagtccagagttcttttgttgacttaattcctgatcagtatagacaggactatatatatttaatcagagaattacattatatctgaagatggagctcaggagaatgcaccaagactttgaattgtatttacattcactgtcagtaaagacctggctacgctttgagaaatcaggatctcctaggtcattgcttcgcagctgtgattactgaaatcctcctcataggagataaagtacgaggggtagagtccaagatgtcaacttgtaatttctttgaagtcatatgttttatctttaaaattattcttattttacctgtgaatatatacaacagaactttttaagattaaaaaatttttaaacctctatgtctgaaaaaaaaaatgacactcctggaagatggctagggttccccagtttgagaagcagtggccatggtgaaaaatagtttttgaaaacatcagattataaaatcaagatagtccggacgcggtggcacatgcctgtaatcccagcactttgggaggctgaggcaggtgaatcacctgaggtcaggagttcaagaccagcctggccaacatagtgaaaccccgtctctactaaaaacacaaaaattagccaggcttggtggctggcgcctgtaattccagctactcagaaggctgaggcagggagaattgcttgaacccaggagtggaggttgcagtgagctgaga

SEQ ID NO: 15346 - DNA, 1276 bp, Homo sapiens
tcctaaacaaagccactggactgatctcaaattttagatacagttgtgtcactattctgctccagaacttttccaggtagaccgagaaccatacagtaaaatttggggaggaagattggacagtccaccttggtgtccctaaggatgagcagggcagtgcggtcagtcatactcccttaccacattatgtacttgttttgttggtatttttttttttaaggtggagtttcgctcttgttgcttaggctgcagtgcaatggcgtgatctcagctcactgcatcctccgcctcccgggttcaagtgattctcctgcctcagccttcccaagtagctgggattacaggcatgcgccaccacgcctggctaatttttgtatttttagtagagacagggtttctctgtgttggtcaggctggtctcgaactcctgccctcaggtgatccacccgcctcggcctcccaaagtgctgggattacaggcatgggccactgtgcctggccctataatggctagtttttaaaattactttcttttaaactagttttttttttttttttaagaatgttggtatgttttccagtcttagcttgtgcagtaaatgattactatcaattgtagaccacatataaaagatatattcagtattattggattttgttaatcatttttttctagataacgggaagagaatattctacacttgatcttagccaaaaggccgagaagcgatgagaatattctaatactcagcaagggaagaaacatcacaatttgtattaacaatttagctagctagcatttaagcctgtgggcatggctttgttcatataatttctgtgagacttatttaagagctgaagtataaaaaggcctttaattgtcatttgtgaaaatcaggagtgattagtgtaagtttgttttatttagaacttttggtggtggacacaagagaaaatccgtatgtaattttattgcatttactttgttggtattttgtaggtcaggaacctagcattgtttagactaaaaaatatccaattttagagatggggttaactttttcccctaatatatttattattgttaatactgctgtttaacactcattccaaaacttagtggcatgaaacactttttattatgcacatcgattctgcaagttgtgccctctgaaagggcacagtggggatagatttttctcagccatgtggtgactgggatctcagttgggaagactggaaagttgagattgacacacttgactcctgggggcca

SEQ ID NO: 15347 - DNA, 1614 bp, Homo sapiens
ccaatttctacttcatactgatgtttttggaaacagcaattaaagtttttcttccatgagttgagtccttaagaaaatgattccagttactcattttgcatatttgctattttaacattattggaccctgcatttatagtcctttgatttcttccctctccctggtgtctcccccaagaccccaaataaagcaatacactgttaacactgtgggtttatatactaattctataccccagatggggaatgggggagatggtccctgggcttaatattctttaaagggcatgggaatttagcctctcttttattgtaatgtgctcttttggaaaatagttggttagcagggaagacccagagttgtagattgagattagggtgtactggctgaactgtggaaaacatacaattctgtgttcctcagtaaatgagattagcgtctaatgagtagcacccctttactaacttagtagtagtataaaatcatttttatttagttaattaccagagagatttagcataattttgttctggattcagtaaatcaagtcagcttggatcattcaccttaacttttcctttagcagccatttccactagtttccattaagtagtgttctataaactttgatccaaagcagaatcaatgtcttttccatctcgtgacttaaagttctgtgactgtgatgcatgtgagtgttccgacttcatctgttcctcttaactacggtgtttcccttaccatggcattcataggatgaaatgaatgactgcccagaatgagaatttgtccagattattcagataaacatcataaagcagaatacattataaataagtagaatatgaataaatagaataataaaattccaaaatactcaatgggaaatgactagtaatataggctttcaagagttggtaccttttagctatatttgcagattctctgggattttaaggaactgagaaaacagcaaagttgactaaattttatatttcttgtcctctaaatattttgataatttctggattgatgcagtgatgtttttgttccttccgtatttataaatgaaacacctttttttagtgtttctaaacctaaaatctacttggtttgaaatcaagtggttggaacactgtttgacttttatttgaagcatgttgttgattgaaaatttcattgaggaagttttcaatcagtgtgatcagtttgattctgtaatgagcacagcacctaatattttgaggagctctgttttgaggaccaatgcttaaggtggactttgttcgtaaacaatatcccaatagatttgttgacttgaggtctggtttggttttgtttttgttttgttttgttttgttttgtttccaatagaattaagaattctaatgttgaaaaactgcacaaatttttatgggacaaagcctagaaaagagaaatgtagtttgaatcataatctaaatcatcgtatgatagaagagggaaagttttggtgccataatttctcctttcactggtgttggacttaaatcagttgaaatgtatttctgtaccacaatttacgcttcaataaaagtttaattgtctagtgacattcagaaacttttctgttg

SEQ ID NO: 15348 - DNA, 1690 bp, Homo sapiens
tgtagattttaataggattccattgtaaatgaaagttaatcttaggaattaaatgaatccttagggaaatttgtactctatctttacaaaataatatcctttagaaatgtctcaacatagggtagtctaggcttccaagagattaaaattaatgaaagtttctgtaatgtatgtctgccagtaatctgtggtagtctagaaagtagggattataaaaatttgttgtttgcatacacgcataaaaactttcctattattttttgtatttctcttatgctttcagatatgcaagaactgtacaggttgctttgatcgacacatcccatgtgtttctctgaactgcccagtacttttcaaactctcccgagtaaatagagaattgtccaaggcaccatatctccggcagttattagaccagttttaaattgtcaatatcacagtattacaggtgctatttttttcagtgcttaccactaaactgttgtgcatggtgctttttaactttcatcgagtcaaggatgttcactgtctgttatctgaagactatgaagacttctatgctaaccgaattaaaatgtacttgttgatctctgaatagctcacttcttacaatgtacaaattcctcattctgtcaccttttaaacattgttttataatgcaggtgttggatttgctccagtatgtgtaccatcttgtaaattcatttgagtagatcatgtttacttcccagtggaaggagcactgaaaacctcttaaagaaaaagcatttgtgtgttttccttgaactgtctgtatcaagacgtgttacttcgagatatccattcactttataattttgactgcaaaatattttgtaaatacacttttttacttttcaaacgagcaaaataatgtgcaatgatttttatacaaatgattttcaagttgtttggtatatttcctctaggttttgcttgactcaaagtagatcgttattttgatcaaactgtgcaaacagtagtaccacgtgtagcattttgaaacattatttttttttaaaaaatgctgtcttgctttagctattaatggggcattgtgaggaactgtgcaaagacatttttgttacaaacctgtgggcctgttgcaatactttaaaaataaaaaattttattccatttgcttgttttgtatagacatttctattgcttctaaatatacttaaaatattttctttccttatgtactgtacagttaatcttatttgccatcatcttgaacacaaaatgtgtatttagaatatttgtataactgtgtaaaataaaaaaggaattatgtggtcagtgcattgttttttaaactggaaatcattttgttttaaaagttaataatggaaaccatattaaaattgaataaaatataaaataatatagcagtgtgacttcatcttttttataagcctgtattggttacatctttcttaccctacccttttctgagttttaatgaagtaaattatttaacatatttttatatcctgtttgatattgcaatttccttaccaaaacttcttcagggttaaaacaaaaaaaaaaataaaaaaagggcagcaaaaatgggaaaatttaatttagcactcatccttttagagagttttaagagtgtacttgtttgttagtagatcttcagtgttcattttcattttgatataat

SEQ ID NO: 15349 - DNA, 1190 bp, Homo sapiens
gttctcattcttaggggataaaatacatctttttcctgcccctggaggcagggtctcactctgtcgcccagactggaaagcagtggtgcaatcacagctcactgcagccttgacctcccaggctcaagcgaacctcccacatcagcctcccaagtagctgggataacaggtgtgcaccattatggtggctaatttttttgtggagatgggggtctcgctatgttgcccaagctggtctcaaactcctgggctcaggtgatccttggcctcccaaagtgctggaattacaggcatgagccaccactcccacctaaaatacatcttaagctagttgatatctgccaactcattattttccaggtaacagtgatttacagagtaatttttaaactcttgtaggatatctacacttggtgtcaactaagcaaaatgtatatatattattctcaaagaaatagtaattctgttttgaaattgtcttttgtagttttttcattgttttattattgtttaattctgacttaatttgtgagaaagatggcttccataacagtatttgggtgtggtttttttctttgaattcgaataggaaaatgctgacttatgaccggcgctctgagcctcaggttggggagcgagtgccatacgtcatcatttatgggacccccggagtaccacttatccagcttgtaaggcgcccagtggaagtcctgcaggacccaactctgagactgaatgctacttactatattaccaagcaaatccttccacccttggcaagaatcttctcacttattggtattgatgtcttcagctggtatcatgaattaccaagggtaagcttaccaaatagtacatgtgctctaactatggagagatttcactccaaattttcagtagaactaaaggttttatgtgctattgatatgggagtgctgggaagggaagagtgtggtcccgtaaaatgatacggaaagcgggaggggaagtgctgggtagagaaaggtgggtccctggctagggctccacccccacagatctaggtgaggataggcactcctgctttcatgcccaaatgttaccattttccaagaccaccttggcctgccatgccccaatcctgggcctataaaaacccgagaccctagtgggcagacacacgagcggctggacattgtgaggaacacttc

SEQ ID NO: 15350 - DNA, 1340 bp, Homo sapiens
ctggctttgttaaactacagatactggagaatataggaagaagctatgaataatatccagggacatagtatttgaatgataaattcattgtttttattcatatgtggtaataatggaaaatttattttaagattaggagaggaaaggaatctgaaaagtttgtgtcatctccttgaaggacagaaggcttcatggggcattaaaataaaacaaaaaataccttctctccctaagattaatggtaccttccaaaggaaattaagtagtagtcatatacctgtgaggaaaagcatattgagactaaagatagaatgtacctgcacaatatagagggggcagggaagatagacatggacatttttgagactccaaaagggactttatctaggatatggagttaaatattttggtaattgctctttgaaacaaaacagttgttctaaaatatgttattatagggagattggtggacggctcctcatggtagaaactcgacttgcaaatgatctggctgagtttgagggagacttttccttggaaggacttcgtctttggaaaacagcattctcagcaatgactcagaatccaaggccagggtcaccccttcgcagtggccaaggagttgtcaataaagggtcaagtaatagccctaagatggttgaagataaaaaaattgtgattatgccttgcaaatgtgccccaagtcgacaactggttcaagtgtggcttcaagccaaagaagaatacgaacgttccaagaaactgcctaaaaccaagccaactggagttgtaaaatctgctgagaactttagctcttcagttaacccagatgacaaacctgtagtgcctccaaaaatggatgtaagtccatgtatactccccactacagcacataccaaggaggatgttgataattctcagattgctttacaagcaccaaccacgggatgtagtcaaactgcaagtgaaagtcagatgctgccaccagttgcctctgcaagtgatcccgaaaaagatgaagatgatgatgataactattacattagttatagctcccctgattctccagtaattcccccttggcaacaaccaatatccccagattccaaagcattaaatggagatgatagaccctcatcaccagtagaggagctgccttcattggcttttgagaacttcttaaagccaataaaagatggtatacaaaaaagcccctgcagtgagcctcaagagcctctagtgatatctccaattaatactagggcaagaactgggaaatgtgaatcactttgctttcatagtacaccaatcatacagagaaaacttctggaaaggcttcc

SEQ ID NO: 15351 - DNA, 1122 bp, Homo sapiens
agcaagctttcagttaaaccctccatctttcacaaagatgctgctacattagaaccctcatcttctgctaagattacctttcagtgtaaacacacaagtgccctttcttcccatgttttgaacaaggaagatttaattgaagacctttcacagacaaacaaaaatacagaaaaaggtctagataactcagtcacttcttttacaaacgaaagcacttattctatgaaataccctggatctttaagcagtactgttcattcagaaaattctcataaagagaatagtaagaaagagatcctcccagtatcttcctgtgaaagtagtatttttgattatgaagaagatattccatctgttacaagacaagtaccaagtagaaaatatacaaacattagaaaaatcgaaaaggattccccttttatacatatgcaccgtcaccctaacgagaatacattgggcaaaaattctttcaacttttctgacttaaatcattcaaaaaataaagtatcctctgaaggaaatgaaaaaggaaacagcacagctctgagtagtttattcccttcatcatttactgaaaattgtgaattactgtcatgctcaggggagaatagaactatggtgcattctcttaatagcactgctgatgaaagtggactaaataaacttaaaattaggtatgaagaatttcaagaacataaaacagaaaagccaagcctcagccagcaagcagcacactatatgttttttcccagtgttgttctttctaactgtcttactagaccacagaaactatctcctgtcacatataaattacaacctggcaataaaccatcccggttaaaattgaataaaaggaaacttgcaggtcatcaggagacttctaccaaaagtagtgagactggatccacaaaagataattttatacaaaataatccttgtaatagtaatcctgagaaggataatgcattggctagtgatttaactaaaaccactcgtggagcttttgaaaataaaacacccacagatggttttatagactgtcactttggagatggaacgttagaaactgagcagtcctttggactatatggaaataaatacacacttagagccaaacgcaag

SEQ ID NO: 15352 - DNA, 2076 bp, Homo sapiens
aattttaaagtattccctatctcagcagtagttgagggcaggaagaatggtgaatatcgtttgcccatttctcagtgtgctcaccttcccttttattgcatgttctcccttgttttttgaatactgaaaaagatgtctctaggcaactgatttcatatgtgtatggttttttatgcattcctctgaggtttttatattatcctatcccattctgccccgggtataaccatatgctaaaacgttttatattccttttatataaaatataatgaaccaaaatacgtagaatttacttcaaaaggatctagggtagtcagtataatatgttttgtatttttctcatcctatttttcattatatatacatataaagtatcaattttgtcagaataattgtgaattaatatatcaggttttctgggtacaagctaaatgtaagataattgtataagtaagaaaaatgttagaaagtttgctctcacataattattatgttttttatatcctttaattgcagctctttaatattggaaggtgttgaaccacagagtacatgtgaattagaagtggatgctgtagctgctgatatcttaaatcgtctggacattgaaggttcatacacaattattcttaatatatgtttttattttttaaaattaatgaccggcgggtgtggtggctcacgcctgtaatcccagcactttgggaggccaaggtgggtggatcatgaggtcagatcgagaccatcctggccaacatggtgaaaccccgtctctactaaaatacaaaataaattagctgagtgtggtggcacacgtctgtagtcccagctacttgggaggctgaggcaggggaatcacttgagcctgggtggcggaggttgcagtgggccaagatcgcaccactgcactccagcctggtgatagagcaagactctatctcaaaaaaaaaaaaaaaaaaaaaaaaaaaattaatgaccaaaatggaatagaaaaagtaggaaagaaaactttacgaggaaactaagatattatagaaggaggatacaaaatgttatgaagattgcttctatacttctgatgaggtattaattttttgtttatatttttgtccaaatgactatatttgaatagatgatactaaaataagtgtgacactaaataaaattagctaatataaagcaatttaatgtactgtgccttttaatttcttaattttcatattatatatcagcaaagggactcttaggtctattgactatcatcagatgtttgaattgtattcacttgctggattttggggaaccactaggaagaaaactaaaaaaggagtaacatagtaagtgtaggttgggataatttgtccactttattacacaaaatatgtgattggtttttttaaaggcagtatttgttaaagaaaagtttagattttttaggcatttcttactttgaccctgtagtattgaagtattattgtgattacagctcaaattggtggaaaccctggtctacaggccatatgggaagatgaaaagcaacggcgaagaaacagaaatgaaacttctcaaatgagccaacctgagtcacaaggtataaacctaatagtgctctgattattcttttaaatcaagtattttaatggaaaagtttgtcattgagttgttcctttgacattagattttacttttcaaatgacctttatattttgtatgtatttttcttgttgtcattgctgtacagccactatttatctttacagctgtctccaattgtcgcttattatctctttgtaagaagttgacgtttttactgttctttgtttttaatgtaccttgtcctcttgcctcacttttttgttttcattctctagtatgttctagccctctgtatttccaaatgagctatagaaaactcacagaagatcatgaatctcaacttagaaacactgtttaatacattaagctttgaaaatgtagccattgaaatgctgcccacagtttattttctgagtatgtcatataagctctcactttgttcaatatgtacagctctaaagaaacatttattgctaaatg

SEQ ID NO: 15353 - DNA, 1822 bp, Homo sapiens
ggccgaggaggccggggccagcgccgccgcctgcgaggccccctccgccgccgggcccggcgcgcccccggagcaggaggcagcccccgcggaggagcccgcggccgccgcagcctcgtcagcctgcgcagccccctcacaggaggcccagcccgagtgcagtccagaagcccccccagcggaggcggcagagtaaaagagcaagcttttgtgagataatcgaagaacttttctcccccgtttgtttgttggagtggtgccaggtactggttttggagaacttgtctacaaccagggattgattttaaagatgtctttttttattttacttttttttaagcaccaaattttgttgttttttttttttctcccctccccacagatcccatctcaaatcattctgttaaccaccattccaacaggtcgaggagagcttaaacaccttcttcctctgccttgtttctcttttattttttattttttcgcatcagtattaatgtttttgcatactttgcatctttattcaaaagtgtaaactttctttgtcaatctatggacatgcccatatatgaaggagatgggtgggtcaaaaagggatatcaaatgaagtgataggggtcacaatggggaaattgaagtggtgcataacattgccaaaatagtgtgccactagaaatggtgtaaaggctgtcttttttttttttttttaaagaaaagttattaccatgtattttgtgaggcaggtttacaacactacaagtcttgagttaagaaggaaagaggaaaaaagaaaaaacaccaatacccagatttaaaaaaaaaaaaacgatcatagtcttaggagttcatttaaaccataggaacttttcacttatctcatgttagctgtaccagtcagtgattaagtagaactacaagttgtataggctttattgtttattgctggtttatgaccttaataaagtgtaattatgtattaccagcagggtgtttttaactgtgactattgtataaaaacaaatcttgatatccagaagcacatgaagtttgcaactttccaccctgcccatttttgtaaaactgcagtcatcttggaccttttaaaacacaaattttaaactcaaccaagctgtgataagtggaatggttactgtttatactgtggtatgtttttgattacagcagataatgctttcttttccagtcgtctttgagaataaaggaaaaaaaaatcttcagatgcaatggttttgtgtagcatcttgtctatcatgttttgtaaatactggagaagctttgaccaatttgacttagagatggaatgtaactttgcttacaaaaattgctattaaactcctgcttaaggtgttctaattttctgtgagcacactaaaagcgaaaaataaatgtgaataaaatgtacaaatttgttgtgtttttttatgttctaataatactgagacttctaggtcttaggttaatttttaggaagatcttgcatgccatcaggagtaaattttattgtggttcttaatctgaagttttcaagctctgaaattcataatccgcagtgtcagattacgtagaggaagatcttacaacattccatgtcaaatctgttaccatttattggcatttagttttcatttaagaattgaacataattatttttattgtagctatatagcatgtcagattaaatcatttacaacaaaaggggtgtgaacctaagactatttaaatgtcttatgagaaaatttcataaagccattctcttgtcattcaggtccagaaacaaattttaaactgagtgagagtctat

SEQ ID NO: 15354 - DNA, 1173 bp, Homo sapiens
aaagtgtgttagcatcttgttactcaaaggataagacagacaataatacttcactgaatattaataatctttactagtttacctcctctgctctttgccacccgataactggatatcttttccttcaaaggaccctaaactgattgaaatttaagatatgtatcaaaaacattatttcatttaatgcacatctgttttgctgtttttgagcagtgtgcagtttagggttcatgataaatcattgaaccacatgtgtaacaactgaatgccaaatcttaaactcattagaaaaataacaaattaggttttgacacgcattcttaattggaataatggatcaaaaatagtggttcatgaccttaccaaacacccttgctactaataaaatcaaataacacttagaagggtatgtatttttagttagggtttcttgatcttggaggatgtttgaaagttaaaaattgaatttggtaaccaaaggactgatttatgggtctttcctatcttaaccaacgttttcttagttacctagatggccaagtacagtgcctggtatgtagtaagactcagtaaaaaagtggatttttaaaaataactcccaaagtgaatagtcaaaaatcctgttagcaaactgttatatattgctaagtttgttcttttaacagctggaatttattaagatgcattattttgattttattcactgcctaaaacactttgggtggtattgatggagttggtggattttcctccaagtgattaaatgaaatttgacgtatcttttcatccaaagttttgtacatcatgttttctaacggaaaaaaatgttaatatggcttttttgtattactaaaaatagctttgagattaaggaaaaataaataactcttgtacagttcagtattgtctattaaatctgtattggcagtatgtataatggcatttgctgtggttacaaaatacttcctctgggttataataatcatttgatccaattcctattgcttgtaaaataaagttttaccagttgatataatcaagcctgctaaaataggatttttttttacaaattttattttaaaatgcaaatatttttagagaaaatttttaaatcttaagtgttaaaggtaagcattcagtttaagagatttaaatgatatgcttggcattata

SEQ ID NO: 15355 - DNA, 1187 bp, Homo sapiens
atagatattttaaaaattactttccttttatttttcctttaaattacaagtaagtttgctcttcctgtctgtgccagggtggcgcatggtctacgtcgagcaacagagacactcaggctgtgttctcacgatgactgagtgggagacagcagcaccagcagtggcagagaccccagacatcaagctctttgggaagtggagcactgatgatgtgcacatcagtgacatttccctgcaggattacattgcagtgaaggagaaatatgccaagtacctacctcacagtgcagggtggtatgccgccaaatgcttccacaaagctcagtgtcccattgtggagcgccttactaactccatgatgatgcacggctgcaacaacggcaagaagctcatgactgtgtgcatcgtcaagcatgccttcgaggtcatacacctgctcacaggcgagaaccctctgcaggtcctggtgaacgccatcatcaacagtggtccccgggaggactccacacgcattgggtgcgccgggactgtgagacgacaggctgtggacgtgtccccacttcgccgtgtgaatcaggccatctggctgctgtgcacaggtgctcgtgaggctgccttccggaacattaagaccattgctgagtgcctggcagaggagctcatcaatgctgccaagggctcctccaactcctatgccattaagaagaaggacgtgtggccttcttggagcatgtggccaagtccaaccgctgattttcccagctgttgcccaataaacctgtctgcccttcagggcagccctaccaaaaaaagcaaaaaaattacaactaagttattataatgactttaaaaaatgtgcatgttgatatacaatatgaatttcaagaaaggaaaagggagttataaagcacgttataaaaagaaatatctggccaggtccggtggctcacacctgtaatcccagctctttgagaggccaaggcgggcagatcacctgaggttgggagtttgaggccagcctggccaatatggtgaaaccctgtatctactaaaaaaaaaaaaattagccgggcatggtggcaggtgcctgtaatcccagctacttgggagactgaggtagaactgcttgaacccaggaggtggaggttgcagtgagccaagatcttgccactgcactccagcctggc

SEQ ID NO: 15356 - DNA, 1960 bp, Homo sapiens
agaatatcccgggcttctggatgactgcttttcgaaaccacccccagttgtccgccatgattaggggccaagatgcagagatgttaaggtacataaccaatttagaggtgaaggaactcagacaccctagaaccggttgcaagttcaagttcttctttagaagaaacccctacttcagaaacaagctgattgtcaaggaatatgaggtaagatcctccggccgagtggtgtctctttctactccaattatatggcgcagggggcatgaaccccagtccttcattcgcagaaaccaagacctcatctgcagcttcttcacttggttttcagaccacagccttccagagtccgacaaaattgctgagattattaaagaggatctgtggccaaatccactgcaatactacctgttgcgtgaaggagtccgtagagcccgacgtcgcccgctaagggagcctgtagagatccccaggccctttgggttccagtctggttaacatttgcccttgggaatactcctgcacaaggtctcctaccaccttctgctggacctgtgcttgggcatcagcaatgagtatgccttctattgtgctttgtttttgctgacttttctgcaccctgtttcctttggatattcagttctctcaacctcaagattgagacggtggtgggtatgcttctccacttccatatgaccttcatgctgttctggaatatcacatgctacgaggtcatccttcacactacttgtaagccaagcaaatgatactgtagattgtactgcctttatctgcactgcttggaccctgtttattcccagggcctctgaactggttgctgtcacttggatttctagctttgggagcctgttccacctactcagctctgcattgagcagtatgggcacatgccctgtggacagttactggacgttaatgaactcagaggagaaaagcagtgagccacttgttctgtgtgatttatggtacttcattgctcttccttcacctctagtcactttctattgctacctgccctacattggctcctgccaaggtccctctctctccctgttttccttttttttttttttttttttttttttgagacggaggacggagtcttgctctgtcgcccaggttggagtgcagtggcgcgatctcggctcactgcaacctccacctcccgggttcaagcgattctcctgcctcagcctcccgagtagctgggactacaggcgcgcgccgccacgcccggctaatttttatatttttagtagagacggggtttcaccatgctggccaggctggtctcgaaccccgatctcgtgatccgccctccttagcctcccaatcctctcttaaaaaagtgatagctcagaaacatttgtaaaagcaaggtttttatttcattttggctctgtcattttcagaggcaaagaagttggcctgtaaaatagagtgctagagctcttacgcccctccccttcttcccaacttcctacttcctagcccttttatcaactcctagaatagttaaagagagacacatctagatgggatgaaaggtgccctaagcaggagaaactgaacaaaaggctagaggcatgggccaggtaaaaattgggcctagagtgaagactgtgctgtcgttaagagctttcgaggaaggagtacttactccccaatgatgatgaatggaaaaatacttttcagggagaattgaaggggttaaagtgttaaatatgttgcctagacaagggttctttaaagaaagacagcgcaactttgaatgctttcttacttgttttgtgacctaatttatgtggaagattgttatttcattaggatttagtaaaatttttttttctgattctaaacttattgtgaaaattgagctgtacagatattcttttgatttcaattgggaacatttggaagaacaacagtcttacttgcct

SEQ ID NO: 15357 - DNA, 1187 bp, Homo sapiens
actttattacaactcaaggcttgttagagtccagattctaacatggcatttctagaagaggagcccctcaaccagaaatttggatgaagtgcttaaatccatgaggcccagtagtttgaatggtcactctgacatcatcaagtgaagatagtccatgtagagattagagcagaaatcatttcgggcccaaacccaaggatcacaaatgataaagaaatattcctcttccagtcaccaagggtttccctttgtgcatactggttgtccttggatatttttagaattgtccctaatatactctgcactgccagtgctctgggtagcatttgtgtgtcgcatcttccacattaccatgttatgtgttattttcactgccatcagaaaaccatttaatttttcaaaattaatttcaggtatgatggcagcttgaaatcggttcctcctccagactttggcacccctacactgcattattttgaagactggggtgtcgtgacttatggaagtgcactacctgcagaaatcaatagatctttcctttccttcaagtctggaaaactggggggacgtgcaatatatgacattgtccacagaaacaaatacaaagattggatcaaaggatggagaaattttaatgcagggcatgaacatcctgatcaaaactcatttacttttgctcccaatggtgtgcctttcattactgaggctctgtacgggccaaagtacaccttcttcaacaatgttttgatgttttccccagctgtgtcaaagagctgcttttctccctgggtgggtcaggtcacagaagactgctcatcaaaatggtctaaatacaagcatgacctggcagctagttgtcaggggagggtggttgcagcagaggagaaaaatggggtggttttcatccgaggagaaggtgtgggagcttataacccccagctcaacctgaagaatgttcagaggaatctcatcctcctacatccacagctgcttctccttgtagaccaaatacacctgggagaggagagtcccttggagacagcagcgagcttcttccataatgtggatgttccttttgaggagactgtggtagatggtgtccatggggctttcatcaggcagagagatggtctctataaaatgtactggatggacgatactggctacagcgagaaagcaacctttgc

SEQ ID NO: 15358 - DNA, 1230 bp, Homo sapiens
atttataaatttaatgttttaactgttgctcatttatggtttgttttgggtggtggtgttcatctgtatatcaccatgttaatttgtaatggaagtgcacttcgtagtgtatattgttactgacattaaaatactttatagcattgtctctgagcaaaagctagtatttaattgtacaaatgaataagcaagttacatgttattgtttgctcttgacagggtaggcctcttaaaagaaaaaaaacaacttgttttttctttatgaatcccctatgccaaacacataccttccatgcatgacatgagatctgcaaactggattttagccaccgtatttatttagtcaaaaaaattgtccattgtagcagacccgaaaacctttttgctgtgacatgaaaccatgttattcttatcttcttaaaacacagcctgggatggaatggccatggcatttttttcagagaacatcctttatctgctatgactgaatccttaggaaatgtaagctataaccctttgattttcaagaactaccgaataagtgtatgaagaggtggttttttaaaacttcaagttggaatttttatgaggtcactgtgtaatttgaagaattgtgtgagattgtcatgatataaattccttttaaggactgataaatagaatgaaaagtttccaggtagtttaaaactccacaggtcagtttccttttcattcctgcttcactgtggtttataagcctacgggagagcaccgttgctcagatgctactgtgagcttcctgtccggtgttagaaagtaactagttaaaagttcattttagaatgtatggtttttggggatgaactaagaattagttattagttccaaaggactgagaaccaattttaatattttcacatttataggaaagaaattcatatgtccctgaaacttctaggacaaaaccaaacaagtaaggagggaactgttgcaaagccatttcatcgagaaggggacagaaggagaaatacacacatgtatacacaaacagaatggttgagaaaacgttttaataaaatgtgagggttgtatgtgtgcgtgtatatatttacacttaacctctaaaattctcttctacagtatctctgttatgaatatgatggaaaagcaacattttggtggtgagactattgttaaaataaatttgagaaagacgaaaattttgtgagtcttgataattacaagtcaaca

SEQ ID NO: 15359 - DNA, 1133 bp, Homo sapiens
ttgcctaaatgaaaggcgggtacctcagggcttcatgtgaacaattctcaatgcataaaacaccctgttttctgtggtagaccataattagctattgcatgtaaagcaattttgattttcttgaacttgtaagcaccaaagcatgtgtttcccaaaggggtattactgggctcttaagtaccaaatgaaaccctactgttttacttggttccttttccctttagtaggaggacagtgctaactggaattttataaggagtaccctttaaaatacagagagtaagtgaattcatattttatattctagaatgttaactgtggtatttcagaagacagagcttgactcaatgaattgtagaaatataggcttgacttaatttttgtaactgaaaggctttagacttaaaaaaatttattgtgcatcctaaaatctaaaccaattattaatgatcatttattgtaatgagtttgcatttcagctttattcaatgcagtacaaaatagttttctttaagcagtcttttatcaatcaatgctgcactagaaatagattctcaaaagttactaaacattttactttttttgttttttaaaagaaatgcagatgagtgtaaaacatctgttctcaattatgttgatctgtgtgcgcagtactggagcatttacccattcatgttgagcctcaaatgcttgttttctggggtccacaaaagacagttttatacattttgagttgttcataaagtttgtcttgtgatagtcctggcacttaaagacaaatttttctggtagtaaaagttcagatttattactatgtcatgaaacacagtacattcaaatcaaacggcagttttctttctaagtaaatgatttccagtcatctaaaaggtgggcaagatgagataaagacattttgatacagtaattgttttggttgggttttcatgtcagtttatgtttgactaaagctctcttcatatgcaggtttataaatttgttaggtctgttgtcccatgattaaacatggagtgcctcctctctgatttaatattctgcaggtcattgtaacctgctaggcaaagtcacaacattgcattaaagaggtgatagctttgctaatatcactgttttaa

SEQ ID NO: 15360 - DNA, 1111 bp, Homo sapiens
tgctttccatccctaggttctttccggcatttgtaatttccaatccacttaggacacttctactcctcagaaaccgtttctgtcggggccgtgagaggagacagtataagacttcctggacccaagggacgccgggtcccctggaagcgcccatcgcattgaagaccacgtgtgccttgctggggtcccattcagacaagtcccgggtcgttcgctcatcgccctccacgcgaccagggggcgcccgcggtatcggcccggctagttcgcaggcgtgcgccttccctcactgcgccggaacgggccacgttctcggacccagaagccgcgtcagaattccacgctggccaatcggaactgtccatgtactactgggggcggggctgccaagggaggaggaagatggcggcgggggcgaggtgaggtgttggcagtggaaaggggttcgggctcggggggcggggggacgcggagcgatggcccgcgccggccgcaggggcggataaaaagccgtcgcgctgcgggagtgggcgggagggagagggggtgtctgagggccacaagagtatgacggggctgtacgagctggtgtggcgggtgctgcacgcgctgctctgtctgcaccgcacgctcacctcctggctccgcgttcggttcggcacctggaactggatctggcggcgctgctgccgcgccgcctctgccgcggtcctagcgccgctcggcttcacgctccgcaagcccccggcagtcggcaggaaccgccgtcaccaccggcacccgcgcggggggtcgtgcctggcagccgcacaccaccggatgcgctggcgcgcggacggtcgttccttggagaagctgcctgtgcatatgggcctggtgatcaccgaggtggagcaggaacccagcttctcggacatcgcgagcctcgtggtgtggtgtatggccgtgggcatctcctacattagcgtctacgaccaccaaggtgaggcccggtgcggtggtggggggtggccgaggcgtcttggaccgctagaccgctggtctggcgggtggtgcccatggcacgagttgccgcggcctctctgcaaatcacagcgctagcgctttcgag

SEQ ID NO: 15361 - DNA, 2857 bp, Homo sapiens
atggggacgtattggagaaggaaatacatagacctacaactttgagcaaatagcagtgatgttttaggaactgaaatgtcacacttaaagtcttcagcccagctacttccctatttttgtggggagaagagggcctgattagaactgttctggttgtgtttggcgggaggggaataatttttgttcagtccttcttagtgaccaaactttaatttttaagaataatatattgacttactgaactgaagcattctgagttgaaaggagctccagaggagtggagttctgtgttgctcacatgttaaaatcttgctcaccttcagagcagagggaatacctatcttcagatatccgtccattttcatctcttaattgtagtcaaaagtatgacttgagagtgttgctctggtattctgggttctgaagtctggtattctggtattctgggttcaaaagtatgacttgagagtgttgctctggtattctgagagttgctctgtattctgggttctgaagattatttgaaaaataactcctactacattgaaatgcagacttaaaaatttaaacattggattaggcagtcaaaaaaaccaagcaagcataaaaggtcaataagttgtaatcttgatagtaaaggtggaaaacttattataaatggaaagaaagttttatttccttttttgtttgatgggcagtatgccatattatacccaaagttcttttaaaaaatatttccatcaaccatttttatttaaaataaacatttgagggaagttaccaaggcagcttttttcctcaaaagtaacctgttcctctttggaatagcacattttaggggcatggttaatacctgagatttttactcagtaaatcctgatggttactgtgtgtaaaatatctttaagtaggattgaaggcctctgtgggggaataaaatattaccaaagtctataaaaataaattttacatgttctcttttatgacagagagcagcactggttctgttatttttaaaatgaataattgatttcttgataggtgtttaatatttcttccctcactgctgattcttagatagaaaccattctttatatttgatagactgctttcagaaaacccttatcaacaagtgtacaatacttatctaaaactatacatttagaatggagcagtttaatactagatctcagaagttttgaaaaatagcaaagaagactggatttggaaagcatggtctacaattggttgttaaattctgaagctatgaagaataaatgtttcaactttggattatgaaaccccatttatgattttttaaatacacttgaaataaaaatgattaaactaaattttggtccagtgacattactttgcactgcataatccattatacgttgtacgactttttttttttgttttaatttattactgagagttttgtgtgaagctacagcatatctaaccagagaatttctgattccttatactgtgattatattatattgaggcatttgtagtgcagctgaagactgaatttatgccttttgtaaacatgataggtataaatgtcttataaacattctggagtatgtatagctttaatgaatgaaatttaatggacctgattaaaatgaagggatttaatcgttgttaaagttaagttagtcaaataaattacctactggaatatagcccaagccagtaaaggtttaatatttgcattttcgtgcttttattttctccttccattcataagtatatacttgaaagtacatctgtagcctatgatttgagtctcttgaagttctaggaagaggcaaactacaaactactaggattctgatttcagatgtagtcattccagaaccttctctttatgagttcacctgctagtacaatctccacaacttgaatggcattggttgttctgtaattcctgccaaaagcatcacaagttgtacatcatcaaggctccctttgcactcccaagaagaactggtaattttaaacaaaagtatgtgtctttatttgtattggaaaatactgtctttaaattgtttcttgttgacactccccacaatggaaaaattaccgaattaaacctgttttatggatggcagcttggagcatagcaagaagttggaggatttgaattccattcccagttctcattgtgttttgtttcttaaaactataataatcggttactgttataaagtttaaaaggtggttttaatgtgaatagcaaattctggtatatcgtgactaacgcttaagaatgcctgtctttgagaggaaggtgttataatattaatgaacagtgccaaatacactgtgcatatctgcaatttaatctttgaatgtatgttactggattagctccctcctcctgtgtgatggtaccatgcatagagtcaatcaaatccttgtgatgttttgtatggactttgacaatatgtaaataatgtgtaaagccagtttttatgattaaggaatcaaatttattgaattttattattgaaagttgaaacttaacatgtatgaacaaaaaccaataaaagaatatactcttttcattgactatagtattatgtgaatgctacatttgttctgaacacttaggggctgcaaaaatgtaataagaaatgcatatgactagatagcaatagtgttttttttagatggtatgctcttgattgaaatatattctcacttttaccaggttaaacatttggaatcttataatgttacttgctttttgatagataatagtgaaataaattcagctttgccattgctggagttgtcaaaattccacagtaattaaaatttgaatttttaccgaatatgaaat

SEQ ID NO: 15362 - DNA, 1199 bp, Homo sapiens
atcacattacagcaagcataaagtaacagttgactcaatgaaagacccaaattgcctgtacagataaaattcactgaatcaaaggcacaatagctatcttttcacttgagctcagaaaagtaaaatggcttaatttgaactattaattttcagtggcctctaattaaacaaaaacaaaaaaccacaaatactggctaggtaagatattcctgaggtcattttaaaagaagtgtggcacctaggattcaatatttaatgctaacagtattatattttagtgaaatttattttggtggtgacagtttattaaacctaattagacttctttcaatagcttgttgtagagacaatctcaagggctggaaagtgttgctaaaatgaatgtcatacatttctgatatactaaggagcttataaagtaattctttcatagtgcaagaattattaatttcttagaggatgtttttaaaggagctacttaattgggaaaatgttctttaaatatcagtaatagttcattaagtaacatagtagctaagaacatggactatattttcacagcatagttcagcttaggcacacctttagtttggattattggcattctcttacgtaggaattatatcattgtagatatgtaattatggtaataagcaattttcataaccatgctcactcagactatatcatttgaaactgccatgtttccatttttgacaattcatgttcacaaaacaacaggaacaatttcctatttggtataaagagcaaaatttccaactttgccccaaaatgccatgggtggcatattgccatatgattatatcatatatttaatcatgtatgggaaagattttggattttttttcttatttaaaaaagtgctaaatataagaatatagttttaaatcagcaagtctaataacactattgcagctgtacacagagagaaccttttgtgcctttttgcctgcagtaagcatttatttctattttacatgagttctaagaatgttgatgattattgcaccttgttcttctgtatataaacttgattaaggaatttttttttttaaagcaaggagccgttttttgttactaggtggataccttagtaaacatgaggggaattatcagatagatgtctttggagcccagccttccctgtgtagtgagctggaaactcctttagattgtat

SEQ ID NO: 15363 - DNA, 1201 bp, Homo sapiens
aaattgtcacatagaaagtacatacggtggctcataccactcatgagtgctgggtggtaatcccagcactttgggaggctgatatgaaaggattgcttgagcccaggagtgagaccagcctgggcaacatagtgagaccacgttgctccaaaaaagaaaaaaaacattagctgggcgtggtgctgcacacctgctgtcccaactactcaggaggctgaggcagaaggattgcttgagcccaggagtttgaggctgcaatgagctatgatcacgccactgcactccagcctaggtgacagagtgagaccctgtctcaaaaaaacaggacattttgaaccaaaacaaagttatttcctcctttaatcctgttggtcatttggaattggacctcctgatcacttcacatagtagagtatatttaaatgaggatggtcagataggaaaggaagggaaatttcagttggggtttcttgaaaattattgctgatttctgatctttctgcttttcctaggaaggaatgtaatattggctagcttgtgccctcaagtgtttggaatgtatctagtaaagcttgctgtggccatggtgctggctggtgggattcaaaggactgatgctacaggaacacgggtcagaggttagtacctatttagaaattttgagtaatattgacacatggatggaagctagaactttttctttcccaaataaaaactgctcgttgggttttattttccaattgtaatcttataaaactgacagttgtctgaatatcttatacttagtctagcatctgtatatcagaagctactttctagagttccagaaagactgaaagaagttacatttttctatggcatatacttttgctatagcctataaggatgccacaaaataaaatctttgtttctattactgtgttttttgttggatccccggtctgttttcaaaaggaaaaagattagaaatagtgtattttaatgtctccagtcagcgtctctccatctgtggctgtcactgtgtttctcttagactgctgctttcagtcatctgcctgctgattctccttctgctggtagatagcaaatgtgccatctgccatggggtgctgctgcaggtcacaccttcaagaaaagattactcttaagtgtataattatgtccagatggcagaaagctcttttgcagctaacacacttaa

SEQ ID NO: 15364 - DNA, 1180 bp, Homo sapiens
atcattccatgaatataaagtataccaccagaactatatgtgtaattgtatttcttttttcccaaactttaaggtatatggaagaaattgtggagagtactttgtccttgttaacagttaaacataatcaaagccatgttgtctcacaaaagattttggatccgatctacttttttgcattagttgataccaaggctgtgtggttcaaaaagtggatggtaaggaaaaatagaatatttttataccttttagtgcattgctatatcattttaataaatagttaatgtttgaatactgtgtgctaagagttctaatcacttttacatgtgttagctcatttatttcttataaaactttacgaggttggtggtattaatacccccatttttcagatgcagtaactgagatatggagaagttaacttgcccaagatttttcacctattaagtgtcagagccagaataggattttaagtgatatttcatttgaatctaagctgaatgacctattcaaaaatctattttttctttaatgtgaaagcttcaaaaattttaagcaaatgtggtagaacataaggattcaatatgtattttttttcaggcttaggagatatttctgaaagtattctttcatttgccttcctcctgaacctgaagtttggggaatgtgtttaatacctgaacctggcaatttcttatgaagctgaaactgaaactactagtaagagtagagagatctttatactgttacctccctcaacctctgttaactaagagaggtctgtgtttgtcaatagcagcaacaggactggcttttatgctcacattgtcttctttctcaatctgtactgggcacctaggtactatatttcttgcacttgagaagagaggggttggggcattcatttactcttcagcacagtttggatgttatctagcaatggtgctttgtgccttctgctaagttgtatcataaatgcccaattaaccagaacacaattctgtctctagtggttagcccttacctggcctgtctagtatgtgattcatgtttactcaattaaattaaattaatttaagatgaaccctttgttccttacatctaacagttaaatttttttcttgattatcaaattatatcattatttgagaaaatatgcaaaatatgtaaaagcttaaat

SEQ ID NO: 15365 - DNA, 1734 bp, Homo sapiens
agatgggtggagagggaggggataagagaggtgcatgttggtatttaaagtagtggattcaaagaacttagattataaataagagttccattaggtgatacatagataagggctttttctccccgcaaacacccctaagaatggttctgtgtatgtgaatgagcgggtggtaattgtggctaaatatttttgttttaccaagaaactgaaataattctggccaggaataaatacttcctgaacatcttaggtcttttcaacaagaaaaagacagaggattgtccttaagtccctgctaaaacattccattgttaaaatttgcactttgaaggtaagctttctaggcctgaccctccaggtgtcaatggacttgtgctactatatttttttattcttggtatcagtttaaaattcagacaaggcccacagaataagattttccatgcatttgcaaatacgtatattctttttccatccacttgcacaatatcattaccatcactttttcatcattcctcagctactactcacattcatttaatggtttctgtaaacatttttaagacagttgggatgtcacttaacattttttttttgagctaaagtcagggaatcaagccatgcttaatatttaacaatcacttatatgtgtgtcgaagagtttgttttgtttgtcatgtattggtacaagcagatacagtataaactcacaaacacagatttgaaaataatgcacatatggtgttcaaatttgaacctttctcatggatttttgtggtgtgggccaatatggtgtttacattatataattcctgctgtggcaagtaaagcacactttttttttctcctaaaatgtttttccctgtgtatcctattatggatactggttttgttaattatgattctttattttctctcctttttttaggatatagcagtaatgctattactgaaatgaatttcctttttctgaaatgtaatcattgatgcttgaatgatagaattttagtactgtaaacaggctttagtcattaatgtgagagacttagaaaaaatgcttagagtggactattaaatgtgcctaaatgaattttgcagtaactggtattcttgggttttcctacttaatacacagtaattcagaacttgtattctattatgagtttagcagtcttttggagtgaccagcaactttgatgtttgcactaagattttatttggaatgcaagagaggttgaaagaggattcagtagtacacatacaactaatttatttgaactatatgttgaagacatctaccagtttctccaaatgccttttttaaaactcatcacagaagattggtgaaaatgctgagtatgacacttttcttcttgcatgcatgtcagctacataaacagttttgtacaatgaaaattactaatttgtttgacattccatgttaaactacggtcatgttcagcttcattgcatgtaatgtagacctagtccatcagatcatgtgttctggagagtgttctttattcaataaagttttaatttagtataaacatagcttctatattccgtgtgatttgtttcccctgccgagatggagtcttgctctgtcacccaggctggagtgcagtggcgcgatctcgtctcactgcaacccttgcctcccgggttcaagcaattctcctgcctcaccctcccgaatagctgggattacaggcaccgccaccgcacctggct

SEQ ID NO: 15366 - DNA, 1214 bp, Homo sapiens
agccctcaggcagctctgtgtcagagaaattaaagaaactggactcctctagggagacatcccatggttctcccacagtgactaagctcagcaaggaaccttccgacacttcttctgcatttgaatctacagccaaagaaaactttctaggggaagatgatgattttgttgacttggaagaactttcttctcaaactggtggtggaatgcacaaaaaagacaccttgaaggagtgcctttctcttgacccagaggaacgaaagaaagctgagtcacaaataaacaattctgccgtggaaatgcaggtgcagtcagccctagcctttttgggaacagagaatgatgttgaactgaagggggcgctagatttagaaacctgtgagaagcaagatataatgccagaagtggacaagcagtctggttcgccagaaagccgagtagaaaacacactgaacatacatgaagatttagataaagttaaactcattgaatattacctgactaagaacaaagaagggccacaggtatctgaaaatttgcagaaaacagaattaagtgatggaaaaagtattgaaccagggggaatagacattacccttagtagttctctttcccaggcgggtgatcccataactgagggcaataaagagccagataagacctgggtgaaaaagggagagcccctcccggtaaaactgaactcttctacagaagcaaatgtgattaaagaggctctagactcctctttggaatctactctggacaacagctgtcaaggtgcacaaatggataataaatctgaagttcagttgtggctgttaaagagaattcaggtacccattgaaggtaagctgtttttctttaatgcctttatattctgttgcataattgcctttctacaatttgcacatgtaatacccacattagtacatttatttgaaaacagtattttctcaatagagtgtatctttgctgatagcattaacaattggggagaaaatttacaagatatggtatctattttggaacttggactgtgacatagatctctagatacctacttcaaaagtcgtttacttttaatctttcaagttactttccttttttacctttattttctaaatctagaggagtttaaactgtttttgaagaaatctcaattctaaactgaattgcattatgttatattgtgttctcagtagcattcattaata

SEQ ID NO: 15367 - DNA, 1212 bp, Homo sapiens
cacttcatggcctcctttggtaatattcttgaagagatatacattattggttatttatggccaagtttaaatattgatgcaggtaaaagatataggtgcaataagaacagatgacacctgacttctaacactaaacgtccctgtttttttgccctcacttctgtgcaaagctgcagctctcagtagcagttttgagcctctgagtgtttagaaagaaaaattgggaaaatatgaactgtttggtaaaagccaggttgaagtggaaaggaagggcatgtgtctagtttatgcctctttatccagcttgatctgtgtcttcaaatatatagcaggatagggactccatagtcatgtccctgaatgggaagacacctcctggccagtatccttgccaaggtaaacactgtcaaatgatcattttcttggtttagaatagcaaatatttgccagaataaggaggggcactatgtgagtgtatgatactgagtttgaataacaggcatttgttttgtgccacatgttcgtgagcaatttgtgggtgaaccttctgtttacatctcttcctttggctttgtagctggcccgacgccttcctgcaagggtgcaagggtatccatggagactggcctatagcacgttagagcacgggaccagcttaaagacgctctaccggaaatcggcatcactagacagtcctgtcctattggtcatcaaagatatggataatcaggtgaggcctgtccctctcataaagaatattttttaataatttttcaaaattcccaacagtagagagactagtaccatatacttccatcacccagattccacagttaacaggattttgccttctgtgtcttttatctttgttttttctctgctgaaatattttgaagtaaatcccaatcattatggcatttcacccctacatatttcaggatcatctccaaaatgcaaatggatcatacttccaaatacagtcacattctaaggagcttttttctatcaccatgaagtggaaaagtataatgatatcccacagcctaaaaactggaaagttggggtggagtgagatctggatttggaaacagttgcagaaataagttccagtgccataccagtgcctttcccaggtagccaaagtagtgcccacaaaccttgcctgcattttggatgtgatggagagtcagtcaaggccatagtgtgttgtgc

SEQ ID NO: 15368 - DNA, 1103 bp, Homo sapiens
gacaacacagctgaaaggagtcataggggagaaggagaagaagatcatgaatcaccatcttcaggcagggtaccagcaccagacacctccattgaagaaactgaatcagatgccagtagtgatagtgaggatgtatctgcagttgttgcacagcactccttgacccaacagagacttttggtttctaatgcaaaccagacagtacccgatcgatcagatcgatcgggaactgatcgatcagtagcagggggtggaacagtgagtgtcagtgtcagatctagaaggcctgatggacagtgcacagtaactgaagtttaaataaaaatgtcttcagctccatgctcaaggttgaaagggttacctgtaaatttctgcccacataacattatactcatccctagtagtgcattttgggagttggggtgggaaggggtatgggaaggatagactcataattaaaatgtctaacatgtctctgttgagaaatttatttaatgtaaggaacttgggtgttaatagttgagagctgtttagtaataacccagttttcttgaggtctgtttactttatactttttaaaaacttctgtagttcttttggccagtgtgtttgtattatctgtgcattaatggtcctcatctgactcctgcattgtgtcttatttttctgcatggattggcataagaccattactaaaatttggcacctgtgagatgtttgatattatgaacaggaaacataatttaatgtatgaatagatgtgaatttgggatttcaaaatagatgaataacaactattttatagtaaagttattgaaatggaaatgaaaacagccagtaacttatgtttcagaatgtttgtaacacacttcatggtgttcccataggctttgctgtctagtcttatagtttgaggtttttttggtctgcatttttctttttgattacaaaatttataatttaataaatactagagtttatcaaaaacagtttgtctcttgtttgagggtggaaagggtgtggaaacattttgacatttgtgaccaaaggtcacttaaaaagtggtggttttaattggttgttttcagcttaatcacctgctc

SEQ ID NO: 15369 - DNA, 1165 bp, Homo sapiens
aaattatttccaggtaaaacagaacaaaaattgtatgaaaagtaacgccaggaataggttttgtatagaagctctccttttaaacactgctctttggttataagctaagaattattattggaattgacagcaataatttttaagccaaaagtgtatattttagctaaatgttccagattacgcagtaaatacccaagtgagtaattggcaagaaatgaggtaaatgagttcagatattcaaatgattaaaagtaagtctgcatattaatagtagccttcaaagtaattctgatgttcatatttaatatcatttaacatttatacatattagtcactggagctttacttggagtacatccacacgaaaaaccaattatttattaaattttcctttcttagcaatagcctctaaatttgcaggcccaccccaaactgttcctaaaagatctctttcgttctgtaatgcttcctccaaatatagctctctgcctgaacaaacagattttttcaaagctctaattacttccggtggcccttggatgaattgctttagccattcttgtgcctcttctagagatttagtttcatctgaagactgcaagacctcttcaaccattcctatgtttagagcattttttgaatccagtttaagggccccactcaacactttgagagcttgtctacttccgattatttcaactagccgggtggtgccaccccagcttggtattatgcccatctctttgtggacgaatctgatcttactctctggagtcattaacctgtaaaagaaaaaagaaaagcttaattgtaactctctctgtatgctctaatcataaagtactatccattcatgatctgatgtgaattctccatagatctttataggtaggtatattaaaaacaatgtttgaaaaatatggctgtttcatctagaatttaatttactaatagtatttaaaacttccctttgaaaacagtatcattttttgttgtgcttgtttaccctttgcaaacaagaaccttctaaaagcccaaagttgatctttcttaagtgagtggtgacctaatgagaggatgtggatcaagtgaaagtatgggagtaggaaatgttaggtgcatactaagaaaaacaaaccgaaaagcatagtaagttaaggttctc

SEQ ID NO: 15370 - DNA, 1329 bp, Homo sapiens
tcttctgatgatagaattatagctctttttctcattctttatgtttgttcagaatgtgtatattctttatatttgtacagaattgttctgtaatgatcaaatattactattataaacagataaaaaattatagatatttaaaaaattgatagaaaatatgcggcaaagataaaatgtctttttaagataaatttcctttttcttaaatggatcattagactcaagtataaaatatgtatgcctagatattaatctcatatatagaaaaaataaattgtaatccttgagtaatctaaattggttgtcaagtttcatttggtaactgttattcaacattagtctctttcttaagttttctcactctttgtgttttgacatctttcaggagcaataccgtttctgctatgatgtagctttggagtacctggaatcatcttagttgggtgagactctttaaagtgcatccatgaagaaacctgtccatctattgagccagcagctgttgtacctgttacacttgtgcagaaagattttaatgtggggggtgggagacttttacatttgagaggtaaaagtattttttttatgaagttgtgtatcttaataaaaaggactgaattagtttttattactatattaaagcatcaacatttcatgccacataaattatatttaataagaaccagattgaaatgagaacgtattggtgtttgtacagtgaacatgccaccttttttctcatggtttcagtagagcagctaccacatgttgcatgagttcatactttctacgtggcatttttctccctttctaaaatgaaagctgatgaatcttaaaaggaagaagaaaagaaaagctgtgcaaattcatagtaaagttcgttttttatatgtttccagtgtagcagatctctatataaatatataaatatatataactggcttattttcttttaatgtgcaatgatggctggatcatttaaagttctttttagaaaataacataagccaaagactcaagtgtaaatatgtctatatggagaaagcacattatatttattggttacttacattccttttttgatggctaaaatactaccaccacacaatcatcttttttttcctgaagaaagctttttctttagctaaaatcaattgtaaacgatttttgtagattattttttgtatgttttagtgtaagtagaagataaactttttattcataaaccaggaagcaatgttctttatagtgattctcttgtgtacatgcttgtgaattaaatttgtgtaaaatcccttggcaattgggtcttttaatataggaccaaat

SEQ ID NO: 15371 - DNA, 1180 bp, Homo sapiens
gttttaaccctttgtggtgggggtgttttgttgcaatactgctgtgggaaggcaccaccctttcttgttttccacataggactcatatattcatattttttatacttattctgccctctaatctctttctgcagccatctcattcattttcatcccaactaccattccgttttgtacacttatagctatattattgcctctttatctcacaagttgtggtatgataaataagtgatgtttgtacactgtttttgcaaaaaagctcacagtgctttctgggggtatctactaattaatctttacagaatccctatgagatagatagggctggatagggtattcagcacacaattcactagaccatgctgtctctctattatgataaaggattattattatgttaaaatgtttatacactgaatacataaatttgtagagattgatgtaaaccgaatcccttggcaaaaatatgaacatgcctgtagcataaaattgcaattgtgaagcaggttttatcaacttctggtgtttaaagaattattccagatttgcacattaaacctctgttggatagcttgttttcgttatcttgcctcttggggaatgacagggagcagtgagctactgaacttctgggatttcagcaagtgacaaactcagattcttgatagcgttatttaaaaagtatagcaagctcctctggcttgtgtgtgactcatctacatgtatataatagcttgattgacttatataattagtacttttatgtttatatactgataatatttgtggaaatctagtcaggtattttatgcttttgcagagtttgatgtggattagctgcattgccttttctacaaaagcaaacaccctgaagagttgtctcctttagggagggagcttcactcttttcagtcaacagccatgtatagtcctaagatgctttagtagtgtttcccccaccgtagcatatggattcactggggaaaaacacaaataaaccaggcagcagaaaagaaaagctagagaatcagttctttgctaatcttatgctatcacttccttctttttttttctctcaatgagtccatgttgcttttctctctttaccttccctttaatttcttttagctgttgaacatgtcaaaaactgcagctgctcatgaactcctatttcagc

SEQ ID NO: 15372 - DNA, 1764 bp, Homo sapiens
gaaaacttgatgaatgttacttaacatttttttcaagcctgtgtttttggaatatttaagccttctgttttttttttttttttctcttctagaaagtcattttttaaacaacactcaactttgtgaacccctgaagattttttgaccgttccaagtcttaatgccacaccactattccagcgaatttatgctacaactggtaacaatgaccagaagcctgaagaattaaaatgccaacaccaaacctttccttaccagctctggtctatattgctcccatgcatttaatatattattttgttttataaccacttctaaatattctcagttctttctttttgttgttgttaattaaggggttttggttttgttttctgtttactttgtgtgcaactacctgcttttaatgactcactttgatcaaatgacagtgaacaaagccagcccaagctggtaaggtgctgttcacttgaacaggtgctgttgcgcagaaaggaaactctgtgactaatttagatagtggctttccttcttctggattcttttcattgaattctcacagtaaatatttacggagttttcaaattgcagcaaatatactgtatgagaaaatattaatacagattaaaagcctttcttacatcttgaaaattttctaatatttgagaatttcacagggatgttttttatattggacccttttgactttccagtcctgtgactttctacttttagtagagagtcagaatctctggactggagaataatgaagaagttcactgactgtgcactgtgcttagagaccctgccgcaccacagtgccaatgcttgtcagacacatgcccttcggcagcattccagaacaggagggaagagaaagagaaaactttcttcccttctactaaaagattcaggcagcttaaaaccttagtgctttctttcttaacatacccacatttcaattctttccattatttgaacacttgggtagaactcttgctttgtattaaacctctttgtctacacatgtaaaacttaccttttgttattgagcaggcctatctctttcagatagttttatgattcacacaggtttgaggatgctggggagagggggagggggctgtggtggtgttctgttggttacaagaaagttataccatttaaagctggcaccagagacccgatagggacttattaactatattgaacattttttcctttgcctttgaccctatgtatagttacgatgccagattagatttatagcagcctcaagttgtattaaatgatattttgcttcctgtaatactattataaaataaagtttgtttattctctaaacttgtcacttctctttttctaaagggttaaaaaaacaaacttgagtgatatttttcatcagaagtcttagtattttgtgaaaagtagcatttcaaaatctgttttcagctcttctgtaatttgatgatgctgccaacatcactatttgaaacggtgaaagcgacgttgaaagtttgtaaatctaatgttgagagtgccagattccttctgcctggttacataatccattccagcttttacgaattctccgagggatatttttgcttgttttctttgtgcatttttcattttgttttcaggaaatattttagctgtaccatctgaatcttgctcctctgcttcatgtccttctttactttgtgtccactggccctctgtatatcaggcaaactaggccactgaggggctgcatcccagtct

SEQ ID NO: 15373 - DNA, 1200 bp, Homo sapiens
ttgaattttcagaaaagcatatttagaaccatgtatttttaactaaatatccagtgttaaatataatgatggagagaaacaacttaaaagtctttattgaagaaaaaattataggccagaacttgtacaaataagaacacataagtgatattgctaaaaataagaatgagaatgactgacaaaccttgctggttgttttaaaaggtacgtgaaaaaacgtagttttagaattaaaatatagctgtaaaagatcttgaggattattgattgactcagttttcatctaatcatacattgaatactgtgttttagaaaatgattaaagctttataagtgtacaaaaatatagagtgtggtataaatgtttatataaatagctttatgatatatttgaacacaagtagtacatttcttaacagatgttaatttatattgaaatcagtgagctgagttattttcatttaggatatgtttaaataatgacaagttaaataatccttttttttctgtttgtgatatgttaaaggaggaattaattccaatgagtgtgaaaatgtatcaagaaaaaagaaaatgtcagaggaatttgaagccaatactatggattctctggtagacatgccatttgctactgtagatattcaggatgactgtggaagtaagtactttattaagtaaacgcgtatttagaagcaatgagtagtaaatttagttatatatatatttttttctttataagttgtttcacttttaatacttatgtttttgagttttaattttgatttcatttcatttattctagttttttgagacacagtcttgctctgtcatctaggctggagtggtgtgatcacagttcactgcagccttgacctgccagtcttaagtaatcctcccacctcagcttcctggtgggaggtagctgggaccacaggcatgtgtggcaccatatgtggctacatttttatttttctttgtagaggtggggtcttgccatgttgcccaggctggtctcaaactcctgggctcaagccatcctcctgccttggcctccaaaagtgctgggattacagatgtgaatgatcgtgccgcgccaagtcttgttttttatttaatagttgtctatatctattggtataataataataatgttatattcatatataataatatctgtgataaaataatcacagataatat

SEQ ID NO: 15374 - DNA, 1181 bp, Homo sapiens
accaaatcacctggagggcttgctaagctgcagttggctgggcccccagccacagagcttctgattcagtaaatctgggataaggtctgagaattttgcatttcttgtaagacccagatgatgctgataccgctggtgttgggaccacactctgagaatcactgggctagtgcaatggattttcctcaaagacactaacatatgtagccaaagggtagagacacttcattcttttttttctttttaagattggcggaagtatcaacagatgattgaagaagctttgaattcaggcttacttagaatttccatttaggaaatctaggaaaaggaatcttggagataatctagtcaagcttatgtattttccagacacagaaattcaggccttaattgctgagttgctcaaggtgacctagagtttattagtgtcagaatcaagtctagaactggtttattaactccatatccagtgctctttctactataaccaatgaaataaacttctaatcctctttttaggcattcttcaaacaaaataatgtgcctcaggaaagccgttttaatctgaaaaaaaatgtggaggaggagtataggaagtggaagtcaatgagcaacgaaaacgacattattacccacttctctatgcagggctcccctcctctctttctttgtcttctctggaaaatgctcttggaaacagatcatattaatcagattggctataggtaagtcaaaaacctaatttgcattccatttggcaaattgttgtatccatacaacaatggagtttatgttttactctctgccttccagagtattagagagaattggagccagggccttggtagcccatgtgaggacatttgcagatttcctggtatatgagttttctacatcagcagggggtcagcaactcaataaatgcattgaaattcttaatgacatggtatggaagtataacattgttacactggacagattaattctctgcctggtaagaataaatacatttctaagcttattctcttagatcaagatgtatgactaatatatgttatgccaatctgctctatattgctttgaaggatttaatgaatttatactatatcaagcattgctgtcacttccctaaagagccggaaattttccaatttctgtttttgtttgtttttgttttt

SEQ ID NO: 15375 - DNA, 1186 bp, Homo sapiens
tgatgaatgaagcatggctgtaaatttatttatattcaaaactaatttgtttagacaactacaccttctttgaattaatcttaggttgataaaaagttcttgaacagctgaagaataatatatcaatacttagtttatatcaatattttaaaagtaaatacattttactttcaatttttatttaaaagtacaatatacatcaccacataaaagttagatcttgaaaaggattttagtttttaggaatagttcccattattcctctgctctcaattcaggtttcactgtgcaaatatttttttccaaggtgtatttgatttgccctcccgatgtccttaaccagaagggaaccacagaagaaaacactgctgaagacatccattctcattgcttgcgtagacctgattcactaagaaaataggaaaagcttaaatgaaaaacattctagggaagtgacaaaccatataaggcaatgggtgagccgcaattgtgggcgtaatttttttctctctctctttgaacagggagacacatcgcctctgcctcccactgtcccagactgtctgcgggctgatgtcagggttcctccttctgagagccaaaaatgttccttctatttagcagacaagaatatcacccacggcttcctctatcctcctggttagtagaactcttttttagagcagtagcttagaaagctctcatcagctggatgtgggcatgtgccttaaacatatactccccaccaaaactacctgcttgggtaagctagctgcctgagaggcttccagtggttgtggctggccagagcagcacagcggctgtaataaagactaagacattttgcagtgggacccacacagcagctctcatctggcccagatgtttagagagttcggcaggtttaagtttaattttaaaactggagattctttgcagaaggacacaaacatctaaaaacccatttcttctgactcctgcccaagctaaggtccacctggagaatacagctgtgcccgtgaaaagaaatcaggctgggtgctcgctttggcagaacatgtactaaaataggaatgatacagagaaggtcacctagtaaaataaaataaaataaaaaaagaaatcaggctggaattttggcctgtcgctcatgctgtagggctaacagttttaaactgcaggtgaa

SEQ ID NO: 15376 - DNA, 1175 bp, Homo sapiens
caatgacatctttgaatcgctgtactacaggaagatgtacggagacatggcatgaagccagagagtgagagacattaactcattagactggaacttgaactgattcacatctcatttttccgtaaaaatgatttcagtagcacaagttatttaaatctgtttttctaactgggggaaaagattcccacccaattcaaaacattgtgccatgtcaaacaaatagtctatcaaccccagacactggtttgaagaatgttaagacttgacagtggaactacattagtacacagcaccagaatgtatattaaggtgtggctttaggagcagtgggagggtaccagcagaaaggttagtatcatcagatagcatcttatacgagtaatatgcctgctatttgaagtgtaattgagaaggaaaattttagcgtgctcactgacctgcctgtagccccagtgacagctaggatgtgcattctccagccatcaagagactgagtcaagttgttccttaagtcagaacagcagactcagctctgacattctgattcgaatgacactgttcaggaatcggaatcctgtcgattagactggacagcttgtggcaagtgaatttgcctgtaacaagccagattttttaaaatttatattgtaaatattgtgtgtgtgtgtgtgtgtgtatatatatatatatgtacagttatctaagttaatttaaagttgtttgtgcctttttatttttgtttttaatgctttgatatttcaatgttagcctcaatttctgaacaccataggtagaatgtaaagcttgtctgatcgttcaaagcatgaaatggatacttatatggaaattctgctcagatagaatgacagtccgtcaaaacagattgtttgcaaaggggaggcatcagtgtccttggcaggctgatttctaggtaggaaatgtggtagcctcacttttaatgaacaaatggcctttattaaaaactgagtgactctatatagctgatcagttttttcacctggaagcatttgtttctactttgatatgactgtttttcggacagtttatttgttgagagtgtgaccaaaagttacatgtttgcacctttctagttgaaaataaagtgtatattttttctataaagggcttggttattcatttatccttctaaacat

SEQ ID NO: 15377 - DNA, 2036 bp, Homo sapiens
ttgcagtgagccaagattgtgccactgcactccagcctgggtgacagagcaagactccatctcaaaaaaaaaagaaaagaaatatatgtgaagaaaagttgccaatttgtacttactgatatcttcagagaactcatttttaagaaaaactttaataaaaggtaaagaatgtttaagctcgtaagctgttctttatttttattcataggtaacctcagtctcttgtttaagtcagtaacttatttagtggtgtcttctttcttaaggtcagccacacccttagaaaaattaccaatgaaagttgaaaaattgctcccttaattgtagcattagttcaagaatttttttgaaagaatagtgccatatgtattaaagagatttttgaggaacaaaaaaacacagtcaaaaatttgagggcaatatactactactgattttactctagaaatgaaccaaattatttttagttgctgtagaggtactccactaaatctgtaaacatgtttttttgttttgttttgttttttgcgtctgcagcgcaaatccagaaaaaccctgtgcatcatcattcttatccttgtcattggagttgcgattatcagtctcatcatatggggattgaaccactgaagttataaaggagcacactgtcgcactacattgtctaaattatgtaggaagattcctgtaatcatgtttttttaattattattttaaagctattgtataaaggatggttcccatactttgttatttttattgggggggttggggtggttcctttggattaaatctgatattttctaatactgaaagattttctaaatgtcactgctgacataactcccttggtcttcaatttaatagttgttaagtttttgcccacattgcatatgcctttcatttataatttatttaccctgcttgacttagttttgggaattcgtaaatttaaaggtgtgtgtattctgtttgcatctccctgtcactgtgacacacctagatgtgtgttacttcaattaaaattctcaaatttaattttgatttgcttcagcagggaaaatattctcaataatgtaaaataattaaggtctatacatgggttgtatttttctggttcacaacagcacaaagtgtctttcatttttttgttggttttcttttaagatcttttttaccctgaagtcggtgaatacttttctagtttatttgatactctttctgtgtatatattaagcttttgctgtagattgcctagtaaaattactaaggataggttgtttttacatatggtctatttaagtctgatgtttacgggggaaagtgtagttactaaaaatgtttaacataatttggaagaagagtatgaacaaccaataccaatacctattgcgtttggattcttaagaccccagtttgttattccactaaactagttatcttaaccatatcatctggttttgtgggccattatttaccttcccttatgtcttatagaataatggttaatatttttaggtcaaaattacttttggaaagtaactttcccacaattaactgtttttgagcacctgacaaaatttagtgtttaccttgcgtgccattttgtgtcatccttcattaaaaaagcaattggaggtttgccagttatctcacttccctttttaaatcaatgttgttttaatgcactaatctgaattctgtaaagaggattatcttagtttatactttgtattttataatgttcttgtatagcagctcggtactgaaggcggtgtttaacttggcaagctctgagacttcaaatgggaacaaatagtaagtagctaagtaaaccacatctttgcaaccaaaataaagatgagttaaaaggtatctggttaggcctatttcatgaggactatgctctggtgggaccacaggtcacctgatacttagtgctgtgctgcctgaaacctcagcatggagacatcaccacatgcactgtggccattcagcatctttctggagcaccagttcactccaggtttttattt

SEQ ID NO: 15378 - DNA, 1184 bp, Homo sapiens
aaaagaaaggacatgatttggtttgtttgttttgacagagtctcactctgtctcacaggctggaatgcagtggtacgatctcggctcactgcaacctccgcctcccaggttcaagtgattctcccacctcagcctccctagtagctgggattacagacatgcaccatcatgcccggctaatttttgtatttttagtagagaccaggtttcactatgttggccagtctggttttgaactcctgacctcagatgatccaaccaccttggcctcccaaagtgctgggattacagacatgagccactgtgcccggccagggacatgatttgattctagtaacatttgaaaaataaataatatagattcattttttacatttcaatttcaaaattgtgaaaagtgaattaacaacatttaagtttaatgactttattttgttttatttctcaggatgtgatcttcgtggtggaaagctaaattttaaaaccaccccaatggatgcagacagtgatgttgcattggacattctaattacaaatgtagtctgtgtttttagaacaagatgtcatttaaacttaaggaagattgctttggaaggagcaaatgtaatttataaacgtgatgttggagtaagtatctgagttttcgtatttgtactacatagcctaattttatagttctatgactaatactaaaatgtattcattctacagatagtttatgagcaccttaccatgtgctggttgtcctggatacagaagtgagccctgtaaaagcaatccctcctctcatggaggtgcaagcttttgtacatagagtgctggtacctgaatcagcaaagaactcattggttacagagacattttattgctctctcaatttattttaactgaagaaagggacctttatattcgcacatgtacctattcaaatatgattatatttgaattatatttgaatgatgccttaatatatattataatttttataatattttaattgtcatattctttaacaaaggtagatggttttctttcataacaaactgctgaaaataatatgatttatatcttaacctggacatcttaaattttagtttttgttaaacctgtaatattttaaagcctgaatattaataagtaataataaaaccttagtgttttgagattaacattataaaagacat

SEQ ID NO: 15379 - DNA, 1200 bp, Homo sapiens
gcagattagaaataaaaacgtgtatataaactctagggaaccagactagaagtttatagataaaggataatgttttatgttgctaatttaatatgatagaaaatgttaaataacttgtaaaggttaagaaattgtagttttaagaagagaaacctcttacccactagatggaaatgagaaagaagctgtgatgaatggtgcctcatttggacctttgtttttctggaaagactcaacacctgtagttgtagagaagtgattgaggttcttgactttaatcttgggttgatgcccaagcctatactaagagtcttgtcagaagttggtaacatggagatgttttaacaagaagtgcccataagctgcctctgtgccacagtgtaattatcaaatagccccacttgaatttgaaagccattttgtgtgatactgtccttccccttgctgtatcttatttaatggagttaaagagtgactattcagtatatgagattgctactcttaaagttataataaatatgcatttatgaaacagtgtctctggctcacccaggagccctgatgtggtaatacaggatcaagctgtagttgtgccctgtcatttaggtttaggagtttagtgtaaccaacagtgattatacctagaaataaagctgagtggagagtccaattagcttctcaggagaaacttaatggggacaatattccaacacaatgttccacaaaaacttgtatttccaaaatgtttttaaacctttgtggaaaaattgcaacatcctaatctccatatatagtacattttccttactgtattataaaatcttgaaaacctagcttaggcactgcactgaacaacacatattatttttatcttttttcttctcaatgccttccctaacctcctgcttattccaaagtggaaagcaaaggctaacttacatttttccttcttgtgaaatatttcattgagatttttagacttgtatttttccttttttttaaaaaaaaagtgtttatttcctttattttaagattcagtaggatagccaaattcatagagaataaaattacatgaaagagttacaagctcactgttttaaagacttgacatttttcatttagttttaattaacagtaataagtcacctcctgtttttcaatgttcaccaaaaaaagaaacatagaatagggggaaaacat

SEQ ID NO: 15380 - DNA, 1103 bp, Homo sapiens
tctaccatctccagagggaacgctgcttcctggaaccacgggctcgtttctatgctgctgaaatagccagtgccttgggctacctgcattcactgaacatcgtttataggtaagcctgagagctcttcaggctaccagttttggtataaaggagacgtagcactggctgtttcatagggccttaaaataatttgtgtttatttgcaacttggttgcctaaaaccagatcccctagcacgtgagctggcttgacttaagtgccaagggggaaccagccaagtaggattgtgcctaatccagaatagatgagcagaacaagggctcccttttttcttcactacacaactacagtgaacctaaaatgcctctaatacctttagcaattatctttaagaggatatcttatgaagtgaaattaacttgtgcaactacttttctattcacttttttacagagacttaaaaccagagaatattttgctagattcacagggacacattgtccttactgacttcggactctgcaaggagaacattgaacacaacagcacaacatccaccttctgtggcacgccggaggtaggcgctgtcttggtttggtgcctggtttacccccgccttccaagagagagatgtacaatcatgcacttaactaccaaaaagagtaaactcctctcagagacttcttaatacagttcagtgcaaataaaatacatttgctgtttgatgtagcatgagaaatcccaagtccttctgttcctttactgaaaagtagctgtttgtaagtaagatctgcatcataaaaactttctaaatccctaagtaagagatatcaagtgcccagcagtttcctaaatgtcagtacacataggtagccagtcaccctcaaaaagtccagcagttttatcaggaaggaatctaaagatatctatcttccaagctggctctgggtctctcagctttttcaaactaaatgtgtggtcgtgggattgcttgctttcgcaggttctaaacgctgtttccctggtctgtttttcagtatctcgcacctgaggtgcttcataagcagccttatgacaggactgtggactggtggtgcctggg

SEQ ID NO: 15381 - DNA, 1454 bp, Homo sapiens
gtgtaaaaataggataatagaatctacctcctagagttgtgttgaaatgaaatgataacgtgcaaagcactcagcacataaaaagcatccaatattggtagctgatatcgttgccatcaatatcacatttaatctatcaaggcattctttctaaaagagcattctaaaaataagatagagtcatttgtggagaataatggagagattatagtaaattgcagaaatggcatgactaggaaaggaagaaagttgcaggacaaagaaaaagattttctcttgatataataattctttcaccataattttccctttgttgttcttataatgtgattgattaaattacagcaaatgtcttttttttttttgttttaacagataaaagaatgatgggtcagaatttctaccacgtttctggatacagtgaaatagctaacctctgtttcaagaatgcagttattaagtcaaaggaacaatgtgcaattgatatgtttttagatgagagagaaaaattaaagctaaaattagctgcaaagaagtattaataatcacctctgcaaaaattctaagttgccaactggcaaagaaagtctaatgttaaaaacaactttgcctttgaaacgttaataaatggatttactttgctaagatttatggcaagtgtcaaaaatagtatctgaagatactgaatcatcatgaaatgaactctacttctggccaaagcacaatgtatttgcagttttctcttttgattcaattatactgcacatgttttaaggaaaagtaacttaattgggtttttcaggcagttgatatttgacctaagctttttttttttttttttttccagttaatgctaagaaaagatttggggaaggttataataaaagtattttgtggtgaccataagaatgtccctccccaaacaagtaaacttgtgaaagtttaatttggaattagtggaagctgttcctttgaaagccaagatattatttaagttgtaaagccagctaataaaatgccttagtttgagcataatacaaactgtgttttgttctttagacatttatgagattctctgccactaacagtaaatatgatttaggggttttgtgggatctttttcacctaagagtttcctagctctgtcacatgaattcttttttatcctaatggcagatccaatttcatctcattcatttttttaaccataacttgcttttcccattctcacttttagaattatacctatgatggccctttctttatcttgcttaccttatagattataagtcccctgtgagtaagtaagagtcatgtttttctttaaagtttcaacaacaaaccccaaggtttatttatttaacaacaggtattcgttgaggtgccttctgggtgcaaggagctttagagtagattttgacctcagctgaacctggaactctgatctgatagac

SEQ ID NO: 15382 - DNA, 1175 bp, Homo sapiens
agtgtcttcctttttctccctactcatgcatacaagctacctaataaacacttattccttcttcagagtgccagatgtctattctcaccatcatggattctttggtgcacctttgtgtttctattgtatattttacatattatttgtctcaggacaatgtaattgtttccatctttctcttcactagtataatatctttatgggcagggacttacatttttatttttttttatccccagagtttagtataatatctggtactacgtatttattatttctcaataaatatttgagaaaggaatgaacctttctttggtaatatgagtatttttatttgcaaaaaaaaaaagtaaagtgtggtatgccatatttagtagagatgttaattctgaaatgattattatttaatgtccattgaactactagttttatatgactacttgagaactaagtatagttaacggtattaatcatcagataacattgctgtatgaaccataagattttggtatgttttgcagatcaaggatctggattttgcataactggtaaaatagaagctggttatatccaaactggtgaccgactactggcaatgcctcctaatgaaacttgtaccgtgaaaggtatttatctgcaagatgcttttgctaaacaagccttaagttgagacagcagatttttaaaaagtggtttagttacaactccaaagtaagtaacctcttactgaaattgtaactgactgtcaaaatgatactgactgttgaagattaaaatgtgaaaacattaaacgatttttttctgttgtgattgtgtctgtatatatatgtacataaacattctaactgtagtagcattctatttttgacacagatctgagaagcctggttaggatttaatcagatatgtatagatacctcacagatgtatttggaataatattctgtagcagaaattaaatctagtcccagccttaccctaactagtcagtggcaaagcagccttctacagtctgttactttgaaatgtatgtttcagaataactataaattaacagctttgatcatgtttatgccaaaaatgtaggtatattttataggaagatataagtaacattcaaatggagaaaaacccaatgttgaaaagagaaattgaactagtttaaattgccagtc

SEQ ID NO: 15383 - DNA, 1099 bp, Homo sapiens
cctgtctagtgctcagttttcctcagtttatgaggctagtgcctggtttacatatcttatagactgttgttaaaattaaatgagattaacattcattttataagctgcaactattacttggttgaatgtcccttatccgaaatgcttgggacccaaagtgtttggggtctgaaattttttttttggattttggaatatttacattatacttattagttgaacagcccaaattcagaaatctgaaatccaaaatgctccaatgagcatttcctttgagcattatatcagtgctcaaaaagtttcagattttggagcatttcagatttcagaattttggatttgggatgctcaatgtgtatattagtgacagttaagttgctattagtaattataaaaagtagttattttctaggagaagtgggattataatgagtttattgaagtgagtcaaaaatttaattttaaattaaaccttgccttttgcaatttcttttttccagattcctttaagcctccccagcgatctattgacaaaccttttagattatgtgtgtccgatgttttcaaaggtaagtgctacctttgtagtgcttcttcagtatagccccttttccccattccctcctaacctcctttcctggactaagttatgacagtatattgccttcagagtctctcctctccatgcccaagtaaggatcactgtcagattaatcttaaaatgcacagatttagtcacttagcttccctgtccaggaaaaccttcagtttactcaccatttctcatctttcaagcataagaaaaccttgccttttgtctttctaactttatagtttttttttctcccattagattcctttagttttcaaatccttcaaccaaactggattgtttattgtttcttaaccacacaggatgtgtttattgccacatgtctacccgtgcttccctgttgtattgttctttctctttacttgtccatttcctccccatctgtaacagtctgggtccagttaggagttagataccatacataggtgaaatgggaaatgtaatataaagaattattaactatgataaaaatgcaactaaaagata

SEQ ID NO: 15384 - DNA, 1149 bp, Homo sapiens
actggagaagcggcaaggagggaagcagctactcaacttagtggtcattggtaatgctctttgtccctctggatcgtcagccagccatgccttagcctgcccactgtctggaggcagcatggaaactctgagtttctccatgggtggaatggacagagagcaaggaggcacagtctcataatgctttctagtcatgtggggagagataatgccaagttaccaaagaggtcattacacttgattgtgggatttttcattttgtgaacattttgaaattggcgtgtcttgttgacaattttaatttccaaaaatctgagaaattccccccgtctgtaaagagatatgctcttttttttttctattagatgttttaactgtcatttgataaatactggtattactgtaaaccactgacatgaaatattgaattacacatttatgcaatgcctcaatgtgaacatctggaaatgtacctggtattaatcctgaatcaattttctttaggtcatgttgatgctgggaaaagtactctgatgggccatatgctttatcttctgggtaatataaacaaaagaactatgcataagtatgaacaggagtctaaaaaggctggcaaagcttcgtttgcatatgcatgggtcttggatgaaactggcgaagaaagggaaaggtagtcactatatttcaaaattttcagtttgaaatcatacagtcttctaaaataagtgtgtaatatgtgttgaatttgtaaaacatatgaaatactttagagattatttttagaaaatagcttttagatatcagggaactattttgacttttttgatgtaatctgcatactgtttttactcttctgaattttatagaaatagattaaaagaatgtttaaaagaaacaaaataaaagccatgcagaaaaacaacagtaaaaatcataagctgattattctatgggataagtttcagttgtcacttccctaagtatttgtcaaattgtcttgattttgaattaaaattatgagtaagacttttaatttcatgtcagcttacaaaggaaaggtaactgtcataaaacctcttctgtgtagaatctaaataaccagcaaattcaaattaccaaacaattcatttttatactttacatattatg

SEQ ID NO: 15385 - DNA, 1105 bp, Homo sapiens
cagtattttagtaagtctagtgttgtgtgcaagtaaaatatatactatattccagcacaattcagactctcaacttgttcatcagttcataaacctcgcaggattaaaaatagtttagccatctgctaactgaccaaacaattttagtattgtgaaagggtgtggtaggaaagggaggtatagggtctaggtataatgtcagaacaaggctcagtgcagaaactaccttgtgacctcttaatactgaaacttaacagtcagttcaaaattaggaagagatttggtggaggttaagcataggagagtcctgacaataggggatttcctagattaaagtgacagaatttctttcagcattaatatcttactaaatttttttagagataatgtgtttataaagacattaattctgtgaaagttatcataatctataatttaaaatactatgtaatagatttctttatattactaaagaaattaattggccttttatattttactccttaactaggaaaaccagtagattcccagacatcgcgaagtgaatctgaaattgtgccaaaagttgctaaaatgactgtatctggaaagaagcaaactatgggatttgaagtgcctgggtaagactttgagtacctccctcatccccacccccacccccaagtttttgaaatcactgttgcttctgtaagaaagagactgtttcaatttcgcataatatatcattagcactgaagtatcatatatcctcagtataacatagtacaaagagacaaaatgagaaattaggcttgattctggccttatcttgtgtgtattacttactctacctcactgccagttttcttacataaatattttatagctactttaacataaaaaaccctatgattttgtgaaacctagcactgtgagatagggaattcttataccactaggtggcagaggtaaccagattttggagtgagtccccgaatcatggaatcattaattaaattttttaataactaaaatatttttaaactcttttggattttcatattgaataaattggaccattgtagcaaagacgtaaattggaccattgtagcaaagacatatgata

SEQ ID NO: 15386 - DNA, 1112 bp, Homo sapiens
gcagaaggtttcattaaattcagcgagtctgtatcagttgtgtgatgtgagagagatctacctttgcatccttcacaaatgaatatacattgaaaaaaaaatcttcaggaccaaagacctacatcatttcatgttcaagagaaaacctagaatctatttagatcttagccgcaggaaggaaccaggagagccctggggaaagcagcttctcaaggggtaaccactggggacagagtttctaattatgtttctaattatggggatggaggcagtttctaattatgttttgctgcagaggtagctggaggatgagaaaggtcaactggacaggcagcgaggtaatttggtttaagtgcaagctttgccactaaggtgaagtcacttatttgtcccttgtttctttgtcaataaaataagattagacttgatcagttgggtagcccttcagctgggtggctattatttctgtctgaatgaaaactgtacctaacggatgattagttcttctctattctagagactgaacactaattatgaatatatgagttttcagaatatgtatcttttgggtgatcatgatttggtgggtgggttttgtgaggcctaggggaggacattaataatctttctttggaatggtgcattttatttttatctcatagtgggctagttgatttaaaggacatcttagtggtttaattcacctcattataggaagtggaaattttacgtacttcatggaaaagtttagaggaaactgaagctagtgaaattaaatgaactgcttaagccgtaaggtgacagctaattagtggtagggcagggaccagaatcaaagcttccttctttttcatccagtacttatttcttactgtcatattttgggacttactgaaaatttagtgttcaatttcttgggattgttaaatggtgaatgaatttccagttgtttggggaagatgggagaacacagtaaacattttacattttaaaaaatatggatttgattatatatatgtatctcttattgatctatgacttgctattttagttatgagttcctttctgacttatgtcagtagagtttgcctgccttccagaatggtgctagt

SEQ ID NO: 15387 - DNA, 1157 bp, Homo sapiens
gcctcagcctccagagtagctgggactactggtgcccaccaccacacccggctaatttttttcttttttgtattttttttagtagagatggggtttcaccgtgttggccaggatggtctcaatctcctgacctcatgatccgcccgccttggcctcccaaagtgctgagattacaggcgtgagccactgcacccggcctgttcttattattttttttaagatggagtctctctctgtcgccaggctggagtgcagtgacgctcactgcagcctccgcctcccgggttcaagtgattctcctgactcagcctcctgagtagctgggactacaggtgcatgtcaccacgcccagctgatttttgtatttttagtagagacggggtttcaccatgttggccaggatagtcttgatctcttgagcttgtgatccaccgcctaggcctcccaaagtgcagggattataggtgtgagccaccacgcccggcctaacttgttctttacaataagtaatggaatgtggagttttcctttttgctactgacagttgtgtgccccacagtgacaaagtttcagcaatgcaggatcaatagaagcttttctaatcagtagaataattatgtaattcatcccttaaagcagtggttctcaactagcaatcagaatcactggaggaattacttcagaacacagatactgtggcttcactccatatatgctgaagcagtctctgtggaatggcatttgggaatgtgtattttcaaaattattccccaaaatgtgtatttctgttcgagaaccattgccttaaagggaggaatcagtagaatgagttatcaatgccaagaataacatctgaccaacttgaatgaataatttctagaaatcaggaataccaaggaaaaatgctacttaggaattaatggccctttgcataaaatgatggagatattattagtattccttggaaaaatataatacagtagtatctaaaatgttattttattagtttttttgagacagagtctcactctgttccccaggctggagtgcagtggcatgatctcggctcactgcaacctccgcctctcgggttcaagcgattctcctgtgtcagccccccgagtagctgggattacaggtgcgtgtcaccacacctg

SEQ ID NO: 15388 - DNA, 1181 bp, Homo sapiens
ctctttcatcttaaacactttcgaggatttgcagtgcgtctagcacctagattacagccaggaacattggttaagaactgttggaaacaaaactaaaagcaaactcaacatatgtgatgtttatggccctcagatccttagtattgtgtgattttcccccgttaacatgtctttctaaaattgtctattaaagcagaggaaatacctgccaaaggaagtatgtattgcattaatcagggcataactaatattctcctgttcagaataatacttatttacgtgtgaaagcaacatggatgtgattcccaacacagaattttcatgacccttttattgtatacaaataaataccataacagttacttggttagacatcaaatctgtgtgcatgactatgtgcttatccacttaagacaataggtaaaaggggatctgagaaattatgtaatagggagtgggaataaaactacttaattcctgtgggcaggttatattttaagttcaaatgcattgctttaacctttggttacttttattctgttaaacagaattgaagaaagagtattataccagagtgtagtaggctagggtgattgtaagaactctgtaatagaatgtcattgtggatgttacctttttcagatccaagcatataaaaagcctgtatattttttaaaaacacatcttaactccacgctttacgatattataaaagttgaatggttcctcttggtaaggatatttgcttacaagtgctaggaaataactcactgatacctgcgttaacatactttgttttgcctagagaggggcaataaaaatgaaccaaaggatatttccagaaaggattaagaaagctgtttaagaaggccatgactctttaggtgtgtatgtgtacctttcagcatcctaggaatttttatactaaaagcaaaatgttttttccagttagtcttcttcaaggaattactattgttccttttgtcacaggtaaaatcagtgttgggaattataatttgagaaaaatattacccagtaacattgaatgtagatggctaaacgattcttactcagtgtgatgtataatgatgcaacagggacccttgtaaattgtcatacgccaataaaatgtcacaagtaataactgctgttgtttgtttacctgtgtctatttcacacat

SEQ ID NO: 15389 - DNA, 1138 bp, Homo sapiens
tgactttctgctgcatctttatgactaaggtaattttgggaaaaacttaattttatctcattgcatttggtgtaataataagtggacttggattgacataataaaaaaacaaaactcaggattctaaaaatcagtggtaatttagcagttgagatcttccaaatgattgtctgggtaaccttcagtgcttgggttgctaagtagtaagatgtagttattctcttgatgatggaatgtatttttgttgaaaaattcagttttactggttttgttttattgtgttttagaatattaccaatctcatatacccaatcttcagaagattaatactgtgatttatgattggagaaatgatcatctttacaagaaacatttcattgacaattgtttttaacctttctgtagcatgacgacagagatgatggtgtggattattgggccaaaagaggaagaggtcgtggtacttttcaacgtggcagagggcgctttaacttcaaaaaatcaggtagcagtcctaaatggactcatgacaaataccaaggggatgggattgttgaagatgaagaagagaccatggaaaataatgaagaaaagaaggacagacgcaaggaagaaaaggtataaaatttcaacttgtgattctgacagattttttttgatataggtttggtgggtgaattatttcatttttaggaacaattattaatatggttccttttcactctccgcatcttttgttaatctttaattttttctctctcttttaggaataataaatatgaagtaagattacaacagagcagaacttgcacccaccattttttttacctgatttttgttttcaaataagaatgtaagcattttacttaaattttactgtttgcaagtagtctatagaaattttgttttaagtcttcaaatatcttgagaaatagtagactgtatgttgaaaattgtactgaaataaagtagaaaattgttacgtaccatatttgtaactatcaacttttaaaacttttaacgtttttgttacatgcattgtaattctgctttgtctataagatatggtcaagtacagctctgtgaaagttctgattctcttccttccctgtttgtcaatgttttattctgaagtaaa

SEQ ID NO: 15390 - DNA, 1756 bp, Homo sapiens
gttgaaaatacaaatgaccataataccattaagaattaatagtagttgatgctcattctttttcccccaccaggcttaactttatattatgtatgtatttaattaatagtatctcactgatagttttttgtaatcttttcccccatttaactatatattatgccatgccattaaatattcttttacaacatcaatttaagtgcttgcctagaggtactacaatttgctaatatgtcctaatgcatgtgatatatataacacatgcgtgtgtgtgtgtgtgtgtgtgtgtgtgtgtgttttgtgccttcatttgtaaggtctttaaggtattctctcagtatttaccttagtgaggctttttgattggaaaccattaacttttgtacagatgagttttttaaaaaagtgtatttttgcctttactgtttatttacatgttatattcaaccagagtatttagaatggtagcatggaatactttatttttcttgcattgatatttatttcatttttagttctaggtctcgttccagaacatattcaaggtctcgtagtagagatcgtatgtattctagagattatcgtcgcgattacagaaataatagaggaatgagacgaccttatgggtacagaggaaggggtagagggtattatcaaggaggaggaggtagatatcatcgaggtggttatagacctgtctggaatagaaggcactctaggagtcctagacgaggtcgttcacgttccaggagtccaaaaagaagatccgtttcttctcaaagatccagaagcagatctcgccggtcatatagatcttctaggtctccaagatcatcctcttctcgttcttcatccccatatagcaaatctcctgtttctaaaagacgagggtctcaggaaaaacaaaccaaaaaagctgaaggggaaccccaagaagagagtccgttgaaaagtaaatcacaggaggaaccgaaagatacatttgaacatgacccatctgagtctatcgatgaatttaataagtcatcagccacatccggtgatatttggcctggcctttcagcttatgataatagtcctagatcaccccatagtccttcacctattgctacaccacctagtcagagttcatcttgctctgatgctcccatgctcagtacagttcactctgcaaaaaatactccttctcagcattcacattccattcagcatagtcctgaaaggtctgggtctggttctgttggaaatggatctagtcgatacagtccttctcagaatagtccaattcatcacatcccttcacgaagaagtcctgcaaagacaatcgcaccacagaatgctccaagagatgagtctaggggccgttcctcgttttatcctgatggtggagatcaggaaactgcaaagactgggaagttcttaaaaaggtaaaaactaaaatacagaatctagattataatattgtttttgttctttgaattctgtttggaattataaacgtaaaattgtgatatgtatttaactagcggtttttactcttgacttccttcattttaagataattccaaattgtttttactcttatctggtgaactttggaagctaagtgttttaataaaaattaatttatccagctactcaggaggctgaggcgggaggatctcttgagcccaggagttcaaggctgtggtgagctatgattgcgcctactgcactccagcctgggcgatagagcaagaccctgtctctttaaaaa

SEQ ID NO: 15391 - DNA, 1143 bp, Homo sapiens
ttttttcaaagcaagaaaataatttactgccctcttacataatgtatttataaagtttttccagataaactaatcaaataaattagaataatgtgacaacattacaaatttaatttgttagctgcattccttctgatgttaccacgatagaatgttactgatgattcagggctatttctgaagtctgtatgttgctgctgtccccagtgatggtggacttatctttgccttacctgatcacaaattatgttggggaaaataaagatttaatatttctttaaatagaaaaagaatttggttttgctcgtttaagagcaatgagaaaatgatggaatgttgactgtgtttggcacacaggacacggaccttcatggaagtccttgctctgcgtggcatctgtcagcttttcacctttcattcttattcttcacttttgctgctgagcctagctgtacaaacttgcactttcatttgctaatataaattcagttttattttaccattttagagactactaatgattaaatgtagaaggagagggtgcacatgtttttatgtggagtgtttaaaagataaatttataccactgtaatgtgcagcttttattaaaagagaaattggttgaactgctaggttgaatgagagacttcatctattggactattttttttaatccaggcatatggtctttagtaatggcttgtaatttgtgaaaacattaatttgggggttttccctgttttcagttgtccatgtacacatagtcattatattagaaaagaaatctgttcaacaaacttgtttaatttgtttaaatcaacatagcatgaaacaccaaataaaatgtttgacatagttttacttttagctttctcatatgttataacttcactcagattgattcttgagtcttcagattgtccttcatttaactcagtgacattttcctagcctcctgttgattaagcatataggatagccttatttaaaatttagagcagtaggtgtattttggctgtttttctttttcatgtgtgtttttaaactttagtcatcattagcaaacggaaagccttctaagtaatcaagttttaattagaagtggtgcaaaattcttaattatattgtgttaaagagcagcgc

SEQ ID NO: 15392 - DNA, 1253 bp, Homo sapiens
ttccaccttttgttccatcttaaagctaatttaggaaaagtctggttataaactagtctttatataaaaattatcttttatcactaatgtagttttttttccagaaccatcagctaataggaatataagaccattgctctccataattactggattacttctacatctttcattagtatttaaagagccaaagagctaacaatatattccagattttttacgtggacatgccttccttttggactcatcataaattcataggactgtaaggacagttgagtatgatggttctgggcacctttaggtaataacatcttcttcctacttttctctctatctctgctttgctccttttcctgaacctgcttttggctttcttcaactgctcctctggcactcttgtgtgtaaaaccaatcacctgcaccctagttatccccatttgtcctcgttcagcatcttgcagccccatcatcatgccctacaaagctgcacactctagaaattcgatggatcgaccaaaactctttgtaacaccacctgagggctcttctcgcaggaggatcattcatggcacagcggtgagtagctgttgggagcagctgggcaagtctgggagccagtgctgttcctgtgcagactgtacatgaccctgagctgtggtgtgggcgtaagagggggagaccgtgacatccaccatcccatctttcccattgatcatgaatctggctagctgggcagtagtgtcccctcacttcctcttcacttggggattttgctctccctaaacatttgaatttgaagatgaaagctgttctttgttcaagcatgtatgagtggacgccctaccctcctggagcgtccatacacataagtacaatgccagaatactttcatttttgaaagtaggaaaaccaaatggcctttgaaggggaagtgggcttggactgctgccttggcattttatttcaaccatatccagaagctggctgaactctaaatgtggttcactcaaaagcaagataaagaatttttatcctgcttggctaatccctgtcaaggccctgtcaagggatcttaaaatttagtcaaaaaagtattttgaaaacattagtcatttgctatatcactaattcgtaaaaggctgttaggctgtgctataaattctgattttgtaagtgaaaaatataatttgtacttattattacgggctgaggtaatgttaattttcaccatgctataaatgcaatgaggt

SEQ ID NO: 15393 - DNA, 1226 bp, Homo sapiens
aataatactattttttgtcattttgcatttatattctgtgtattctagcctttttccttataatttgaagaggcttaaatagaataaagatgtagtagtaaaaaggcatagctggggagaatgttatttagcccatttagaggaaaacagaattcatagttatttgtttagatatgtggctctttcatagtggaaaaagagattatgataattatatagttctctgctaattgtattcatctttattgcatgaaaaacacaaagtctaattttggtgcacagagtttattctaagaaaccataaaattgatatgaaagtgtaacgtaggagtgtcatttcattattgcttttgctccttatttactagtaaattcacttctctgagttttattcatattatcatctatactgccaatctcaattgtttctatgaactgttctctgatagagcaaaatcttttaaagtatcaataaatgtctgttgattgtgagggtctcagatgacctctgttaggtgaaattaagaatatcttcccaaaattctgttctagaaattcctgaattgcctgtatttcatctaaattcttctggcacaaatactgaagattctgaacttaccgactggctgagagtgaatggagctgatgaagacactataagccgggtaaagaaaactgtctgtgggacaagtattctttcacttcgtttcataatgttgggtgcctgctatgtgacaggcacaggggatacactggtgagcaaatcagacccagccctgccctcctgaggcttacagaccagggtaggcacgtgataatcagctaactccacagatacaaatgtgattctacactggtaaattctatgaagaaaaaggtatcaggtgtttattagatagggcgagagaggttggggaaggttgttggagaagggaatgaaagagctgaaggctaacagaatgtgagggtataaataggccaattgtatgtatgttcaggaggggtgtgggagggagaccagggaagaaccttgtgcagtggggctgcagtgtgtacaatccaacgaggcaggcaaaagctctgtggtcctgagccccttaggaattttatgtatttgaaatgaaaaccagaaagagtgggaaaaaaataaagacaggactaaaagaaaaaatttcttgtttctaattctttgtatgttaatttttattttattttattttatttta

SEQ ID NO: 15394 - DNA, 1225 bp, Homo sapiens
aaagtggaacatacagaagaactttctagtataacagaagtggtgactactgaagaaaatattcctgacgtggtcccgggcagccatctgactccaatagagagagagagttcttcacctttaagtagtaaccagtctgaacctggcagcatcgctttaaactcgtatcactccagaaattgttctgagagtgatcactccagaaatggttttgatactgattccagctgtctggaatcacatagctccttatctgactcagaatttcccccaaataataaaggtgaaataaaaacagaaggacaagagctcataaccgtaataaaagcccccacctcctttggttatgataaaccacatgtgctagtggatctacttgtggatgatagcggtaaagagtccttgattggttatagaccaacagaagattccaaagaattttcatgagatcagctaagttgcaccaactttgaagtctgattttcctggacagttttctgctttaatttcatgaaaagattatgatctcagaaattgtatcttagttggtatcaaccaaatggagtgacttagtgtacatgaaagcgtaaagaggatgtgtggcattttcacttttggcttgtaaagtacagacttttttttttttttaaacaaaaaaagcattgtaacttatgaacctttacatccagataggttaccagtaacggaacagtatccagtactcctggttcctaggtgagcaggtgatgccccagggacctttgtagccacttcactttttttcttttctctgccttggtatagcatatgtttttgtaagtttatgcatacagtaattttaagtaatttcagaagaaattctgcaagcttttcaaaattggacttaaaatctaattcaaactaatagaattaatggaatatgtaaatagaaacgtgtatattttttatgaaacattacagttagagatttttaaataaagaattttaaaactcgtttttgtattcatttattcaagcacttaggcagtctttcatagttaagcagaatatttttatatccactgcttgtttccatgcattaatgctataggattatttgctaattgttcatatttaatatttaaaacaaccctaaaaataatatttttaaatggtccttataggtctatatttcagtgcttaacacccagtgtgcagaacactgttctaagtggtttgagaagaa

SEQ ID NO: 15395 - DNA, 1834 bp, Homo sapiens
ctgggcctacggctttgggtgggcagccacgattatcctgattggctgtgccttcttcttctgctgcctccccaactacgaagatgaccttctgggcaatgccaagcccaggtacttctacacatctgcctaacttgggaatgaatgtgggagaaaatcgctgctgctgagatggactccagaagaagaaactgtttctccaggcgactttgaacccattttttggcagtgttcatattattaaactagtcaaaaatgctaaaataatttgggagaaaatattttttaagtagtgttatagtttcatgtttatcttttattatgttttgtgaagttgtgtcttttcactaattacctatactatgccaatatttccttatatctatccataacatttatactacatttgtaagagaatatgcacgtgaaacttaacactttataaggtaaaaatgaggtttccaagatttaataatctgatcaagttcttgttatttccaaatagaatggactcggtctgttaagggctaaggagaagaggaagataaggttaaaagttgttaatgaccaaacattctaaaagaaatgcaaaaaaaaagtttattttcaagccttcgaactatttaaggaaagcaaaatcatttcctaaatgcatatcatttgtgagaatttctcattaatatcctgaatcattcattttagctaaggcttcatgttgactcgatatgtcatctaggaaagtactatttcatggtccaaacctgttgccatagttggtaaggctttcctttaagtgtgaaatatttagatgaaattttctcttttaaagttctttatagggttagggtgtgggaaaatgctatattaataaatctgtagtgttttgtgtttatatgttcagaaccagagtagactggattgaaagatggactgggtctaatttatcatgactgatagatctggttaagttgtgtagtaaagcattaggagggtcattcttgtcacaaaagtgccactaaaacagcctcaggagaataaatgacttgcttttctaaatctcaggtttatctgggctctatcatatagacaggcttctgatagtttgcaactgtaagcagaaacctacatatagttaaaatcctggtctttcttggtaaacagattttaaatgtctgatataaaacatgccacaggagaattcggggatttgagtttctctgaatagcatatatatgatgcatcggataggtcattatgattttttaccatttcgacttacataatgaaaaccaattcattttaaatatcagattattattttgtaagttgtggaaaaagctaattgtagttttcattatgaagttttcccaataaaccaggtattctaaacttgtttccagtttgtagtttttccatttttcaaatctggggaaaggaattaaaaaaaaaatgggtaataagaacatgggatataatgaaaagtggtttttgtttgtttttttgtttgaagttttaagggccttgctcattttaggtgtccaaaaccaatttttgagtggagattaatgaattctaatagtctattccctgaacttttcctcaatgaacaataccctagacacacattaaacaatttctctgcagtgctatcaaccagaggaaaatggactaagagatttctggcaggttcagacacccgggggacatgtgtgcagtgtagctgaagcctcctccttgtgctggggtccccttccattcaggtggtggggtagcagtctctctattttccccttgccctccttcccattttatcatttgttattttttttcccac

SEQ ID NO: 15396 - DNA, 1161 bp, Homo sapiens
ttagaggataactgataattcttaagaatcagatttaaatgataattttaatgcaattttaatgtaaaaattctataccattttattactaagatctccaaaacaaatggaatttactgtaattaatattgacttatcactccacctgttttaagaggtatgattttttttgtgtacctcttttagaagagtagtatttcatatcaaaatacatctgtatataactcatgctcagatgcttgatttgctctcattgtggccgcattctgatttttctagcatggggtagggagtggggaagcgggggtgtctgattggcagttctgtcttgtggtctggcatggccctgtttgtagtgctgattgcaggggttgacttgctacagattgacataagctctacatatattaattccagaattctttgcattttatctcaattatattttattaaatatctatacatatgtgtaaaatatgtgcacgtacataatagaatcatctttcaggggtcgcactggcaagtcgcactgacttgctttgttttgaacaaaactttgattcattaggatcacaaaatcagtacattaacatttgaatgttcaaagaagaatttgatgttattctttctttctttagtcaaggcatgcctctttagcatttttacttggtggacatttatatcacttagactttgctcctgtattgtgttttattttaactctgtaaggctttaaatctcttccatagagattgcaataaatcattactatacttttgattgtgaactcctcaccttacattacaagtgacccagaataaatataaaatgttgacggaaaaatagaaattactgaattttgttaaacctatgaaacacaacttgcagtgcaacctctgaattactttgctaaatcttctccagtgatcttttactccatctttctcatcatgctgacttgtctctcctctgtctgttcagcagtgggagacatttagtgaacgctcttcaagctcacaaactctgacccaatttgattctaacattgcaccagctgatcctgtaagtcaatcacttagcttgcttgtttgagattaattttattaacccaaatttccattcattatcgtttttagctgatatgcatgattcagtggagtg

SEQ ID NO: 15397 - DNA, 1192 bp, Homo sapiens
cgctctctcctgcagactctaaagaaatctggactttctgtgtatgattttagagaatgctgtgttgttaacaagaatgctaaatgttcatatttattgggacctttctttctttcttccttttctttttttttttcttttttcttttttttgagttggagtctcgttctgtcaccaggctggagtgcagtggcacgatctcggctcactgcagtctccacctcccgggttcaagcgattctcctgcctcagcctccttaagtagatgggactacaggcacgcaccaccatgccccgctaatttttgtatttttagtagagatagggtttcaccatgttggccaggatggtctctatctcttgacctcatgatctgcccgccttggcctcccaaagtgctgggattacaggcgtgagccaccatgcccagcctggacctttctttaaaaagaaaaagaatatcaagggctaaaaattagtaaatttttcttaaattctgaatgaataaaaggaaacctaatgtttaattcttaatgagcctaattaaaataaattactgtcttcagtgtttccatctatactctcatttgtatatgatgatggaaagaattttatacttttaaaagggaagttcaaatagaatttgggtctcaaatgggcatttatctatcaggcagcatctctttaacctaaaaatatacatggtctgacttagttgtctaaattacgcagaaggaatcagatgcatgaaattactgtcacaaaagagaacagtctccttggagtcagtaatctgaatgtgcttctagttttgctaatttaatctgtgaccctgggcaagttctaatcatttactgtatttttcccttctgtttctccacctgaaatgtggatttgatgccattcacatttcaggacctgaattgtacactgaccttttatcaacgaataggttgattgtaaaaatatggcattgattttaatttcttaagcacatttttctatgataatcctaggattttgggatcatttcagttgtgaagcgtcagcctctgacttgagctgaaagcttagtatctttattaggtaattttgattcaaagtactttaatttacctacttaagaaataaaaacaacttctttgttaaacacctatgatagtaaccaaaagagaagaacatgtggtaactt

SEQ ID NO: 15398 - DNA, 1598 bp, Homo sapiens
ccagtactcttttaaccatgcatcctgcttctgtccaggtgtgacattttattggtattgcatttttatttgcttcattcagagtattgctccagtcgttgtttttatattttgctgttgcagattttataaatgcaaatccactcatttatttaaaagcaaaattctgctctgtgcatttcaaatctgttatcattggaatgtttcagctgattttatttctgtttctgattccctagtgaagttttgaaaggtttctgcatctggaaatatatttgcttggctttcttagcacattttcataactttctgttgcttacataattgctgtcattctactcgtttctataatcattgtgcaaaaacatatccaataatctgactgtaacagatgtgtggttttacattttaaatatacacaaaaagcaagttttactttcaaagataaataacctagcaatcttggtccatataatcatgtaggtagatattgtactgaggaaaaaatgtttcattacaggaccagacaacagtacgaactgtagcatcagctacaactgccattgaaattcgtaggcaatccagtagttatgatgatccctggaaaataacagatgaacaaagacagtattatgtaaatcagtttaaaaccattcagcctgatctaaacggatttattccaggtgagttgttgaaaacagaagttcttctagatgggacaggagaatctcaatttcataatatcaaagacattgttttattggtcatagattttaattataaaataattatcagattatttgtctaaaaagaatttataatcactgggggccaaaaacatgacatattcacatattaaaaatatcttttcccagttaaaaaagtctaagactcttacattctgttcgtggatccgtaagttcagaataacattaaacaacactgttttaatatttcaggatctgcagctaaagagttttttacaaaatcaaaacttcctattcttgaactttctcatatttggtaagtgtggtatatcattagttgggtaactgggttgcttccaaggagtttctagcagatagattttagagccttaaaaaataaacaactaaccccttcaagaatgctgtcaaagaactcagtattgccttacaatagccagcttctctcttattctgcagaaaagaaataagtgatactgatacagtagttctttgtaaagagctaaaattctttaagctgtatcagctgtttttttgttgctagcataatgtatgagataaaagttagtttgcacatacatggttatatttatcccattggttttttatcaagtttagtaagtcctataccatgccataagtttaggaatggtgttagcttccatttaaccagagacttaagaatagctgtgttggaatatggttcgaattggctattagaacacaaagtgtaatcacaaattactttataaaaataggccagggccgggtgcggtggctcatacctgtaatcttagcactttgggaggccgaggcaggtggattacctgagctcaggagtttgagaccagcctgggcaacatggtgaaaccc

SEQ ID NO: 15399 - DNA, 1141 bp, Homo sapiens
cctggccaacatggtgaaaccctttctgtactaaaaatacaaaattagccgcatgtggtggcgcatgcctgtaatcccagctactccagaggctgaggcaggagaatcacttagaacctgggaggaggaggaggttgcagtgagccaagatcgcgccactgcactccagcctagatgacagagcaagacgctgtctcaaaaaaaaaaaaaaaaaaagagagagagagagatggtagagattatgaaggtaaacgtgataggcctgggttatttggcagtgttttggtgagaatacagtggggcaaggattattctttggacaccactcacagttagaaaaggggcaggaagagggcttactttttaaaagagacaatgatgagtttggtttcagacattcttagatggcaattcagatctcttggagacagtgggaagtgggtggagatttgtccaccccaactgctggttcttacagcagttcaggttcagaggttcgggatttcttcctctgttttgctcacctaagtgtttagggacgggagacagtgtcacatagactgggcatgcacatacatatcaggaccttggttggtacagtagttttcggtgtttgttagtaaaagttaggaggagactgagtcatctgggggcatgagtgtagagaacaaataacaccgagtccagaaccaaacgaggaaggagctggcatttatcgagtgcctattatgttcctttaaccaggcaaatcattttcatggaagaactcatttgattcttgcaacaaccttgtgaagtgggtgttattcttgtttatttttatttttatttttattttttgagacagtctctcgctctgttgcccaggctggagtgcagtggtgcaatctcggctcactgcaacctccacctcccaggctcaagcgattcttctgcctcagcctcctgggtagctgggactacaggcatgcgccaccaccacactcggctaatttttgtatttttagtagagtcggggtttcaccatattggccaggctggtcttgaactcctgaccttgtgatctgcccacttcagcctcccagagtgctgggattacaggcttattcttgttcactaagaacttgatagcagataagtt

SEQ ID NO: 15400 - DNA, 1373 bp, Homo sapiens
tgtctgtttcccccaggcccgcctgaactgtaagcactgtgggaagccggtgatcgacgtgaggatcgggatgcagtacttctccgaatatagcaacgtccagcagtgtccacactgtgggaacctggactaccacttcgtgaagccattttcctccttcaaagttctcgaagcttattgatgaaagctttgctttagtaatagctattttattgatattattactttattacatatcttttatagggaaacattctgtgacattaatttcctttctaatttaaaggagagttactttgttgtatgtgtgccactaaaataggggctgcccttgccctgtcttgattcccgagtgttaatctgtggttttgaccagagcccagatgggtaatcctgtgcatttgggttggggttcactcttaccaagaatctttgatgcagctttaagatggtggggaggatggggtgaatttaggaaaggaatttgtggttataaactaagagcttgataggagttggaaggaaactcttactaaaatgttaactttctaaaaaccttcttttagatcttccttgggcctttggaaaaatatgtgacaagtgaatgtaagtctgtgcctggagagctaatagtgcattagtctatctcagcctagtgttctgcagcacacatgggcaggcagtttactcacactgacaggtgacctgaaagtggcacaagtgctgtttctatcactattgtaatttgccagttcatttttcatgctgaaagtaatatccaaattgtaagacatatgaaagatattagtgttgcaaatatgtttaggtaaactgacctataacagaatatgtgaaatgaatttggaaataatgcaagaaggcagaactcaatcatttaaattgtgtctttgaagttggtaatatagcttttaaggagaacccatgaataacctgatttgggcagtgatgatttattacaggttgcactgttgaagtgtcatttggtgtcaggttcttctcacaggtaaatctttcagccacagaatctaactggtgagcttcagaaccaataattgccacatttattgtcctcaaaattgcttatggccatgtataaccaattaattctgagtttccaaaatcaaagatttgaccttaagagggaagggaaaaaagtgtgaaaggatgatgaagaaaataattttactatttcttttaaaagtatgttttggaaaatcaatgattttaatgcatagcagtatgtttgaaaaatagaccattctaaaaagcccatgataccttactgttgatgaaaaaggatgatcatatatatagaacttgattagtcagagcattgggcattccaaaataca

SEQ ID NO: 15401 - DNA, 1171 bp, Homo sapiens
tttctgattgattgttttctcttcaggccatctcacctcttcattctcttgttacatttgaagcagttgatataatgggtttatactttaaaagatagacatggtgccatgaagttggggagttgggtgaattatcccattctagttacagaggagctttccttaaatgccctttaacttctaggttttgttcaagaagttcattttctgagtaaaaggtattttcatatatgttgggggaaaattaactcatctaaaaagaatcttattaggtatttgaactctaaaactaacagataagacagatatgtaccttattagagcaccagaactaatttgctaagtcttttgtttagtcctgcaagactgatgcttaatacacagtctgttctcctgtgtctaggtcaggaactccagtttgcttttctgttttgtgtcctggtagcagctgttgagtaactttcattggaggttgggaaggaagtgaggagaaagtgttcttgtttagtgttttatttcctataataggatgctgcctaacccagttcatctctatgtcctgttcactgaatattccgggtaattgaaagaaaatataatggatgggctccattaaaaccagctcaaaaataaattcttgtcagtaaagatttcttgtcaagatgtcttggattgcacttttgttgaggaaagacagtgtaaatagttaaagaatgttgataaaattgaaacatttggttgtggaattgtgtgtggttttagagggtttctgtttgtgaaatgtatgtattaaaaataataaaattccagaaactaacattgtactctgtctttagtttgtcactttatttttcattgagatttttgagcagtgggattgtctggtcagaaaagatgaagagaaagctttctgaggttttgatcactattcaggtaaccatttcaaagtcactcctgcagctaataaaaaaaactgccaacttttttgctgcttgcgtcatgtatcacatgtaaactcactttgcaataaaagctttcagtatgacaaagttgattctatacgaatagtccaaaattatcgttccggttttagggaattctattatttgatagatagtatagtgttaaagattagatagacccccaaggtcaaccacccatagccacatag

SEQ ID NO: 15402 - DNA, 1247 bp, Homo sapiens
ggcagcggcaacatgcccgcctccgtggcccacgtccccgctgcaatgctgccgcccaatgtcatagacactgatttcatcgacgaggaagttcttatgtccttggtgatagaaatgggtttggaccgcatcaaggagctgcccgaactctggctggggcaaaacgagtttgattttatgacggacttcgtgtgcaaacagcagcccagcagagtgagctgttgactcgatcgaaaccccggcgaaagaaatcaaacccccaacttcttcggcgtgaattaaaagaaacattcccttagacacagtatctcacttttcagatcttgaaaggtttgagaacttggaaacaaagtaaactataaacttgtacaaattggttttaaaaaaaattgctgccacttttttttcctgtttttgtttcgtttttgtagccttgacattcacccacctcccttatgtagttgaaatatctagctaacttggtctttttcgttgtttgtttttactcctttccctcactttctccagtgctcaactgttagatattaatcttggcaaactgcttaatcttgtggattttgtagatggtttcaaatgactgaactgcattcagatttacgagtgaaaggaaaaattgcattagttggttgcatgaacttcgaagggcagatattactgcacaaactgccatctcgcttcatttttttaactatgcatttgagtacagactaatttttaaaatatgctaaactggaagattaaacagatgtgggccaaactgttctggatcaggaaagtcatactgttcactttcaagttggctgtcccccccgccgccccccccacccccatatgtacagatgataatagggtgtggaatgtcgtcagtggcaaacatttcacagatttttattttgtttctgtcttcaacatttttgacactgtgctaatagttatattcagtacatgaaaagatactactgtgttgaaagctttttaggaaattttgacagtatttttgtacaaaacatttttttgaaaaaatacttgttaatttattctattttaatttgccaatgtcaataaaaagttaagaaataacttgttttctagaagtcatttgggggtggttgttccctttggtggcttttttccccccgtctttgagttgaacactattgatgagagtaagcattccaaaggataaattacaggacactaaaacaggtcatgatgagcttaagcgg

SEQ ID NO: 15403 - DNA, 1193 bp, Homo sapiens
aattgtatatttcagtgatataaaatttaagaaaccttaagaaatttttacatggatggcacaaacatgtaaaatactctcatgcttaaaacaagctaagcaacctggttttctttacataaagtttgttattcactttttttttattgaaggtgatacttacattccagctcaaatgagggttgaattggtttagtctgtgtgtattgttccatgaagagagaggctaagtgattttagcatagacaccaaagctgctatccttgtttgtccttattgcttcttgaaggaaaatcttaattcatctaagttattatgtattgccgtgtctgtggtttatattagtaataaaaagacaattgaaaagaatgaagaaaatgtatcaaagttcatgtgagattgactaaaactactgtttttacatagccttaaatatgttttttaatcttaagcataagcatttgcccaaccttacagaacactttttatattcttataaatatcccaattgttctttttcttctaggggatgttcgtctaaccccagaagactttgctagagctcagaagtactgcaaatatgctggcagtgctttgcagtatgaagatgtaagcactgctgtccagaatctacaaaaggctctcaagttactgacgacaggcagagaatgaagcctttgtatgacagacccatgtatttttggcatgaggaactaacagtccattactctatcttcagcctatcaggatcacagttttaaggaagacttggttttgttgaatatgacaatgaaatctgtgtgtatcagatttttattgaagcattcatcagcagcctcaaccagttttcattgtccatttactagattcaatcgtctctgagtatatagggctgatgttagcaagaccctaaaaatgtccattgaaccctgcttcaaaaaatgaaaacacacctctataaaatgtgtactgggaataagctttgtatttacatacattaggggaattttttaaaatctgtaatgtttggacaaacagatgatattactttgctataaaattataaatgtaacttttaataaagatagccagaatattctaaattagaaattacgtttttgtttccctcaagacataaaacaaatataaacattctaaactgctggatgaatctgaaaagacattaagttcaa

SEQ ID NO: 15404 - DNA, 1115 bp, Homo sapiens
tttctaagttttattttctaatattatcaaaaccttaataagagatttctaaattgaataatatcaatatcatggcaacaatgtgagtggttagctgtggtgggagggctcagtgattaactggaaaggtcattggttgaaacatcaggaaactgaggttcttgctctgaatttcatagaatagcttgcagagcttgggcaagcaactcaacccttcactgtttcaccactcagcctcgtgcttttgggggtatgtgatgtgtgtgtgtgtgtgtgtgtgtgtgtaattggactttagtatgtgtctgcaaaacctctaaaattatttctctatttaaaacatgaaaatcaagaccccatagagatctttaaacaaatactgatatggattactgtgggagtcagtcccttaatccagatgtctaggaaatatccttcctctaagcttctaagtgtgaagggcaggctccatggaaaatgttcattgtgctcatgtaaattgttaggaagaaaaaaacttgctacaagatttgtccaataagtttaagaaatggatcatgagcaaaaatgtgaaaaggcactttctgaatcttccttcattctctctggcctctgtggccattcttcctcctacttgacctgaattttagtgtcgggtagggaaatgccttctaccagctccagaggtgtgaactataaatgtatggactttattggtttcaaattgcagaaccacccctccctcacccctaagatgtgttatcactcactggtattcagctatggttttgtagctggctgagatggggcagaagatttccaagttggtcaattaagggtgtaactgttgcctccctagcctctgggactggatctgagccattgtgttacacggctacgaggtattaggcataaactttgtgagattctgaagaagagtggaagcaaaaaacctgatggaactgctttggtgacagtcttgaaggagaattggttataagccaagcttgatttggaccttacgaacacacagctggggagggtcattgctgccagtatttatggggcctctggggcaagagttcaaatggaggcccacaaagattcttcatttg

SEQ ID NO: 15405 - DNA, 1097 bp, Homo sapiens
tatgtttatttcagagtttcttaaatttatgcttactaactggcatagataagaagggaaatggtggtttaaagtgtacattcaatcaacagcaagggctgaactattgaaaatgttgtgttctgtgtccagaaaacattttattttcacataattgtttaagtgtctccaatgaacatttacaatatttatgggggtatagtgcttgtggttcagttagctcagtcttaagttctgtgcctgggtaatggtgtgttgtttagcagtaattctgaaattaattataataaaggagaaaacaccagagaaaaatatcggtttactgctcctagttttacaacaagggaacactgttaggagttccaaagtagcgttagtagttcagcgttgagatattttgtctcctcacccccctgtctccaacatcctgtttcatcacaaatgtttatcattttactcattggttctccacccgtcttgtgggctgctgtggttgctgtcacccagccaagaggctggggaatgcctgtccacaagcagtaaggggcatctggctagggtgctcagaagttcctgagcattgtagtatcagcattgtgaggccattgagatagggagagaacaagcctatttaaatagctgccagaacaatcaatacaagcaccattgttgctagtcatagtggaaatatacacactgtctttagcaaagaaaaaactgaagtgtacaccatttgaagatgtcatactgaggtgttctgaaagcatcaaaagagaagaagaaaaattcctatctaaacaatattactatcttaaaaaggctattctatttgagtggttgttaactgttttaaagaatggtttggtttgcctgagaagtttatttggtattaattagctactcactttaaaaatatttaatatgacacaagatacaatatgatagtaccatggcacagtctacttgtttcagatggaattgacattttggaagagtatgggccaggaattttgtagtctgggcttatgggttttgggggcagaataccaccaggcgaggttcccatctcatcacattatgttaggaattgtgtcaca

SEQ ID NO: 15406 - DNA, 1173 bp, Homo sapiens
aaaaccattcttagctcacagttctcagctatggaacagatttggtccaccaagtataatttgccaaccctagctctatagcatggaatgcttaatggaccactagtaaataggagcagataaaaataactaatgcttaatgagcacttatgatgtgcctggtatttaacaggtattatctcacttaatcctcacaaaatcccctgaagtaagtgctattattgccagcattgtataaataaggcatggagagtttaagtgcctaacccaagatcacaaagctggtaacttctataatagttaatggatgaataacagttgattgggagtgatgcctaataacagttgattgggagtaatgaaaaagatgatatatcaaacatcttttggaagtgtacctccttacccatgttactaatatccccaaagtttattaacatctgaaatctgtttacataatcatgtatatatatgttgtttttatgggatacagcacacattttcataggcctatgtttattctcaactttctcattccatcagtgtatccctggatatcgggctgaggaagcagtggaaatgttaaagaccttctacaaacaagaaaatccaaatggtcagttttctgttgtggataatgtccttcccttaaatccatacaaagagaatctgctatgagcttacctcttcattttctttttcttttctattcttttcacagcaccaaaatcgaaagttcggaaaaaggaatgtcagaaatcttgaacatgttctgatgaaagaaccaagtgacccaaagtgacctggacaagattcatagactgaaagctgttgacatcgttgaatcatatgtttatatattgtttttaatctgcaggaaaatggtgtctctcatcatttgctctgttaagggaacaaattagcactttttagaagtctgacaattgtaaacagttattagcttttccagaagctgattcccattttaagatgggggaaaattaaggtttgaggttttagaaattagcaagtagtgcatacccttctagccacaagtgcccagtccaggcaagtgctgacttcttagagaatgtgtggccagacccagggacctggagtgtgtttggactgcagtttgccaccctgagaacaccttctccaggactggcattt

SEQ ID NO: 15407 - DNA, 1268 bp, Homo sapiens
gcctcttggcctttaccacaaaacttagagctgaattcatcgcttgattgcagaaattaattcaaattagctatatgttttgcaaactataatgttatattatcatctttgctaggatctgttgacaatggagcaagtgaaagactttgctgctaatgtgtatgaagcttttagtacccctcagcaactggagaaatgatttttccttcaagaaaaactacagtgggattcatttactttttaaaatacactgggtaaatcacctatacttagagtaacagtttgttatcaaaatgcctgataaaatatattcttaataaaagtcttcatttcataatgaaatcaatttatttggcatcttaatatatttttttagattcatcaacagaccagtttttgtgggcatatatatatacacgtgcaaatatcagaattgttaataatttgttacacatggacatttgttccaaactgactaaaaatcaatatagatattttatatacatatatatatataaaaatacaaaattcagtgtactttaccatattaatactgaggaaaaatctgttggagacataggtctaggatgtgtgaagtttggaaaaatatgctatttaattataatgttccctagactgctgtaaacagaagtgaatcagacttttctccagctacctttcaaaataataaattatttgtctcaaatataccttgatggaggacttttttattcttatggaaatagtgaattccaacaactatgatgaactatgttctttgctatttcttcactatattttttaaggttttattaaaaagccttagaaagttacatattggtttagaggctaaaattgtgttgatgctgtttactcacctaattacatagttttaatcatttgtacataattttaaaaacttactttgtattgattttgaatacagtgaaaatcttattgcaataaactattttagtaaaatattattttgttgagttaatatttttcagctattaatttacttatcccatagcatttttgttattatttcggaagagagagcatgctagtttaagtttcattttaattggtcgtgtacttggtgcttttttgttgttgttaacttgttcatttagtaaaaagcaaatagctttactttctgaaaaagaaataattcattatctctagtaatacatctgtaattcttcatttagaagggtaattagggcaaaagtaaataaatcattatatatcattagtatgttgac

SEQ ID NO: 15408 - DNA, 1290 bp, Homo sapiens
ccatcatgcaacattctctgatggggcggggatctccatggaggggggaggcacacttgttgcgtcgcctcagcaactccaattgcgtgacagaatgtgcttccgcttccgcctctgagccctatgagcgagagttacgctacttagtcgttgtgacgccattcttctgcgacggcgcggacctggagcttccgcgcggtggcttcactctcctgtaaaacgctagagcggcgagttgttacctgcgtcctctgacctgagagcgaaggggaaagcggcgagatgactgaccgctacaccatccatagccagctggagcacctgcagtccaagtacatcggcacgggccacgccgacaccaccaagtgggagtggctggtgaaccaacaccgcgactcgtactgctcctacatgggccacttcgaccttctcaactacttcgccattgcggagaatgagagcaaagcgcgagtccgcttcaacttgatggaaaagatgcttcagccttgtggaccgccagccgacaagcccgaggagaactgagactctgccttaccaccgcagtgcggggcacctctcccagcgtttctccggtttgccaatcctcttaagtattcctgtctccaaaggaccggctctccatggctcctgcgcctcgtgctttccgcgtacagaagtgcttgcccggggagtcccgcctgacctgccttcatgtggacccttagaacagcactgggagaccagcaggactcctgagaactgtgctggtggagaggtcctagagccggcgagcgtttgagaagagggcatggcgctggagtgagatgggatttggcgtctcgtttttggctaattgattgtcattggctttttccataaagtttagaaatcgttcagtctcttggtgtgaactttctgtgttagggtggaaggctccggaaagagctgagcgggaagtgggtttgggtgagggagcgcatgccagtgtccatggccaggcacttagatccgccgtgtctacctttataattaattccccgactgccacttttcccaagagcgttattttcaggcccacaatgccttcagtattgaaatttgtggttattgtatcccatcttctttttctcctgttttaaaactctttgcagtctttgctgtcattgtcctccctagcctctttaaaatgcatccttttttttttcttgggaatttgtggccatgtctccagaaatgacaagctggcaagcgagttcatccattctacattcaacaaatatttgttgagct

SEQ ID NO: 15409 - DNA, 1610 bp, Homo sapiens
tgtgcttcctatctcccagctatccaggacccaactctagagaaagctaaatgagaattttgccagactcctcgtttgctttcactaggactcttctccttcctgcccccattatcctctcatgttttattttcaaattttataaaagataaatgttgttttatggagcaatgtctcaacatcactttactgtgagaagcactttacatatattatcttatttcatttattttatctaatttcccccatttcaattttacttgtttattctttaagtattctgcctctattttgtttttcctactttgtctttatttatatttccattaaaaataatactttcacatccttttgaaattatatttattcctagttcagcctagaatttttgtttttaatccatatttatatttttcataaaagactaatgaatctagcttttttttttccccgctcgctcccctctccaccttagcaccgctcaggctgcactgcgcttgctgcaagcttcaggctcctgctaagctagtgctgcatcgtctcccttcagccgccatcatgattatctaccgcgacctcatcagccacgatgagatgttttccgacatctacaagatctgggagatcatggacgggctgtacctggaggtggaggggaagatggtcagtaggatagaaggtaacattgatgactcgctcattggtggtaatacctccgctgaatgaccctagggcgaaggtacagaaagcacagtaatcactggtgttgatattgtcatgaaccatcacctgcaggaaacaagtttcacaaaagaagcctacaagaagtatatcaaagattacatgaaatcaatcaaagccaaacttgaagaacagagaccagaaacagtaaaaccttttatgacaggggctgcaaaacaaatcaaggacatccttgctaatttcaaaaactaccagttctttaattgtgaaaacatgaatccagatggcatggttgctctattggactaccgtgaagatggtgtgaccccatatatgattttctttaaggatgatttagaaatggaaaaatgttaacaaatttggcaattactttgatctatcacctgtcattgtaactggcttctgcttgtcatccacacaacaccaggacttaagacaaattggggctgatgtcatcttgagctcttcatttattttgaccgtgatttatttggagtggaggcattgtttttaagaaaaacatgttatgtatgttgtcgaaaaataaaatgcatttaaactaaaaaaaaaaactaatgaatccaatttgtatttttattttattttatattttatacctttttatttccttgatcatcagtctaattgttttatcttataatcattacattcatatttaatctgtattttaatttcaatatttgtttttttttaaattttctctctttcttgtataattttacttaaaatttttcttttttcttttttttttgagacagactcttgctctgtcatccaggctggagtgcagtggtgtgatctcagctcactgtaacttccacctcctgggttcaagcaattctcctgcctcagcctctcaagtagct

SEQ ID NO: 15410 - DNA, 1165 bp, Homo sapiens
aacaacgagccaaatggtattttcaagatacctgctagagttgtaaggtgatgtgaaaatggttatgatttttgctggtgacacagtcaaagctaccactaataatgtgttttgtgatctgccatcacaatggaaggaaatgcaaatttctgttagaggtcagtgaaaagatctaattgcttttcctgtccaagttcatggaccccctgcctggtaataacccctgataaagatgatggcttaaaatgagtatttgtttccttaaacctcagcagtggcagcagtgtgccacagagtgtttcaaaagagacaacaattttaaatggaaagtagtcttgggtgaatgccccatatggcaggcactgcactgggtgtagttgacaaaactgatgagctctatgatggcatctggcctcttgagtgtgtagactagtacgagaaccagacatcaaattgcagagcatacaaatagttgtttaactgcttagagggtagacattctgcagtgctgtcatggcaaatcactcggggacttcatagggacctggaatgagtgatagtttgagtggtcagggaaggccttcttgaggaatctattcaagtccatagttcaaggtggtggagggcactggctgaaggcagagctgtgtgcaggctctaagctggcagaacttggcccacagaaagcctgattgaggccggtgattgggagtgaagtgagcagagggctgtggattaaaattggcagaaagatgcagtctgcatttcactcagtagtatttcttatcctgattgaaggggcatggtttacctcttagtttgagggcatgtattatttagtgcattaatggatggatccctaaaagcattaggaattagtctggagtatgtaggttgaaaaataggttataaaattgatgagaacaagctctcttgcaagagttagaaacataaaaacaaatttttctaaagctaaattccttaacatttttcctcactcagatttctatttggcttgaatctaaggaaaacctgagaagagaggaagtgcttggcttctctgtataccaagcagtttcaacagtggtgtttgtagaaatgcataccttgctgttcctaggcagataagtgttgtcacacgtcttcagattttaaggcgacaggc

SEQ ID NO: 15411 - DNA, 1214 bp, Homo sapiens
atcattctttttatgtattatttgtttagtcttttgttagacttttccctctgtggcagctcgtcttttctgcttattttcatacttctcttgtttgtcagaagatagtgtgtgtgttacacgagtagatacttgtgtagaatattctcattttgtgggttttcttgtatgtttcaaagagaagggaggaatgaaaaaaggcatgtcacagctctcagagttaaaatatactcccctcccacaatctatttacacattcacgtgtattttttgcctttaaaaatatttcttctcggttatacatccaataaaatttgagcaggaagcaaaaacgtaagtgctgcttacttggagatataattagcagcattgaaattgccctgatgacctaaaatcaccctacactggatgctaattttctcagatatggttttgtttgcttagtttctttaaaattttcatgcctataaaataatttttcttttagtagagcacagtagaaaaaaagctgatgtaaatgatttgaaaaataatattgaatttaatttgtttttattgttacgtgattactttggggtgttttatatcatgaagtctttagattagaactgggttatttgtgttaatgttaaatcagaagagatttttgtaagtcctccttatttttttcttagtgccaatttctgtaaaatatttagcaattgagggcatggtaaaaagcagtttcctgtaaagtagattgggatatgaacattatagaaaaatgagaaaaatttaaaaatatttagtgctgtaaattgactccttcgtgactcaagcattttagaaaatgttgatttaagtgatataacttctatttgcttgaatgtatatgtaaatcattttagtttaagtggttttagtcaccccccaaactattctgatcatatttcttcagcaaaaatcttttaaacatctagctgtatatagatgtgtattcatttaaaaattatacatatatgccatggtgaaatcatgtattaaatattagtagtgtataattttgttcttactttctactgttgcctttttgtaccacagttgattctttttctctatgtggtatacacaacacgattttggtgactagtcatttacatacagagtgaaactatggctattcttagcctggccttctagggggcttgagctttcagtgtggtgctgatctcaaa

SEQ ID NO: 15412 - DNA, 1193 bp, Homo sapiens
tgtttaagaacaattagtttggctgtgatacaaagaatgaagagagcagtgcacaggctgcttgcaggagttaagatgaggagagcagtgtaatatttgagatgcgctgccatttggagtagattgagagatttatgccttgctacatttaaaagcaaaaagagcctggcaaagggaaagccagaaaaagaaagtaggaataattaatattccaaagagcaaaaaatgagataagattgggaagcaacagagttcagattcaaaagtatgaaagtgtggtaaaatgtaagaatagaaatgtgtttgtttctttaaaagctgaaatttagctaaaaaggatagattcttaaattgaagaatcaagctaaatacttgagactagaaatgcctttgttgtgatgttgttatgtaatgtaatgtaatgtaatgactgtaaacattccttcttctctcctggttagtggatctcttagagttgagtacaacaaatgaaattttcaaacagcacaagttgaaccaaaatgaccagctcctcagtgttccagatgtcatcaactgtctgacaacaacttatgatggacttgagcaaatgcataaggacctggtcaacgttccactctgtgttgatatgtgtctcaattggttgctcaatgtctatgacacgtaagtttatattttttctcattaaaatacgatcactgaatgaaatatgttaatagaaaatgtctgatttttaagtgaattttttaataagtgctttcaaattactttcccagtggaaatatttatgtttgttgttgaaactgaatgattttacaaatcattgagcttcttaacaaacaatagaacagaaaagaatgtacatctttcattttaaaatgttgcttcaatttacaaagactgtcaaatttatagtattctttgccaaaatgctaggggaaacaatatagctaagtcctactttcttcttgtttcataatgtctcacagtatttcttttttcaaaataaaaaatcttctgtttattgttatgaattacagtaatttattagctcataataatctgctctacaatctttgtaatccaactgaagagtgatttgaatggccatgaacgaggtagtcttttaatatttgctttatttgcatagtggttatgtgtgtgtgtatatatatataatatatatatatatg

SEQ ID NO: 15413 - DNA, 1191 bp, Homo sapiens
agaacgtggagaactggagaggatcattgctgacctggaggaagaacaaaggtgtgctaggcctgggagaaggaaatatgtcatcctttcttttgtatgaatttcactgtagcccccatttattctctttttcaagactattgtctaagaaatctcagtggagtgaaaattttagaggctattaacaaactgggatgctggctgcaatacagcagcatttgggggttcattgatgatgtctactgggacacttgcttaaaactacaattttattcctgcatgctcatcctgctattaatacacatttttatataagaggaactagcatgagctaaatttgaacctcacagacgattttggagagacgataatgcacgtggtagtcattctgtttctccctctttctgtattagaaatctacaggtggagtatgagcagctgaaggaccagcacctccgaagggggctccctgtcggttcaccgccagagtcgattatatctccccatcacacgtctgaggattcagaacttatagcagaagcaaaactcctcaggcagcacaaaggtcggctggaggctaggatgcagattttagaagatcacaataaacagctggagtctcagctccaccgcctccgacagctgctggagcaggtagggtgtgtagaattcagcgtcacacctccccaggccatctgtccactgccctgggagatgatggtccaggtgtcaggagaggcagagaagtccactttcaatttcttacctccgtagttaattcagactggcttagaaatttccttttacatgtaagcatataaatcctcattggcacacaaaaatgtgtttgcccagcttacaatggaatttcccagtcttctttaacaatgaagtccgcctcagctctgaactgtttgagagaaaatatcctatgacatatatcttcctaaattatacatgggaagcatctgtattaaggaacagcaagagacctgaaatcggcattctaaagctttcttccagtgagacaagaatgctgactccaagaatcattattttctattctcaagaaattgagttaaagatggttattaatttgctactattatttcctaacactggaccatgttttatgggagttgcttgcaagctttctggatgataagaaatacaatttacattaagatgaat

SEQ ID NO: 15414 - DNA, 1244 bp, Homo sapiens
ctgtctgttttaaaaagagtgtgtaaacctatggtgtacttaataataattcaactcagctatcccttggacactgtggaggtccactcttttctcctggatgtaacttacagatctgttagaactaggcttcttttagcctgatttctcccccaaataccgggcctcacactttccctccagacgttataggaagggtactcttcatgcctgctctttttttctcacatagctcccagcacacagcacatggtcactgatgtcctttctcccactcagcatagaacagtgagagatggaaggagtgcagcatgctagatgactagggacaacttttatttgaccaagaacagattgttgccattactgggggacagatctcctcttttccccccagcattgagaacgagatgatcatgtagcaaaagaggggacgaaaagcagatgccttagagaagagatggcagtggctgcccttgcaaagcccgccagatcgtcttcactgttatgggctctggaaccaaaaaggaattgagctatctgtgtggaaaggagaattagatgccatattctaacttctccgttgttcctaactgggcccatccaagggactattattatcccaagtgtccagaaggacactgaggattaggccagcactttccttgatgcaagtacttggccaccattttcctgggcgttagggtccagggtgtgtcaagggtgggtcaagagaggcagaaaccaaagacttatgccttcagtggtcccttggtcagaattagtactcagcaaagtaagtagaacatgctctgttctgatacataaaccaaatacacagtatgatttaaataggaaatgagattttttgcaagactaagtgctcagtgaatgctttagtgtatgcactaaatcttaaatcacatgggatatgagaaactaaccaggaaaactagccctcattgaagcattaagccaggaaaaaaaaaatgtgtttcttgtttttcctattagcatccatttaacaactgggctattattaccctatgtagagtgatactttccacgcatttgcatgcctgagagttggaaccaacaaagtaacaggactgccattaagtgatttcttttgttttctctttcagcaaatgttcccagcaggccacaggtaagagttaatggcttggttggctctatgttactgatcccaacctagagtaagcagattatccacgactgatttt

SEQ ID NO: 15415 - DNA, 2277 bp, Homo sapiens
tccggccaaccaatgtttcctgacgtacagtgttgcccttttcagcaaatgccaattccaagttccattaaatcagaagctccatggctccttggcccacgatgttgagtgctgactgtgtgttctactgaaagagtaaaacactgactatccaaagagaaatggatattttgtttttataataaccatatattattgttttcttcttccctttctatgcaagtgtaaattaatgaacagagaggtatttggaaatggtaatacatttgtcacggatttgtataatgtatacagcattgggaaagtgggtgggggctttctaatatgataccgtctttttaataactatgacaaagcttacataagaattagaagaccactttacatttttacattccttctgctgttcatattaaccttgcacaattacttcattttttctttgactcttttaccacaatgttttggttatttataatttatcagccatatgtttatcagccatataaccaactagatcccaaatagatccatgtatttgtttccgtgatttggccacattaataaattcataaatttcaatcaaatatcttatatatacacacatatggtttaagctacagccctgtgtatgccgtttaactttatttgacgttgcccacttacttctttgctgaccacttggataaccgtaataaaaatcctataagcctaaatggcatttcttttgggatatttttcctgcattttattccctttttatataagtaggaattaattatttattttatgtcttaatctatttgataaagaagactacattataataatctcaaagatcatattaccaaaggttgcccacttgagcatattttcattttgacacagaaacaaaatttagtacaacctttcctagttcccatgtcttgattttcatcattacatgcacagcagacctttacctattgtgataccagaacacatcattgtctttggttcccttcaaagagaattttattgttgttttgtattttcaagtccttaatagttcttgaaactcctagttgttttcttgttgaaagcagacacacatttagtgcacggcttattttacctttcgggtgaaagatcagatgtttttatacccttcacttgatcaatatatttggaaagaatgtttatcaaaagtctatgtcactgcttctacagaagaatgaaattaatgcttaggtgatggtacctccacctacatctttttgagtgcattcaattatgtattttggtttagcttctgatttaacatttaattgattcagtttaaacatgttacttaattagcaaatgtagaggaaccaaaaaaaggtgaaaataatatgttttgattcaaacctaaagacataaaaacataaagacattttaactttgggttctctttagctgggatctggccagaaggaggcttaaagttagaaattgctattattttagaataggttgggtgggttggggggcaagggtgtctatttgcagcagagatattttgaaaagaagaaaattgttttatataaaaaggaaagccatgaccacctttctacctcagatccatcttcatccattgcattggaaactgctttatgctgctgcagtctgcaaagtctagagcttttatcaggccatgtcatacccaagaaagcacctatttaaagaaaaaacaattccctgagctctcaactccaagttgtagatttggtgtcttccttgttcttactttaaaaagtcatgtgttaattttttttctgcctgtatttgtatgcaaaatgtcctctatctgctattaaagaaaagctacgtaaaacactacattgtaaccttctaagtaataataaataaaaagaaatatattgcagtaacaatgggaagtaagtatgtagttcttttgaaatatgtggtaaagaactaatcacagactatcatctaatctggttacatattgtatttttcatcctgaataaaagtaattttaacacaagatgactttgatattcttcagctggattcactgatagaatgtgagttttgaatgcacatttatgaaaacaagatatagagatagcctgtgtcctgatacatctacattttttcctgcagtttctctcatacacactaatacagtctcctgttgctctcattctctctctctccccatctcttacacatacatataattatatgattctcaatttattttccagatagaaggtttattgatagagaaaa

SEQ ID NO: 15416 - DNA, 1136 bp, Homo sapiens
aatgttcttatttggcttccttttctttgagccttcagagttttaaaggaccctctttgaccctcaggacttattagctcccagttagctgcctggaaaactcatagaaccattccctagatcccatttgtccgagaggctttggtgcttagttaaggtgcattttcttactctaggtttatagagtgatgtaattcaactgaagaaaacacacacatgcttttggtgcttattcttcagttaaaaggaggtatccattgattcttttatatgaaattaaatcaaactgttatttttatagctcttcacatattaaaaagagctttcatgtacatttacgtgtttaatttacccaacaatcttgtgaagttgatataattaatatctttactgttttaaaggtagagaactgaagttcagatatattgaaactttcttaggacatgtagcaagtaaacagtggagcccaggtcccctgactccatatcttacattcttttactaataacatgtcatgctgagattcagaaggcccatgcttataatttaaaaatgagactatttcagtatttctttgtgtttgttttctactattcctttctgagctatgttttagagaaaacaatttgatatgcttcaattttgtaaaatcaaattacatatatataaaaaaacctatctgtattagacaaaaactgtttttatttatttctgtaagatatccattaaataaatattttagtggaaatgaaaattgtggaattctttgatttctgagacttagaacatatggggttttttggttttttctttcaacaaaagatatcaaaatggctaatactatagaatcccatattttatatacatttattacatcttaaaaacaattgtgacagtttccaattgttcaaaacaagtacaaatctgatcctcacattttcttggctgcaaacaaaggattttttaagttttctttctctattattttatagcctctgaaatattactgtgtttagaagtagttgttcttaaatgggtgctatgctaatgaaccaatgagacaaaatgagatagccgcaattgttagagtagtcccagtcattaaacttaaatgtgtttggacctggagaatcatt

SEQ ID NO: 15417 - DNA, 1200 bp, Homo sapiens
caaccaccaacagaattattgttgaagtttggagataatgcttagcacagtatctgaaacataaaaggcatttcataaataatagctcttattgttctactttttcataccattgtgctttcacatatgctattgattccatcctcctacctacatatagcccttttctctttttgccacctatgagaacctttaagatatacctcaggttttaactcctctgtgattttaccttctccgctacagaattggtctttccactgtgatgctgtcatgttcacatttattacagtttgttgcacatcagttatgtaattcatcttccacactaaaacatgtctttctccaaacaggtatgggatctgtctcatagcatgaatgctcctaagaaaatagagaggacttagtaagggtataaatgagtgaatatttcattgcctttagtgagcctttttgcaataactgcctgtattgattatttcctaggtatatcaaggagtgaagaaagatggctttttacaacctcattttttggcagaacaggatatagttatcattacctatgatgtactgcgttcagaattaaattatgtcgatatcccacatagcaatagtgaggatgggcgtcgcctacggaaccagaagcgctatatggctatcccgagccccctggtagctgtggagtggtggaggatctgccttgatgaagctcagatggttgagtgtcccacagtaaaagtgagagtttctgcaaaatcttttgagggctggggaagaagggtgaaaaggaattaggggaccttgagtagtttaatagtttaagcatagttaacctgtagtactgatattggtcaaaagtttgttattaaacactacttgtgcttttctcttgtgctttgaactacataaccctttgaaattagttctgtactctgtgactcattgctctatatgaaatatatatttttcagtaagatgtctgtttatatatgatgcagatcaaagtaaactgtgtttaggaacttctgtaagcatttctgctaactgggagctcatcgtgtagcctctgatagctttgaaccaaagttgactttgacagtcttttaaatcagaggccaaatggtaacagaaaatactactttagaggacagaattttgattcagcctttgaatgtcatatgtctttattctgttgtcttt

SEQ ID NO: 15418 - DNA, 1230 bp, Homo sapiens
cttgaatttttataaaatgtttaaccaaatgtacctttgcattctttaattaaaattgcttaaaaaaaaactttcattatttcagtaaaatgctcagctcccttttcaaaatgccctttatttgctaactgttccaatacactcaggtgatgagccaattaaatgttagtgcacatgctatcgcatggaaaattacaagcatctgttgtcaataattatataagagtttagtctgatgacctacaaaatattttgtgtagaaatatactataaatctgtacatatcctttcaaggttttaaaaaaccaaaaagaaaggaaaatatgtacactgtgataactaaattatttctgtattggaatataatacaatttgagaccagcaatggacaatgaatgattgtttcatagaatagcattacgggcaggaaagaaaccacctagtagatctagaagtaagcaatctcagaatacagactaatctgagattattattgattgttgttaaagcaacccagcaaaagcaaaatggaagcattaaaattaatgttaatgaaatttaaatattgtcttctataaaaaattcctttaaatgattttgttttttcattaagagataatcagagcacaaattgatagtaaacaggatggttgtttttctattctatatgatcattaaaggaatatgtaggacatcttaactttttcatacagtctgttatgcatattttcctctacttttcattaataaagcttttatgtttacattttataacatgcactactagatgcaaaagtttacatcaaagtttactttaaatatcatttggtagggactaaatgtgtgtgatagagataattgatcaagccaaaagaaatattttttaaataagcccttttcaaaagtttttgaatttatagaaagcaccaatgaataacatatttctgtttcgttaatgtcagctgcctgaacattcagcagtttataaattgcttaatttgtgttatctattatccagtaaacccatagttccatgatatgtcacaggaattgttaggtcctattttaaaggtacagttttgtgaatgtcatcaataaaatcaacagttatggatttgaagaagttgggaaagcattatgtagattaatatactggttggttccctatctatgtggaaggtcatattagctgcaattatttaatttgctgtgttattttgtgttatataa

SEQ ID NO: 15419 - DNA, 1129 bp, Homo sapiens
acgcctgtaatcccagcactttggggggccgaggcaggaggattgcatgaggtcaggagttccagaccatcctggccaacatggtgaaaccccgtctctactaaaaatacaaaaattagccaggcgtgatggcgcatacctgtaatctcagctacttgggaggctgagacaggagaatcgcttgaacccaggaggcggaggttgcagtgagccaagatcatgccactgtactccagcttggactacagagcaagactgtctcaaaaaaaaaaatgcagatttctgtcttctttttgaacattggaagattcagcaggatggacattgcacttgccaattggcagcaaccaactggaggaactgtgtactggccgccccctttattagggacactcaatatcctgttgtgggtgtctcacccgcctccctgccccctttgttttcctagagccgaccactgtactcatctgtgggcccaagtggcatttgtggtgctgagtttatgttttcattattatttgctttctcttttcctcttacacaagagacttcccaatggcagtaacttcacttgtattagtagttcacagaatgaaaggtacttcagtgatcgtctagtgaagtctgtcttcttcatttaatattacaggtctcaccttcgagtgagtctttaataaatgtcgacaaatggcacacgagtctatttctaggaagtcagcagatgggtagaaaaagccagtggtaaatagcctataacaatttccctggctgtattaagtagtattgatgctgggtcaaactagttaggaggattttcagttctcccatgaaagcaaggctctctggtaatctgatttgtttttcttttctaggaaccctcttcataaatcaaactcagaagacagctctgtaggtcagtaccacttttcttggtttacctatttaattatttcaatactttatagaaaacacgaatatgtgaaaatacaaaacccacaagaatccttctactcagaaataaacactgttaagattttgatgtacatccttattctcctttttctaggcagttttaaaaaaatataattgtgatcatattctgcatactgttttatagtttttaacttga

SEQ ID NO: 15420 - DNA, 1249 bp, Homo sapiens
gacacatggagcgtttctatcatattctttcttaatttatccagattccaagtggtggactcacggaaatctgccgaaagcccgtctctcctgggtgcatttcgtctgtgtcagattggctcatttccatcggtctgcccatgtacgccggcaccctctccaccgcgggcttcagcacactgagccaagtgccttctctgtctcacacttgccttcaggaggccggcatcacagaggagagacacataagaaagctcctatctgcagccagactcttcaaactgccgccaggccctgaggccatgtagccaggcccggaatgggcctctctggacaagagccaccctttcactgtgcatatgatgctgatgcaattcctccatcatctctggacgtgcagaccagatccagaagaaaggcctggcgtgtggccaaacagcgtgaaaccttggcacaggactgaggatcctctcctccagaaaagccccctcgaggaaataaattagtgcggttctctttgacccccaaagacaagacaagcacttatttttattttcagaagacaaaagaaccaagatgccaactggctgcgaatgctctatctccagtctgtctctgtgtactggtagaggctgggaggagtagggggcagcctgttccatttctgatagtgcccttgctcttctgtctgtcatcttgcaggatgcccgagggccagatgggcttagctaggccaaagtaacagactcaagagttattgtacattactgaccacgctcatttgttcaaaagttagaacatctggctgcaccaggaaaaaaaaaaaaaaaaagtcctgttcttctttagataaacaagagacattttcataattgctttctagcaatcagcttttatttgccttaatataagcttttaagcagttatctaactagtgtccacaaccctgtaaccatacttccacatcttcagcttaggcagacatcgaacctctctgggatgtttccagcaaaagtgagcttttctaatcgtctcattgtaacatggcttattttgtagaggtattcatcagccacacacttcatgttggtttttggtttttaagctaactacaaatctagtaaaaagctatctgaaattcacaaatatcatgtgtgtgcgtgcgtgcgtgcgcgtgtgtgtctgtattcatagtgactgcttttggttttaaccagtttagtatcgttactgtgtggatcgtcgcgct

SEQ ID NO: 15421 - DNA, 1486 bp, Homo sapiens
ttctttttttatttagataattcttttaatttaaacaaaggttcactatggaaccagacaaatctcattagccatgtgttaagtatttgctactttaaattgttttacaactgatttcagcacattctatccttttttttttttgaaatggagtttcgctcttgtcacccaggctggagtgcaatggcacgatcttggctcactgcaacctcagtctcccaggttcaagtgattctcctgccttagcctcccgagtagctgggattataggcacccaccaccacgcccagctaatttttgtattattagtagagacagggtttcaccatgttggccaggctggtctcaaactcaactcctgacctcaggtggtccacccgcctcagcctcccaaagtgctgggattacaggtgtgagccaccgcacctggcctctgtcctcttttagtctagtgtctggttttctagcaaacagtaaatttaaacaagtaaactattatggtttccattgcttacaaaatgattttcctttacattcttatcatgaacactattttaagcatcaaatgcaatcatctaaaatataaaggtcaatcatttataatagaaacaccttgaccacaagcccttgattgaacattttataatatttcatctacttattaaaacaaataatttcccttgggttggaggggaagtgatttcataaattaattagaaagccatctttagcatattgcttatgtctggatccatgtttctgaggaaaaagacattctcaggtgatgtatttttttcatgcattagtatgcatttttaaaaaataatgcatgtttctttaataattaattttcatcttctataagatgccatgtgaagaagttgtggaaatgtagaataaaaagctaaagctgccaaatttctgttgaactcttaaaaacagctcatgtttgtttgtcctctcgggttgtggcctagcctatttgcaatgtaatgaagctgcagggttcttgtatagctaaagcgttcaatgcatttcacgtgctgtggtggatgtgggtgctgtagacaggcttcttctcttcctgctctcaaaatacctcggcttgacatttggacagatcctgtcattgtttaagctgagcaaaaaaccacacaaaagttgtgtaagagatgagataacaaaggagcgagagaaatctcatgtgaatttccaagttttaattcgttctccatgaaggattttcatttcagtgaaagtcgcagcagaagagggaactttctggagtttttgagaatgccaaaccacatttttatcacacttctttggaaatcaatgcctttgcatagaaaatcaaattcagggaccacaaagaattttcagtgggaatgtctagtctgaggggtctgaggttgtttttactttattgtgttgtttaaatattttaaaaatatctttagcgtttggtcttttttttttctgtaaa

SEQ ID NO: 15422 - DNA, 1140 bp, Homo sapiens
agtataattcaagatgagatttgggtgaggacacagccaaaccatatcatcgttcaactagaaaatatatatatatacacacacacacacttagtgaaagttattttattaattagccaggataaaccttatttaaactatttagatatgagtcactttgaggaaaggttattatatgaaaatatcactgaaataatcagaaatttctttaaaaaatgctgttatgctataattcatttcataaagttctgcttacattcataaacttgagccgtttgtacagatcacttattatcctcatataataattttctgacacatccaatctgcgtggctgtgataaaaaatgatccaaaatgttgacctataacgtgtcttaagagctcttaaaaaaaagataaaatccttgaatgatgccaggcatctagaataaaattgtcaagagaaactcaactaattttgagatcaaattttaagatcaaatcttactcctttattacaaatgttcagtaacgatctcatcaacatgatgtctgtagcaaattatttttacttaagggctcagctctgacatttgaagtgaatggttgtgagtgccagtttagttcaggaaaatgctgtggttaagggctggcccattttcacatggaataatattattcaggtcttgttttgtggtatttatgttgtaaataatacatccagagtccatgtagctacctatgcctgcccgtgaatgatacctacttagcgttgtcttagatccagtggcaataacgtttaaatgctgaaggaaatatcttttggtttgctgagagttttaattagggttcactttgctgctaagacagcagcatttaagctactaggttcttggcacaatattgtttccatatttctttttctttccagaaggcttaattatttcttcacctgaattttaacaaccattttagctgaatgatctagaaactgtcctcctcaatgtgtgttctgagtcagcagcatcagcatcacctgtgaactgttagaaatgcagaatctcaggcccaccccaaccccactgaatttcttagaagctgcatccaatggaagcatctatatgaaccacacttttgagtagcaaggatctagagttct

SEQ ID NO: 15423 - DNA, 2478 bp, Homo sapiens
tcatgttgtatttcccagagggagaagtgccaactagatagaggttggtagtgatcgagcatgtgtgtcagtgtcagctagatgccccatttggggagcaagctgcatcaggctgtgcactacaaatggtgtttaaagttgcctgtaattttttagactttgtgattttttacttataaaataatttttttctttcttacagatcaaaggtccatcatcaaaacaccaaagactcaagacacagaagatgatgagggagctcagtggaattgtaccgcctgtacttttttgaaccatccagccttaattcgctgtgaacagtgtgagatgccaaggcatttctgagccaaatggccctgtatcttctctaaaaccacatctaaagttcaagaaactagtctgtcatcgggaaaaagtttcactgctacataggattttgtcaaattgaaggtgtgacaagatggtgttctgctaatgttaaatgtcagcccacagagctaataatacctcagtataatgtcatgagcagttgaaattcatcacatgaaaagtaatctgctgaaagacttggttgcccactgcctaactgtgtacagtgttaccagtgtcccattatggataattctcaatatgttaacacctaggtgttcccaatacctttttcccctcatgtcactactgaattttgacaggaggaaggaatagaatgatagcttgttttatttgtaaagctttcagtgaaacactacatacacgaagaaaaggaacaaggtttaactatttaagaaccatttgctgccgcatagtgccattggatagggaagaacttcagaaatctgtggtactcttggccttgtctttgtcttccctgaacgtgtctccactctgtgaagccagcatctaggggctaaagatgcaaaggaaagcagcatgcattgtctgtacaaatgtgcagcgaaataccccaaagcttttcctactgtacagatctctcgagtctgctttaagtgatttcttttcttcttgattattttcttatatttctatatgtatagtgtaatagccttttgttaactaattttcttttttccttttagtaattaagcacgatcatgtccctttttaagccttacctgagaggaacaatgccttaaaataaaaaagcattaatgagatgaaagtatgcacagaataactttcctctacttattctgtactttgccctcatgagttccaatgttgtgtgaagacaggcagatgctgcacagtgaattgcagatgatattacagaagtgatgtctgtaggtcacattaaatactgacttgagcagtgggtgacacaacacagtgtttgtcttccacagggaagcttaaaacaaaagatatttttaacccactgacagaacaacaaggttaagcttcatctgcttggtgtcccacagaacttgcacaagcagttgttattgggaaagtacagtctcaaaaccagcaacagcagcagtacctacagccctttttttggagagaagtttaaatgctttactgttggggcagtccatttctaatcctgacttggtgacagtatcatgtgtatttataaaacaaggctagccatatttaggacaactgaagaaaagctggaaaaaaaaacaagcaaacttgaacactgaagcaacctcaagcatctctttattttgatgatatatttttgtaaggaaaatattcagatgatcaggaatgtatataactgaaatcaagaaaaagaacagtatgcatttaaaaagacagaattatgaaattatatgagtgcttagaatggggctaagggaagtgctgaaatagagcaaaggatggaagataatatagactaccacccactgtaaatgtttgcaagtggctgtgttttaaatgggattattacagttgatctctatgaatgtcagagccctaactttcaggctttgcattttgtatatgggaagaaatatgacaatcctaggtaattaaaccatagacccaaagcccttacgtttgatgcaatttatttttaaaataggccttgtttttcagcttcatctgcagttctatgtgaagattgataaatcagtttttacttgttttattaataaaacgtaatttggatatcttgagttgatggttttgtgatttagctgggtaaactatctttgtaacagataagttatttataaaaattaaaaaacttatattctaatgtggattttgtgacttgttttcagtttgtgggacaggagataatttatacatcagcagatcatttaagcattaatggaaatcagggaaaacttcttctctagagtctccttgtgacattgtgatactcagctgcatttcttggactgtttttatcaatttccctagacttcttttttcatagtttatgatagttttcccttttatttcctttggatttttcaaaatttaccgcattgttaaaga

SEQ ID NO: 15424 - DNA, 1147 bp, Homo sapiens
gggaagaggcggtgctgagaggcgcgtactgtgcttgctttttgcagtacctgctgcggccgctttcggcatggaggaaatttatgcgaagtttgtgtcccagaaaatcagcaaaacccgctggcgaccgctgcctccgggaagtttacagaccgcggagacgttcgctacaggatcttgggacaatgaggtatcgccgctgatagggacgagcccctacctcctccctctctccggttgagctgacccctggccttccgcgcgccaactcccaccttctggttcttctcgcacttttaggtcccccggacccctgtctcaggcgcggttgctccgtagctcagagccggtgatggcatgcctgagcctcgtatctcgttgtgttttaaactcaccataccatttgagatgttttggagcaacatttccggacgggagcacaacttttattttccgagagttgacgtttatgtcatctcaagacaaaactttctgttttacaggaaaattatatttcactgtggtctattggagattttggaaacttggactctgatggagggtttgaaggagaccatcagttattgtgtgatatcagacaccatggtgatgtaatggatttacaggtaaatctgtgtagcatccaaaagctaactttgaaagtcctgagtaatacatttaaacaagcagagcatcataaaagttgtctggtgtcacccctcgtttacagaaaactgagtgctctgtaagttatgatttgcccaacatcatttagccatttagtggcagaaaaaggactgggaaaggggatgtagatttaatcatacttttttattaattgactgtcgactatgtgctaaataccgtttggggagctttacaaaaattaattattgttgcatgccagtgaatcaagtatcgttactttgttttactaatgagaaaattgagactaatatatcttgagcatgtactatgtgacagatactgtgcagggggataacatcattttgttttttgaattctcataacaactccctaagtagagattagtgctcccgttttaaagatttaccacgatttagtgaacttaacttggccaaagtctcaaaaccagtaatgagtggtggggatgaaattgagtttt

SEQ ID NO: 15425 - DNA, 1991 bp, Homo sapiens
ttaattgggccagaagattctgcaaatcccaaatctttctttattatttattgtaaaaaaagtttccttagaagtcataaaatattttgaaatttagagaggaattcatgattaaagattcctaaaaatataattctgatttatgtaagctgtccctgaaaatagaaatgtgtacttagctgagagaaaattcagcatctcaggaggtggtattaggatgactgtgttaacccattaccttttagaagccaactgttggccccttaccatgctggactgctataggcccagcttccccttgttctgtggcccttttcttcctccttgaagctcccagtattctttttcttttcccctctaaacctgtttctgagagtggatctcaagcaagttcatgccttcaatcagatgttacttagggtgggtatacctaaattataaaccttatgtacaagtcagtaagccttagggaaggtgagtgtgggtccttcctaatccctctgacgtcatgtcatataggtggctgcctccttagactgacctttgggagaaaaaaaccccagactttgaattagtaacagctctaagatggtcatgcagtgagataggaaatcaagatggaagcagagaatctggcatgccaaaaactaacagaaacttagttgaaggcaaagagagcaaggagaacgtttaatacttcattacatcaaatcaacactgctccatggtgagagcacagcaactcatttatatatatatatataggctttgttgatgaaaaacgacaattgaagagaggacgttgagtggattcctgggtacagcttttgtaaaaatgtcaccatggctttcatccaatggaatgagtcgatgttttttaatgctataaaatgttagaatgtgccatcagctaatgccaggcttacgtatttctagaccataaagcagtttttcacaaattcatctttacagaaaaccagcatctagcttagcatctttccccttttaatttgtaggcttttaaaggcaaatcattcccaccatcacttaacgccgggattatacacattctagaaatgattctgagaggagtgtatagtatggtgcctatctacactcacatgatattcttattcacgttttttttaaccataagtggcaaatattttaaaatatttgaaaaacactccagaatctagtacgctttatttttagactgaacctaaagtaggttgttcttttaacaaagggtttaattcgggtggggaatataacatatcaaaatacatgaacaaatggaaagttacttctagaaaagcaaagaaattgggtatcatttttgtttcttgggaagctaattttgttgaatgtttagaattgagcaaagatgtaaatttttgaagggcagtttagaaaaattaactttgtgaatgaacttaagatgtctgtactctatatgtgatgctgtgcagtttgtttttatatggaaagatgtcaactatagccataaccaataaaataaaaactgatgaggcatgcagctttcagcacatcttttatacatgaagaaattaattttgtgttgctatggtgttgaaatatccaagatgttctgtatctatgtaaacatgattcctttaataaattgtattttattattaagcctttttttccttttaatataatcataagttgctattattgactgagctgttactgcattatttggattcaatcataccaaccctattttacaacgggggaaattgagtattagagaaagtgacatgcccagggccacataaagcatactcgagggaaggagaatcaaggtctacaaaatatttatatcaggtagactgaatgtgacttttaaaagtgatcttcttacctgtagattatctgattgaaggagttctgcatctaagacaatggaaacataattttaaagggaaaggtgtccacaatttctctcttaaacatgttcttgt

SEQ ID NO: 15426 - DNA, 1201 bp, Homo sapiens
attcgagctgtctgcacagccacccagttggtagttaacacgatcaaagagattgctgtgactgtgaagaaggcagataaagtggagtagaggaagctgctggagtagtgtgccaggaccactctgagctccaactgatctcacagcagaaagctttctttgctaagatggtggtggatgcagtgatgacgtgtgatgatttgctgcagcttaaaatgattggaatcaagaaggtacaggatggagcccagctggtgttgcatttaagaagactttctcttatgctgggtttaaaatgcaaccctcccaaaaataccaaaatccctagattgcccttttgaatgttgagctcgagttgaaagctgagaaagataatgcttagataaaagtccacacggttgaggattatcaggcgattgttgatgccgagtggaacattctctatgacaagttagagaggatctatcattttggagccaaagttgtcttgtctgaactccccactggagatgtggccgcccagtactttgctgacaggaacatgttctgtgctggccaagtacctgaggagaatctgaagaggacaatgatggcctgtggaggctcaatccagaccagtacgaatgctttcttagcagatgtgctgggtcgacgccaggtgtttgaagagaccctgattaaaggtgagaggtacaacttttttactggctgcctcaaagccaagacaggcaccttcatcctccatggtggtagtgagcagtttattgaggagacagagcggtccctgtgtgatgccatcatgatcatcaggagggccatcgggaatgagtcagtggtggctggtggcagggccattgagagggagttctccaagtacctccaggattcctcaaagactattccaggaaaacaacagctgttgattggggcatatgccaaggccttggagattgtctcattccagctgtacaataatgctggctttggggccacagagattctcaacaagctgcaggcatggcattcccaggggcacgtgatatgaggtggacatcaacaacgaggacattgctgacaactttgaggccttcgtgtgggagccagctttggtatggatcaatgccctggcagtggcctcttaggctgtgtgcctgattgtgtctgtggatgaaaccatcaagaatccgattgactgtggatg

SEQ ID NO: 15427 - DNA, 1145 bp, Homo sapiens
ttgtggaaagaaattcagcaacaggaattggaaccaaaagggtttgaatagagaatttttgttgattacaacaccccactcctagttcctagtcattgtaggttggtgctgagaaagttcaagttttaaaagggttttttgttgttgttgagacattcttgctctgttgcccaggctggagtgcagtggcgtgatcttggctcactgcaacctctgcctcccaggttcaagtgattttcctgcctcagccttctaagtagctgggattataggcatgtgccatgacgcctggctaattttctatatttttagtggaggcggggttttaccatgttggccaggctgatcttgaactcgtgacctgaagtgatccgcctgcctcagcctcccaaagtgctggaattataggcatgagccaccacacccagcctaaaagggtctttttttcttaagataaagttcttaaaggaaggatctgaagttttgagtataatattgaattttcatttggttagtaggtgtcaacctagatggaaagaagattttggtagtgggggcccatgggtctttggaagctgctctacaatgcctgttccagagaaaagggtccatgacaatgagcatccagtggaaaacacgccagcttcaaagcaaggtaaatttcatgttagaaacatacatcttgaaggcttctgttagaacagaagaaagtctagaaatgtataagctaagtgcttaattcaagaaattagaggaagaaaattgaatagacccatatccattaaagacattgaatgagtctactcaccagacaaacaaacaagaaaaggcaacaggtggttttacaaatgagctctatcaaacaaagaacagatcattctaatacaatccttttctccagcaaatggaaaaagaaggaacgtggcctaacagactttatgagtgccaaaaccaaagaagggtaacatgctaaaggaaaattaacaggccagtttcagctatgaatataaatgaaataatcgtgagcgaaatctgagaacaccaaatacagcaggaagtagggtttattttaggatttccaggtgattgaacatgagaaagtctgtcactgtaattcaccacattgtgattaaaaactaaattct

SEQ ID NO: 15428 - DNA, 1195 bp, Homo sapiens
gtccagcctcctcctttaaatgtgggcattatcactaggccaccctgtgaacgatatttgtgtcttggggtatttggtctttctgtgcttcatctaaaagtatacagaaatacccagttctttctgtttgtttatttggtttggtttcattttagcaaatgtgttctcacaatgttattaaggaagtgaaatttatatatagtgagttactatctccttggcttttttttttttttttttttttaattctacccagcatttttgtctgaaacaaactgtgaatgatcaaagggatatgttatggaattttcttgataacacccttaacgacttgaaatatttgagtcactttagagaggactttttttttccatgctttaagtctgatttatttaaacacgatgtgaccacttttgatgtttaaaatgtattcagtgttagggagcgaagttctgtataaatggtgagtctttctttgaaaacatagctaaatggatacagatgcaaaaccacaaacattttcttcactaggaccgacacccgcgctgagattgacttggtgtgtgagcttgcaaagcgggctggtgcctttgatgcagtcccctgctatcactggtccgttggtggaaaaggatcggtggacttggctcgggctgtgagagaggctgcgagtaaaagaagccgattccagttcctgtatgatgttcaggtaagatctagtaaaaacaatggctcacatttcttacaccttagcatgggttgtcccattctgttgtcaccacaaccctacagataagaaaactaaagatagaagagtttaggcccggtgcagtggctcacgcctgtaatcccaacactttgggaggctagggcgggcagatcacttgaggtcaggagttcgagaccagcctggccaacatagagaaaccccatctctactaaaaatacaaaaattaggtgggcatggtggcgtgcacctatagtcccagctactcgggaggctgaggtgggagaattgcttgaacccaggaggtggaggctgcagtgagccaagatcgagatcacaccactgcactccagcctgggcgacagagtgagaccctgtctcaaacaaacaaacaaaaaggtagaagagtttaagccatatgacaaagtcacatttccaagtacagaccctagctccttgtcccaaagc

SEQ ID NO: 15429 - DNA, 1215 bp, Homo sapiens
gtctggctctgtcacccaggctggtgtacagtggtgcaatctcagctcactgcagcttcgacctcctacgtccaagcaattatcgtgcctcagcctcctgtgtagctgggattccaggtgtgcgccaccacacccagctaatttttgtatttttagtagagaccaggcttcaccacgttggccaggctggtctcgaactcctggcctcaagtgatccacccgccttggcctcccaaagtgctgggattacaggtgtgagccactgtggccagctaatcacttttttaaatcacaatttgtgttacgttcatgagtaatgggtgccagaaataatgttgtgtgttaaacataaatgtagatgggtaaccatgtatacaaatgcatatctcctcaacccagagagtgaaatttccccaccccagtgaccctgcctcgctgtatggttcattcttctccaggaattgaaacatggtggcagcctgccagcttggcgttaccattaattcttattctcttcccctgccgatgtcatggggacaccagccaaatgaactctgatgtgtctcacgtaatgcatgtggacttctggtgcatgtaaacagagggtggttattcttgattgcacatttgtgatttttagtgaggctctaagggagaagcaagaggacttgaataacagatttattctcgggcactggtacatgaaagagatgagtaatgccaaacaaataacacaattctgattcacgccattggtaatggaggagacttctgggtaaacaaaccaaagtaacagctagaatgcagatctgatcacagcagtgtgttttgattcagtctaaagatgacaaagaaaagtttctgctggtcctatctgtagcaacaagggcctgcccgcctgaccacactgcagtggaacagccacattgtgattttgcgggcctgaagcctttcgtctggtgaccctttaagaggaacttgagccaagatcttatcagtgatggagatggagacacctcaggattttccagtatcgtttttcactttttgttcttggacatagttaataacgctgccaggtctttcaaatgctgaggcatttcctcatagctccaagtagctgctgcgggtcagattctgcttgaaccgagggttcaattacaacatccgtatgctttccagcccactctctgacctttgttctttttttcagta

SEQ ID NO: 15430 - DNA, 1204 bp, Homo sapiens
gttgcagtgagccgagatctcgccactacactccagcctgggcgacaaagtgagactctgtctcaaaaaattaaaaaaaaatttttttaaatcctaaatattctcattccacaggatcctgcaaactgtagatcccaaacttggaagttctgggaattctgccagtatccccaagtaaatctcttgggaagtttagaatgctgcatggcgtagctgtgcctgctcttatagagtggtgcagactctgcttctccacgtctgctaagtaaaatattccaaacacagatcagccttatctagcgaaccatcactctgctcttgaattttcttttggcctcaaactctagagctataacatgttaacggtttaacaccagaggagaaagctattcttaaactactcaaacatggtttttttttctatttttcagactcctgaaacagactactctttgcctttttgctgcagttggagaagaaactgaatttgaaaaatgtctgttatgcaatgctggagacatggtgaaataggccaaagatttcttcttcgttcaagatgaattctgttcacagtggagtatggtgttcggcaaaaggacctccaccaagactgaaagaaactaatttatttctgtttctgtggagtttccattatttctactgcttacactttagaatgtttattttatggggactaagggattaggagtgtgaactaaaaggtaacattttccactctcaagttttctactttgtctttgaactgaaaataaacatggatctagaaaaccaaccagcaagttttcagtgccagataaaactctgcgctctagaggtaactcctcatgggaggcagctaggagtgttacctgacaccagtttcctagaaaactgtgacaagcaaagcaataacacacgtcgagaaatatctgatcaagcgggaaatcttctgactgtcggggatctctagtaagatctcttggaatgaagtgcactgtgtatccaaaactattttccagcgccagtgaagttgctcttacctaaaacaaatgggtttatgctagtttccaccaaggaatgagtctcgatggccattaaactttctaaggcccacagggctaggaaaagtcgctcttaaaggtcaggtgtttggaaaatgtttttccttttgcccaacccttaattagtagtagagaatgttctg

SEQ ID NO: 15431 - DNA, 1772 bp, Homo sapiens
attcaaaaagatggtgacgcccaagaagcgtgttagacggccttcggaaagtgataaagaagatgagctggacaaggtcaagagcgctaccttgtcttccaccgagagcacagcctctgaaatgcaagaagaaatgaaagggagcgtggaagagccaaagccggaagaaccaaagcgcaaggtggatacctcagtatcttgggaagctttaatttgtgtgggatcatccaagaaaagagcaaggagagggtcctcttctgatgaggaagggggaccaaaagcaatgggaggagaccaccagaaagctgatgaggccggaaaagacaaagagacggggacagacgggatccttgctggttcccaagaacatgatccagggcagggaagttcctccccggagcaagctggaagccctaccgaaggggagggcgtttccacctgggagtcatttaaaaggttagtcacgccaagaaaaaaatcaaagtccaagctggaagagaaaagcgaagactccatagctgggtctggtgtagaacattccactccagacactgaacccggtaaagaagaatcctgggtctcaatcaagaagtttattcctggacgaaggaagaaaaggccagatgggaaacaagaacaagcccctgttgaagacgcagggccaacaggggccaacgaagatgactctgatgtcccggccgtggtccctctgtctgagtatgatgctgtagaaagggagaaaatggaggcacagcaagcccaaaaaagcgcagagcagcccgagcagaaggcagccactgaggtgtccaaggagctcagcgagagtcaggttcatatgatggcagcagctgtcgctgacgggacgagggcagctaccattattgaagaaaggtctccttcttggatatctgcttcagtgacagaacctcttgaacaagtagaagctgaagccgcactgttaactgaggaggtattggaaagagaagtaattgcagaagaagaaccccccacggttactgaacctctgccagagaacagagaggcccggggcgacacggtcgttagtgaggcggaattgacccccgaagctgtgacagctgcagaaactgcagggccattgggtgccgaagaaggaaccgaagcatctgctgctgaagagaccacagaaatggtgtcagcagtctcccagttaaccgactccccagacaccacagaggaggccactccggtgcaggaggtggaaggtggcgtacctgacatagaagagcaagagaggcggactcaagaggtcctccaggcagtggcagaaaaagtgaaagaggaatcccagctgcctggcaccggtgggccagaagatgtgcttcagcctgtgcagagagcagaggcagaaagaccagaagagcaggctgaagcgtcgggtctgaagaaagagacggatgtagtgttgaaagtagatgctcaggaggcaaaaactgagccttttacacaagggaaggtggtggggcagaccaccccagaaagctttgaaaaagctcctcaagtcacagagagcatagagtccagtgagcttgtaaccacttgtcaagccgaaaccttagctggggtaaaatcacaggagatggtgatggaacaggctatcccccctgactcggtggaaacccctacagacagtgagactgatggaagcacccccgtagccgactttgacgcaccaggcacaacccagaaagacgagattgtggaaatccatgaggagaatgaggtcgcatctg

SEQ ID NO: 15432 - DNA, 1038 bp, Homo sapiens
tctaacagcggctgcagaggaggaaaaggtcttaggagaaactgccaacattttagaaacaggtgaaacgttggagcctgcaggtgcacatttagttctggaagagaaatcctctgaaaaaaatgaagactttgccgctcatccaggggaagatgctgtgcccacagggcccgactgtcaggcaaaatcgacaccagtgatagtatctgctactaccaagaaaggcttaagttccgacctggaaggagagaaaaccacatcactgaagtggaagtcagatgaagtcgatgagcaggttgcttgccaggaggtcaaagtgagtgtagcaattgaggatttagagcctgaaaatgggattttggaacttgagaccaaaagcagtaaacttgtccaaaacatcatccagacagccgttgaccagtttgtacgtacagaagaaacagccaccgaaatgttgacgtctgagttacagacacaagctcacgtgataaaagctgacagccaggacgctggacaggaaacggagaaagaaggagaggaacctcaggcctctgcacaggatgaaacaccaattacttcagccaaagaggagtcagagtcaaccgcagtgggacaagcacattctgatatttccaaagacatgagtgaagcctcagaaaagaccatgactgttgaggtagaaggttccactgtaaatgatcagcagctggaagaggtcgtcctcccatctgaggaagagggaggtggagctggaacaaagtctgtgccagaagatgatggtcatgccttgttagcagaaagaatagagaagtcactagttgaaccgaaagaagatgaaaaaggtgatgatgttgatgaccctgaaaaccagaactcagccctggctgatactgatgcctcaggaggcttaaccaaagagtccccagatacaaatggaccaaaacaaaaagagaaggaggatgcccaggaagtagaattgcaggaaggaaaagtgcacagtgaatcagataaagcgatcacaccccaagcacaggagga

SEQ ID NO: 15433 - DNA, 2043 bp, Homo sapiens
tttcccccaggatggtcttgaactcctgacctcaagtgatctgcccgcctcggcctcctaaagtgctgggattacaggcatgagccaccgcacccagccctatctttgttttttgtttgtttgtttgtttttgagacagaatctcgctctgtcgccaggctggagtgcagtggcacaatctcagcttactgcaacctccacctcctgggttcaagcgattctcctgcctcagcctcccgaatagcagggactataggtgcatgccaccatgcccagcttatttttgtatttttagtggagacagggtttcaacatgttggccaggatggtctcgatctctttacctcatgatctgccctcctcagcttcacaaagtgctgggattacaggcatgaggcaccgcgcccggccccatctttgtttttttaatggagttaaactatggtattattaggtcactttgacaactatcctgttgttaataaatgagagagaaaaaggagattttatttacgctgattcttcctcctcctacagttaaactcattgtctgtttggaagaccagaatgtgaagacaagtagtagaagaaaatgaatgctgctgctgagactgaagaccagtatttcagaactttgagaattggagagcaggcacatcaactgatctcatttctagagagcccctgacaatcctgaggcttcatcaggagctagagccatttaacatttcctctttccaagaccaacctacaattttcccttgataaccatataaattctgatttaaggtcctaaattcttaacctggaactggagttggcaatacctagttctgcttctgaaactggagtatcattctttacatatttatatgtatgttttaagtagtcctcctgtatctattgtatatttttttcttaatgtttaaggaaatgtgcaggatactacatgctttttgtatcacacagtatatgatggggcatgtgccatagtgcaggcttggggagctttaagcctcagttatataacccacgaaaaacagagcctcctagatgtaacattcctgatcaaggtacaattctttaaaattcactaatgattgaggtccatatttagtggtactctgaaattggtcactttcctattacacggagtgtgctaaaactaaaaagcattttgaaacatacagaatgttctattgtcattgggaaatttttctttctaacccagtggaggttagaaagaagttatattctggtagcaaattaactttacatcctttttcctacttgttatggttgtttggaccgataagtgtgcttaatcctgaggcaaagtagtgaatatgttttatatgttatgaagaaaagaattgttgtaagtttttgattctactcttatatgctggactgcattcacacatggcatgaaataagtcaggttctttacaaatggtattttgatagatactggattgtgtttgtgccatatttgtgccattcttttaagaacaatgttgcaacacattcatttggataagttgtgatttgacgactgatttaaataaaatatttgcttcacttagatttgctggttttattagataccaggaagcctgggacatatgtgtaccacattagaattctaaagataatgattgataagctagaactttctgatgtagtcattacatgaaaccccttgtcactggtttgtgtgttcagaggaagccatggccgagatagctttcctgaaataaaccagtagcttttcagattgacgttcttgctacaattgtaccatctggtaattcctgaaaatgtcaatttttttgtgttaatatttttggtttcaaacaataacaaatgtctctagaaagaaattttaagaaagcttaattaatagtaaaaatgcctttcctgaaataatcttggaaaattttttaaatgtcaaaatgatgagtcatgctaatacattgagggtttgtttttttgtttgtttgtttgtttgtttttgagacagagtttcgctcttgttgccca

SEQ ID NO: 15434 - DNA, 1695 bp, Homo sapiens
tacatgattttaattggttaattgaacaggtaaaacacagtaatcataagtggatgtccaagtgtggggctgactgggaagagtatattaaaatgggtaaatgggtttaccacaatcatatattttggactctgcctcatgagtactgtgcaatgcctcaggttgcacctgacttatatgctgaactacagaaggcacatttaattttattcaagggtgatttgaattacaggaagttgacaggtgacagaaaatgggagttttctgttccatttcatcaggctctgaatggcttccatcctgcaccactctgtaccataagaacattaaaagctgaaattcaggttggtctgcagcctgggcaaggggaacagctcctggcctctgagcccagctggtggaccactggaaaatatggaatatttcagtacgatggtcccctttgacttgatttaggagctctcagttgcatagaaagatctggtgagcaccttttcatccccagaaaaggagcacgtgaattgagtcgcctggcggctctgtacgcgctcagggaagcttagcttcttggtgcccatctacgtgcactggatgatttttcttttgaacattttgccccactacactgttttggggatagctgggttaagcaagttaaagatatttacatttatattggaattttagcaactttttttcaggttaaatatataatttcaagtgcttttaatgaacttatttttaattggctagggagcaaaaaataagtgagttctgcttttagttagttaaccttgttcttttcttaaatagtacactgcatggtatttaatattccaggaagcatgggattttattttgcttgattttgggcacatgaaataatagctctaggaaaatgcgcatcttaatgactctttgtaaagagaggcatttcttacaactgtgatgtttgcttacataaaagttacctcataagttaattctaacttttattcttgaattttatttcatttcaatagcttgtttcatttgcacgcctttgtattttgattgacctgtagaatggatgttaggaaactcaaaattgaacacagtgaaacaaatggtatttgaagaaatgtaatatcttttatattctatttatgatatccataatcaaatgagattattttaccacataaatgttttaaatatcagatttttagtttgcagttttaggaaaatgctttagatagaaaaggttcttatgcattgaatttggagtactaccaacaatgaatgaatttattttttatattcttacacattttattggtcattgtcacagatagtaaatactaaaaatttcaggtcagtttgttttgaaactgaaattggaaataaatctggaaatgttttgttgcactaaaataataaaatgaattgtactgaaaatctccttggttttattttctagtggggaaaagtcaagaaaggaagattaaaaatgagatttatataaaaagagacataatatatattctagatgttgccaaaagcagttattaaatatcatttataaaaggttattagtctatgctcttgctaagtattaaaaaagatttttgcaaaatgtttatataaagctgtacattttgaatctactgtgtttctttatccacatgtgtgcctattttaaagagtaagtttgta

SEQ ID NO: 15435 - DNA, 1755 bp, Homo sapiens
aaggtataatagaaggccttcaagttcagaaagcttgcctttttccacttaactctcttcctcggttcttaaaagcggaaaatgcaaaatgtagtactgagtaattttataagaaatctaggtttttcattatttcttcagtgtttctaaattagaactcaaaatcactgaactttcaaacaatgccaagcagtacctaatattcatagaaatacatttctacgtactttcctaatttcatgtttcttttgttttccacattgagagcgaaatgaagaggacactaatgaaatccctaatagttctaattatactataattaaatttaaatgatcattaatatcaggtttcttaatgtcagagaataaattagttattatctagagcaaagttacattttgaccttgaaagttcttttacatttcttactctaaatctcttatgttttaagatttatgattagacaaaaaattacctcagagaattcattgtgtcgactataagtagaacctttctgatcaccttgattggataacttggtttgagcatcttttttgagagaagtctgggctgctgatttctgaacagaagccagtggggttctgaacataacatattctctggttgaagcatgaggtgaaaatttattgttgttttcctaatttaaaaaaaagttttaatagaatttagaaattatttcctgtatcctcaatgagacatttttatgtttgtacatataagaaatgacaaacaagattaggtaagagacttatccctacatgcaatttacctgcacgtacttaaacaaagcaaaacctaaatactcacacatatcaagcctaacttatagacagaaactgtgaaccaaatactatgggaaatcactttagatgcagtctatatggtacttaatacctaaaaagtaaaacagcttttccaaattttccagatgttataaaatacacatacacacaactggcaactaagattgactaaatggtcgactctatctgagaaatgagtaattttccctttgttactttagacattctatttctaggaagaatccaagaaataaatgttgagttgagatttctttatttttgaatgtggtttctaagttccagtataaggctgaaatactttatgactgtaaagaagggtttccagattacctcttttcttttctatttctagaagagcactaacagtgcatttttaactaaaaacatcatctgcaaacacttacggtaactctttgtattgctttactgtacaactggaatgcccccttatcatcttctaggatcttcttccaagttgtgctcactttagacacactggaaaagtaaatcaccataaatgaaataattaaagcatcacaaagagctaagatgaatacagtagaaaaacatcagcagtgcaaaaagatattttatattattagtgcttctcaaacctgaccacattacaattgcctggcggttttaactggtctaaaatgaagctcagggctctgtatttttaaaaagctccctcctcattaagtaattctgagtgcattgaggcttaagaaccactgctttgtacagtattttttcacaatatctgcaaacatcaaatagtagcccccactgtatatatgataccatgttagctatctggtaaaagtaatagacaaatttcaaagtactctaggcacactgctattagaaatcaactttagaaactcactatgttaacagaaaaagtaga

SEQ ID NO: 15436 - DNA, 1187 bp, Homo sapiens
acatctgaaatccttctggtactaagcatttcagatgagggacactcaacctgtacaacagcctttgcatgagctggtggtactgagccactaacagcaatgttcagtgtattatgctaatatgtatattcaaaacagtacttacttgattaagtccatgtcactgagttgtgctaaaatagttgctaagacatgtctgagtccccttcgaaagagttcgctgagaatatctacacattctaggcccatttttctgccaattatattctgcagtctaaaatttcctctggctataatttccttcagcatctcccgatctactttaggatttcgttttgcattcttttttaatgttgaacaaaccactttttcaaaatgaagaactggcagcaagtttttgttgggatattggtctgggctttgtatttgtagcaggcaggattgtagactgtcaccgaaattctcctccaggaggctaccttcttcatgttcactgaggccactttgtagagaaaatgaggaatagccactgtcttcataaagtctactggtctctagtgcttctatttcatttgtactattaagtgtctgttgcacatgttgattttccttgttatgcaagcgcttgctttcagtttcaagttgtacaatcctagggctcacaatcggtgacccaatacatgacagcctttcatagtctttaatgcagtctttacaggaaccttccaaatatgcaggggtgtaggaaactagtcttccaatgtcatcaggttttaccagtttaagtccggaatgaacatggttacaattaaaatcacacttcattttgacagaaagggtagaactttcttctttacaacctataaaaagaacataacatttacatcttaatggcaaaatttccacacatccctacttcttaaattgggatatacaaagattactttgcaatctctcagcattaggtattgtctacatgtacttgcttacatagctgtgatgttattcaagtttaattattgatatgacaataatatgtgaaaatattacttaaatcttataagtacatacatattatattattcttgagaaggcacttcagaacagactgcttttggatctgcctggctgtaacacctgactgttgtctataactgattgagtaaaaaatagtggaaaaaggggct

SEQ ID NO: 15437 - DNA, 1107 bp, Homo sapiens
acctgatgaaattataaattaaatagtttaaaaaggaagaacatatagcagattttgaacttgttgcagtggtgaaattattgatagtttttctcttgttcctctgcattctgattttcttgaaattgacttctattcgttgtgttactaaaagaatattgatttatatttttaaagtgtgaataggagttgaaaaaagtcttaactcctattcaagtctttctagaaatattgctcaagaagaagaagatagttttttttttcgtctgggctgccaacatgccatccagactgaggaagacccggaaacttaggggccacgtgagccaccgccacggccgcataggcaagcaccggaagcaccccggcggccgcggtaatgctggtggtctgcatcaccaccggatcaacttcgacaaataccacccaggctactttgggaaagttggtatgaagcattaccacttaaagaggaaccagagcttctgcccaactgtcaaccttgacaaattgtggactttggtcagtgaacagacacgggtgaatgctgctaaaaacaagactggggctgctcccatcattgatgtggtgcgatctggctactacaaagttctgggaaagggaaagctccccaagcaggctgtcaccgtgcaggccaaattcttcagcagaagagctgaggagaagattaagagtgttgggggggcctgtgtcctggtggcttgaagccgcatggagggagtttcattaaatgctaactacttaaaaaaaaaaaaagaagaagaagaagaagaaaaatggaatactggaaatgtgagaccaaaatgagaaatcccagagcatattggtgtggtgataatgacccagcagacagggaaagcaggtgaaggagagagaggaggtaattgctgtgtgaagtctttgcggaggaaagagacaataggatatcaagaacgggtcttccctgggagcatgaatatttcacctcatccatttctacaggagtgaaggcaggatatgtaagttctgatatagttaagtggatagatcctgtagtggaagatgaagaatttcaattctgatagtctgtatttccaaaatgacatt

SEQ ID NO: 15438 - DNA, 1180 bp, Homo sapiens
gtagatataagagagaatcttgtgaggccaggtatagatcatcttggtcgaagagaccactttggctttaatccagagaagccctgggggcatagaggagattttgatgagagagagcatcgggttctaccggtctatggtggtccaaaaggcttacatgaagaaagaggtagatttcggtctggaaactatcgatttgatcctagaagtggtccttggaaccgaggatttggacaagaagttcacagagattttgatgaccgcagaagaccctgggagaggcaaagggatagggatgacagagattttgatttctgcagagaaatgaatggaaatcgtcttggacgagacagaattcaaaacacttgggttccccctcctcatgctcgggtttttgattattttgaaggggccacttctcaacgaaaaggtgataatgtgcctcaggttaatggtgaaaatacagagagacatgctcagccaccacctataccagtacagaatgatcctgaactttatgaaaaactgacatcttcaaatgaaataaacaaggagaagagtgacacagttgctgatatagaaagtgaaccagtggtagaaagcacagaaactgaggggacataatcatcactcagtaggtaaaagataccttttgtaaagttgtcatctctctgtaatagataatggctgactggaccatagttgttcacttttgtctgccagaattaagttaatctgatgttcatgttcacctttctcttaaaataattgtacaactgacttgtatagacattgttcttaatatgaacatggtaggtaaactttttttttatttttttctgataaaatacaaatgttggccccagattcttttaacgtcaaggaaatgaataacagcttgtcagagacttcctatggaagaaagaattttttagatactatcattaggttggatatggtaatagatatatttcagaatagcaagtggtggtatatcttatccatatctttaggctgctgcagaattttaaggttatagataaagctgtgatattttatgcaaagactggctctaggtatttgaggagcacaatacagagattttaaaaagtgattttgtaaaatctacactacggtctctgtttctccaaagtaagtgtttgtgatttgttcctcatac

SEQ ID NO: 15439 - DNA, 1161 bp, Homo sapiens
tgggctaatttcatattgtatgggagacattagatgcctcagttaattgagggtgtttttgcgtggagctcaatagatagttcaagtatattgtatttgaatcgcaatggtggaaatatagcacctggttgtcctgtgttctttgttccctaccctctcccccgacttccatccccacccctgtgggcagctatcattgttttgttttatttttctgcctttctcagaattagcctccaaatccttctcatagagcactccaggctcctttttgaccccatcattccaggcagggaccatcaattggatttgttgtttgcattgaaagtcatttgctgccccttcactaagtgattatttctgacatcacttctagcatttaattacctcaagtctatgaaataagctttcttttctgtaaatgaccagttgaggaagaaaactaagaggaatggaaagacttaacattattggaacacttttaaaaatagcacaaattttattgcccttgggtttttaaaactgcctttaacaatagctagatgtgtggctttggacaagttactgagcctctaaacatcgtttgttattagctaatctgaaggggtaaattttcattattaaagataatattagctaatactaaatggacacatgctctgtgacaggaactggaataattgtattacctgcacaatataatccttacgacagtcctataaggtacttattacttcactatttttctgaagagaaacccaagacacagatttaagttactttgcagactcactgtagtgaagatttaaacactgtgtaccagattcaaaaattagtgtgtaccatcagataaagtgcctgacatgatagaggctcaccagatattaggcaatgtatatgcagaaaaacataacccaaccagccatatgtttatagccacagttaaccactaaattgtttccattgttacaaacatatatcgggctatctccttttcctatggctaaataattaagtttgattttcttagatctccctttcttctttttctttttcttttttgttttctttcttgagatgggatctcgctctgtcatccaggctggagtgcagtggtgcgatcatagctcactgcagccttgaactcttcctgggctcaag

SEQ ID NO: 15440 - DNA, 1171 bp, Homo sapiens
tgcttattatctgcagtagtacagtacttcctctttttgtcctaaaatcatttctttcaagcttcaaggagcaccctgggtctcagtatttggaagcgatgattacatctgtattttctccattcggttcagcttgatcccagaggctctgatggtatctgctcagcctttgtcaagactgagcaggctaattttagtttagaaaatggaaatttttcaaaggaaacttcctccactagacaaattgtttttgacctgaggttttgatcagggtacagtggtcctcattgttgaaatgcaggaacacttcttgttgaccgctaacaaagggttaaacatcacgggcagtgttagaacaagttaaaaacagaacctatccaaagcatataacgtgcactccaaaataagccaggctcgctccttgttaatgggatcattgcagacatgccaaattctacaactagtcaattgtatacatatggtaaaacttttcataccattcaacatttgctgcaatatgattttaattacatacagattgggtagctggaagaaagcactggaattaaatagaagaaagttcaacacaagctcttttataagcggccctggtttaggttaggatgtatgcaaatgactgccagggacaggaagaggaatgtgtggtttggaggactctggggatgggacatgactcatcttcaacctgggaacacagttgtttatctggaagggagagtttacagaaacggtgattatattccttttgaagttgcaacttatgctgatgcttgcaccttgttacttacattcttccttcccaagtatagggtagtctctgcagacaaagttgctctctgggcaaaaattgcattcagttggaaaagtggtgggggttggatatgagagaatggtacttctgaaaatggtacttctgaaactcccccccctttattaggctgtgtttcttgtttctttgaagttaattttacataatgatttcaaacgtggtgctgtttattttatgcaagaaaagagctgggaagcacattttgtttcagattctgaaatggcgatggccgttgtgggagcgtggatgggcctttgccttttacagagggggaaaccgccactctggaatgtgctttcctcaaactttcatggcatatct

SEQ ID NO: 15441 - DNA, 1227 bp, Homo sapiens
tttaaaaaatggccctttgaaaactattaatcacgacttccccagccttactttttccacataacttaattattagaatgtaattttaaggatcctaaatcatttgatacctgctcaaagtggatataaactaagtaatttacagattctgaccagtttcatctaggtttctgatccacaataaattaaaataacttaaatctttacaaccattttgtgggaaaatgtatactgcacaaaacccaggaatgaacagtttttttttttttttttttttgcaatttccactttaccaccagtttaaaagtaaaatgaggaatttaacccatatctggattgaatcatactatgattttccgtggctctctgtttcataaaaacactcctcactgacaacagatgttaaactctggacactgaattctcgctctagaacagaatttaggtcgatggtggcattttcagactgactgtcaagggactggtgacggatctgcgccttgagcaaagttcctctgtccctcttggtgctgttggcttttcgtttaatggggcagaagtgcccccggaccagtttgggctgctctcctcctttctgaccctcacccgactccgggccaggctgctgctcagcctcggggtgaacgtctgggtcctcggaaatcctcagtctctggaactgaatttcgatgtctttagtagggctgccctgcttcacagtctgacggtggtcatcatcttcatcgctcaggatgtcactctctttgatgagattgtcggcaaaatctgccaagccggggtgtgggtatttcccgggagaagtgctcttggagtcctgcctgccctcagccgtggggcagccgctgctctgggtgccgctgctcaagctgccctcgtcagagtccagcaaggttcccttgccagtctcaccggtccactcgttgctggaggaattcttcaggacttttaaagacctggatgaagctacagtgagaaaaacacatttcgctgtgatacagaaacaggttacacaatgtgtaatgtttgcctcaaagcttgtgtaagatttaacattaagattttattttatgatatgacttcagttagcaactatcctggtaattaggcaaaaatgtagctactgaaaacatggacatttttgacttaggtttacagttgtaagttaggcaattcagcatttttagattaccagagctcaattatgta

SEQ ID NO: 15442 - DNA, 1164 bp, Homo sapiens
aagtcatgaagataaattagctgtcaccaatgaagttaatgattaatttggaaatgggtttttttcctcctgatgcttttgtcttttgactgattttcaatgctctgtaaatgatgagtgagagaagaggaggagggagagaatgtgtgtatgtttgtacatttggtacgtaagatttgtttcagtgcttttaagacagaagaatattaatttgccctatatattcaatttgaaataaaaatttccaatctgttatggtttaccttatatattatattcattgttattatcatgaaaatttaagctttagacttttctgaatgtatttaaagttatttgatcttattaatgaggtcaaattattattttttataacgtagacttatatttgaaacatagatgctgtatgaacctccttttgggggtttctgtgtatattgaaattggtgataagatttgcaaggaactttggttcattcagtagggagcccagttttaaattttacttttctttcagttaagtgaatttttgtcattgatatatgcaaagttcagatttgtgtagactttcggggtactgaatttgtttcctgttcattcagtcctaggaaggaatgtccttttctcctcttaggtcacacgtgacctttcccggtccctgtctgcagtctctttcctgcagggagctgtctccccttcatgtagccactgtccttgagctttaaccaagcatctgtaagcacctcacctggactcttaacgcctcacctgggaaatgattattgtaaactgttgttttggtaatactgtttggtagccagcattttaattttagtctattgtaaattgacacaaatatttgaatattttgttcattttgccattttacaaaaaatgagaaaggggaaattgagaggaacaatattagtgatgaaaatatctatatctgaaaaatgtaatgtaaagatatgaaacacttggggaagatgaatgcagaaaatctttagtctgaaattgactattcattaccccttagcaagaaagtaaatccccattgagcattatgttttagaatggaaaatgtaaattaagcctttgttttccatcatcattctcatcgtctttttcatgctctctggtggcagaaccccacccagctcccac

SEQ ID NO: 15443 - DNA, 1158 bp, Homo sapiens
cttacttgataatctctggatttcttcctgtttctcttggtgctgctactatcagctaactcgggatccttgcaaggcccacagaccccccagtcaactggcagcaattccatggcagaggttccaggtgacctgaagccacctaccccagcctccacccctcacggccagatgactccaatgcaaggtggaaggtatgttcaaataactctgtgaggcatacaaagtcacatttgttcatcttttagttttctggggcaaacttcacagagagaagaaatggtattccctagagagtttttaaatgttgatgactgccagttttcttcatgtcatttatcttgaatggtttttgcatttgcacatttcaagatgggttcatcttctgaatgtactgtttggaggtaactcctgctgtatcattaagctttcattctttgcctctcttcagaagcagtacaatcagtgtgcacgacccattctcagatgtgagtgattcatccttcccgaaacggaactccatgactccaaacgccccctaccagcagggcatgagcatgcccgatgtgatgggcaggatgccctatgagcccaacaaggacccctttgggggaatgagaaaaggtacgtgtagaggggcctccacccggccatggaccagtgggcattctactctctgccgttccacaacagttcacctttcactcagaacacctctgagcccatgctgcatcggtgtgggtcccaggtccccatcctactccacttgtggccttgggaaaagcagttagcctctttgtgccctcatcctgtccccggctggcctcagtgccctcagcctgttccctggcacatgctccctgtttccggatacctgccacctccttacacgtgccaagttacgttcctcatctagaaattgggaaaataataggacccgcttccaaaggcatggcgaggattaagttcctgcaacagagctcagagaagagtggctggcagccgcggtaagtaagcacgcacttcacggcacttggcatggtggtgtgctagtgtgcgctgggcgctagctcgtggattggtaaatcagagtcgctgcccaccttcagggaatcacagactccctgccttcttacttcctgggaggaagcaaaaaat

SEQ ID NO: 15444 - DNA, 1272 bp, Homo sapiens
tttgtttccttcagtagcaggaatagggaaaacaacaaattacttcccattctgtggctccagccatactcctgagaaatctgagccatcaaagtgctaatatttatcacagcatgttctgagggcaggagcacaggactagaggaaagcagcctgggaagccaaggccgtgtgtctgaggaggctgtcttggagttaaattttgcttccatgttctgcatacttggcggccttccaggacgccaccttgagacactcgtgagtggtgaagccaaaagaagacaaataccacttttgggtttgactcatttattaaaagctctgataccacattgcagactctgtagggtggctgaaagaaataacccggccatgagaaaggaccatctgtgctcaaccactccacctccagaagcactttcggcccctgcgtgaccaacaaagcgagatctgaaaccacaaaagtttctcgttacagctatggcctccatttaaaatcggaaatgatcacgcttaactgtccttgagagcatttgtttaaagtcaatatttaacttaacactccacttattttttcttactctttcgttaactttcgttctttcatgcatagagtcaacattcatgatatccttgttcttccccatcttcagttactcctgaggcgtggcgtgtgatgatgtcccttaaatcaggtcttttggctgagagtacgtgggctttggacactattaatattcttctgtatgatgacagcactgttgctactttcaatctctcccaggtaagccagcatagtccaactaacaaccaaattaggataggagagcatcaggccatgcacatttgtgcttgaactaatgcctgagttgatgagcactgaccgtccaacactgttaatcactgcagttgttatcaaccagccttaatcaatgtagagttatctgggataatattcactgtagtctttagtgtgtgtacacacacatacctctatttcttatgagagaacagtgactgtgtgtgtatgtgtatatgggatagatgacagtagtaacattaaattgttcagaatgaatattagctggccaatgggaagaaatcaaaatgtaacattaagttgtgactggagtcagcattggaaacacagttggttgcaatgggacataaccctgctttccaggaggacttgacatcttcttttcattaaaaagatattcaagatttagaaattttatattctatacatttatagaatgtataaatatatat

SEQ ID NO: 15445 - DNA, 1168 bp, Homo sapiens
gttgcatctgtcatctgtgatgtactgtttcagattgggcagttatgacataagtgagaaggcaagcatgtgtgagtgaagattagagggtcacatataactggctgttttctgttcttgtttatccagcgtaggaagaaggaaaagaaaatctttgctcctctgccccattcactatttaccaattgggaattaaagaaataattaatttgaacagttatgaaattaatatttgctgtctgtgtgtataagtacatcctttggggttttttttttctcttttttttaaccaaagttgctgtctagtgcattcaaaggtcactttttgttcttcacagatctttttaatgttctttcccatgttgtattgcatttttgggggaagcaaattgactttaaagaaaaaagttgtggcaaaagatgctaagatgcgaaaatttcaccacactgagtcaaaaaggtgaaaaattatccatttcctatgcgttttactcctcagagaatgaaaaaaactgcatcccatcacccaaagttctgtgcaatagaaatttctacagatacaggtataggggctcaaggaggtatgtcggtcagtagtcaaaactatgaaatgatactggtttctccacaggaatatggttccattaggctgggagcaaaaacaatgttttttaagattgagaatacatacctgacaacgatccggaaactgctcctcaccactcccgtcatgcctgctgtcggcgtttgaccttccacgtgacagttcttcacaattcctttcatcattttttaaatattttttttactgcctatgggctgtgatgtatatagaagttgtacattaaacataccctcatttttttcttttcttttttttttttttttttagtacaaagttttagtttctttttcatgatgtggtaactacgaagtgatggtagatttaaataattttttatttttattttatatattttttcattagggccatatctccaaaaaaagaaagaaaaaatacaaaaaacaaaaacaaaaaaaaaagagggtaatgtacaagtttctgtatgtataaagtcatgctcgatttcaggagagcagctgatcacaatttgcttcatgaatcaaggtgtggaaatggttatatatggattgatttagaaaatgg

SEQ ID NO: 15446 - DNA, 1236 bp, Homo sapiens
caattacagactaagttagcatattcttttgaaaatataattgtactggggagaaaggggggattaaggacctactgatctcttgcataaaactggcctgatattcaatagattgactagacagaaatggagaggaagtgaatatttttgtaccatggttactgactctgtgaggaattggatatccgtgatctgagcagcccaaatcacttaagatagggatacaagttctttcctcaggggacagttatcaggactggctgcataatttgtggggccacagcataatgaaaatgcagggcccctcactgaaaaattattgagaatttcaagacagcagaagagaagtaaactaagtatggggccttttattcttgaggccctgtgaactgtataggcccatgacactggccctgacaattgtttttttcacagatagttgttgcttgcaattggaataatcaggaaatttcaaaagaagtgtaatctgagctttcttgaaagacaggtacattttccagttttcaaggaggaaggatggcatgaatcaagacacaacaaggaagcagttcaggctgcatttccctgacatcggctagaccatgtttactggcacagaagttgtcatgtgggaataagtctagaaggatggctagaggacagattatgacattgggaggccatgggaaaccattaaaaattatcttagtaatgtttttggaagatttggcagtggcatataggatgctttggggcaggctcactctagaggaagaccagttaaaaggctcttatgtagttgaaggcattcattcgcccagtggttatagccacactattctgaaaaatttcctcccttcccttctccaagaacttggaactgttaaataacatttactggaagccattggtttggactgagctcctgcactaggcctgagagaccaaaccaaaatggaacgactcatgctgaagtttcatgccaccaagccaaaactacattgtttatctgaccttctaaaaaatcaggagagagagagagagataatagcaatttcccaaacaggccagttttagctggcacagtaaggaagttccttctgcttgaatctttacaaggaaagtaactttgaaaggaccagtgcgcgttttgttctctgatactgctttcctcaccccttttctgtctggaaagccaaagtcctctgctgtatagcatattctatagtgtaccat

SEQ ID NO: 15447 - DNA, 1288 bp, Homo sapiens
cactccaccctgggcgacagagtgagactgtctccaaaaaaaacaaaaacaaaaacaaaaaaaacaaaaaaccaaaacccgaaactcaagaggaattactaaataaccagtaattacatttgatccagaacagaaggtagccaaagatattctaaggttctcttcatatctgaaaagaaataaacccaatttaaaaaaagacaaaaacatttaataggtatcatgtacaatttcagtacaaattttcacttcaaaaatattacaggattttattaatcactagtcccccaataatctttgcagctttccttcccaatgaaatgacttcattataaagtgaacgctttgatacattactttgtttatacttacacacacatcagggagaattttattatgtgccttgaacttcaacaacgttaaaccgttacaggaattgcttaagctgatgtcctaattcaatcattaaccaaaacatattttaagaataggcaagaagtctgagaagatggtgatgtaaaagggactaggcttggggtcagagagacaatggtgagttgtgaagtacctaaaccagtctgcgtgaactgcaccatgttagagaacagcaggaacaaaataggctacaaggtcacaataagaagccctggatggtagcatcaaagacgaaacatttaaaaaaccacagaatgaaatcccccaagatggcagctgctcattgtcaagattatttaatcaaccctgctgctgacctgggaatcctaccaactagtaagcattgattttaaaaataaataaggcaattccaattgtccttttttttttttttaagagaattctggtatgagaaccatacctactaccaactccaaatccaatctatgttgttcactaaatttgacagccacgatcaaataatatttaactcttaaactcctcgtaacttttttgtgattcacctcccccagtcaacacaattctgtgtgtttttacttacggtcagactctgaagagctacttaggagatgagcacatattttaacaaaaattttattctctgtcccatttatttggtatctggaacgaagagaaaacctaaaaatgagatctatttccagcactgcaagcaactttggaggagcttacttttcccctgcttctttgactggttgttacatttatctgttttcaaatttatctcctttttggtgagaaaagaggttatagggaaaagagcatttgaatgaattcttcaatttcatttcatttatgactctggctgttaata

SEQ ID NO: 15448 - DNA, 2011 bp, Homo sapiens
cattcagtgcagtcagtagctccatttgatgtaagtgtaaagatgggtctctcatttcagtttcagcaattattcttaaaacctttattttccagtgttttaaagtttttaaattttatatctttttttttttttaaacagatttgtaagactccagggcctcccagccgtgaataatctgatggttcctgaaatgactggggaagcagacgcttcgtatggcagttgaagagtgtgtgtctatgtgcatttaaaaccttctttctgtacttacacattcacacgggaagacaggctcattcttgtgcacacttgagagttttacaactgatgaaaattaatttaagaatcagatggagcaacttgacaccagtgggctcaggagcccggggagaaaaatacatcactaatggccagttttccatatggtctgcacgggtaaagaaagtctgcaaaaagaagaaaaaaaaatttgcgcagattaaaccacaaaaatattctccagtttaaagaaggaactaagtgagaaggtgactgagaaagaagtgtgatttcaaacattgcagcggctcacacagtgtttgttgcactttatttttcagtgggtttggtgatttggacggattaaaattctagactgaaaagtaactcctactgtggttatggctagaggaaagcaagttcaagtatgatgggacaagtttgaataatgaactgattcctttgcctatcttaattaactgtatttgagaaattttaatttattattcccccccttttttcctgcatctataggataatattgtaaaatagcaattgaaaccaataattattaaataaatatcaaggaaaatccaagcaaagctttctttttgttggactagtggtgtggtgtttggagacagtctctgaatgtgaacaggaaagcacccatcagcaaaacactatcactctctagggagacagctgggggaatctgactctggcttctgcttttgttttaagggattaacttccctgtcaagtccaagaagacttgcgtatgagaagattacctgatggacttaattctaagattagcttttttcatcaagatggaaaaagatctttaggagcagaaaaggggagtgctaactgggggagcgagaagggagacgagcaaaagaaacaaaatcttgccacgtggctctgttttgtcagcaagaggatttaagactcacccagggcaaacactgggaccactgtaagagcgctggaacattctgcctcttgagtgaaggggccttctttctagcctctatggcactgaggggtgcgccggctggtggaggagcagtccgatggagccctgcgttccccggggacacagggccaagctttgaggtggaaagtttctggttctgaaacaacaaggagagagtctgtttttcttcctaaaatttggactcttgtctgcacaaactctggtctgttttgcacggtttgtgtgcctttttttccctttatgcaatctttttcagctttagcagcagaaatttgtctagttcaggaaacatgctagagggtggcttcagaaggaagatgatcctgtgtattctgtctctgcatccgaacttttgaagagaaaaattcgagctagagggattcttaaagccttaagttacttgaaatctatgtatttgcaaccctttgtctctggaatcatattacactaaactggaatctcaggctgaatgagaataaccaagtggagtaaaaagaagaaaaccgtttcttgatcaccacttaattaacgatgctctttctccaaaggatcagcacgttcttcctctgagaacttgaaaatacaaatggaccccatgtttttttaagcattaccttttcttagaagactgccatcatcttttatagaggaattttttcactatgcattcggtggatctttataaaatactgaccttctaattagattcaggtcagtcttaattaaagggggaaaaaagcaacgcaa

SEQ ID NO: 15449 - DNA, 1163 bp, Homo sapiens
cctggccccggtctgaggtcctttcttaagatactcctcacaactccgtgaggggtgtgctaccatggcttgcgtcaagcagacgaggaaaggggcagcaagagggtcctggtggccacagctgtgcagctggtgagtgaatgacgaggcccggagtcagagccaggcagccagactccagagcccgccttcctcaccactgacctcccggtgacatctctgggggcagcagtctgcagaaccattgttctagttgaatttcttccagcctccttttcagggtgcttttggttcgttaaaatgaccacatgtgtctacaattaaattggcaatcactttgtttttcttgcacaattgtagttgttgctggttcacttaataaattgcagaataagaagaacagagtggtgataatcacagggatttcttccttgagctgtgtgtatttagtgttcattcaaattacatttgttttaggttgagagaaatccttctgaatagtgatgacattggttgttccctgagatggcttcttgtgtaaatctatcaacaccctttggagggctcctgactcagaagatgaacgtccttgggatgggcaaagtgatgcttgttttgccttccctaaaagtagttctaggtgtaagaagtgatgtgactgacttagggccttagattatggcccaaatgtaggctttctgcagttctgccctatgtttttttgtgtagattttcctgcctttaataacttcactgataatagtaacactctaaaatgagagaacatgtcttatattggagagggtaataggttggtatctttttgaaccatcaaaggcctaggtcaaaactaaccctttcctctgacttcttagtcaaagaacatacactttagctaataccccaagacagaagttctttggtgctgagagtcaacgagagtcacattctccttgaaaagggaagggaagctctatacctggataactgcgcagatccatggccccatagcacaaaattcgggcaactgagaacccagctggcccccagctggtaattcctcaacattctggtgtgtcctaacattgccaaataggctggaaggatttagagaacaggaagtaagctactgggagataaggctgcagctgtgaattatagac

SEQ ID NO: 15450 - DNA, 1105 bp, Homo sapiens
tccaggaagtcctctccctgaccgaaagcccagtcccccagcggacagaaaaatttggaaagaagaaccggaagcgcctggacagccgagcagaagaaggcagcgttcaggccatcactgagggcaaagtgaagaaggaggctaggactttgagtgactttaattccctaatctccagcccacacctggggagagagaagaagaaagtgaagagtcagaaagaccaactgaagtcaaagaagttgaataagacaaacgagttccaggacagctccgagagcgagcctgagctgttcatcagcggggatgagctcatgaaccagagccagggcagcagaaagggctggaaaagcaagcgctccccacgggccgccggcgagctggaggaggccaagtgccggcgggccagtgagaaggaggacgggcggctgggcagccaaggcttcgtgtacgtgatggccaacaagcagccgctgtggaacgaggccacccaggtctaccagctggacttcggggggcgggtgacccaggagtccgccaagaacttccagattgagttagaggggcggcaggtaagacctcagaccaggtggcgctgcgagcccaggaggcgagggtttcagtgcttcggccttcaaggagcatttttcaaaaggccaaatgggaaatgtggaaaacaacgaacacctcttaggtggagctcatggggttatggtttttagtgtgcccactgctgtcttgtatttttttttttctttttgagaccgtctcgctctgtggcccaggctggagtgcagtggcgcagtcttggcttcctgcaagctacgcctcctgggttcacgccattctcccgcctcagcctcccgagtagctgggactacacgtgcccgccaccatgcccggctaattttttttttttttttgtatttttagtagagatggggtttcaccgtgttagccaggatgatctcgatctcctgacctcgtgatctgcccgccttggcctctcaaagtgcagggattacaggcgtgagctaccacgcccagccctaatttttttttttttagaaatgggagtctcactgtgttgtctagattggtctca

SEQ ID NO: 15451 - DNA, 1204 bp, Homo sapiens
tgggaaatatatttcacaccattgcctttgtgtagagaaatatttcttttcctgtgttaatgagctatgtactgaatataaaccagtgcatttaaagtaatatcttttgtgcacctctaaatgtgtttggaattgtgtttgttctcatagaatatacaaaagtactgattctaggtaagaaggagtctccacgggtgtgccctgctcagctggatgtccatgagaacagccatgaaataagtcactacttgtccccaaaaccacaggaatatatacctaggtcacctcaaattcctgagtgtgctctgccatgttacacggtcttcaaattgaaaaggtttcttgaaaaggaaagtttggcccagcaactggagaaggagtccatggtgtcgctgtgtgcctgtatcatttggccaagtcaatggttgtaagcaaagttagtggagacaaaaatgtgtccaaaatgtcgtttgagttcctgggatttctgtaatagcacacaactcagaactcttcagcatttgtgtgattccttacctctggctgataaaactctaatgggttgtggcttactttgtttccattttctttggctttgtgcaatttttgtgtaactttacttgtacctatattttctgtttacagttctttttaaggggaggggtagggttctaagatcttgttgtttattgtagataaaaattttttcgtgttgtagaaaagcatgggttatgcgtttgactgaaaaagacactgtattatttaccaaaggggtattgtttttgcatttgtttataaatgcattattttggtactgtaaatttggacataatttctgagtttattactactggcattttctttttcccttttttttttttttaaccgtaagtgcacgatgcaggtgcataggccccagaccaaactagaccaccagcatgttcatgtccagacctcggcagtggcgtgcactgcttgtgcacctcagttcctccagtgttggtttgtttgttttttaattcagcatcctgctggttttactttccaagcaagatctgttgcgactcccaaatgcgttttaatgagctcatccttatttgcctttcttcttacgtattttgtgtattagattgtgcaggagatattctagaaggcattaatggtttgcattcaaaacgatgtggtttgtccaagttattttctg

SEQ ID NO: 15452 - DNA, 1219 bp, Homo sapiens
ctccctgccactccggaaggggataacaaagcagaagagacctggcttttaattctaaaggacaaaaggaagggctcttgtcaacagtggagcacacgtatcctcacatctgcacttggtgctgtgcacacagcctttgctttgactcggagtggagggtggagagagcaggatggagaggaaagagggctccatgtagagagtgacaggttaaaaggagagaaagaagaatgtgtaattcactctgttcattattataacaatcgcaaaattgggccagggaggacaaattaggccgcggcatctgcattgacgtgtcttagcttacgtttcccctgtgctctagtgttatatatttatggaaatgtcaggcttgcgttgcactgttaactttcttacacggtgacttattttcagtcatccaaagtagaaagattctaattggtgtaaatcatatattatgtttccaaaaatacccatttggttcattctttctaggaactgtgtttggctggcatctgactttctctgggcttttggcgagttccctggagacaatgagttctgcccatctgctgttgaaacgtgttacttcatgggttatttggcgggagcgtgagtctcgctttctttaaaggcaaatctttctgtgtatttgcagaaatgtgcggagattattgtggctcaccttggctacctgaactacactcagtatacagtgatagtgggatttgaacacctgaagctccccatcaagggaatgaacttcacagtaagtataccagctgactgcacgtttccatggctcatgttctagttcccattctttgttcaatgattgaaatacatctcagcatctaaataatgttaatttggacagtggaggacttgtaaagtttttaaaaattataggaaaactacagtttcttaagtatatagaactaagaatagcttaaatatcatagagattgggcaaaccttaggtgtctgagatttagaatagagagtatatagtgtgttcagctgcaaggcagtgaaggggttagcagacacagcacccccttctctggcccctgtgagtggtcgtcagtctctgcccgaactgccggtgagtgggagggcactgttctaattgttagactgtcctttcttgtgtccagctgaaatctcccctttccactcattaggagtcagtataaccagcatagtgatgaggagt

SEQ ID NO: 15453 - DNA, 2103 bp, Homo sapiens
tgggcaacacagggagaccccgtctctataaaacatttagaaagttggctgggcatgctggggcatgcccatagtcccagctactcaggaggctgaggtgggaggattgcttgagccctggaggtcaaggctgcagtgagccatgattgcaccactgcactccagcctgggtgtcagagcgagaacccgtgtcataaataaataaagctacatgaaagattgatagaatattttagattatttattggccaaaagtttttaaaactcatatttggaagcaaaatgaaaagcaagtaaaatgttttaaatggttcatggaaaacgtatttgggtagaaggcaactcgtgcttccggaaggggttccctgtcctccatgtgtccacatggcggtcaggtagggacgacctgttctgtaaagtccttggcactgctgaatctgtggcatcatagaaggccctggagcttccccgttcctttcagtcagggactccatatagagtctcatgtggacgtctcccgtgctttcctcttgacctctacagtcacacttctgttaacatctggtaactgtgggcaacctgactgatgccgtcttggcaattgaggtccagaagatgatagttccgcaacgcaagcagtacctactttttttcttcatctatgcattgactctcagattaccatgcagagcttcacgttatcatccacgttaagtagtgctaggtaggaccttagagatgttcatgagaaactatttgttatgactttcctttgtatctttccttttaatttaaactttaatgataatgtacttttaatatggattctattcacatttgttttaaaaaccttgtaaatatgaatgtttaagacaacttactgcaagggtaattcaagtttacatgatttttaaatttgcaatgatgttttttttattctgtgtattgaaaaaaattttctgttaccaaattttacaacttctaataagactactataactttatgtaaactgatgaagatgtgctgattaacatattctgtgatatggtttacaacttttaatcataattgtccatgattttggaatgctgttatttatcagtaaatgtaaaatatttgaggcatttagccatacacacactagaactttttaaaactttgtcctatagtgtaattataaactgatgactattatcttcatacattgagtcttcatgcatcaatgaaatgaaaaatataggattatttatttactttttgtaactaagtgggaaataagaaaaaaagttagaaagtacttaaggggaaaatcgttcttactaagtcatgtattttcaacttgtcttccctggtatatcataaataccgacatattacataccccatgtaaaattttgcttaaactctctagcacttggcatgtagaatatgtaccataggtatcaggttaaaacactaaagtctgccagaaacttttgacagtagcaagaaaattgttgaagaaaaaataaattatttactgagggtagttatgttaaagttttgcgaacttaaagggctgactttagttccttcatggtaatggcttgagtaacatcatctttgggattttttaaatactggtccagtctaggagaacctggaagatgaccagaggtatttcagtttccctagggagagcttcgttatccatgtggatgataagtctgcttgatttattattaaatcattatagcagtgaagtggtgccattttctctctcttaagccccatttgaaaggctagagaaggggatatatatactatgttcaaggtttgtaaggttgttaatgtacataattgcagattgcaataaaagcttagatacattttgtaaacccaacccactaaatgagcaggttacaagacaaatgtcaccagcctcaagtattttatgaactatttactgagggtagttatgttaaatagattataatgtggtaaattatttcctgaatcctttatcacaggaaaaacacagaccctcataaaagggataattaaaacggatgtgtctgaacatttagtgaagatgagacttaaaacatgaaagtgtatttgtg

SEQ ID NO: 15454 - DNA, 1099 bp, Homo sapiens
tagcgggcgctgccagccccgccacgcttgtgtctttagtgctccaagtctaggaactccctcagatcccagttcctttagaaagcagttacccaacagaaacattctgggctgggaaccagggaggcgccctggtttgttttccccagttgtaatagtgccaagcaggcctgattctcgcgattattctcgaatcacctcctgtgttgtgctgggagcaggactgattgaattacggaaaatgcctgtaaagtctgagtaagaaacttcatgctggcctgtgtgatacaagagtcagcatcattaaaggaaacgtggcaggacttccatctgtgccatacttgttctgtattcgaaatgagctcaaattgattttttaatttctatgaaggatccatctttgtatatttacatgcttagaggggtgaaaattattttggaaattgagtctgaagcactctcgcacacacagtgattccctcctcccgtcactccacgcagctggcagagagcacagtgatcaccagcgtgagtggtggaggaggacacttggatttttttttttgttttttttttttttgcttaacagttttagaatacattgtacttatacaccttattaatgatcagctatatactatttatatacaagtgataatacagatttgtaacattagttttaaaaagggaaagttttgttctgtatattttgttaccttttacagaataaaagaattacatatgaaaaaccctctaaaccatggcacttgatgtgatgtggcaggagggcagtggtggagctggacctgcctgctgcagtcacgtgtaaacaggattattattagtgttttatgcatgtaatggactatgcacacttttaattttgtcagattcacacatgccactatgagctttcagactccagctgtgaagagactctgtttgcttgtgtttgtttgtttgcagtctctctctgccatggccttggcaggctgctggaaggcagcttgtggaggccgttggttccgcccactcattccttctcgtgcactgctttctccttcacagctaagatgccatgtgcaggtggattccatgc

SEQ ID NO: 15455 - DNA, 1232 bp, Homo sapiens
atgagacttgtaaagaactgcctgtagattgtttttaaaaggtcttgaataagctccttgagaaagttgtggaaagccctcctcagtgaggatagctacaccatggccatggcgcatcagatagtctctgtgtacctggatttgtgcaatatgtaaaaatgtatcaaatgtattatagataaggtgttaggtgcaaaggatgtctaataatccctgcacacgttttgaacttgcagtgaagtacactgctgttccttgcttcctggggcacttttctcttggttagtgtttaaaaattatcttcgcttttttaatgtggcctcaaatgtcatgccaattttcacatcttccacaaactccatttagggagaaatgtttaaatctctggtataagtttactccataccagagtaaactatatattactctatataagcagtcttgcaataactaatcaccaccatagaagaaagaaacagactgcaaggaacagagttgagtgtctggagtcatcaaaggcattaaaaactccagtaaaagctggggccgtagcaaaaatcatgaaaaacacttcaacgtgtcctttcaatcatccaattaaatgtgggtagattaatgaaaatgtattacatcaatattaactcatctatagcactttgagtatctttgtagttcatgatatcctatcctataatgtggaggtaaatgattttatatgcattgggggtcatatataaaacttcaatgtaatttcactacaataaattgccttccttatttgaaagtaaaaatgttctttttttattgacatgttaactcctttccctcaattaatagaaatccactaagaaaatcattcacatattggttcactcaacaagcatttattaaatatatattcactattctagactaatagcaagaccggggatcttgtttaggaagaagcagtccctgttctccagaatttgcaaaaccattaaaaaagcacctactttaagccattttttttcagcaaggagtcattctgccagaaaaatgtagtacacaaatacaggataatataacaaatgtaaaatttctcatttctagtgaattaaactttccagtaattttacatctcacctcattcttatgatgctcagtttgcttaattattggcaaacataatggtaaaatgtttgtactgtattagagctttactgttcgattattaagatatttatccagta

SEQ ID NO: 15456 - DNA, 1990 bp, Homo sapiens
ttgaattcattgttgcatgtggagggccaactgtatattattttaagtatctgacttcccccaaaacaaactcagtcatattttaagattccaagcaaaatttttaaatgtagtgtgattttagaattgtatttgtttacttgagcgtttattgactcccttgctttgtggcaggcactaaagaaacatttttcaatgttataaacgatattaaagttggtctgactctcctttgcacagaactgaatgacttcatcatccagcttgatgaagaagtagagggtatgcagagtaccattctagttctgcagcagcagctgaaggagacacgccagcagttggctcagtaccagcagcagcagtctcaggcctctgccccaagtaccagcaggactacagcttctgaacctgtagaacagtcagaggccacaagtaaagactgcagtcgtctgacaaacggaccaagtaatggtagctcctcccgccagaggacgtctgggtctggatttcacagggagggcaacacaaccgaagatgactttccttcttctccagggaatggtaataagtcctccaacagctcagaggagagaactggcagaggaggtagtggttacgtaaatcaactcagtgcggggtatgaaagtgtagactctcccacgggcagtgaaaactctctcacacaccaatcaaatgacacagactccagtcatgaccctcaagaggagaaagcagtgagtgggaaaggtaatcgaactgtgggttcccgccacgttcagaatggcttggactcaagtgtaaatgtacagggttcagttttgtaatattttttcagcaaatttttatacagtgtcatttaatttgggagaggatactgtccagaaaattaatgcatacttttgtcacaatttgcctttttgtgggtgtacgttttggtttttttttgttgttttttttctttgttttttttttcttttctttttttttttttttttttttttttgcttcaatacttctgccgctttggaaattgtaacagttaattactttgaatgttgctaaaaggacattttgtgtagggtcaagttatttttatatgagttaatgtgaaattgtaaatggaaatttttccttaaaatacaacacaatgatgtctgtataaatctgtctgtttagaatctgtgctgtgtaagggcattcgtactcatgctgttactgtacttatgcaccattcagacttgttagagtagatgtgggtttatgactgccaagtttgcccagtacagtagttttttatcactaaaagttggactcattgatggagtcctgtagtagtttcagtgttagatacagttttttccaccatacatctgtgcattttctctttaggtgactgtttaagaaatttgtgtgcatagttactcagtttttatgaactgttgtatcctgttaatgcatattgctctgtgactccagtatatcttacctgtactgaccaaacctaaataaagatttttattgtaactccttaattagcttttttgttttgttttgggtgtatgtttagcatttgtcattttcattgagtcattgaatttctactcattatccttcaagtaccacaacagtcaaacttaagaccaagcatcgattacgattttgcacacaatttttaatttatgccttattttgcaaaacggagctggagtttagggctacacttaaaattttttcttgacttataattgttacaaaatattttaaaatacagaaaagtataaagaaaatagtcatctatttcttaggctttttttttttttttttttttaattgagacagggtcttgctttgtcacttaggctcaagtgcagtggtgcagtcatggctcactgcagcctcaaagtcctcgactcaagtgatcctcccacttcaggcttccgagtacctgagactataggcatatactaccacacccagctacatttatttt

SEQ ID NO: 15457 - DNA, 1142 bp, Homo sapiens
ttgggccaccctcttggagcatctggctgtcgaattcttgtgaccctgttacacacactggagagaatgggcagaagtcgtggtgttgcagccctgtgcattgggggtgggatgggaatagcaatgtgtgttcagagagaatgaattgcttaaactttgaacaacctcaatttctttttaaactaataaagtactaggttgcaatatgtgaaatcagaggaccaaagtacagatggaaaccatttcctacatcacaaaaacccaagtttacagcttgtactttactttaatgtgtaatactcaactcaaggtacaagacaattgcatttaacattgttataaataaaaggaacatcagatcaatcattaagggctccagagtgaacagcatcttcataacttccatgtttatcatctttactttctggatgtaatttaataagatcatcaattcgaagaatggtgattgcagcttctgttgcaaatttcaaactcttaactttaactatggttggttcaaacacccctgcttgtttgttgtctcgaggtttaccattgctcaaatcaagaccaatcctgcaattaagaaagaattatttaacggccgcttacaatttcattaggtggcctattaactccagcatttcattcaagtattaaggttgatttttaaatcagactagagatcttgtaggtagtctttctaccaaaagaagcagggagagattagcaatcacagttaacgaagacacaccagtgctaataattagtcattatcccttgaattacagtgactgaacaacaaatgcttgctgtgaagtttttcatgttaagtatttgacaagtctgttacttatgtttgctgacatgtaattgactactatcctttttaatgcaacctgttctgcagaggttaacaaagagcgggaaaccatgcttaccattttagatttttacgttctgggttaacctgggcctcattatgaaaagctcttaattttgcaaccagatctgtggagtcctgggcagcattaactgctagtgtattgggaataacaagaagtgatcttgcaaactctgcaatcgcaagctgttcccgagacccctaggaaaagaagaaaattaggtgacttcacaaaagg

SEQ ID NO: 15458 - DNA, 1938 bp, Homo sapiens
aatgttattctaaccactggtggaattgatgatatgtgtctgaagtattttgtggaggctggtgctatggcagttagaagagttttaaaaagggaccttaaacgcattgccaaagcttctggaggtatgtcttgtgctggctgtcacataaaatacttttattatccctgatcctatcaaaggtctttttacattggaatattgacagaaaacagctcaaaaacatttatattctcttaatgctttgtgctaccaacacatttatagagccatttttcatgtaactggagaaattttgttggaaatttgtgaactgaatttgttcatttctaaaatgacagttccatcttaggataaaaggagttaccgtgtgctgcctaactaaattctaaacttgtaatatagcacttttaccacaaatgctactgagtccaaggatattaaaatcatgaaagagcaatattcacagatcctttgtaactctcttattagcaactattctgtcaaccctggccaatttggaaggtgaagaaacttttgaagctgcaatgttgggacaggcagaagaagtggtacaggagagaatttgtgatgatgagctgatcttaatcaaaaagtaagagccactttctaaaattgtaaagttataccgattttgttaagtaaaagtaggttttcttcccatttatttgctgcttgtagtctcacagtgatacgagcagttatacgcatgggataaaataacattgggccactgtaaattgagatgaagtaaccattttcatctcttctgcagggactagacattgtttctgtatagtatatctaaatatcctgtgtaggcaggacttaagggaactttatgtagacttattttattaaaatgccattttttttgagaaattgatggtcttggcaaaaaaaaatttttaaaaatgctattacaagaattgtacttttgttttgaacagtactaaggctcgtacgtctgcatcgattatcttacgtggggcaaatgatttcatgtgtgatgagatggagcgctctttacatgatgcactttgtgtagtgaagagagttttggagtcaaaatctgtggttcccggtgggggtgctgtagaagcagccctttccatataccttgaaaactatgcaaccagcatggtaagaacagtcatttcttgtcttagaggcctgagagcagtagctgtggacttcaattttttttttcccttttgtgaagtcacctaattttcttcttttcctaggggtctcgggaacagcttgcgattgcagagtttgcaagatcacttcttgttattcccaatacactagcagttaatgctgcccaggactccacagatctggttgcaaaattaagagcttttcataatgaggcccaggttaacccagaacgtaaaaatctaaaatggtaagcatggtttcccgctctttgttaacctctgcagaacaggttgcattaaaaaggatagtagtcaattacatgtcagcaaacataagtaacagacttgtcaaatacttaacatgaaaaacttcacagcaagcatttgttgttcagtcactgtaattcaagggataatgactaattattagcactggtgtgtcttcgttaactgtgattgctaatctctccctgcttcttttggtagaaagactacctacaagatctctagtctgatttaaaaatcaaccttaatacttgaatgaaatgctggagttaataggccacctaatgaaattgtaagcggccgttaaataattctttcttaattgcaggattggtcttgatttgagcaatggtaaacctcgagacaacaaacaagcaggggtgtttgaaccaaccatagttaaagttaagagtttgaaatttgcaacagaagctgcaatcaccattcttcgaattgatgatcttattaa

SEQ ID NO: 15459 - DNA, 1938 bp, Homo sapiens; identical to SEQ ID NO: 15458

SEQ ID NO: 15460 - DNA, 1084 bp, Homo sapiens
tgagccacagtgtctggccccatttacactcttagtaggtggtttttaaataattaacacagatttgtagatttgggaaatacgggggctgttggatgtcatttacctttaggctgaaattactgtctttcagagttgtggcttatcctcatttcttttttatttttaattgattgtctacagttatggctgcagcttcgattgccaatattgtaaaaagttctcttggtccagttggcttggataaaatgttggtggatgatattggtgtaagtacacataactgttgtgttagtttccttaaagtaaaactatcttcagtgttttgctatgttctttctttgactttatcagaatccacgtactggaaggtgatattaaaggtgaacgtgtattataatggggctgtgttgatttctataagtggttcatattttttcctgcgaatttcttaggatgtaaccattactaacgatggtgcaaccatcctgaagttactggaggtagaacatcctgcagctaaagttctttgtgagctggctgatctgcaagacaaagaagttggagatggaactacttcagtggtaggtagactggctaaagaatgatcatttttctaaaaacgaccgactttcagaaagttgaagccataagtgggtcatttgtgctgtgtcagaaataagttacatattctgaatgcccagaagattgagcaagaagaaaaaacaaaagaagttacacatttaagaggggaaataagcttcttaggtacagattcagaaacaaaatttgtaagttgatagttacagctagtttgtacagtttaagtaggaaagaatttgagttcatttgacatagccccattgttttaaatgttggtattcacaagttttgagggcttatttttccttttatggcagtattcagacatcacacagatttttttatggtctctcaaaagtcttgtttcctcccccatcaccccttgagacttggaaagctctcaacttttctgattatttggaggataaaatgttaccaatctgggggagaaacaatgtttttatattattatttttaagag

SEQ ID NO: 15461 - DNA, 1188 bp, Homo sapiens
cagaaatagaactgtgaaggataactccctagacttgcacgtgggagtgaagaggccagttcctgctgtgcttgtgtcatcctgcgatgctggggttgacctgtttgtagtccactctggttgcggttaacaggaggggctgccttggagggttggcgtctggtgggtgtactaacttggtcagatgcagatgggctcctcatgggagccttttcacgggaagcatgaggtcacgttttctggctttcgtttgctggcatttgcttaagagaacatttggagtttgagaggagaatgactgaggatttcttcccatgaactcactcaatgtacttgcacagctggggcggtagaattcctttggattagttacacaaaatcccaacatgattttatgaagctttggtctcagaatttgcagatttgggaacctcttgatgaccccgtttaactaaagcggttgcatcccctgcccttcttgctgctgctttctttattttagtagcctttactgcattctcattttaaagaagaatctttacaatgtgtggtatggtaacattataattactatttttttttaatagggaactcctgaatttgtaactgcaacagaatgtgtgcactactttgagtggaggaccactgcagcctgcaagaaagacatatttaaagcaaataaggaggtaacatgggaacttcaaattacatgcttatgaagtatactctggggaactttatctttcaaatactgattctaacctttccgggtgaaaatcttttttagcttccaaattgcatttgagcagagataccatgtgatttaatttttaaaacttttctgagtggttcttatttttaggacagggcatttaaaatatcacaggatgtgatttttggtccagattggaaatagaatggctcatccatatagggcaagttagttcttggtttctggtgctgtgcaactcagtaaactaagtgacgtgtttgggcttgggcttagagtattcactctacctgcaggagccatctgtttctgacgctgcctgcttcatcttcctttgcacctggctttccacctgtgttgtaccccgcttttgataagtctcctttacctgtttgcattgttaaatctctctgtccctctcctcagccttgggatgacttctggctgcaatgtgagtc

SEQ ID NO: 15462 - DNA, 1254 bp, Homo sapiens
tggatgtgtcagcagagatgttgtgggtgagctggtaagcggggttttgctggagtgggaggcagcaagctgatgggactgtgttcaagagagaatggaaggcaggaagaggagaagacgtgtagggacaattgaagaaattttgctctaagttgcagagacatgagatgatagctaggggaatgtagggaccaggaaggacgtttgtgaggtggtagatctcatggcatgctgacggaaacgatccagtggagagggaaaacctggtgatgtaaagtgagaggagatgattgcacaacagtcctcatgtaagagagaagagataccgaaaagaacgcagaggagccaagacgtttattgacctttgcctgagttcgttattaggggacaccatagcatgatagtccctaaggaatggagagcagtgttgtgtgacattggtcataagcttttctgattgaccaagatgtatactgaagactcacttttttcttcctcccttccaggtgccatgctatgtgtttgatgaagagttgaggaagcatgatctcaatcctctgatcaagcttagtggtgcctacttggtggatgactccgatccggacacttctctattcatcaatgtttgtagagacataggtatgaatctttgtggggctgagggggtggtggtgagggatttcttctatggcttcaatatctttgcctttctacctttatttctgttttcacatccatgtttctgattaggccctctaataaagcttttgtccccaaaaatgttctatttgcacaacccacctcttctcccccagtagattccatgcctcctccccaacccctgtagattccatcctaactgttgatccattccatgtgggtgttctctcggccagacaccttgggtttcgggattctacagaagtgagggtcggtcttgttctctgtgtgtgcctgaatcccttggctctgagttacgggctgggtgaaaaagaaaaagggatgatcaaggacttgggtacttggtcgggatgcatatttggcccaagctgacttgttcctttctctgtacttgccaaaactggtgtgagaagctttagcttaagctttagaatctttgataaattaactaaagaccgtaaataaatggtctttatctaaaaagggccatgaaaagttttactaagcctttgactagccttcagctggttttactaagccaagtttctaaaacccagcttgatgttcccctca

SEQ ID NO: 15463 - DNA, 1145 bp, Homo sapiens
tataacaaaaagcaagtgaactaagaagtaagcggcctcctgcttgggttgctaaacaggtttcgttaatttctgctttggatatgagacacattctcaccctttggctgtgtggctgtgctttcaaaagactttgtgtcttggggtagctgaagccctgacagtaggggacaatgtcagtttacagttggtgctgatgcatgttgcaagccatttggtctttcttgccctggaagggcattgtgcatccttcatggcgctttctggctgaacctatggatgaccctggaggaccccaatgtggctgttaatgtctagccaaacgtggcactctagggaaacccatccgctgccttggtgggttcagggggctggagaagggctgcacgtgctgggtttgggctgatttctttctttctttctctttctttcttttttttttaagtcacttctttgtctgcgtgatgatcatttttaaccacatcttctgttttctccccctttctcttccagataaaaatggaagtaaaaatctgggaaaatttatttcctctcccatgaaagagaaaggaaacattcaactctcttattcagatggtgatgattgtggtcatggcaagaaaattaaaactaatatcacacttgtatgcaagccaggtaaaaattttaaaaaagatgaaatcttttctggcttctgccagaggtcctgcattcttcatatctctgttcctcatcagtcactgcaaagctgatcagacagattggcatggtgttcagcattttgagttccagactctggcgatgggagataggtcatttggaatttttccctcatcccctcctcaaaaccaaatcagaaatggagaaaccagatggtgtcagaagggagttgtgggtctcagcgctgtatcctcttcctcgggactgatactcggccagtcatgtggttacttaacttccttcaaaggggaaaaaaatcataaatggtttaaaacattgcccgtgatctcaccacttaaacacaatgttaattttcattacctttatttatagatgtatgttgtttttaccaagtcaaaatttttatggtaacaaatcttaatgtttctcaaagtgtagtattttgtaaatacttttctatgttt

SEQ ID NO: 15464 - DNA, 1158 bp, Homo sapiens
cttatttgagatactgaaaatactatcttaaattcattattgaggtggttttgctgaatgcaaaaccttcggaacacaagggaataaattatgtttgaaaaggctttcgtgtgaattctaggcaagaaacctctctgagggagaccttacaagaaggccataatatcatgctcgtcctactttgaacatgctgttgtttattagcccagcagttatgggctttgaatagcgctttaggctaacccagtagaagggaatggtggagttggatccatctccaaggaaaatgttagtaatcgcggttctggtggcctcaaggggcagcgtctcttctgcctcctccacttcttcctgccgttgggaacctcctgggaagaacctctccctttcaaactgtggggtgagaccactctgttaactgtcggactgaccttccatacttttattgtttttattctttcttagggttttcttttgacttatcacctctcacaaagaaaaatggtgcctataaagttgagacaaagaagtatgacttttatataaatgtgtgtggcccggtgtctgtgagcccctgtcagccagactcaggagcctgccaggtggcaaaaaggcaagtagcttctcagttctgtttcattcttaggcattatatgctaagaaatattattttcaggaataggtgtgttctcacttaatgtcattgctttatgacaagcatttaaatactgatgagacctggtctgaaaactgaaggatgttaggagtttaatttcccagagaaaggagcaggcccatccttgggaaagaagggtggattgaggttatgcctcactattgcgcattttgtgcttctcagtgcctagatatctctgtgcgtatttctgcattctgcgtaactgcagttcaaatgaagtgagttgtctaaaccagcggtgccaagaggagatttgggtcccagtgttcctgctgccgttggagaccttgtgtgggttcctgtggtctgcagcccgggcctggttctggtgactcctcacgtcgctcacgggccctcccttcagtgtggcagccttggagtgcttctgcccctcaggtctttgctgagagaaacgtgtgtttatttcagtgatgagaagacttggaacttgggtctgagta

SEQ ID NO: 15465 - DNA, 1505 bp, Homo sapiens
gacacagtgagctagccagtgttggatgttctggggtagtacttgatagcattgagtcacagggaatgcatttagtacgaggtttggctgtagaaattacagggcacgctgttggtcattcatgctgtttcagcagttgggcaagatttaaatacatttaggaacttgtaaaaatgaagtcaaagtagctggtggtgagtacgtggacagccctcaggcacagtggagaaagtgacattcccttaggtgatgaggctaaggaatgcctcatgtcatcatacacgggtcagtctgtgacgttgcagcagccttggacaaggggaagcctgattttattcccaaagtgtaatgtgacaggagtgcatggtatggtgctgggaggccagggatactttgtctcacactcttcagggtgtgtggtgtcacatgtcttaggctaagtttgacagcctagggacccgaaccaaaccttgtttaatgttctccttctttacaggtctcctgactcagaagctaacttatgaaaatggcttgttaaaaatgaacttcacggggggggacacttgccataaggtttatcagcgctccacagccatcttcttctactgtgaccgcggcacccagcgggtgagcatgtaccgacggccctcagcggggtcttctccccaccctcaggctgctgggatcatattagaaagaatctgtcctcagatctcatcaaatctcctggttaactgagtttaaaataaccatttacagaaaatatgttgaaactttcatcagttagtattgattttcatgaacgtaaccattctttactattttcattcttaaaactcaaagtataaactaaagttttgcattctcacttttatatatgtgcctcttaacttttttagccagtatttctaaaggagacttcagattgttcctacttgtttgagtggcgaacgcagtatgcctgcccacctttcgatctgactgaatgttcattcaagtaagtccatggatgtgttgtctcttttggacagactaacttggtatgattttgctttaataattagtggtcttgggtgcaggggattagattagtcagttaatttacctaggactcggtttgctcatattaaaatgaggagtcgggctaggttaactctcagctccgtcaccacctggagctgctgtggtgactgcatggggaagggattggagctgaagcagagagtggacccctggcactcttgcgtgatccacatgtcagtgagcagagtgggccaggagcggtgtggtgacccctgcgatgaagggaggtcttcgttgcatgtgatcgtccacagagctgctctcaacagctttgccagatcgccctctggacacctggggtcccatccttagagattttggttttgtgggtctgcggttctgttttttggagggatgccctgtgttctgccgtgtgaaacacccagtatgagccacttgatcactgttgactttcctggggg

SEQ ID NO: 15466 - DNA, 1182 bp, Homo sapiens
agaccaggattagcgtgggcaaggccaacaagaggctgagatacgtggaccaggtcctgcagctggtgtacaaggatgggtccccttgtccctccaaatccggcctgagctataagagtgtgatcagtttcgtgtgcaggcctgaggccaggccaaccaataggcccatgctcatctccctggacaagcagacatgcactctcttcttctcctggcacacgccgctggcctgcgagcaagcggtgagttttcagatgggcacgggagaagtgcatgtccagtgcctggctgcacccgggccccttcgtcaggttcacttgcccactagtagatgcccagctgaactgtccactcctgatcaccccaataataaagttgactggaagtgcccagtgctatgtaatgaagcattttgacacctttctactttttttgttgttgttattcagcttttaaattcttatggatgacctagtggtgattaggaaaatttttttgtagactcaaagcagtctttcctacttaacagaccgaatgttccgtgaggaatggaagctctattgttgacttgtctccccttattcatcgcactggtggttatgaggcttatgatgagagtgaggatgatgcctccgataccaaccctgatttctacatcaatatttgtcagccactaaatcccatgcacggagtgccctgtcctgccggagccgctgtgtgcaaagttcctattgatggtccccccatagtaagtatgacaaatccaagggtggagataatttttgcaagacttttagtgataacctttgcgttgtttcttgccttcagtggggagttgctcaagcataaaaaaaatggagaaagtaagtgggactgtgtatgttctgggtccgctactggaagattaaaggtttgcacattgaactgttcgctgatgatggtagccagccagtctttgagcatgggaggtaacacgaatatgtgtgtagggactctacttgtcatgagcctcagggttgacccaaatcaagaagtttttaggtgaagtgacaggaaagcacattgccctagcctggtttctttgtgtgaaatgccttgtcttctgtagttaaaacgcttgcgaaatgcaaacagtttctttggcaaggagttataattaagggcaagagtacgtttgctaat

SEQ ID NO: 15467 - DNA, 1128 bp, Homo sapiens
tgcagtcgggccagaacaaggaggctgtaaggacggaggagtctgtctgctctcaggcaccaagggggcatcctttggacggctgcaatcaatgaaactggattacaggcaccaggatgaagcggtcgttttaagttacgtgaatggtgatcgttgccctccaggtaaatatttgcaatgaggtaaataaacttcaagctcatagtaaactagaaattagacatagcagcagaaagaagctgcggagtggagctccacggtcctatgagtgctgtaaccttgggcgtgaatgtgagctgttcctctgtacacccccggtgtgaatgctggtgtgtgaatcacgctgtgttctctcagttgcctggtgagttttggcaggtgaatgccggttgtcacgtaggtgctttaggatgggcagcttccttagggactgctgctgcattctgaggtgattgtgcctggcgaggcacagctgccacactgataatgttcttcttctttccagaaaccgatgacggcgtcccctgtgtcttccccttcatattcaatgggaagagctacgaggagtgcatcatagagagcagggcgaagctgtggtgtagcacaactgcggactacgacagagaccacgagtggggcttctgcagacactgtgagtaggacggctccgcgtccccacatggcctggggccttgatactgtcaaggctcgattcacactgagacctttgtggatgccccagtcagtggcaggaattctcttgcataaaatattttcttactcgggctgtttcccacagagaaacgtttgaattgctctgtgggattgctgggtaaccgtatctacagaccgtggtagagctgccgtgagatgctgtgctgggtggctggctaggcccactcactagctggagggccttgtgtccacataccaggttttagccctggtggttcagattatgcctcaggaaaatgaatgtctgctatgggtcttcaggattctgaagctagtgaggattccggtaaaccaggcgactcatttattgactttccgccatgtggcagcccaggtggggatggaggtttcttggtgagccacactcagtgccttgcccctgcggtgctcagg

SEQ ID NO: 15468 - DNA, 1208 bp, Homo sapiens
aaaagtagcaatatgcctgcagatttgcttagtcttgggacacggttaccaccagaacggctgctcagacaatatgcttggggactttctcatggctttttgaacaaggaggctgcgcaccctgtgaagcctcctgcattcacacctctgctgcatggtttatgcctcagtgttatgtgcactggaatgcttttcactatacgtttccaagttagaaagattagtgttatggaagtgcctaatgtatcctagtccaaaatatttaaagattgttctctgtgtcttgaagttttgcacaaaattctttatgaattttacacttggcaaatgttaatgctagaagccatagtccgcttcttatacaagtccaaagcgttgactgttgtatcattagctccctggttacactggtttcccagctccttgtgtagaccactgctaatcccttagaaacaagaggtctggcactagtagcacaacctaaggtggcattccaagtctttaagcaagtcacagcaacttttctgccaaagtcagcttagtttagacttcagtgaatcaggctgttgccatcctaatgtatgtctctgtgagtctgttcattcacatatctgccgttggctgactttcttgactcgctgcttgcttgcttgtttccttgctttggaaagctattgaagatgtgtacataattctttaggaaggggattgctaaaaaatacactgcaaagcgatggaaaacagtggagaacaggggagtagccaggctggatggctcaaatataaatgaatgaggaattctttatgaagtgtcagttggactttgtgattgagtgatgtaatacaggaattatatagaaagggaagaatatctgatactgatctgttagatacttcagaggctccttgatttgcatatttaaagttcctaaaattgtagcttttcccttcttttggctgtacagcagactgttttaatccacggttgtgccttattgttccattaaaattgtgtcttcagtccatcaataaatactcgtggttaaaacaaaacaaaaattctttactgcatgctgactaagggcagggctctatccatgtgcatcgagtggcctcgtaagctgtgaacagagtgcctgtgggacgtgggatgaagtctcttctgcctgattttaagtctttgcaaactttttagaccgtaaggagct

SEQ ID NO: 15469 - DNA, 2360 bp, Homo sapiens
ccctgggaactggagatgcagtgactgtgaggacagtgggccagttcttccccagctcgtgccagcagagagcatccctgatgtggtggatggtggagcagaatggggtctcttagggggctcacgtggtctctgctgttgatccctggcaggtgaataaggaagaagagacagatgagaatgaaacagagtggctgatggaagagatccagctgcctcctccacggcagggaaaggaagggcaggagaacggccatattaccaccaagtcagtgaaagccctcagctccctgcatggggatgaccaggacagtgaggatgaggttctgaccatcccagaggtgaaagttcactcgggcaggggagctggggcagagagctcccacccagtgagaaacgcacagagcaatgcccttcaggagcgtgaggacgatagggtggggctggtcaggggtgagaaggcgaggaaagggaagtccagctctgcacagcagaagacagtgagctccaccaagctggtgtccttccatgacgacagcgacgaggacctcttacacatctgactccgcagtgcctgcaggggagcacggagccgcgggacagccaagcacctccaaccaaataagacttccactcgatgatgcttctataattttgcctttaacagaaactttcaaaagggaagagtttttgtgatgggggagagggtgaaggaggtcaggccccactccttcctgattgtttacagtcattggaataaggcatggctcagatcggccacagggcggtaccttgtgcccagggttttgccccaagtcctcatttaaaagcataaggccggacgcatctcaaaacagagggctgcattcgaagaaacccttgctgctttagtcccgatagggtatttgaccccgatatattttagcattttaattctctccccctatttattgactttgacaattactcaggtttgagaaaaaggaaaaaaaaacagccaccgtttcttcctgccagcaggggtgtgatgtaccagtttgtccatcttgagatggtgaggctgtcagtgtatggggcagcttccggcgggatgttgaactggtcattaatgtgtcccctgagttggagctcattctgtctcttttctcttttgctttctgtttcttaagggcacacacacgtgcgtgcgagcacacacacacatacgtgcacagggtccccgagtgcctaggttttggagagtttgcctgttctatgcctttagtcaggaatggctgcacctttttgcatgatatcttcaagcctgggcgtacagagcacatttgtcagtatttttgccggctggtgaattcaaacaacctgcccaaagattgatttgtgtgtttgtgtgtgtgtgtgtgtgtgtgtgtgtgtgtgtgagtggagttgaggtgtcagagaaaatgaattttttccagatttggggtataggtctcatctcttcaggttctcatgataccacctttactgtgcttatttttttaagaaaaaagtgttgatcaaccattcgacctataagaagccttaatttgcacagtgtgtgacttacagaaactgcatgaaaaatcatgggccagagcctcggccctagcattgcacttggcctcatgctggagggaggctgggcgggtacagcgcggaggaggagggaggccaggcgggcatggcgtggaggaggagggaggccgggcggtcacagcatggaggaggagggaggcgctgctggtgttcttattctggcggcagcgcctttcctgccatgtttagtgaatgacttttctcgcattgtagaattgtatatagactctggtgttctattgctgagaagcaaaccgccctgcagcatccctcagcctgtaccggtttggctggcttgtttgatttcaacatgagtgtattttttaaaattgatttttctcttcatttttttttcaatcaactttactgtaatataaagtattcaacaatttcaataaaagataaattattaattgggtgttaccattttttccttgatagtgagacgttcccgagcgagttacccatctgcctgcctgtcttttctttctgttaagtgactgaatttgggttttaactctggtgttctcgttgaccctttatgaggcagcactttcatttttctccagagtctcctggtcgtaggtgttaactttgggtccaatctgccttcccttggctctttctagatccgatttctttaccttctccaggccaacctcggggtgtggtcctgttcatcaaaacaatgaacatggagtttagagtccagtgagtcaataaagcttttttttgtgcaacct

SEQ ID NO: 15470 - DNA, 1210 bp, Homo sapiens
tgctcctatacattctgttttctgtgtgtttcaaagacagaaagaggcgaggcactgaagttcagagcaggactgaacttgcccactcatcaattaagctgtcagcagctagcacataagtacatttttagttctgtctgatttgtatcttctagtccttcgctggtttttccttaaggcgtaagtttttagttctatatttcatttgtgttagaaagagctctataaacaagagaaacagaaagcataacagctctacccatgtggtactccttgttcatggtaggagaagcggcagtcacaattattactctcttcaagcaaaagaaaagttctccttttgagttttcacaggtaaaaatgaggaggagcacagtgctgaagagatttttctgtacaaaagttttacaaagaattatttaaaaaattataagtaaatttgaattcacttaactgtgttgctgaatattttccctgcacactgtctttcataggcaagagggcacattgggagattcagcttgcaagagtcctgaatctgatctagaagacttctccgatgaaacaaatacagagaatctttatggtacctctccccccagcacacctcgacagatgaaacgcatgtcaaccaaacatcagaggaataatgtggggaggccagccagtcggtctaatttgaaaggtgagtcttgtacttgaaaagaggtgtacatgagagggtatggcacttgattgattctttcaacaataaagttagcaatttcttttatttttaatttgattttaatgctcctgtaaagttcaatttttttttgaattattaccattagtattaataaaattgacacatagttttccagagatagaaacgtttgtcctgagtaatggttaaagccagcaatgcacgggcatttgaagaagtgaaagagggcaaatgtttcccagtgtactaatacaagatggcaactggttacatgggatagatggccttctattctttcagtctcttaggctgaagtttctagatttcctctgcccagaagtggtgtattggggatttgaggagagacagagccaggctgtcttcccctggattccctctgctctctgctggtgccccggggtgctatctttagtgtgtagggctctctttttcatactaagcacagtgaccccacacctaacaaccatgacagaacctgctttc

SEQ ID NO: 15471 - DNA, 1232 bp, Homo sapiens
ggagcttcgcctttgttagagatagagctggttttaatggtacttcagtagaagggcagtgcaaagccactcctggaacaaagattgtaggttactcaacacatcatgagcatctccaacgccagagggtctcatttgagcaggtaaaacggataatggagctgctagagtacatagaagcactttatccatcattgcaggctcttcagaaggactatgaaaaatatgctgcaaaagacttccaggacagggtgcaggcactctgtttgtggttaaacatcacaaaagacttaaatcagaaattaaggattatgggcactgttttgggcatcaagaatttatcagacattggctggccagtgtttgaaatcccttcccctcgaccatccaaaggtaatgagccggagtatgagggtgatgacacagaaggagaattaaaggagttggaaagtagtacggatgagagtgaagaagaacaaatctctgatcctagggtaccggaaatcagacagcccatagataacagcttcgacatccagtcgcgggactgcatatccaagaagcttgagaggctcgaatctgaggatgattctcttggctggggagcaccagactggagcacagaagcaggctttagtagacattgtctgacttctatttatagaccatttgtagacaaagcactgaagcagatggggttaagaaagttaattttaagacttcacaagctaatggatggttccttgcaaagggcacgtatagcattggtaaagaacgatcgtccagtggaggtaggtttccagtaggtattaatacaatgatatccttagttccatttatttattgcaaattataatgttggtgttatgtactttcatattctaatatttttgaacacaaatggcagttataaattgcacatttaagcatttctgtaaagtactatgattaaatagatctatgaaaactgcatgaaatttagtgaattaagtgcagggtggtatgtggagggaataagttcaaccacgtaaatacaggatggcaaaggacaggctgggtataaacaaaaatggaaggaagaaagccatagtcatggatgaccacaagctgcatgtgagtcaggaaaaaagtccacgtcacactcaggtgtttataaatgaatagggcgcccaaggtcaaggagagagttctttctctatcctttgaagttgttttctctcttttgattagca

SEQ ID NO: 15472 - DNA, 1178 bp, Homo sapiens
acattagggatttgtaattaaataacaatttatgtcttagttatgaagtgcataacaatttatattgacctgagagtgcatataggcgttttagaaaatgctttcattagtcagttcccaggcttaactttagagcagtaacttacctctgccattgttcattacatttcttaagccttgccctctgtgcccagtacagtgctgggagcatcaggatgagtggatggggccttccccgtaagactcatactgcgcgtatgcacaagcacacacctggctctgcaagagctcagctctctcctgcttcctcacaggtttgcacagatgaagaatgaagcctagtagaatatggacttggaaaattctcttaatcactactgtatgtaatatttacataaagactgtgctgagaagcagtataagcctttttaaccttccaagactgaagactgcacaggtgacaagcgtcacttctcctgctgctcctgtttgtctgatgtggcaaaaggccctctggagggctggtggccacgaggttaaagaagctgcatgttaagtgccattactactgtacacggaccatcgcctctgtctcctccgtgtctcgcgcgactgagaaccgtgacatcagcgtagtgttttgacctttctaggttcaaaagaagttgtagtgttatcaggcgtcccataccttgtttttaatctcctgtttgttgagtgcactgactgtgaaacctttaccttttttgttgttgttggcaagctgcaggtttgtaatgcaaaaggctgattactgaaatttaagaaaaaggttcttttttcaataaatggtttattttaggaaagctcagttatattgtcttttaatggttaacacttatgagccaacgcagtatgatacagaagtctgtcattttcactcatctgttcctcaaaaggaggagcacaatcacgtgtgctaaagatggtcactgggttcggcgtctctttaggatcgcctcgctgaaaagcaaaggaaataaatgaagcaacactaatgacgtaaggtggttccttttaagtagtttctattaaccagcaagtttataacagatacaagtttaagccttgttatcacatgttgggagttcactttatttttaaaccaagatgtttaggtgctaggtcagtgtaattac

SEQ ID NO: 15473 - DNA, 1168 bp, Homo sapiens
aaatttattatcttgcagctcaatagtgcagaagtccacataggtcatacaggactaaaatcgaggtatctacagaaccgtgtcccctcctggggctctgctggaaagcctgtttcctggccttttccagctttcactccttggctcgtgggcctcttcaaagacaacttcttcaaagccagcaacgttgcatctccctgaccgtttttcgtgtcatctctagctgtcatcttgtgcctcactctgccagtttaaggaccatcgtgattatacttgatccacccagattatccaaaaggatctccctatctcgaggtctttaatgtgagcatgtgtgcaaagtaccttttgtcatgtaatgcaacatagtcacatagtcacgggttccaggaattaggttacgttcatcttggcggtggtgggcagaatattctgcctaccacacagtggagtggtcttcctaaaacacatctcttctcctactgacaattactaactactacctgtggagtaaagtccaaacttcctatttgggcataatggtctccatcctccgtcccgcgtccagtagtgcctacattcaagaaaccactggcatttgctccgtagcagtgtgactgcctctgtgtctactagttctgctctttgaccttgagtggccttaccttccctcagctctcgtgatcattcccaagtcaccacctctgcaaagcctcccaggacccaccctccgaggtggaacggcacactccttctaggtgcttgctgtccctacaaccacatctctcatgtcacctctccctcttcattgcaccttgctggttaccagcagagctccctgtgaacaggaaacttgtctgtcctgttgctgcatccccagcaccaggcatagtgaattacaaatgttagttggatgggcagatgaacgcacattaggctgcagagctcgtgggctgctcctggggcccatgcttgctctcacactaatataagaacagttatccagccagctgaggatgtcaacagccacttctcagaatgaaaaaggacacgaaccaatgtttcactttactacaccactagtgaattaaacgaagccacaagcactcggcttggaagattctatcattccttatgttctattccccaccgtttgggccacttagta

SEQ ID NO: 15474 - DNA, 1199 bp, Homo sapiens
cgccccctcctccctgcctccccggcggggcgggcgacgggggcaacgggagtgtgacggactgcggcgctcggcgggcctgggcgcaaggactgggtcgccgccgtgcggggcgcccggggcgggtgggtgtgggctgcggggccgacggccgcggggggggcgcggggctttccacggcacggggcgggtggggctgcgggcgcggtcggggctggcgcggcaggcgagaggaattccagcgggacgcgccagcgctgcctccgcctcgcctcccgttactatagttttttcagaacctcttatccaccccgcagaagagaaatttttttttaacgtcctgttgcttcacgggggactttcggggtgggcatcacgtggcccgacacgtagccgtggggctccagagcgcgtgcgcgcgtcgagcccggtcgccacgccccttccgagggtcgctccgcccccgtcgggccccgcgagcgcgcggtgggggaggggagggccccggagcgcgcctgcgtggggcgggggcggcagccgactaggggctgggtctggccgtttagggccgggtcttggcccgtcgcccacggtgcggagggctggtgggctttccttggccgtcgggcccgccacggcgcgggtcttggctgcggggcggaggtggggcgggagagccgaggataagagtttgaggcttttcgaggcgcgtgccgcggcgtccgcctctgcgggactctgcgccgggcgccctcggccggcgcgcccggctcccgctttgtcgccgagggaagcacgcgcgacgcccctcccgtcgccgccgtggcttctttcggtgttcgtgatttgctgagaggctggaaagcagcacggcggagaggagccttgcactcgccaggcgggaagcctgcgcggacacgcgtgcgcacccacggggcggcgggcgggcgtggggggtccgggccacgcgggcgacgcgcctctagggaagcgatcttgttgcaccttcccgttattctgaaagcaaatcgtagccagacccgagcgcagcggcttagcaaataataaggggagcgtcagtcgtgctcgaaatgcttccttcgcgatggcgtcagtgttccgtgagggaatgaagccgcagtaggaaataaagaggctgtgcgcgtagtctgaaaagcagaagtcaacatttttacaga

SEQ ID NO: 15475 - DNA, 1228 bp, Homo sapiens
agacttctgctgaacttgcagtctgttgtcttttgaacatctctgtttggatattccaaagatatctaaaaataatggaagtggtcccgtttaaatatccttcggacaaattagttctgaagtacaaaagaggctttggtattagttttgtctgacaggcattcttatagttgtttactgaagctatgatttggaatgactggcctcgtttagacttggaaaaattagatgaactaacaagtccatattataccggttaggaaggagctcgggctttgaagttaatttaataagatatgttatttgattcgtataaaaattggtttgtagtagaaattaattaaggctatagtcttgtttaaacatgggcttaatccagagaatgatagaataggccaggagctccttatttgagttttaatgctttatcaatgaaaccctcccctgccctctcttttttcctctggactagcaagaatattttttttgtctaacacatttaaaatttttacttttaacagaaattagcagagtacggaaagacatgtacaatgacacattaaatggcagtacagagaaaaggagtgcagaattgcctgatgctgtgggacctattgttcagttacaagagaaactttatgtgcctgtaaaagaatacccagatgtaagtatattttgttgttttattcaattttgttctgcttcacatatgttgggaagagatatatttggtggtaaatacttaagcattattagccactttaaaaaaatgcagtcatcaactgaagtgtgaataatttggcatgataatttaaaaaatttctctctaaatatgtttgcatttgattgctgctatgtcactttggaaatgcacatggtatagactcttgggtttcaaaactggatgaggaattgtggaaagcactatggcctgactgacacagagcaccaagcacaacattgctcatctttaatctgaccttcaagaagccacagcttgggccacagcattctttctgtaaaatgaaggtgttggaccataagtttcctttcagctctaaaatttttattgaaaccactgattgtaatctgattttcccccatcttagtccattgttgaactattctctataagcatcttgttgtgaatagcctccttgtcctatatctgttaatttctaaataaatccagattctttgctttttgttacaaagccctatatgatac

SEQ ID NO: 15476 - DNA, 1065 bp, Homo sapiens
ttagtttttcatgttgtcattaagccgtcactagctgaaactaatctcttctctatcttttcttttcttttttttgttttgtttttttttgtttctaaccacccagccgccaccggcaactaacctatgaccttctgacctctgaactcttcacccaatgatgacctgaccatgcctgcctgctgatcagttaactggtaatcgcctttgcttgcctgtcgtcagtgcagcgagctgaggcacttgtccgttcgtcttaccatctaaccaaacaaaagacaaagaaattgttgtcctccaactcagctttttttttttttttttcctgtttgggtgaaagtggttctagaaactgcactgaatagtagtaaagcaataaggcccaattcatcccacagcactgatcatcttttaatatcccaccctaagcgaacggtaagaaggcctctcttaagaaggggagacagatggtccttaactactcaatgacagaggcagttactgtgagagacttctaggaatctttttcttctcatagcgaagtcaaagctctctctgaatgtactgtgtgatgatgcatcatgcatgaaccttcggtcagggatatcattggtgaagtgatttcaaaaagtattcaaaatttgatatgctgtttagtcactacagtgccctcaaagggcagaagttgcagccttttttatattgcctgccaaaatttgaagtattagaagaaagtgtgccatgagagaaaaacttaaggagttttgaaaagtaatgcaaataacaaaactgcaacactatttttaaaaagataaatatctgagttaaaattactgaatctttattttacacctaaaaaaatatgagaacaaggtacatgcattatgtgtcacattactgggcaaactgttcaagtatttttttttaaacctccctgtatagaaaaaaatcattaaggatgtaaaagccatgcttgcctatttgctgtatacatgtaatgaaattgtagataaagtgtagtgcattgaaacaaatgaacaaaaagtagatacttttactatacaa

SEQ ID NO: 15477 - DNA, 2425 bp, Homo sapiens
tgccttattttccttcatggtcattcagtcaagtgtctcataaagatcagctcctccctcagaatacaagttaatgcatgttactcagtcgcccagtatgtgaaagaagatatgagggagacaaatgagttgatagtttgaattataggatttttgccacgttaccttgatgcaaatttgccaaatctgatactgtgaaaagatttgataacttttctaatgcctgactagtaagttttaaaacatcattctttaaaagaatagtttaatacttttggttattccaatcttcaatgttaacccaaaggattctgagataaaaattatgtgtcatctaaacttcagtttacagacaaaattagagctttgttttatttggagaagggggatgcattcatttgattttgttttttgtttttaattaattgaatataataggatacctagcaaatgttttcacaaaagtgaatctttgtgattttcattctagaaaacaatgttttaaatcacccaaatttaatcacatgtctttatatcataccagataactggtgtagtgtatccttttactgtttcaataacctctgcctcccccaccccttaactttaaaagaatgtgaaaaactagcatcatagtgcatataaatactcaaccacatttcagcttaagcttctaatttctcaagaagttgaaacagttagttatgtagttgaagcaatttgtgtgcaaagcctacatctaaacacttgagtgaataatcattaactgctcagtaccagacgtggcaaatctcaagtgacagtggacccccccccccgcccagcttatcaactcgtcccctcttccacaccttcccagcatcacagtcagaggtcagcaggaagctgagtcattaccttcttggtgacctcccccaccatcttgtctcacttggaaaccgttgtcagtttatttactatgcaatagacattcattgttttgtatccagctagctttggtttaatatgccactgctttgtctttctgttacacatacagttttgatttatttacaatatatgctgtgccattttgatttttatattgtttggttggttgaataaatttgcgacactcaaacacttgaggtgatagttgttaaaaacaataccagtatttgatccagtttcatctcaactatgttatacctggacattttagatgtttatcaaaggtcttttatggggaagaaagtaaatgtatgaaataataaatgtgtgacatttatagggaatgttggctctgaacaaacttttgaaaacttggttgacaaaattttggatcaactgaaaaaagcatgacttttgaaatctctgaatgccttggttctcagtattatcattctttattgaatttatttcttattaaaatatgtagtttttaagactttttttctgacagtattatgtaattttttagcgtgggtagatgggagtgtcgcttgtatgttatcgtacagctgacatgtatttttgtctattctttattatcttagtttcatgctatgtatgtaccataaccaacctattgcctatgagaaacatgtaagataatgtatttacagccattgttacaagtttataatgtatttttctatcttgttttatatgtatgttatataacattcaaaaagaatttttttcttgattgagaaaaggatacaaaatgcaaaatccacaattttgataactgaaaattgccaattgttttgcagtactttattatattgggtgtcttgtcttttttgggcttttagttagctaatgaatgaatacattagacacttttgggttttagttgggattttacatagcttgcattttaattctttggttctttgctgtttctattaacccacagcattattttaataaatgttataataccaacctactaactctggactttgtctgtttattaacctttatatgtttaattaaaataaacaaataaagacaaaagaatgtaaagtcttgagttactggactaaccctgaagaacgtgaccacagataacatagtgtgacttgtttttatgttgtttgtcagctgacagttttgcacactactgttaaaatggctttggttattctggtcttttagcttgggggccggggcgggtgtgggtgtaggtgcagtagagatgggaacaaagtagcctttgtttgaggcattcttctcttgccacttgcctttcagcatctgcattactaattccacaccttatttttccttctccaaaataatcactgtctgctcacagcatcgagtaaaaagatacattgtcatggtatatacctggagaaaccagtttgattctttgttgaaccatttcttttaatttctgtaaataagtaattttatggtcacattgtaaagcagagaa

SEQ ID NO: 15478 - DNA, 1071 bp, Homo sapiens
aaggcccactggctgtttctcatggtggcctgaagccccgctgctttccagtgaggaaaagaaccctcagcacgttactgagctttcctcaggtatttttttctctgtcacctactttacaaatacagtcagactaaaacattaaacaagaagtttaagggggaataacattgggatttgaaaagttgtatgtgattaatttcttgcatgcaaatcaatttaagatttcttaaatatcttcatgcttttcttggctggaacttgggtaaattaacctgtaattatgaattatttagtttaactcaaggtgcatttttatttcacagattgatacttgcttttttctgtgaaacagttctcctagataccaaaatcctcaggatgaatttttgcatttgtaaataacaatttatctttgtaaattacattttatttatttagagttctaaaattgagggctgaaatgaatgacatgtaatagaagacaaaactgtaccaatacgctgttaaccaatcagactgtccaggtattctcatttcataaatatgtatacacacatataaatacacagagtagtgttagctgatgtgagtgataacagcgaatcaccattgagatggtcatttggatcatgtaaacaaaccgtgtcatgtctctgatgggagcggtgggtagtgtactgttaggtggacaggtcttttaacatgctactatttgtaaaagtttccgttgccataacagttcatgtagtagtctgtgaaaattcgaagctgtctgtcaagctgctaatatacaagttgtcatggtaccatgtaacttaaattgatgaatttctatgcaatttactattctctgaagcctatgaatgcagcctcatctcattttcagttaagggtactttatgtataattatgtcattgctgccttttatgtaggaaatgtaaaaaagttttaaaaggcgaaaataacattacagatttcatttttatacaggttacaatattaaacatgaaactaccaaattccaagaatagtaaaattctagagtcagttgattgattgaaactatt

SEQ ID NO: 15479 - DNA, 1244 bp, Homo sapiens
atcagagcttacccaccatagtatattttgatattaggtggttctacacatagttggcaaaatgacttggtaaatttgtaatgctgaagtatattagtataagttaaatttgatgtgtcaactttattttgtatttccttccatttggaaggtttgttagaccattaaggttatattaaagtactcttgtgtgtgctatttagttttgcttgttttaaagaaatctagaagtggttatgagttttaattcatagaattgtcaataacataacatttgcaatcgtcattcctcctgttatccatgtaagcagctttagtcgtaggttctcttcattataatttattatctgtaaagattccttgaaacttaaatgcatctgaaaccattaagcagtgcttttatttcagatctgtaagttaattgtattaaaatccaaattggaatgaaatagtagtaatggcctaagaccatgttcagtttgacaagctttatatactgtacataatttcattgtaacccttaaaaatagagccaataatagaatttccacagtctcatttatacggttaaagcattattgctattatgtaggtcacggatgtttataatactaaagtattttaaaatgtgcaagtagaaaaaacagtagaaagtgatgcatgcatatttatatataagtaaagcaggattgtgctgtttttgcactttataatttcaattaagttgcggctttttactacaagttaactttattagtaaaaggagcaaattagacctaattcattgatctcggttaagtgagcagactgcatgacttgtgtaatgccagtttctcatttcatattagcctaaatattacagaaattactccttgggctctaaaatgtagaggaaatgaaaatgtaaggattaaggctgtgtaacagaatctggctttttaaaatttaagtgaaactaagctgtaaacatcaagaggaagtaggacataaactgggccggtacagcctgggagccctgtgtatttctgccctccgtctgtgagctgctatctcagtctccttcagctcttcatgtcttagtaaacagcaccacgtgcagatgtaatcttgttgcagtcccccagtgtggttgttataaaatgcatttctttgtaagtcatctctgtaaacagtcactttctaaaagcactatagttctggtcccctggaatctggatcacatgtatgatttatttttaatattt

SEQ ID NO: 15480 - DNA, 1225 bp, Homo sapiens
tttgttagtaatagaattgttgttttatttcaataggcttttgcgggaacaggcggtatttggttacatgaataaattttttcgtggtgatttctgagattttagtgtacttatcaccctaaaagtacatttttatatgtgtatttgtgtgtgaatgtggtttttatatgtatgaatgtatttactgatcatagagttgtttactaatgtaagcatttattcttaacctggtgtttttttttcaagcttatgatgtctttcggtagctgttaatttagagtagtctttggaaattgcttgctagagcttttcaaacacaccaagaggctaatatttcctctgttgagtgaaagtatgaattgggtaagctgtacacagtgattccttggcagatgttcctaaattacatgcatctttttgagaaagttttgcacagttgactgccagtcagcgggccatcctgaccaacctgagtctgcctgatgatttcccatgctgctgttctagggattttagtctttcagttgaagaggaggccaccagaccacatcccaaagaaaaccaagaaacacttggaaggcaagacacccaagggaaaggagagagctgacgggtctggctatggctccacccttcctccggagaagctgccctatttagtagagttaagcccaggtgagaaaactggtcacaccagcacacattattaatgtgcatttttagcttcaaatctttgtactttctaatgcatcttcaagtagtcttctgttggctgacttaacatttttagccatttatttttttaaaagtaactctcataacatttatttctcttaaattattaaaacttaaggttgtaaaatatgtatatgtttacataaaaatggttcacatggacaaagatgagtattcagaaaccaaatttagtgtatggacaattttaaattattttaatccctaaaatttttttttccaagataactttagtaaaatagttactctaccaacaatgacaaattggtatttacctagggcagatttcataaaggggtgggtgtgtgtgtgtgtgtgtgtgtgtgtgtgtgtgtgtgtgtgtggctgttgtttctgatgcatggacagtgtctaaaaagaatatctttaaattttatatctaagaaacccatcttagtaagaggaaggctatttgattttaaagtaacagactacatttattttcacatga

SEQ ID NO: 15481 - DNA, 1172 bp, Homo sapiens
aataggttaggatgttttctgactgtctccctctatcccgcttccttcacgtttagcatcattttaatgcttagcgtaggtaagtggaggtgtttttaaaataaatgggatgtccttttgggtttggcaatctttaataaattttaacgattatttgttttgtttacagatagttctcattttggtgtgtcatgctggccatactctttaaaaagtctcttaaggccaaactaatgatgttaagtgtaattagttaataactatatgtagtttaagatcatgtcactgtttcctcttggaatgaagttgatatttttaaagtaattaaacggcacttactaccataggtaccattatctaaatctgctgcacattcaaaggcttcttcctggatgacattttgctcctcttgtcctctcaccctgtctgggcagatgatgtgctgcacacgctcacaggagccatgtccttgctacgacgctgcagagtcaatgccgccctgaccatccagctcttctctcagctcttccacttcatcaatatgtggctgttcaatagattggtgaccgacccagattcggggctgtgctcccattactggggtgcgattatccgtcagcagttgggccatattgaagcctgggctgagaagcaggggctggaactggctgcggactgtcatctgagcaggatcgtgcaggtgattgctggtgccactccccagctcatgtgctttatgataaaggcatctgatctttatgatgagcaagagcttcaatgcagcaaaacctcaataccctctttttggggtttttcgtatgtacaaataatgaagtagtgctatgtgagtacttgggctgcggttacaaagtacagattattttttcactgtattaattgtatgccataattgttactgttaagtacttaagcctgaataaatctaataaaatgattgcttatagataaataaaaattcagagttagaaatggtggtgacaccaagcaactgcagattgtttacatggtttgttttctgataatttaatgtacacaaactttgtttcatgcacaaagttatttcaaatattgtatgaaattaccttcagtctgtgtgtataaggtgtatatgaaacaaatttcatatttagacttgggtcccatccccagag

SEQ ID NO: 15482 - DNA, 1193 bp, Homo sapiens
gtgggtaatacatcaataaaacgtgtctaaataaaaatcacccataaaccaataatttagaaataacctctatatattgatatatttccaaactggcaaaaatactgggtagatatttgattccggtcttttatattttacattgtgtgggcttttccctatatcattaaacattctatacaaatatagttattaacagctgaaaattaaagaattgtgtgaggaaaaaaatgattagaaaagaaacttcttgtgattgaacaatttctttttatttaaagctacacgttacttaaaattagtaattaaaatcttggttcatctataaaatgtgtgcggcccagagttgctggctttagaaaactgatgatgggggtactcctgggacctgtgctccctccgtaaccctgcgtctgtctgtgtgtgtgtgtgtgtctgtgagataagctgtgctgcagtgagcagacagcctttgaatagttgttggtcacatgcaccaggcagtgagcatctctttttaattttgcgtttgttttccaaacaggatcttatagaaaatgtagtgactgtggctgaaaacactgccgatgagctggcccgcagtgatggaagggaagtgcagttggaggaggatcctgatctgcagctgccgtttcttttgccagaagatggttattcttgtgatgttgtcagaaacattccaaatggtttacaagaatttttagaccctctgtgccagagaggtaaattagtctaaatgcctgagtctgagctacgccccaggttgaagcgagcattttattcattgtccatctcatagggtagtccacttgtgtgggagtgcaccctcgtgctgtctggagaagtccgtgttccactgacttggagaaatatttcatggtgatgtaaggtcagaagtgtcgagacacagagcccttgggcatgttttgtgaccctgtagtgagcatctgctctgcgcacttgatgtcatggttacattttctgcctgggctgataacaaggaaccgtttattgttctcccttcttggtattttatgagcgtagtaggttgattcattcctttagcactaaattgtaaactttgttgataccagcatagcagttaagagcaacacaagctttggaagcagactgcctgcattctaaacccacctctgtcacctacaggctgt

SEQ ID NO: 15483 - DNA, 1191 bp, Homo sapiens
attaaaatgattgatagtatatatcatgcaggtagtttttagtttgcttacacttgtggctgttcagaactattcttaaattaacttcaggattccaagtctctattttactctcatcattaactgatgcatgaataactgatttttcatacttgtaattttcatgtaaaaatgagaaccaggactttgttgcagttatctgtgtacatgttgggtggttttatttttgttttactttcctgcatagtgcatttcttacaatatatcttcaatgcagtgttttcgccttgtttttgcaatagggtgctggtcaagataaactaggaatctatgtgaagtcggttgtgaaaggaggtgctgcagatgtggtcagtatcattttgaaagaagtacattttcagtgtgtcatatattcagcaaatgatgtgagagattctgctgatacttctagttatgtagcactatagtgcttgttggaagaacaaatagagtatctactcatcattaccttttcttcctcccgctctctttgctctctacccctaatccatgcacacacctgtggatttgcctaggatggacgtctagctgcaggtgatcagctcctcagtgtggatggacgaagtctggttggactctctcaggaaaggtatcattgatttatttgcttgaagcatagtattagcatttttaggtgatttttgcattaaatgttgaaattggaagataaaaactatgctaaaacgtgctcatattactctttaccttttatagtgtacgtgacatttcacttgttatcaaattataaatatatattttaatctagtacagtttctttgaaacttgaaagaaacatactcaacacttctttaaatttctgaatattatcttactattcttaaaatgataacaggagatgtgtttgcctattttcatagtcagttttcaaaggagaaaatgggtagtgagtaagctgtctggaagtcagaaccattactcaaaataatagatgaagctgtgtaacatgattttccattgctataatcacagcgattcatgacagagcaggcactgcgttttagtctttcttacatgtgtaatcttcttctcctagggcggcagaactcatgacaagaacaagctctgtggtgacactggaagtagcaaagcagggtgccatctaccacggtc

SEQ ID NO: 15484 - DNA, 2246 bp, Homo sapiens
ccatttatgtaatttaaacactgtctagtttcttaattatctaactcacacgagggtaagttttttgttggtttcttttttggagtcctgagttcaaaggggacagaactaagggcaggagaagagaatggatgtgtcttctctcccatcttcccctcatcatcgaccgaggagcacaaagaagttctgtttctgtttttttcagaaactttattttagctgtcaagcagagaatagcttgaactattcagactattgttggcactgtttagtagtgaccacacgctcttctacccgggaaggaacatatgacgacatgctcctcccatgtcccctgatggtgtctgttcccacaatatccttctagtctgcatcgtgaagtggcttaggccaaagcttcctgtgtgatgacgcacgtccgagactgttccatctcattcctcgcaaatttgagctcttctgatcaattctaaatatttgattaattttaattctgaaagaaaattttgaggatttaagcttaggggattttatttttataaataccagattattgttagacttaataaatcactgttaaatttaaagatgacagttaccttggaaagttcactaatacttcgctccaaggcgtctgtaaaagaagatatctttattggagcaatgttcatgtgactgggaatgacagaagaatgggagatgagtagggacccctcaagcacagctgtcactcagaaattttaaatttgaaaaagaaatcgattttcatctgtatgccgtcaaggaaggaattcagttacagggcatctgtaacttaaatattgtaagaataactcatatggaagttcaagctatttttatactataatagagttatttaattttaatttgttgaattattagttaccactgtcatttcttcagctatggatatgtggctgatgttggggagacggacctcagtgtgttttatattgtctggtgttaagatgataaattactttgtgattacaagcaaattttctatttgacaaagcccttggtggagtccaaatgatttttctgtaccatattgttctcttacacatacgtatgttaggaaaataggcacactttcaaagagaatgttctcttacacatacgtatgttaggaaaatagacacattttcaaagagaatgttctcttacatatgttaggaaaataggcacactttcaaagagaggtataggggctttttactgccttcgaaatcacttttaataaaagttgtatgataaatcattaaaaatgcgagtgtaaatatttttttttacctctatcagggtttttatttgaaagtgtgctcttaccatttccttgtttgagtaagagagtgaatggttctgagtgtttaggaaggatttgcttgcttgcagcagaagttctaggaaaagcaggcacctcccaaatatcttgaggacactggcagccttatggtgactaaatccacactttctttaaagagatgcagatgaattacttttctgttaatatatagaaaaatacacaggagaacatgcagatacatgtaaatatctacatacagggatatttgtatgtgtggttgtgaaacccatacacaagtggatttggccatctttgggcagtgaggtcaaatgtgaatatgtgtaaaagtgcttttcagaactgcattactatgagaaaacatcaaaactgctgtagttttccatttctactgtatttcagttgcaacctatttttaataaactttgtatgtatttaagtgtatttgctattgttttgaaagtgctgacaaagtttatatttgtaacatcagccttcctcgcccatctctttccatctgtctcttcttcattaaacacttactgagtatgatttctgtgtcaggcagtggttttcatttgtggggacgtgtcgtgtgcctcgtcacacagctcacgggtggtgtctgagtctcataagccgttctgctgcccaggccttcctgatgcttccttgatcccagcaagcttaggtgggcattcgagccatttctcagtgacactgtctcttggtggcccctttgaaataaaatatccgtagtaataagtaaatggtgtacataaggcatcctggtgagaagcgtcctagtgcaagaacccactcgggacggcctcgtgtaaaagggtgtgtttgattgtaaaactacacaagtcacattgtgaggacctgggagctgcgggag

SEQ ID NO: 15485 - DNA, 1149 bp, Homo sapiens
ttacaggtgtgagccaccacgcctggctgtgtttcatttactgctatcattcagcatcactcttcattattgatattttctatggctcataaactgatttaaaagcaaaatgggaaaggtgaatttcctgaggaaaattttagaaaaaatcattttatagtcaagtttgggatttttaccattgtttcttgatctaaggaatagagttagctatatgagccgtatctgaatttgagaaaggctattcctcatgaactagtttagtatagttatttatatgaccttcttgctttggattattctatttcctattttattctaacttttgtatcttgctgagttttatttcttgaatttataaatttttttgtagcccctttaataatatttggaatatgtaatatgaatactttaaaaagtcaaggtttttaagcttttaaaagttttacaagtgcataaggttttgctgtttttaatagtcttttgatcttttttttggagatttagagcgacgagatttgtctcacaaggagaaactctacctgagagagctaaatgtcattactgaaactcagtgcactctaggtaagaatagctttttaatgtgaatttttcaagctgaacatttatgagataatactagataagtatcttatttcctaaaatattttacaaaattaataaaataaattgaactatttaaatgctacattatttacttcatttttgattattgttaaaatacacaggagaatgaagcttgaacacacatgtggttcctgacttatgatggttcagcttcatgatggtgtgaaagcaatgcatattcagtagaaaccatacttcaagtgtctatacaaccattattcttttcacttgcagtataatatgtaacaagtcacatgacatattcaacactttatattaaaatttgtgttagctgattttgcccagctgtaggctaatgtaagttttctgagcatgtttaagttaggctagggtaagcaaagatgtttggtaggctagatgtattaaatgcttttactttttaggatagtttcaacttaggatgggtttatcatatgtaaccccattgcaagtcaaggatcaacctctattctataacagagtataattgtctaatttttc

SEQ ID NO: 15486 - DNA, 1285 bp, Homo sapiens
ttcatgcagaaattcctattttgaggtagtttaacttataaattattttactgcatttggatttttcagttttaatttaaaaaatcatggaatttgtccatgatttctgttagtatttttatggctttactgataacatttaaatattttatctatttgaaatttatttttatatacatggtgggacatgggtgcaactttcatcttttattatttattttgctgaatgctactcagttgtcctaatgccatttatcacatagtttttttcactaacaactttagatgtcacttttatgacttactaatttccctcctatttttgtgtctatctgtatttcctgtgcttttctgttgttctgtgtgtttattcatgacccagtacaacaatgttttagttattaaaactattatatgatctaagaactggtaaggctaattttctctttactctttttttttctggattttcctatttttgtttgcttctttttctatttgaatgttagaatcagattgtctagttctcacctcacagtaaaataaattaacaaataaataaaatacaaagatccagaaaaacctcagtctatttttatttaggtgcattcatttacataataagtcagggaaagttggcattttatgatgttgagtcttcctagtcgagaacatcataagtctttctatttgtccaagttttcttttataaactttcgagggtggataaaaatgtatctcatatagatgttaactttcttgttaagtttattcctgggaactttttcttgctaattaaatgggagtaatttcttttgttatatcttctaaagctattggtttctgtatatcaattttatccctacatcttactaattttcttattatttgttgaagaaattaacttgatattgtcttttggtttgagataggtgtatcttaccatgttatgaaaatacttatcaaatcctattttattaagttttttaacgctaaatttcatcagatacgaaatgcagcttttatacagattatcttattttttttaaatcttggatctgttcagaggaattacccataatcagcttttgcaaatattttctaaagtttttgaatttgattttcacatacaaatgtgtttggttgttgtttacagcatgtgtcattcaaaacccaatttttcataaggatgccatgttttcctaagcatttggagttccacagcatcttgaattcgtttaacaaaatgttatagaagaaaaaacttagaattagtacagttgtg

SEQ ID NO: 15487 - DNA, 1194 bp, Homo sapiens
ctgctcagttttctgaaggatgtcatatatagctactcctctgcttattgcttattgacctcatctcctgtcaccccactacacccagaccctaactctgcttttctcagaaaagatgtgcttttcctaactccgtcccacatcttcagtctggaatgttctgtgctcttcagtgtagccttcagcgctcacctacttaaaagtcctttctgctgaagcctgtcttcttctaggagacttagtggacatctgttggggctctcctggctcttattttcttcttagttatagcaattctctgatcactttgcttgcatacgtccacctctccgggtcatgtgcttctcaagagtgggagctttgccagggaatcgttgtcagatttctgatgtgtgtaattcatccaggtctggaagggtctttattcagtctgaaggacattttaattttgtgtagtattttcatcacaaatcctcgtacacatgagggtattggaagaaacttgaacctttcctttgtgctcactgtcacatgacatctcacccaagtttcatgtcccaccaggttggttttaagaacatgcagaatgtggagcatgttccgctgtccttggacagagccatgcggctggtgaaagatgtcttcatttctgcggctgagagagatgtgtacactggggacgcactccggatctgcatagtgaccaaagagggcatcagggaggaaactgtttccttaaggaaggactgatctgtgtgctcttatcaccaatcagttcagacctggttgattttgtactttggaactgtaccttggatggttttgtttattaaaagagaaacctgaagtactcattttgctataacttgtcttctctaagcaggacagatataggaagtagaatttcttttaattttcttcatttttcccacccttttctatttttctgagattttttttttttttttttttttttttttgcattttaagtaatgaaaacaggtcatgttaattttcccttacactaatgaggtaggaatttctctgtaaaagttgaccttttgagcaaacttatcttatgaagagggctctggtgtttacgcagccagcttgcctgaagggacctttaaaccatccagaagggagagtatttactagggttttattaagactctaatggttataaatgaaata

SEQ ID NO: 15488 - DNA, 1214 bp, Homo sapiens
ttcagttctgccactcccagttcatgcactgttgtcacatggctctttccgcagttgtttcttagtgggacttcagcacgccttgattttcccttctgtagttcattgtggcgtaatcatatgttatactgcttgttttctttgtactttttattatcagtgaggttgtgagctctttaaggataggaaatgttatatacattttttattagccaggacaattaacgttcccaccgttattcgagttgccgttgcgccatagttctgacaatttttttgtatggtcagacttaaatttttgtccattggggtgaattccaatgttttcttcgagggggaaaaaaacaaaaaacaaacaaaaaaaaccctttacatccctgtcagcgctttttggaatgggcgggattcaactaccaaagggacaagccgccgtgcagccctccaggagcaacgactagcgtgagatagagaggccgggagcgaacttcaggagaagccggaagtggcgtaacgtccggtcaaggcagccatctcgccgtgagacagcaagtgtcggatccgcaggcgcagccgtgcgatgttgtcctctacagccatgtattcggctcctggcagagacttggggatggaaccgcacagagccgcgggccctttgcagctgcgattttcgccctacgttttcaacggagggtaaaaaccccagagagctgcggctttcactttcgcccttcccccatctgctgaagcctatttaggagtcaccgccgtgatggcgctgccccgggctcctgcaggcctcagaaccctgagctgagggggtccgcacaaggccggtctccctgccgtcctctcatgccctgtgtttccctcttcaggctcgctttgctcaagtttacttggtgattgcgatacagccttggtttttagggtttcccattacagtcatgtcatttgagtttttatgtggaccgccactccgtgctccttgctgctgtaagacagtaaagtagaaattgaaacatagcctctgctctgtggaagaccattaaaactggacctcatgtacacgtttcttatgccagccggcgagggtagagggttagcgtctgaaacttaaaagttagggttgtttggtctgtgttgttagatgcatagctgggttggtagccgagatgtctaattgtagccgcctgatttctgttatttctaattgt

SEQ ID NO: 15489 - DNA, 1174 bp, Homo sapiens
tcagcataggtctgcctgggtgcagactcttctgtctggctggtggcctccatcctcagggttgtctcatggcccaaggtggctgccagagctccagaaatcacatctaagccctaggctggaagaaaggaaggcagagagaagggcaaatgagccattcttggcctcagtttcccccatctgtacaatgggagaatggggcttggtctctagacatgttctgtgagatgctgtgagcctaatcccaattcctgtcagggtactgcaacatggccaatgtggcaaatgtgattctggaaatttcttgaaaacttgaaatccctgtgtgcccctgattgggttaaatgttttcaccctgttttcctcctatgcagccatgtgtgtgctgggtggttcacttggtcggtggtctcagtgtctgtctttcccttctccctgcagatgtgaggtgaggatgagccgcagccctttcctgggacatggatgtacatggcgtgttacattcctgaacctactatgtacggtgctttattgccagtgtgcggtctttgttctcctccgtgaaaaactgtgtccgagaacactcgggagaacaaagagacagtgcacatttgtttaatgtgacatcaaagcaagtattgtagcactcggtgaagcagtaagaagcttccttgtcaaaaagagagagagagaaagagagagagaaaacaaaaccacaaatgacaaaaacaaaacggactcacaaaaatatctaaactcgatgagatggagggtcgccccgtgggatggaagtgcagaggtctcagcagactggatttctgtccgggtggtcacaggtgcttttttgccgaggatgcagagcctgctttgggaacgactccagaggggtgctggtgggctctgcaggggcccgcaggaagcaggaatgtcttggaaaccgccacgcgaactttagaaaccacacctcctcgctgtagtatttaagcccatacagaaaccttcctgagagccttaagtggtttttttttttgtttttgttttgttttttttttttttgtttttttttttttttttttacaccataaagtgattattaagctttcctttttactctttggctagctttttttttttttttttttttttaattatctcttggatgacatttacaccg

SEQ ID NO: 15490 - DNA, 1107 bp, Homo sapiens
cgcaatcctcccacctcagactcctgcgtagctgggaccacaggcatgcaccacggcacctggctaatcttcctgttttttatagagatggggtctttgccatgttgcccaggctggtcttgacttcctgggctctagtgatccacctgccttggcctccacagggctaggactgcagccgtgcaccgcctctgtgaatgttctgaacgacggggcatttgtcagctttgcgtccaccccaagacttgttttgaaatggtgaggttgaaactcacaggtgtcccttaaatgtgatgtgcggtaacttgagttgttgaggttttgcttgtgaatttctcattcttctttccctttttcgttccagagcgccgccctgtgctgggctgccgggagctcgtcttcaggaacctctccaagatcctccctgccctgtgccacgacatcaccgactgggtggtggggacccgagtgaagtcggcacagctgctcccagtgctgctgctgcatgccgaggaccacgccacgcagcacctggaggtcgtcctccggaccctgttccaggcctgcaccgacgaggaggcagccgtggtccaaagtgtaagtggccgtattccagtcgtggtcgcggagctgtaactcgagcttaagatcccgcctctgtggtgtgcggggcccgaggctgtactgtagccaagacagcgttcccctcacccccgggccgcaggccctccccacacccagcccctgggaacaactgatctcctttctgtgcccgtaggtaacagcgtgttgagggtgaacccttcatgctcattttcaagcacactcgggggtgcagtgccaggtgcatgttgtgtagacgtgttgtgtagacgtgccgtgcaccagacagacagggcccgggctgctgacacaggaccgagatgcccagcgttcagcattgacatctggactgtcctgagggcccttccaggcctcgcaggggctgtgggagcacccagacgggggatgatggcacagcttcgggtgtcctgcgagtggtgtccctggtgcagtcctctttctcactccctgtccacactcggctgctggttatcgcctcgtcac

SEQ ID NO: 15491 - DNA, 1277 bp, Homo sapiens
gacatagtctcactttgtcacccaggctggagtgcagtggcacgatctcggctcactgcaacctccacctcccaggttcaagtgattctcctgcctcagcctcccaagtagatgggactacaggtatatgccaccatgctagggtaatttttgtatttttagtggagatggggtttcaccatgttgaccaggctggtctcaaactctggacctcaggtgatcctccctccttggcctcccaaagtgctgggattataggcatgagccaccatgcctgaccaaataggttttcatatggaaaaacgtgattttggggggttaaaattttctgctgcttttctgtgataatcaccttactgattgagaaagaggaagcggggaggtggtggccgatagtgccctctcccaggtgggagcgcctgagcctgggcctgtgctggatggggcctcctcccgtctcctgagggccgtgcacaggagcctctgttgtgtcttacaggccctgccctgggagaagccctgccacacgtcgtgcccacgctgagggcctgtctgcagccctcccaagacccgcagatgcgcctgaagctgttctccatcctgtccaccgtgctgctcagagccacggacaccatcaactcccaggggtaggtccgggctctgcctctgcacggcccccagctggggcctgggccaggggtccccatctccctccccaacagctcactgagcaagggggttcccacctccttccccaacactgcactgcgcaaggggttccccatctccctcccccacactgagtcaaaggtgggccgggggtccccacctccctcccccacgccgagtctaaggtgggccgggggtccccacctccctcccccacagcactctgggtgagggttccccacaccaagtctgaggtgggcgtgtgcagtgacccctgagcttaactggcctggaagcagctagtccatcctcactgggtaaacacaagctctcggcagggaatgcacagagaagcactaagtcaaagtcatctccgtgtggtcattaaaattccagtgaatgaaaaagttttagggaacattaactgttaatggcttatgtattagctgttctctgttttaaaagcctttgggcacttttcaaacctaacaaacaactgattgaatttctattgatggtcaaagtggtaaaaatacctctttgttatctaagacaacttttaggtggcattaagaccccgagggtctagggcctccaggtgtacggct

SEQ ID NO: 15492 - DNA, 1208 bp, Homo sapiens
tgagagtggttaccaggcaacagagaggcatctgctgctgctgaggcttgtgccttgctgagcgggctgtgagaagatagatgggctttcctctccttccctcatgttctgctttcctccttaggccaggtgctgtgtgtgctgccgtctgtctgtattttcttcaaggataagctttcaccttcagtcagaagatggtatctgcatatatctggaggcattttaggaaataaactgtgaccagtgccataatgctgatttattaaccattgtaacctttacattttttaatgggttttgttcttatttgataagctgagctcaacagcaaaaatgtgtgtgtgtgtgtgtttttttttttaggtcttgatgatgatggtgatcttaaaggtaattattttagtccttttatcttcatatacttttcaaaatagaagttttagttaaatatctgcagactgtgataaacaggttccatctactgtttgaaaactttaggtggaaataaagctgccattcagggaaacggggatgtgggagccgccgccgccaccgcgcacaacggcttctcctgcagcaactgcagcatgctgtccgagcgcaaggacgtgctcacggcgcaccccgcggcccccgggcccgtgtcgagagtttattctagggacaggaatcaaaaatgtaagtctcagtcctttaaaactcagaaaaaggtgtgttttccaaatttaatatttcctttctgtaagtctcagtgtctgcactatttgtcttggagacttaaaattatcccttgaaagcataagaagtacaccccaaaccagctttgtccttcctgtcctcttctagtttacattttatgtggttagtaattttgtacctaaaagtatttgaaattctataaatttggacttgacgtgagcaaaagaaaatttctacgtaagcgaaactaataaaactacagtcactttcagatgcacacctttatttttataaaacggcacagatgttcacacatactgaaggagtggctttgggacgctgctctggtctgtcctgtgaagagtggttatgccagtgttcgtgtcgggaaaacatttcccgtggtcgctagccctgtgcttatggtgatggaggggccttcagagaacctgtaggtctgggaaggacacacgtgactctggtttgttctgggacagcagcagtcactg

SEQ ID NO: 15493 - DNA, 2318 bp, Homo sapiens
gcttgcagtgagctgagatcgtgccattgtactccagcctgggtgacagggcaagactctgtctcaacaacaacaacaaaaggttaatttccaactcagctgcttcctgtcagacgtcatatttggggaagtgattggacttggggttattaatatgaaatacatgtgtgtgtttttcccaccttgatttcagaaaagacccgacgacacagctttccaaatagtggaacttcggattttttctaactggggccatcctgagtatacctgtctgtatcggttcagagttcatggcgaacctgtcaagtgaagacactactcattatttttgtacatttttgtatatactgggacagcgtgaaacactggaatccttcatggacgagggcatatacaatgatgggacagtgccacactccttcaataaacgtggctgctggccagaggacgtgagcgtgtgacgggcgccttggcgccacctgttgggtgctcactgcctctgcaggtgcagaggggtcagcagcaggagaagcgtgttgaacacgtggctctcagacactccttgtttttaacgggaagctctttgcatttgcatttcctcaacaaaggagcaaagcagaggaagctgagagtctggcgtgttcttgacgctttggtcttcagccttgcactggctcttctaaaggacttttggagggcagataatttcatctgttaaatccaacacacatttctttcagggaaaaacaatgtcaccaaattttcagagttctaaactcctttccttcaagccggaattttccttttttcagcaccagtaggtactaagtctccagatggggaaataactaaaatgtgtttttctgctttgttcgctcttacttctgaggaaggtttccagtcaggactcgctgtaccaatatccatggaggaatatgggagcgtttcgctctccttgtaggctgaagtcagtctgacttgaaggggcctggtttggatctaagcaaacacccagatggggttctctggtctcagcaaggcttttcctgttgggagtcacagtaaacagaaacccaaaaatctcatcttgggtgttttcagggcttgttttgagttttgctgaatagggagcgcaagacgccctgagcctccctctcactggtggtgataagaggagccgtctggtgtgtcagggtcacgaacccgttacatttcaggacgatcctttttccttcagcagcatttcttactggctgtggctggaatctgccttttatcacagctgtcaccattctcacgtgattcttgtgagactctttttggttataattactatttaatatttagactattttactgagcagactttataaatgagatatctacaaggcacttaaagtgttacagatgttttaccttaagaattatttaagttgtgttgggttaagacagttttcagtgtaccgtaaatgttgtgttttcagaaaaagacaaaacgatggtgctgactggttttctgtatattgcacaacagtcctcaaatacactgatgtatgaaactattcatacatcaagcagcatttttttcactctccttagaattggaactatgcagttaaggcagataaaatgtacagatgtttcatatattacaggttacatatataaatcaaaatttcctatataaaactgatttgggatttggggtggaaatattttgaatattaatttatttttaaagatgcaagataggactttgtgcaatgtatttttgtaaatgcttttcaaaatatctgtctttggtagtgcttctgctgctgccaccaaattgataagatgctattaagaggtttaaataaagagttttaatttttaaaagggcatgggatataaacagtctatttcttttctcagtttgtctgtttctgcccctgggatgtgggagggactgggtttgctggttcttgttggcaagctctgtagcacagcctttgaatggtaacctgtcctccaaggccttgaggcctcaagtgtgccaggcacctctttctgtagggcaccatttccacttggaaaacggactgaattacaagttgcttgatgggcagaacattaggaaaactgatgcctttcctcaggacacagttttcatcgctgcttctgtagctgaaggcaggtgctggcaccaggtcacagacgatagcacacacaccacactattttgcacctggcttttccccagttaccaagtgtgtcccgtaagaacctttttttttttaacagctgtttttgtccattgtatgcacggctggatcatg

SEQ ID NO: 15494 - DNA, 1142 bp, Homo sapiens
tgtgattcgtaggcagggcatgactggggccctgtcctctccactgctccgatggacagtggcctccccgccagctggcaaggtggggcaccactttggcttgtcggcctgtcctgtcgggtgacgtgcggttggcagagcccttctgtgagctgcctggctgcaagtcccactcctagtccctgctgctctgggagatgccccgggccagagccaggtacccagagcggccacagctgttcctggactccagctccccacggcaccttccccagcccccgcctcggccagggcgtccgtccttccttcctcgctgtgctctggggcatatggcgctggaactgcggtgggcagctcagtgtggtggtccacggctcactcagggacgcccagcaggttcctctccctgttaagtagttgcgaatggaaatccacttctgtggggaatgtgggacagagagccggagtggccgtgcgttcctctgatgagggtctgtgctgtttgcagaaaatctggctaaagtgttcagcctgatggaccccaactctcctgagcgcgtgacctttgtgtccagagccctgaagtggtccagtgggggctccgggaagctgggccacccccggctgcaccagctgctggccctcaccctgtggaaaggtaggcctggggccagggcaggcgtgggcacctctctgctctcggcgttgatttgcactgtgcgttccaatacatcagggtcacccaccagggcagagatggggtttcaccctgtggtcacgcgggccggtccatggagacccatgcgccatgctaagcccgggatcagagccactgcacccgagaagctgcgagaaggggggcaggcggccgcctctccaggccttcccgtgggacgttctgaccctcagggaggcagccgtgccttcacggggcctatgcgtgctgctgctcctttctggaacattctttccagcgctgggatggtgctgtgccctgtttttctcctttacgctgacctcatcttctgatgaagcctttgcggggattaatcaccctgtggtggggtctggctgtctgcgtggtgtggttggtgtttttagttccaggtctgcagctctgaggcgggagtggtgctgggtag

SEQ ID NO: 15495 - DNA, 1151 bp, Homo sapiens
ggagggagtgtgagcgggtgttaggacgggcttgggagtggtgtgtgttcatgagatgttgagggttggttgttgggtcagtgtggtgagaacatcaggctggtttctgctgttgatctacatccgaggtgcactggcctgggccctgattatattgcgccctgtaagttgcttctggtaggtgagaagggtcacatggtaacactaattggttatcacaacgaacattagtgcagttggattaagcagctccaagagcttggagaatcaagatgttgcatagctgagtgacttttccccgtggatctgttgatttggtgctgcgtgtgaggcctgggctggctctgagtccctatcaggacctctgcctgtgggctctggctgggctctcctccagggcgggcaggtgggctagaattaacatggagtgtctttccccctttccttttctgtgttatattcgtgaaatgtatttacatttttctgtctttcctttgcagaacaaaactattgtgagtcgaggtatcattttctgcactcagcggacggggagggctgtgccaacatgctggtggagtattccacgtcccgcggcttccgcagcgaggtggacatgttcgtggcccaggccgtgctacagtaggtgtctgtggctcttcgggtctcggcttccattgctgccttggctgggcagccttagaacaggtccccttgtcccctgtccgagccgagctgcaggataaactgagttcactctgggcagagcccacagtgcacttgtcagcctgacccatgatttttcataagtttaaccaatgttaagaagtattttagaaactccccctttcccgacgggcactggagtgccctacacacgcccctcgcctctcgcccactgccgggaggccctgtggtctctgctgtactcaggcctgcctcggccagttctttcccgcactatctggaaatgcgtggaattgtgagcatctaccccgcggcccctcccgccagctcgctggggcgtcctgcaggccaggctccgggcgctgtctgctcctgcgtggtcccttccgccagctcgggcgctgtctgctcctgcgtggtccctcccgccagctcgctggggcgtcctgcaggccaggctccgggcg

SEQ ID NO: 15496 - DNA, 1178 bp, Homo sapiens
cgtgcagccttcgctgccgcctcgcacgcacagcggcctttacttgcgtgaccgcctgacccaggcacgctgcacacgcacagcggcctttacacgcgtgaccgcctgaccctggcacgctgctttcacgtaacacccccatgctctcagatggaggctaggccaacattggggaagggggtcgccctgcatcctccctgccatccttgcacacccctctgcgcggggcacccggtttgatgtgtacagaagctgaggttgcaggtctcgcctgaggtctggctgttggagccggggatcctgcaggcctcaccacctcctgatggagagcctggtggtccctgggcaggctctggacacctttgttctctggggcagctcctgggtgttggggtccctcactgcttcacatcacaggtctcaagggccctgggcccctcaggccacaaggtgggggctacgaatgaacagggacacgatgggacgcggttctggcacggagctgcaccgggcgcttagcctctccgctgcgctcctcctccttctcctccgcttcctcctgacactggccttccccgttccagattttcccgctcagcccggaccctcggtggcagagctccagtccccgccccgtggccctcgccctgcagcaggccctgggccaggagctggcccgcgtcgtccagggcagccccgaggtgccgggcatcacggtgcgtgtcctgcaggccctcgccaccctgctcagctccccacacggcggtgccctggtgatgtccatgcaccgtagccacttcctggcctgcccgctgctgcgccagctctgccagtaccaggtacttgggcgtgggcctcttgcgggggaggagggcagtgagggctctgcctcccgcaggacggcccgggtgtcctgtgactgctcctctgtgggtcttgggtctcagtttccaagtgagaaaggacagtgccccagggagtggcggcaggtcccctttttccagtgaacattcccccgggacgggaggtgggggcagtgcggcgtccgcctgtttgcaccacccaggctcggcgctcctgccttgctttccccatctgctggtacctaggactgtgttttacttggtgtctgtgtttactttttcctttgaaccgcgtgggagccctcaccagctggg

SEQ ID NO: 15497 - DNA, 1192 bp, Homo sapiens
gtacatcgaggactccctgggggagcggatctgggtggacagccctcactgtaagacgtttgtggacaacatccagacggccttcaacaccagaatgccccccaggagcgtgctgctgcagggggaggcgggccgcgttgcgggcgacctgggtgcaggtgagacacacggccagccagagagggcgggtgtccaagccccagggcaggggaggggtgggaggatgggcgggtgggaggcgctgcatggagccctctccttggtttgcagggagcagcccacacccctccctcacggaggaggaggacagccagacggagttgctgatcgcggaggagaagctgagccccgagcaggagggccagctcatgcccaggtagctgcgtgcctgcccggtcccagttgggggcggcgggggcgggcgcctcggggccaccttcctccctcctcgctccctcctctggcctaggtacgaagagctcgcggagagcgtggaggagtatgtcctggacatgctgcgggaccagctgaaccggcgccagcccatcgacaacgtctccaggaacctcctgcggctcctcacctccacctgcggctataaggaggtgcggctgctggcggtgcagaagctggagatgtggctgcagaaccccaaggtgcgggggcgccccgggggggtgggcggggcagggggtgggggcaggctctgtgtggccccacagcgtggtcttcctgccggggtggccgtgagcccactgctccctcctcggccccgcagctgacccggccggcccaggacctgctgatgtccgtctgcatgaactgcaacacgcacggttccgaagacatggacgtcatctcacacctgatcaagatccgcctcaagcccaaggtcctcctcaaccacttcatgctgtgcatcaggtgcgtggcgagccggggcagagcgggggtgcgggtggagtgggggtgtgggtgggggtgtgggcggagcgggggtgcgggcggagtgggggcacaggcggagtgggggcacaggcgtagcggggacagggtctgtaccctcacctcacccagggagctgctgagcgcgcacaaggacaacctgggcaccaccatcaagttggtgatcttcaatgagctctccagcgcccggaacccgaacaacatgcaggtcctctataccgcactg

SEQ ID NO: 15498 - DNA, 1156 bp, Homo sapiens
cgagcacgtgtggtttgggaggttgttctgtccagcgatatcctctttcagaacctgtgggtgcttccggagcagagcagggcaggctgtccactggggctggagcctgtcctctgctccctgctagcctcctggatccttgtctcctgctcccgcgcgcctcctgcagaacggcactgctttttgtctcgtgtacctgctccaggccaccagttagagttcactgctccccgctgggtcgcagccctcccaaccgctggctcagccaagcccgtgcacttgctctcttcctgagagacacatggaacgtgtcacctgtgtggcagtgctgttgcttggcccgactggggcgtctccccccagccctatgggggtgctcaaggcatggccctggagaccctggaggtcagtacagtggtgtcctgggggacacggtggcttcatgctcatgactcagtcgctcaaggcttgaatttactcatctgtaaaatcgagatgattaaaaatcatacttgtgggtgggtcttgatctatgttcctcagatagctaagaataaaggtgcttttagagattttgccaaggttcgaatacaattttattagtattttcctagtttcatgccagacgtcatcactgaggatcaccgtgcatgcggctgtgtttacatcttaacccttgaggccactggcaggctcaccgtgctgcgagctcaccatgtcgtaaccatctcgggctcaccatgccgcgggctcaccaagtcgtaactctgtcttgggctcaccatgccgcgggctcaccaagtcgtaactctgtctcgggctcaccgtgccgtgagctcactgtgtcataaccgtctcgggctcaccatgctgcgggctcaccgtgccgcgggctcactgtgccataactgtctcgggctgaccatgctgtgggctcactatgtcgtaaccctgtcttgggctcaccgtgccacaggctcaccatgttgtaaccgtctcaggctgaccgtgctgcgggctcatcgtgtcgtaaccatctcaggctcactgtgccgtgagctcaccatgtcgtaaccgtcttgggctcaccatgttgcgggctcaccaagtcgtaaccctgtctcagggtcaccatgccatgtgctcgctgtgtcat

SEQ ID NO: 15499 - DNA, 1219 bp, Homo sapiens
gctggtggggaagggggccccctgcagacctggctggtggtcctggggagcccgtctgactctgggaggaaggaaccggcccaggccaggcttgggtctgagttcccgggcagggaccgggtcctatgtgcgtccgcgtgggtgagctccccctcgccttccagggtaagcaggaagagaacgacgtggtggagaagctgaacctcttcttggatctgctgcagtcctataaggtgagtcttggctgctccttggctgggggcagaactttcaggaatgatcttaggatccttcaagggtctaactcctgggggacggaagaggagctgagaagccagggctgcaggggaagacggggccttccgtctggcgggggtgcttccctcggccggctccgcagggccctggcgcaggcatccagacagcgggcgaatgcctcccccggccccgcaggacctgtgcgagcggcatgagaagggcgtgttgcacaagcaccagcgggccctgcacaagtacagcctgatgaagaggcagatgatgagcgccaccgcgcagaaccgcgagccggagtccgtggagcagctggagtcccgcattgtggaggtgggtggcggggcggccgagcaggcccgtgggagcctttcccctcccggccatggtgggacccggagccgtcctggtgggctcccctgggttggctccttgtgtctggaacagagctgggggtgcagtggaggcagggagctggcccgcgtgcccagagcgatgcggctccctgcacggtgctccctccccggccctctcttacctcgccaccttccaaatgcctggtgaaggctgaaggagaaggggccgccctggctcagggagcacgctggtgttcgggccttggtgctcccgtcgccggctgggccgggtgcgaaaggcggctgtttgctccgcagcaggagaacgcgattcagacgatggagctgcggaactacttctccctgtactgcctgcaccaggagacgcagctcatccacgtctacctgcccctcacctcccacatcctccgcgccttcgtcaactctcagatccaagggcacaaggaggtgagtccgccctgctccggccgccgtctcggccacggcctttctttgtccctccgcccttccttcaagcccggcagcgcggtggccggccgccctagagaggttctttagtggagttgggctcc

SEQ ID NO: 15500 - DNA, 1181 bp, Homo sapiens
ttcctccttgaataatttctggtaatttgtattcacagcacaaatgtgctgtgaatatattgagcatttaaatatttacttgtttgctaaaatcttctgtaaaaagtcagttttcattgacattgggatgggattctgcctgcctagatgttgcaacaaacctttcaaaatctaggcatctctggaagatctaatagtggatattcttgagatggtcttcttcatttgcattgtgcattgttaaaagcttttcactgttattctcctgtagtctttggttattaccagaacttaattgacctgtcttgactgtttacatttccatcaaagggagagaggagagttccagtccccccagctgtcatgtttaaaatctgaaacaagctagggttaggatttcttttgctcacagtgaaagcatttagacaattcattgtctcttcttgaagacttgtttagtgtgctcagttaatgtattaatgtttttcttggtaaaaatgatcatttgaaaaatctctcttgttcagaattactgggagatgtactcaaagatcggccccaggaagcagatggaatcgattcggtgattgtagtggacaatgtccctcaggtgggacccgaccgacttgagaaactcaaaaatgtcatccacaagatcttttccaagtttgggaaaatcacaaatgatttttatcctgaagaggatgggaagacaaaagggtgagtgttctcctgttggagaagtatcatctgtgtctggcacgtcatgatgagggagtgttgcaggagatccttactaacacagctcctgccttgcccaggcacgtgggccgttcacttcttcaggccgccctcagctggaagctatccagagcagtgaatgagaagatgataaagtttgtttttttaagttaaggttttaaagtttttaaaattatctagaataggccagcatggtggcttatgcataaactcccaacactcttgaagcctgaggccaggagttggaggctgcagtgagctatgataacgtagctgtactccagtctgggtgacagagcaagactctgtctctaaaataaataaataaagtaaaaactaactagaatagttttagtttctagaattatcaaatacaggtaatgctgctgcattttctgtgttgggcagtcagttgaagg

SEQ ID NO: 15501 - DNA, 1163 bp, Homo sapiens
agtgctgggattacaggtgtgaaccattgcgcccagccaagatttttttttaaacagctttattgagataattgatatacagtaaatctgcatagttttaaagcgtacaatttaatacattttgatgtgtacatatcacgaaaccatcgccacagtcaaaataatggacgttttgattaacttttctataattatgataatgaaactagagacttcggatcttctggttaggatttccctgtcacttaggagctccctggctgtggatctgtcccccgtgtgactgccttaggctcgaggcaggaagagcagcacagatactcctggcaccgagggcttgtccgtggagaggggtggggcggacagcgcatacctgcctagccttacagtgtgggtatgtgccaacggccctctctcactcaggtatattttcctggagtacgcgtcccctgcccacgctgtggatgctgtgaagaacgccgacggctacaagcttgacaagcagcacacattccgggtcaacctctttacggattttgacaagtgagttcagacttggccacaaggaagtggacgttgacgtgcaagtgactggctgtgtgcgggtggcttggtgcttctcggtgctggtgtctgtcagattgttcacatcctttctggtcaggctgccgcagagccatttcacagccctgccccacacttctggcctacagcacccctccctgttatgccagtcacagccctgggggcgggcaggcaggagcacagcagggccatgctggagcccccacgagttgctctttctagtcgtcagggcgtggggctcagcagtctcctttcttctccaggtatatgacgatcagtgacgagtgggatattccagagaaacagcctttcaaagacctggtgagtggcctgaaacctacatctcagtggtttaaagaaatgctgctgggtgtggtgggtcacacctgcaatcccagcacttagggaggctgaggtgggaggatcgcttaagcccaggaattcaagaccagcctgggcaacaaagtgagacccccgcctctacaaaaagtaaataaatacatacattagctgggcctggcatgcacctgtattcccagctacctgggaggctgaggggggaggatcacttgagcctg

SEQ ID NO: 15502 - DNA, 1281 bp, Homo sapiens
cactggaaagaaacactggcgtgcacggctgtgactgtggtttcagcagttctgagacaagagccttccaagtcgggggctggggagcagagtgcgggagctcctgagtcctgggggcctccgcgcctcacagcatgggcacatgtgggacagaaggcctaatggggtgcctgagggtggcctggttgctgtccccccagggtgggaccatgagcgagtaggggtggcacacgggctcagctctctgtggccggggtggctcctcttgcgggactcaacgtcagccccaaggcgatgttcagggggtccctcagccttttgaggtggtgccgtttagggccgccatgcctgtctatccaggggacggactccgcctgctgttcccgcgctgagctacaggactcccgagtgtgagccgcggttcctctgttgcagcgcagccgtgtgtgctgtggagccgaggccgtcctgcaggaagccgcgtgactcccgcctcctccctgtgctctctggctctggactgtgactgcgcctggattctgccattgcgacacatttttgtgcctttcagcccctggtgtctgcagtgggggatttaaggcacccgcttccacttctttcttgtttggagttttctgttggaaccgccggcgttggctccgaagacttagcgacgccactggcggcaccttctcctgcgcccagtgatgtttccacggtgcctgtacacagccgagcagcatttccgttgaaggacttgcatccccattgcgggcagtgctggacgtgtcccggagacccaccgggagggcgccgccatgccttgtacccccaccgtgcaggttgtggccggttttctccgcaggttgaacatggaaataaaagcaaacttgtatgaaaaaccggtctttctcctctctttgaatgtagatagagaccttgaacttggtgcctgcctccctccccagtggcaagggcctgcttgccaagccagacctctgcagggcgctgtcccgtccggtcgtcacgcacactcggccaccctgtgtccagcgatgcactagtcatgccacagtctcttctgttgcgttgttttctgtgaaagatgctggtcattttccctggtgagaaccctgtgacttttccttggagttagacacattgggaaacttgtattgagaatggtcagttctgcccgttttttcattttgagatggagtctcgcactatcactcgggttggagtacagtggcgcaatcttggctcactgcaacctccgcc
